United States Patent Application Publication US 2023/0026259 A1 - sequence listing, part 45

SEQ ID NO: 135230 - DNA, 2374 bp, Homo sapiens
  Payload ID: 6428
  Gene Symbol: FHL1
  Gene Name: four and a half LIM domains 1
  Uniprot ID: Q13642
  ENST ID: ENST00000394153
  CDS Start-End: 198-1040
taacaatgctgagtgtttgagctaatacggcttgataatgagggagccagatccactgccagtgctcatgttatatgataaacagacatttggagaagcaccttggaagttgttttcaaccatatccagcctttgccgaatacatcctatctgccacacatccagcgtgaggtccctccagctacaaggtgggcaccatggcggagaagtttgactgccactactgcagggatcccttgcaggggaagaagtatgtgcaaaaggatggccaccactgctgcctgaaatgctttgacaagttctgtgccaacacctgtgtggaatgccgcaagcccatcggtgcggactccaaggaggtgcactataagaaccgcttctggcatgacacctgcttccgctgtgccaagtgccttcaccccttggccaatgagacctttgtggccaaggacaacaagatcctgtgcaacaagtgcaccactcgggaggactcccccaagtgcaaggggtgcttcaaggccattgtggcaggagatcaaaacgtggagtacaaggggaccgtctggcacaaagactgcttcacctgtagtaactgcaagcaagtcatcgggactggaagcttcttccctaaaggggaggacttctactgcgtgacttgccatgagaccaagtttgccaagcattgcgtgaagtgcaacaaggccatcacatctggaggaatcacttaccaggatcagccctggcatgccgattgctttgtgtgtgttacctgctctaagaagctggctgggcagcgtttcaccgctgtggaggaccagtattactgcgtggattgctacaagaactttgtggccaagaagtgtgctggatgcaagaaccccatcactgggtttggtaaaggctccagtgtggtggcctatgaaggacaatcctggcacgactactgcttccactgcaaaaaatgctccgtgaatctggccaacaagcgctttgttttccaccaggagcaagtgtattgtcccgactgtgccaaaaagctgtaaactgacaggggctcctgtcctgtaaaatggcatttgaatctcgttctttgtgtccttactttctgccctataccatcaataggggaagagtggtccttcccttctttaaagttctccttccgtcttttctcccattttacagtattactcaaataagggcacacagtgatcatattagcatttagcaaaaagcaaccctgcagcaaagtgaatttctgtccggctgcaatttaaaaatgaaaacttaggtagattgactcttctgcatgtttctcatagagcagaaaagtgctaatcatttagccacttagtgatgtaagcaagaagcataggagataaaacccccactgagatgcctctcatgcctcagctgggacccaccgtgtagacacacgacatgcaagagttgcagcggctgctccaactcactgctcaccctcttctgtgagcaggaaaagaaccctactgacatgcatggtttaacttcctcatcagaactctgcccttccttctgttcttttgtgctttcaaataactaacacgaacttccagaaaattaacatttgaacttagctgtaattctaaactgacctttccccgtactaacgtttggtttccccgtgtggcatgttttctgagcgttcctactttaaagcatggaacatgcaggtgatttgggaagtgtagaaagacctgagaaaacgagcctgtttcagaggaacatcgtcacaacgaatacttctggaagcttaacaaaactaaccctgctgtcctttttattgtttttaattaatatttttgttttaattgatagcaaaatagtttatgggtttggaaacttgcatgaaaatattttagccccctcagatgttcctgcagtgctgaaattcatcctacggaagtaaccgcaaaactctagagggggagttgagcaggcgccagggctgtcatcaacatggatatgacatttcacaacagtgactagttgaatcccttgtaacgtagtagttgtctgctctttgtccatgtgttaatgaggactgcaaagtcccttctgttgtgattcctaggacttttcctcaagaggaaatctggatttccacctaccgcttacctgaaatgcaggatcacctacttactgtattctacattattatatgacatagtataatgagacaatatcaaaagtaaacatgtaatgacaatacatactaacattcttgtaggagtggttagagaagctgatgcctcatttctacattctgtcattagctattatcatctaacgtttcagtgtatccttacagaaataaagcagcatatgaataacctgc

SEQ ID NO: 135231 - DNA, 2706 bp, Homo sapiens
  Payload ID: 6428
  Gene Symbol: FHL1
  Gene Name: four and a half LIM domains 1
  Uniprot ID: Q13642
  ENST ID: ENST00000394155
  CDS Start-End: 330-1301
cccgcccctggctagccgcgcccgcccccgcgctcctgcttcctcccctctttccctccccgcctcccaggcgcgcacccctcccctcgcgcccctcccgcgccctacatccaccgcccggcggagggggctcagtccgcagccgccgccgccaccgccgcgcctcggcctcggtgcaggcagcggccgccgccgccgagacagctgcgcgggcgagcatccccacgcagcaccttggaagttgttttcaaccatatccagcctttgccgaatacatcctatctgccacacatccagcgtgaggtccctccagctacaaggtgggcaccatggcggagaagtttgactgccactactgcagggatcccttgcaggggaagaagtatgtgcaaaaggatggccaccactgctgcctgaaatgctttgacaagttctgtgccaacacctgtgtggaatgccgcaagcccatcggtgcggactccaaggaggtgcactataagaaccgcttctggcatgacacctgcttccgctgtgccaagtgccttcaccccttggccaatgagacctttgtggccaaggacaacaagatcctgtgcaacaagtgcaccactcgggaggactcccccaagtgcaaggggtgcttcaaggccattgtggcaggagatcaaaacgtggagtacaaggggaccgtctggcacaaagactgcttcacctgtagtaactgcaagcaagtcatcgggactggaagcttcttccctaaaggggaggacttctactgcgtgacttgccatgagaccaagtttgccaagcattgcgtgaagtgcaacaaggccatcacatctggaggaatcacttaccaggatcagccctggcatgccgattgctttgtgtgtgttacctgctctaagaagctggctgggcagcgtttcaccgctgtggaggaccagtattactgcgtggattgctacaagaactttgtggccaagaagtgtgctggatgcaagaaccccatcactgggaaaaggactgtgtcaagagtgagccacccagtctctaaagctaggaagcccccagtgtgccacgggaaacgcttgcctctcaccctgtttcccagcgccaacctccggggcaggcatccgggtggagagaggacttgtccctcgtgggtggtggttctttatagaaaaaatcgaagcttagcagctcctcgaggcccgggtttggtaaaggctccagtgtggtggcctatgaaggacaatcctggcacgactactgcttccactgcaaaaaatgctccgtgaatctggccaacaagcgctttgttttccaccaggagcaagtgtattgtcccgactgtgccaaaaagctgtaaactgacaggggctcctgtcctgtaaaatggcatttgaatctcgttctttgtgtccttactttctgccctataccatcaataggggaagagtggtccttcccttctttaaagttctccttccgtcttttctcccattttacagtattactcaaataagggcacacagtgatcatattagcatttagcaaaaagcaaccctgcagcaaagtgaatttctgtccggctgcaatttaaaaatgaaaacttaggtagattgactcttctgcatgtttctcatagagcagaaaagtgctaatcatttagccacttagtgatgtaagcaagaagcataggagataaaacccccactgagatgcctctcatgcctcagctgggacccaccgtgtagacacacgacatgcaagagttgcagcggctgctccaactcactgctcaccctcttctgtgagcaggaaaagaaccctactgacatgcatggtttaacttcctcatcagaactctgcccttccttctgttcttttgtgctttcaaataactaacacgaacttccagaaaattaacatttgaacttagctgtaattctaaactgacctttccccgtactaacgtttggtttccccgtgtggcatgttttctgagcgttcctactttaaagcatggaacatgcaggtgatttgggaagtgtagaaagacctgagaaaacgagcctgtttcagaggaacatcgtcacaacgaatacttctggaagcttaacaaaactaaccctgctgtcctttttattgtttttaattaatatttttgttttaattgatagcaaaatagtttatgggtttggaaacttgcatgaaaatattttagccccctcagatgttcctgcagtgctgaaattcatcctacggaagtaaccgcaaaactctagagggggagttgagcaggcgccagggctgtcatcaacatggatatgacatttcacaacagtgactagttgaatcccttgtaacgtagtagttgtctgctctttgtccatgtgttaatgaggactgcaaagtcccttctgttgtgattcctaggacttttcctcaagaggaaatctggatttccacctaccgcttacctgaaatgcaggatcacctacttactgtattctacattattatatgacatagtataatgagacaatatcaaaagtaaacatgtaatgacaatacatactaacattcttgtaggagtggttagagaagctgatgcctcatttctacattctgtcattagctattatcatctaacgtttcagtgtatccttacagaaataaagcagcatatgaataacctgc

SEQ ID NO: 135232 - DNA, 629 bp, Homo sapiens
  Payload ID: 6428
  Gene Symbol: FHL1
  Gene Name: four and a half LIM domains 1
  ENST ID: ENST00000458357
  CDS Start-End: 165-629
acctcttggttctttcagccaggatagctagcaggggctgtggggagcgggtgaggatgaagcggcaccttggaagttgttttcaaccatatccagcctttgccgaatacatcctatctgccacacatccagcgtgaggtccctccagctacaaggtgggcaccatggcggagaagtttgactgccactactgcagggatcccttgcaggggaagaagtatgtgcaaaaggatggccaccactgctgcctgaaatgctttgacaagttctgtgccaacacctgtgtggaatgccgcaagcccatcggtgcggactccaaggaggtgcactataagaaccgcttctggcatgacacctgcttccgctgtgccaagtgccttcaccccttggccaatgagacctttgtggccaaggacaacaagatcctgtgcaacaagtgcaccactcgggaggactcccccaagtgcaaggggtgcttcaaggccattgtggcaggagatcaaaacgtggagtacaaggggaccgtctggcacaaagactgcttcacctgtagtaactgcaagcaagtcatcgggactggaagcttcttccctaaaggggaggacttctactgcgtgacttgccatgag

SEQ ID NO: 135233 - DNA, 926 bp, Homo sapiens
  Payload ID: 6428
  Gene Symbol: FHL1
  Gene Name: four and a half LIM domains 1
  ENST ID: ENST00000420362
  CDS Start-End: 314-926
gcctcccgcccgccggcgtcctgggtcccgggggagcggctgcccttctgccccgccgccgccgccgctcggggctggtccctgcggtcccggctgcctggccttccagggctgggtactgcggcttcggcggcctcgctgaggccgggggccaggggccgtcccgggctgcggggtgcgggacgagggactgcgagtgcgaggtcccccctggcaccttggaagttgttttcaaccatatccagcctttgccgaatacatcctatctgccacacatccagcgtgaggtccctccagctacaaggtgggcaccatggcggagaagtttgactgccactactgcagggatcccttgcaggggaagaagtatgtgcaaaaggatggccaccactgctgcctgaaatgctttgacaagttctgtgccaacacctgtgtggaatgccgcaagcccatcggtgcggactccaaggaggtgcactataagaaccgcttctggcatgacacctgcttccgctgtgccaagtgccttcaccccttggccaatgagacctttgtggccaaggacaacaagatcctgtgcaacaagtgcaccactcgggaggactcccccaagtgcaaggggtgcttcaaggccattgtggcaggagatcaaaacgtggagtacaaggggaccgtctggcacaaagactgcttcacctgtagtaactgcaagcaagtcatcgggactggaagcttcttccctaaaggggaggacttctactgcgtgacttgccatgagaccaagtttgccaagcattgcgtgaagtgcaacaaggccatcacatctggaggaatcacttaccaggatcagccctggcatgccgattgctttgtgtgtgttacctgctctaagaagctggctgggcagcgtttcaccgctgtggagg

SEQ ID NO: 135234 - DNA, 796 bp, Homo sapiens
  Payload ID: 6428
  Gene Symbol: FHL1
  Gene Name: four and a half LIM domains 1
  ENST ID: ENST00000452016
  CDS Start-End: 175-796
aggcagtctgactctggtgcccctgctgtgaagagctgtgccctgctgcattcctcctgtagctgcacgaaagggcaccttggaagttgttttcaaccatatccagcctttgccgaatacatcctatctgccacacatccagcgtgaggtccctccagctacaaggtgggcaccatggcggagaagtttgactgccactactgcagggatcccttgcaggggaagaagtatgtgcaaaaggatggccaccactgctgcctgaaatgctttgacaagttctgtgccaacacctgtgtggaatgccgcaagcccatcggtgcggactccaaggaggtgcactataagaaccgcttctggcatgacacctgcttccgctgtgccaagtgccttcaccccttggccaatgagacctttgtggccaaggacaacaagatcctgtgcaacaagtgcaccactcgggaggactcccccaagtgcaaggggtgcttcaaggccattgtggcaggagatcaaaacgtggagtacaaggggaccgtctggcacaaagactgcttcacctgtagtaactgcaagcaagtcatcgggactggaagcttcttccctaaaggggaggacttctactgcgtgacttgccatgagaccaagtttgccaagcattgcgtgaagtgcaacaaggccatcacatctggaggaatcacttaccaggatcagccctggcatgccgattgctttgtgtgtgttacctgctctaagaagctggctgggcagcgtttcaccgctgtggaggaccagtatt

SEQ ID NO: 135235 - DNA, 775 bp, Homo sapiens
  Payload ID: 6428
  Gene Symbol: FHL1
  Gene Name: four and a half LIM domains 1
  ENST ID: ENST00000456445
  CDS Start-End: 159-775
gagggagccagatccactgccagtgctcatgttatatgataaacagacatttggagaagcaccttggaagttgttttcaaccatatccagcctttgccgaatacatcctatctgccacacatccagcgtgaggtccctccagctacaaggtgggcaccatggcggagaagtttgactgccactactgcagggatcccttgcaggggaagaagtatgtgcaaaaggatggccaccactgctgcctgaaatgctttgacaagttctgtgccaacacctgtgtggaatgccgcaagcccatcggtgcggactccaaggaggtgcactataagaaccgcttctggcatgacacctgcttccgctgtgccaagtgccttcaccccttggccaatgagacctttgtggccaaggacaacaagatcctgtgcaacaagtgcaccactcgggaggactcccccaagtgcaaggggtgcttcaaggccattgtggcaggagatcaaaacgtggagtacaaggggaccgtctggcacaaagactgcttcacctgtagtaactgcaagcaagtcatcgggactggaagcttcttccctaaaggggaggacttctactgcgtgacttgccatgagaccaagtttgccaagcattgcgtgaagtgcaacaaggccatcacatctggaggaatcacttaccaggatcagccctggcatgccgattgctttgtgtgtgttacctgctctaagaagctggctgggcagcgtttcaccgctgtggaggacca

SEQ ID NO: 135236 - DNA, 796 bp, Homo sapiens; identical to SEQ ID NO: 135234
  Payload ID: 6428
  Gene Symbol: FHL1
  Gene Name: four and a half LIM domains 1
  ENST ID: ENST00000434885
  CDS Start-End: 175-796

SEQ ID NO: 135237 - DNA, 539 bp, Homo sapiens
  Payload ID: 6428
  Gene Symbol: FHL1
  Gene Name: four and a half LIM domains 1
  ENST ID: ENST00000449474
  CDS Start-End: 117-539
tttttccctaacttaggcaccttggaagttgttttcaaccatatccagcctttgccgaatacatcctatctgccacacatccagcgtgaggtccctccagctacaaggtgggcaccatggcggagaagtttgactgccactactgcagggatcccttgcaggggaagaagtatgtgcaaaaggatggccaccactgctgcctgaaatgctttgacaagttctgtgccaacacctgtgtggaatgccgcaagcccatcggtgcggactccaaggaggtgcactataagaaccgcttctggcatgacacctgcttccgctgtgccaagtgccttcaccccttggccaatgagacctttgtggccaaggacaacaagatcctgtgcaacaagtgcaccactcgggaggactcccccaagtgcaaggggtgcttcaaggccattgtggcaggagatcaaaacgtggagtacaaggggaccgtctggcacaaagactgcttcacctgtagtaactgcaagcaagtcatcgggactggaagcttc

SEQ ID NO: 135238 - DNA, 2310 bp, Homo sapiens
  Payload ID: 6428
  Gene Symbol: FHL1
  Gene Name: four and a half LIM domains 1
  Uniprot ID: Q13642
  ENST ID: ENST00000539015
  CDS Start-End: 47-976
gttaagctatgccagagccgagtccaaattttattccggtacagggatgactttctatgtggcctctctggctctggagctaatttggatgctgagtagccccgcaggtccctccagctacaaggtgggcaccatggcggagaagtttgactgccactactgcagggatcccttgcaggggaagaagtatgtgcaaaaggatggccaccactgctgcctgaaatgctttgacaagttctgtgccaacacctgtgtggaatgccgcaagcccatcggtgcggactccaaggaggtgcactataagaaccgcttctggcatgacacctgcttccgctgtgccaagtgccttcaccccttggccaatgagacctttgtggccaaggacaacaagatcctgtgcaacaagtgcaccactcgggaggactcccccaagtgcaaggggtgcttcaaggccattgtggcaggagatcaaaacgtggagtacaaggggaccgtctggcacaaagactgcttcacctgtagtaactgcaagcaagtcatcgggactggaagcttcttccctaaaggggaggacttctactgcgtgacttgccatgagaccaagtttgccaagcattgcgtgaagtgcaacaaggccatcacatctggaggaatcacttaccaggatcagccctggcatgccgattgctttgtgtgtgttacctgctctaagaagctggctgggcagcgtttcaccgctgtggaggaccagtattactgcgtggattgctacaagaactttgtggccaagaagtgtgctggatgcaagaaccccatcactgggtttggtaaaggctccagtgtggtggcctatgaaggacaatcctggcacgactactgcttccactgcaaaaaatgctccgtgaatctggccaacaagcgctttgttttccaccaggagcaagtgtattgtcccgactgtgccaaaaagctgtaaactgacaggggctcctgtcctgtaaaatggcatttgaatctcgttctttgtgtccttactttctgccctataccatcaataggggaagagtggtccttcccttctttaaagttctccttccgtcttttctcccattttacagtattactcaaataagggcacacagtgatcatattagcatttagcaaaaagcaaccctgcagcaaagtgaatttctgtccggctgcaatttaaaaatgaaaacttaggtagattgactcttctgcatgtttctcatagagcagaaaagtgctaatcatttagccacttagtgatgtaagcaagaagcataggagataaaacccccactgagatgcctctcatgcctcagctgggacccaccgtgtagacacacgacatgcaagagttgcagcggctgctccaactcactgctcaccctcttctgtgagcaggaaaagaaccctactgacatgcatggtttaacttcctcatcagaactctgcccttccttctgttcttttgtgctttcaaataactaacacgaacttccagaaaattaacatttgaacttagctgtaattctaaactgacctttccccgtactaacgtttggtttccccgtgtggcatgttttctgagcgttcctactttaaagcatggaacatgcaggtgatttgggaagtgtagaaagacctgagaaaacgagcctgtttcagaggaacatcgtcacaacgaatacttctggaagcttaacaaaactaaccctgctgtcctttttattgtttttaattaatatttttgttttaattgatagcaaaatagtttatgggtttggaaacttgcatgaaaatattttagccccctcagatgttcctgcagtgctgaaattcatcctacggaagtaaccgcaaaactctagagggggagttgagcaggcgccagggctgtcatcaacatggatatgacatttcacaacagtgactagttgaatcccttgtaacgtagtagttgtctgctctttgtccatgtgttaatgaggactgcaaagtcccttctgttgtgattcctaggacttttcctcaagaggaaatctggatttccacctaccgcttacctgaaatgcaggatcacctacttactgtattctacattattatatgacatagtataatgagacaatatcaaaagtaaacatgtaatgacaatacatactaacattcttgtaggagtggttagagaagctgatgcctcatttctacattctgtcattagctattatcatctaacgtttcagtgtatccttacagaaataaagcagcatatgaataacctgc

SEQ ID NO: 135239 - DNA, 2878 bp, Homo sapiens
  Payload ID: 6428
  Gene Symbol: FHL1
  Gene Name: four and a half LIM domains 1
  Uniprot ID: Q13642
  ENST ID: ENST00000543669
  CDS Start-End: 712-1554
acacctgtttcctagtgctgcagaaccctcgtcctgggatgagcctgcccgctagtctgcatcctaatcctgctgttgattggagataacttcagcggtcacagggcacctcgtctccatggcaacccctctaaatattcctctagtgacttgtgctctacattctggctggatcagagccctcctgtggcaaaatattctaaagatgttaaaagagagagagagaaaaaaaaaggctcaactaataaatctattctaaacgactgagtcatttgttttgattacccgggtgattgccaaatgttaatttaaaactgaaataggccatgagctcactcccctaacaatgctgagtgtttgagctaatacggcttgataatgagggagccagatccactgccagtgctcatgttatatgataaacagacatttggagaagtatgcagaacatcttggcagttttcctttaactctaagggttgtaaatacaaagtagaatgtgttaccatgagccatttcataggaagttgactttatttttttagaattcagaactttgcttctaaaaaggtaactttgcctcttgattctcatttttttccctaacttaggcaccttggaagttgttttcaaccatatccagcctttgccgaatacatcctatctgccacacatccagcgtgaggtccctccagctacaaggtgggcaccatggcggagaagtttgactgccactactgcagggatcccttgcaggggaagaagtatgtgcaaaaggatggccaccactgctgcctgaaatgctttgacaagttctgtgccaacacctgtgtggaatgccgcaagcccatcggtgcggactccaaggaggtgcactataagaaccgcttctggcatgacacctgcttccgctgtgccaagtgccttcaccccttggccaatgagacctttgtggccaaggacaacaagatcctgtgcaacaagtgcaccactcgggaggactcccccaagtgcaaggggtgcttcaaggccattgtggcaggagatcaaaacgtggagtacaaggggaccgtctggcacaaagactgcttcacctgtagtaactgcaagcaagtcatcgggactggaagcttcttccctaaaggggaggacttctactgcgtgacttgccatgagaccaagtttgccaagcattgcgtgaagtgcaacaaggccatcacatctggaggaatcacttaccaggatcagccctggcatgccgattgctttgtgtgtgttacctgctctaagaagctggctgggcagcgtttcaccgctgtggaggaccagtattactgcgtggattgctacaagaactttgtggccaagaagtgtgctggatgcaagaaccccatcactgggtttggtaaaggctccagtgtggtggcctatgaaggacaatcctggcacgactactgcttccactgcaaaaaatgctccgtgaatctggccaacaagcgctttgttttccaccaggagcaagtgtattgtcccgactgtgccaaaaagctgtaaactgacaggggctcctgtcctgtaaaatggcatttgaatctcgttctttgtgtccttactttctgccctataccatcaataggggaagagtggtccttcccttctttaaagttctccttccgtcttttctcccattttacagtattactcaaataagggcacacagtgatcatattagcatttagcaaaaagcaaccctgcagcaaagtgaatttctgtccggctgcaatttaaaaatgaaaacttaggtagattgactcttctgcatgtttctcatagagcagaaaagtgctaatcatttagccacttagtgatgtaagcaagaagcataggagataaaacccccactgagatgcctctcatgcctcagctgggacccaccgtgtagacacacgacatgcaagagttgcagcggctgctccaactcactgctcaccctcttctgtgagcaggaaaagaaccctactgacatgcatggtttaacttcctcatcagaactctgcccttccttctgttcttttgtgctttcaaataactaacacgaacttccagaaaattaacatttgaacttagctgtaattctaaactgacctttccccgtactaacgtttggtttccccgtgtggcatgttttctgagcgttcctactttaaagcatggaacatgcaggtgatttgggaagtgtagaaagacctgagaaaacgagcctgtttcagaggaacatcgtcacaacgaatacttctggaagcttaacaaaactaaccctgctgtcctttttattgtttttaattaatatttttgttttaattgatagcaaaatagtttatgggtttggaaacttgcatgaaaatattttagccccctcagatgttcctgcagtgctgaaattcatcctacggaagtaaccgcaaaactctagagggggagttgagcaggcgccagggctgtcatcaacatggatatgacatttcacaacagtgactagttgaatcccttgtaacgtagtagttgtctgctctttgtccatgtgttaatgaggactgcaaagtcccttctgttgtgattcctaggacttttcctcaagaggaaatctggatttccacctaccgcttacctgaaatgcaggatcacctacttactgtattctacattattatatgacatagtataatgagacaatatcaaaagtaaacatgtaatgacaatacatactaacattcttgtaggagtggttagagaagctgatgcctcatttctacattctgtcattagctattatcatctaacgtttcagtgtatccttacagaaataaagcagcatatg

SEQ ID NO: 135240 - DNA, 2325 bp, Homo sapiens
  Payload ID: 6428
  Gene Symbol: FHL1
  Gene Name: four and a half LIM domains 1
  Uniprot ID: Q13642
  ENST ID: ENST00000535737
  CDS Start-End: 185-1027
ctctggtgcccctgctgtgaagagctgtgccctgctgcattcctcctgtagctgcacgaaagggtgtggaatcttctagaaacagcaccttggaagttgttttcaaccatatccagcctttgccgaatacatcctatctgccacacatccagcgtgaggtccctccagctacaaggtgggcaccatggcggagaagtttgactgccactactgcagggatcccttgcaggggaagaagtatgtgcaaaaggatggccaccactgctgcctgaaatgctttgacaagttctgtgccaacacctgtgtggaatgccgcaagcccatcggtgcggactccaaggaggtgcactataagaaccgcttctggcatgacacctgcttccgctgtgccaagtgccttcaccccttggccaatgagacctttgtggccaaggacaacaagatcctgtgcaacaagtgcaccactcgggaggactcccccaagtgcaaggggtgcttcaaggccattgtggcaggagatcaaaacgtggagtacaaggggaccgtctggcacaaagactgcttcacctgtagtaactgcaagcaagtcatcgggactggaagcttcttccctaaaggggaggacttctactgcgtgacttgccatgagaccaagtttgccaagcattgcgtgaagtgcaacaaggccatcacatctggaggaatcacttaccaggatcagccctggcatgccgattgctttgtgtgtgttacctgctctaagaagctggctgggcagcgtttcaccgctgtggaggaccagtattactgcgtggattgctacaagaactttgtggccaagaagtgtgctggatgcaagaaccccatcactgggtttggtaaaggctccagtgtggtggcctatgaaggacaatcctggcacgactactgcttccactgcaaaaaatgctccgtgaatctggccaacaagcgctttgttttccaccaggagcaagtgtattgtcccgactgtgccaaaaagctgtaaactgacaggggctcctgtcctgtaaaatggcatttgaatctcgttctttgtgtccttactttctgccctataccatcaataggggaagagtggtccttcccttctttaaagttctccttccgtcttttctcccattttacagtattactcaaataagggcacacagtgatcatattagcatttagcaaaaagcaaccctgcagcaaagtgaatttctgtccggctgcaatttaaaaatgaaaacttaggtagattgactcttctgcatgtttctcatagagcagaaaagtgctaatcatttagccacttagtgatgtaagcaagaagcataggagataaaacccccactgagatgcctctcatgcctcagctgggacccaccgtgtagacacacgacatgcaagagttgcagcggctgctccaactcactgctcaccctcttctgtgagcaggaaaagaaccctactgacatgcatggtttaacttcctcatcagaactctgcccttccttctgttcttttgtgctttcaaataactaacacgaacttccagaaaattaacatttgaacttagctgtaattctaaactgacctttccccgtactaacgtttggtttccccgtgtggcatgttttctgagcgttcctactttaaagcatggaacatgcaggtgatttgggaagtgtagaaagacctgagaaaacgagcctgtttcagaggaacatcgtcacaacgaatacttctggaagcttaacaaaactaaccctgctgtcctttttattgtttttaattaatatttttgttttaattgatagcaaaatagtttatgggtttggaaacttgcatgaaaatattttagccccctcagatgttcctgcagtgctgaaattcatcctacggaagtaaccgcaaaactctagagggggagttgagcaggcgccagggctgtcatcaacatggatatgacatttcacaacagtgactagttgaatcccttgtaacgtagtagttgtctgctctttgtccatgtgttaatgaggactgcaaagtcccttctgttgtgattcctaggacttttcctcaagaggaaatctggatttccacctaccgcttacctgaaatgcaggatcacctacttactgtattctacattattatatgacatagtataatgagacaatatcaaaagtaaacatgtaatgacaatacatactaacattcttgtaggagtggttagagaagctgatgcctcatttctacattctgtcattagctattatcatctaacgtttcagtgta

SEQ ID NO: 135241 - DNA, 2178 bp, Homo sapiens
  Payload ID: 6428
  Gene Symbol: FHL1
  Gene Name: four and a half LIM domains 1
  Uniprot ID: Q13642
  ENST ID: ENST00000618438
  CDS Start-End: 194-778
ccgcagccgccgccgccaccgccgcgcctcggcctcggtgcaggcagcggccgccgccgccgagacagctgcgcgggcgagcatccccacgcagcaccttggaagttgttttcaaccatatccagcctttgccgaatacatcctatctgccacacatccagcgtgaggtccctccagctacaaggtgggcaccatggcggagaagtttgactgccactactgcagggatcccttgcaggggaagaagtatgtgcaaaaggatggccaccactgctgcctgaaatgctttgacaagttctgtgccaacacctgtgtggaatgccgcaagcccatcggtgcggactccaaggaggtgcactataagaaccgcttctggcatgacacctgcttccgctgtgccaagtgccttcaccccttggccaatgagacctttgtggccaaggacaacaagatcctgtgcaacaagtgcaccactcgggaggactcccccaagtgcaaggggtgcttcaaggccattgtggcaggagatcaaaacgtggagtacaaggggaccgtctggcacaaagactgcttcacctgtagtaactgcaagcaagtcatcgggactggaagcttcttccctaaaggggaggacttctactgcgtgacttgccatgagaccaagtttgccaagcattgcgtgaagtgcaacaagggtttggtaaaggctccagtgtggtggcctatgaaggacaatcctggcacgactactgcttccactgcaaaaaatgctccgtgaatctggccaacaagcgctttgttttccaccaggagcaagtgtattgtcccgactgtgccaaaaagctgtaaactgacaggggctcctgtcctgtaaaatggcatttgaatctcgttctttgtgtccttactttctgccctataccatcaataggggaagagtggtccttcccttctttaaagttctccttccgtcttttctcccattttacagtattactcaaataagggcacacagtgatcatattagcatttagcaaaaagcaaccctgcagcaaagtgaatttctgtccggctgcaatttaaaaatgaaaacttaggtagattgactcttctgcatgtttctcatagagcagaaaagtgctaatcatttagccacttagtgatgtaagcaagaagcataggagataaaacccccactgagatgcctctcatgcctcagctgggacccaccgtgtagacacacgacatgcaagagttgcagcggctgctccaactcactgctcaccctcttctgtgagcaggaaaagaaccctactgacatgcatggtttaacttcctcatcagaactctgcccttccttctgttcttttgtgctttcaaataactaacacgaacttccagaaaattaacatttgaacttagctgtaattctaaactgacctttccccgtactaacgtttggtttccccgtgtggcatgttttctgagcgttcctactttaaagcatggaacatgcaggtgatttgggaagtgtagaaagacctgagaaaacgagcctgtttcagaggaacatcgtcacaacgaatacttctggaagcttaacaaaactaaccctgctgtcctttttattgtttttaattaatatttttgttttaattgatagcaaaatagtttatgggtttggaaacttgcatgaaaatattttagccccctcagatgttcctgcagtgctgaaattcatcctacggaagtaaccgcaaaactctagagggggagttgagcaggcgccagggctgtcatcaacatggatatgacatttcacaacagtgactagttgaatcccttgtaacgtagtagttgtctgctctttgtccatgtgttaatgaggactgcaaagtcccttctgttgtgattcctaggacttttcctcaagaggaaatctggatttccacctaccgcttacctgaaatgcaggatcacctacttactgtattctacattattatatgacatagtataatgagacaatatcaaaagtaaacatgtaatgacaatacatactaacattcttgtaggagtggttagagaagctgatgcctcatttctacattctgtcattagctattatcatctaacgtttcagtgtatccttacagaaataaagcagcatatgaataa

SEQ ID NO: 135242 - DNA, 1335 bp, Homo sapiens
  Payload ID: 6428
  Gene Symbol: FHL1
  Gene Name: four and a half LIM domains 1
  Uniprot ID: Q13642
  ENST ID: ENST00000630084
  CDS Start-End: 261-1103
acagaggtttctgctttcgaagtttctcttcctttcctctctgctcttagcgtccaggactaggtaaaggttaaaaaatcatcaaggctaagcgactgttgtgtcgttcgtgttgagcgctgtattattttctgcatttgggaatgtgcgagtttctcaggcaccttggaagttgttttcaaccatatccagcctttgccgaatacatcctatctgccacacatccagcgtgaggtccctccagctacaaggtgggcaccatggcggagaagtttgactgccactactgcagggatcccttgcaggggaagaagtatgtgcaaaaggatggccaccactgctgcctgaaatgctttgacaagttctgtgccaacacctgtgtggaatgccgcaagcccatcggtgcggactccaaggaggtgcactataagaaccgcttctggcatgacacctgcttccgctgtgccaagtgccttcaccccttggccaatgagacctttgtggccaaggacaacaagatcctgtgcaacaagtgcaccactcgggaggactcccccaagtgcaaggggtgcttcaaggccattgtggcaggagatcaaaacgtggagtacaaggggaccgtctggcacaaagactgcttcacctgtagtaactgcaagcaagtcatcgggactggaagcttcttccctaaaggggaggacttctactgcgtgacttgccatgagaccaagtttgccaagcattgcgtgaagtgcaacaaggccatcacatctggaggaatcacttaccaggatcagccctggcatgccgattgctttgtgtgtgttacctgctctaagaagctggctgggcagcgtttcaccgctgtggaggaccagtattactgcgtggattgctacaagaactttgtggccaagaagtgtgctggatgcaagaaccccatcactgggtttggtaaaggctccagtgtggtggcctatgaaggacaatcctggcacgactactgcttccactgcaaaaaatgctccgtgaatctggccaacaagcgctttgttttccaccaggagcaagtgtattgtcccgactgtgccaaaaagctgtaaactgacaggggctcctgtcctgtaaaatggcatttgaatctcgttctttgtgtccttactttctgccctataccatcaataggggaagagtggtccttcccttctttaaagttctccttccgtcttttctcccattttacagtattactcaaataagggcacacagtgatcatattagcatttagcaaaaagcaaccctgcagcaaagtgaatttctgtccggctgcaattt

SEQ ID NO: 135243 - DNA, 457 bp, Homo sapiens
  Payload ID: 6428
  Gene Symbol: FHL1
  Gene Name: four and a half LIM domains 1
  ENST ID: ENST00000627812
  CDS Start-End: 260-457
gcattcctcctgtagctgcacgaaaggattcaggtttgacgcttcagttggattgaatcgaaagagaggtatatttggtatcaggcgtttgtggtggcatgtgaaatcattatccacgtttgataacagtttgactttttgcctgctgtaataatagtagcaccttggaagttgttttcaaccatatccagcctttgccgaatacatcctatctgccacacatccagcgtgaggtccctccagctacaaggtgggcaccatggcggagaagtttgactgccactactgcagggatcccttgcaggggaagaagtatgtgcaaaaggatggccaccactgctgcctgaaatgctttgacaagttctgtgccaacacctgtgtggaatgccgcaagcccatcggtgcggactccaaggaggtgcactataagaaccgcttctggcatgacacctgcttc

SEQ ID NO: 135244 - DNA, 580 bp, Homo sapiens
  Payload ID: 6428
  Gene Symbol: FHL1
  Gene Name: four and a half LIM domains 1
  ENST ID: ENST00000627578
  CDS Start-End: 123-580
agtccgcagccgccgccgccaccgccgcgcctcggcctcggtgcaggcagcggccgccgccgccgagacagctgcgcgggcgagcatccccacgcagtccctccagctacaaggtgggcaccatggcggagaagtttgactgccactactgcagggatcccttgcaggggaagaagtatgtgcaaaaggatggccaccactgctgcctgaaatgctttgacaagttctgtgccaacacctgtgtggaatgccgcaagcccatcggtgcggactccaaggaggtgcactataagaaccgcttctggcatgacacctgcttccgctgtgccaagtgccttcaccccttggccaatgagacctttgtggccaaggacaacaagatcctgtgcaacaagtgcaccactcgggaggactcccccaagtgcaaggggtgcttcaaggccattgtggcaggagatcaaaacgtggagtacaaggggaccgtctggcacaaagactgcttcacctgtagtaactgcaagcaagtcatcgggactggaagcttcttccctaaaggggaggacttctactgcgtgacttg

SEQ ID NO: 135245 - DNA, 1501 bp, Homo sapiens
  Payload ID: 6428
  Gene Symbol: FHL1
  Gene Name: four and a half LIM domains 1
  Uniprot ID: Q13642
  ENST ID: ENST00000629039
  CDS Start-End: 412-1254
ctgcagacaacgctgttatcaccagagcccggcactgagcttggcacatggcgagggctcagtaaactgaatgctgagtgaatgagacgccacgcgccgctttgccatcggtgctttctgagtgacgttaaaacgctctggatggtggcactgggattatggatggggcttatttagctccctccggcttgctactaaggggaggggtcgtcggtgggcctttcggcgccgctgcaagccaccgggttccgaagtcggaggccgaaacggcgtgggccccgaagcggggccgcttttcagggagtgcgcaggcaccttggaagttgttttcaaccatatccagcctttgccgaatacatcctatctgccacacatccagcgtgaggtccctccagctacaaggtgggcaccatggcggagaagtttgactgccactactgcagggatcccttgcaggggaagaagtatgtgcaaaaggatggccaccactgctgcctgaaatgctttgacaagttctgtgccaacacctgtgtggaatgccgcaagcccatcggtgcggactccaaggaggtgcactataagaaccgcttctggcatgacacctgcttccgctgtgccaagtgccttcaccccttggccaatgagacctttgtggccaaggacaacaagatcctgtgcaacaagtgcaccactcgggaggactcccccaagtgcaaggggtgcttcaaggccattgtggcaggagatcaaaacgtggagtacaaggggaccgtctggcacaaagactgcttcacctgtagtaactgcaagcaagtcatcgggactggaagcttcttccctaaaggggaggacttctactgcgtgacttgccatgagaccaagtttgccaagcattgcgtgaagtgcaacaaggccatcacatctggaggaatcacttaccaggatcagccctggcatgccgattgctttgtgtgtgttacctgctctaagaagctggctgggcagcgtttcaccgctgtggaggaccagtattactgcgtggattgctacaagaactttgtggccaagaagtgtgctggatgcaagaaccccatcactgggtttggtaaaggctccagtgtggtggcctatgaaggacaatcctggcacgactactgcttccactgcaaaaaatgctccgtgaatctggccaacaagcgctttgttttccaccaggagcaagtgtattgtcccgactgtgccaaaaagctgtaaactgacaggggctcctgtcctgtaaaatggcatttgaatctcgttctttgtgtccttactttctgccctataccatcaataggggaagagtggtccttcccttctttaaagttctccttccgtcttttctcccattttacagtattactcaaataagggcacacagtgatcatattagcatttagcaaaaagcaaccctgcagcaaagtgaatttctgtccggctgcaatttaaaaatgaaaactta

SEQ ID NO: 135246 - DNA, 578 bp, Homo sapiens
  Payload ID: 6428
  Gene Symbol: FHL1
  Gene Name: four and a half LIM domains 1
  ENST ID: ENST00000628443
  CDS Start-End: 136-578
aacgaggatggcgggggtggcgacgaggagtagacgcaccttggaagttgttttcaaccatatccagcctttgccgaatacatcctatctgccacacatccagcgtgaggtccctccagctacaaggtgggcaccatggcggagaagtttgactgccactactgcagggatcccttgcaggggaagaagtatgtgcaaaaggatggccaccactgctgcctgaaatgctttgacaagttctgtgccaacacctgtgtggaatgccgcaagcccatcggtgcggactccaaggaggtgcactataagaaccgcttctggcatgacacctgcttccgctgtgccaagtgccttcaccccttggccaatgagacctttgtggccaaggacaacaagatcctgtgcaacaagtgcaccactcgggaggactcccccaagtgcaaggggtgcttcaaggccattgtggcaggagatcaaaacgtggagtacaaggggaccgtctggcacaaagactgcttcacctgtagtaactgcaagcaagtcatcgggactggaagcttcttccctaaaggggaggactt

SEQ ID NO: 135247 - DNA, 2304 bp, Homo sapiens
  Payload ID: 6428
  Gene Symbol: FHL1
  Gene Name: four and a half LIM domains 1
  Uniprot ID: Q13642
  ENST ID: ENST00000628568
  CDS Start-End: 133-975
gccccgctccgcatcttttgtgaatcagcacagttgatatatctgagcaggggcttctaccatctccccagggaatcactagccatcggccatctggccccgcggggtccctccagctacaaggtgggcaccatggcggagaagtttgactgccactactgcagggatcccttgcaggggaagaagtatgtgcaaaaggatggccaccactgctgcctgaaatgctttgacaagttctgtgccaacacctgtgtggaatgccgcaagcccatcggtgcggactccaaggaggtgcactataagaaccgcttctggcatgacacctgcttccgctgtgccaagtgccttcaccccttggccaatgagacctttgtggccaaggacaacaagatcctgtgcaacaagtgcaccactcgggaggactcccccaagtgcaaggggtgcttcaaggccattgtggcaggagatcaaaacgtggagtacaaggggaccgtctggcacaaagactgcttcacctgtagtaactgcaagcaagtcatcgggactggaagcttcttccctaaaggggaggacttctactgcgtgacttgccatgagaccaagtttgccaagcattgcgtgaagtgcaacaaggccatcacatctggaggaatcacttaccaggatcagccctggcatgccgattgctttgtgtgtgttacctgctctaagaagctggctgggcagcgtttcaccgctgtggaggaccagtattactgcgtggattgctacaagaactttgtggccaagaagtgtgctggatgcaagaaccccatcactgggtttggtaaaggctccagtgtggtggcctatgaaggacaatcctggcacgactactgcttccactgcaaaaaatgctccgtgaatctggccaacaagcgctttgttttccaccaggagcaagtgtattgtcccgactgtgccaaaaagctgtaaactgacaggggctcctgtcctgtaaaatggcatttgaatctcgttctttgtgtccttactttctgccctataccatcaataggggaagagtggtccttcccttctttaaagttctccttccgtcttttctcccattttacagtattactcaaataagggcacacagtgatcatattagcatttagcaaaaagcaaccctgcagcaaagtgaatttctgtccggctgcaatttaaaaatgaaaacttaggtagattgactcttctgcatgtttctcatagagcagaaaagtgctaatcatttagccacttagtgatgtaagcaagaagcataggagataaaacccccactgagatgcctctcatgcctcagctgggacccaccgtgtagacacacgacatgcaagagttgcagcggctgctccaactcactgctcaccctcttctgtgagcaggaaaagaaccctactgacatgcatggtttaacttcctcatcagaactctgcccttccttctgttcttttgtgctttcaaataactaacacgaacttccagaaaattaacatttgaacttagctgtaattctaaactgacctttccccgtactaacgtttggtttccccgtgtggcatgttttctgagcgttcctactttaaagcatggaacatgcaggtgatttgggaagtgtagaaagacctgagaaaacgagcctgtttcagaggaacatcgtcacaacgaatacttctggaagcttaacaaaactaaccctgctgtcctttttattgtttttaattaatatttttgttttaattgatagcaaaatagtttatgggtttggaaacttgcatgaaaatattttagccccctcagatgttcctgcagtgctgaaattcatcctacggaagtaaccgcaaaactctagagggggagttgagcaggcgccagggctgtcatcaacatggatatgacatttcacaacagtgactagttgaatcccttgtaacgtagtagttgtctgctctttgtccatgtgttaatgaggactgcaaagtcccttctgttgtgattcctaggacttttcctcaagaggaaatctggatttccacctaccgcttacctgaaatgcaggatcacctacttactgtattctacattattatatgacatagtataatgagacaatatcaaaagtaaacatgtaatgacaatacatactaacattcttgtaggagtggttagagaagctgatgcctcatttctacattctgtcattagctattatcatctaacgtttcagtgtatccttacagaaataaagcagcatatgaataa

SEQ ID NO: 135248 - DNA, 578 bp, Homo sapiens
  Payload ID: 6428
  Gene Symbol: FHL1
  Gene Name: four and a half LIM domains 1
  ENST ID: ENST00000628032
  CDS Start-End: 54-578
agaattcagaactttgcttctaaaaaggtccctccagctacaaggtgggcaccatggcggagaagtttgactgccactactgcagggatcccttgcaggggaagaagtatgtgcaaaaggatggccaccactgctgcctgaaatgctttgacaagttctgtgccaacacctgtgtggaatgccgcaagcccatcggtgcggactccaaggaggtgcactataagaaccgcttctggcatgacacctgcttccgctgtgccaagtgccttcaccccttggccaatgagacctttgtggccaaggacaacaagatcctgtgcaacaagtgcaccactcgggaggactcccccaagtgcaaggggtgcttcaaggccattgtggcaggagatcaaaacgtggagtacaaggggaccgtctggcacaaagactgcttcacctgtagtaactgcaagcaagtcatcgggactggaagcttcttccctaaaggggaggacttctactgcgtgacttgccatgagaccaagtttgccaagcattgcgtgaagtgcaacaaggccatcacatctggaggaatcact

SEQ ID NO: 135249 - DNA, 569 bp, Homo sapiens
  Payload ID: 6428
  Gene Symbol: FHL1
  Gene Name: four and a half LIM domains 1
  ENST ID: ENST00000628919
  CDS Start-End: 179-569
tccacttcagttccagctgctgttgcttgggaagaaacaaatttctgctgtgttctcaatctccagacggtccatgaaaatttaatgtataagaacaaagaggctgggcgcagtggctaacgcctgtaatacctgcactttgggaggctgaggtccctccagctacaaggtgggcaccatggcggagaagtttgactgccactactgcagggatcccttgcaggggaagaagtatgtgcaaaaggatggccaccactgctgcctgaaatgctttgacaagttctgtgccaacacctgtgtggaatgccgcaagcccatcggtgcggactccaaggaggtgcactataagaaccgcttctggcatgacacctgcttccgctgtgccaagtgccttcaccccttggccaatgagacctttgtggccaaggacaacaagatcctgtgcaacaagtgcaccactcgggaggactcccccaagtgcaaggggtgcttcaaggccattgtggcaggagatcaaaacgtggagtacaaggggaccgtctggcacaaagactgcttcacctgtagta

SEQ ID NO: 135250 - DNA, 566 bp, Homo sapiens
  Payload ID: 6428
  Gene Symbol: FHL1
  Gene Name: four and a half LIM domains 1
  ENST ID: ENST00000627383
  CDS Start-End: 152-566
aatctagagaagcacgaggaaggttctatcacgggggttgagccttagaaggcaccttggaagttgttttcaaccatatccagcctttgccgaatacatcctatctgccacacatccagcgtgaggtccctccagctacaaggtgggcaccatggcggagaagtttgactgccactactgcagggatcccttgcaggggaagaagtatgtgcaaaaggatggccaccactgctgcctgaaatgctttgacaagttctgtgccaacacctgtgtggaatgccgcaagcccatcggtgcggactccaaggaggtgcactataagaaccgcttctggcatgacacctgcttccgctgtgccaagtgccttcaccccttggccaatgagacctttgtggccaaggacaacaagatcctgtgcaacaagtgcaccactcgggaggactcccccaagtgcaaggggtgcttcaaggccattgtggcaggagatcaaaacgtggagtacaaggggaccgtctggcacaaagactgcttcacctgtagtaactgcaagcaagtcatcgggactg

SEQ ID NO: 135251 - DNA, 416 bp, Homo sapiens
  Payload ID: 6428
  Gene Symbol: FHL1
  Gene Name: four and a half LIM domains 1
  ENST ID: ENST00000625935
  CDS Start-End: 361-416
gtctgactctggtgcccctgctgtgaagagctgtgccctgctgcattcctcctgtagctgcacgaaagggaaacatcaattccagaagggtgaattagatgaaatatgataagactagtgtgtgacagattcaggtttgacgcttcagttggattgaatcgaaagagaggtatatttggtatcaggcgtttgtggtggcatgtgaaatcattatccacgtttgataacagtttgactttttgcctgctgtaataatagtagcaccttggaagttgttttcaaccatatccagcctttgccgaatacatcctatctgccacacatccagcgtgaggtccctccagctacaaggtgggcaccatggcggagaagtttgactgccactactgcagggatcccttgcaggggaagaagta

SEQ ID NO: 135252 - DNA, 567 bp, Homo sapiens
  Payload ID: 6428
  Gene Symbol: FHL1
  Gene Name: four and a half LIM domains 1
  ENST ID: ENST00000630278
  CDS Start-End: 334-567
aggcagtctgactctggtgcccctgctgtgaagagctgtgccctgctgcattcctcctgtagctgcacgaaagggtggccattatgatgctcatagaggctggacagctaatatgaggcggagccggtatttgagctcaggcagtctgactctggtgcccctgctgtgaagagctgtgccctgctgcattcctcctgtagctgcacgaaagggtgtggaatcttctagaagcagcaccttggaagttgttttcaaccatatccagcctttgccgaatacatcctatctgccacacatccagcgtgaggtccctccagctacaaggtgggcaccatggcggagaagtttgactgccactactgcagggatcccttgcaggggaagaagtatgtgcaaaaggatggccaccactgctgcctgaaatgctttgacaagttctgtgccaacacctgtgtggaatgccgcaagcccatcggtgcggactccaaggaggtgcactataagaaccgcttctggcatgacacctgcttccgctgtgccaagtgccttcaccccttggccaatgag

SEQ ID NO: 135253 - DNA, 1462 bp, Homo sapiens
  Payload ID: 6429
  Gene Symbol: FHL2
  Gene Name: four and a half LIM domains 2
  Uniprot ID: Q14192
  ENST ID: ENST00000322142
  CDS Start-End: 168-1007
gcagcgctccactcggccggcagcggagccgcagccaccagccgcccgcgccctccagccccgtccgggagtccccggcccgctgcggtgcctggctgagaactgtgtcttcctggagactaggctggcattttgactttggggttgctgaaaagccaggagtcaaaatgactgagcgctttgactgccaccattgcaacgaatctctctttggcaagaagtacatcctgcgggaggagagcccctactgcgtggtgtgctttgagaccctgttcgccaacacctgcgaggagtgtgggaagcccatcggctgtgactgcaaggacttgtcttacaaggaccggcactggcatgaagcctgtttccactgctcgcagtgcagaaactcactggtggacaagccctttgctgccaaggaggaccagctgctctgtacagactgctattccaacgagtactcatccaagtgccaggaatgcaagaagaccatcatgccaggtacccgcaagatggagtacaagggcagcagctggcatgagacctgcttcatctgccaccgctgccagcagccaattggaaccaagagtttcatccccaaagacaatcagaatttctgtgtgccctgctatgagaaacaacatgccatgcagtgcgttcagtgcaaaaagcccatcaccacgggaggggtcacttaccgggagcagccctggcacaaggagtgcttcgtgtgcaccgcctgcaggaagcagctgtctgggcagcgcttcacagctcgcgatgactttgcctactgcctgaactgcttctgtgacttgtatgccaagaagtgtgctgggtgcaccaaccccatcagcggacttggtggcacaaaatacatctcctttgaggaacggcagtggcataacgactgctttaactgtaagaagtgctccctctcactggtggggcgtggcttcctcacagagagggacgacatcctgtgccccgactgtgggaaagacatctgaattcaacacagagaagttgctgcttgtgatctcacacacagatttttatgttttctttctcacccaggcaatcttgccttctggtttcttccagccacattgagactttcttctagtgcttttcagtgatactcacgtttgcttaaaccctttagtgctttgtgatagttcagtcccagggaaagagaaaactcgccctaggccctaggtgggaagatggtttgaaatttttgtaatcgagtaaggcacacccaaatgtaaaaatccttttgaatgatgcctttataaatctttctctcactgtctatttaagtgcaattaacatatgtcacgaacttgaaagttttctaaactcaataaggtaatgaccagttgttatttacagctctgtaacctcccgttgcgtcaagtctaaaccaagattatgtgacttgcaataaagttattcagaacag

SEQ ID NO: 135254 - DNA, 1769 bp, Homo sapiens
  Payload ID: 6429
  Gene Symbol: FHL2
  Gene Name: four and a half LIM domains 2
  ENST ID: ENST00000344213
  CDS Start-End: 129-1298
agggtacgggccgggaccgccgcagcccggggcgggggcacggcaaccgcgaggcctgggggcgcccgccccccgcgccccacgcccggtgccagcgagccgaggcgtgcatctccttatatggtcaaatgacacggcggggtttctcgagggcgggagctgcgcagcgctccactcggccggcagcggagccgcagccaccagccgcccgcgccctccagccccgtccgggagtccccggcccgctgcggtgccgtgagtacctccaaccccctgcgccccggagggaggccgaggggcttagccaccagggctcggaagtgggggccgaatccggtgcgagacccaaggagaggggagcagagccggagttggggagactgtggctgagaactgtgtcttcctggagactaggctggcattttgactttggggttgctgaaaagccaggagtcaaaatgactgagcgctttgactgccaccattgcaacgaatctctctttggcaagaagtacatcctgcgggaggagagcccctactgcgtggtgtgctttgagaccctgttcgccaacacctgcgaggagtgtgggaagcccatcggctgtgactgcaaggacttgtcttacaaggaccggcactggcatgaagcctgtttccactgctcgcagtgcagaaactcactggtggacaagccctttgctgccaaggaggaccagctgctctgtacagactgctattccaacgagtactcatccaagtgccaggaatgcaagaagaccatcatgccaggtacccgcaagatggagtacaagggcagcagctggcatgagacctgcttcatctgccaccgctgccagcagccaattggaaccaagagtttcatccccaaagacaatcagaatttctgtgtgccctgctatgagaaacaacatgccatgcagtgcgttcagtgcaaaaagcccatcaccacgggaggggtcacttaccgggagcagccctggcacaaggagtgcttcgtgtgcaccgcctgcaggaagcagctgtctgggcagcgcttcacagctcgcgatgactttgcctactgcctgaactgcttctgtgacttgtatgccaagaagtgtgctgggtgcaccaaccccatcagcggacttggtggcacaaaatacatctcctttgaggaacggcagtggcataacgactgctttaactgtaagaagtgctccctctcactggtggggcgtggcttcctcacagagagggacgacatcctgtgccccgactgtgggaaagacatctgaattcaacacagagaagttgctgcttgtgatctcacacacagatttttatgttttctttctcacccaggcaatcttgccttctggtttcttccagccacattgagactttcttctagtgcttttcagtgatactcacgtttgcttaaaccctttagtgctttgtgatagttcagtcccagggaaagagaaaactcgccctaggccctaggtgggaagatggtttgaaatttttgtaatcgagtaaggcacacccaaatgtaaaaatccttttgaatgatgcctttataaatctttctctcactgtctatttaagtgcaattaacatatgtcacgaacttgaaagttttctaaactcaataaggtaatgaccagttgttatttacagctctgtaacctcccgttgcgtcaagtctaaaccaagattatgtgacttgcaataaagttattcagaacagaatcttttgccaggca

SEQ ID NO: 135255 - DNA, 1578 bp, Homo sapiens
  Payload ID: 6429
  Gene Symbol: FHL2
  Gene Name: four and a half LIM domains 2
  Uniprot ID: Q14192
  ENST ID: ENST00000358129
  CDS Start-End: 459-914
agggtacgggccgggaccgccgcagcccggggcgggggcacggcaaccgcgaggcctgggggcgcccgccccccgcgccccacgcccggtgccagcgagccgaggcgtgcatctccttatatggtcaaatgacacggcggggtttctcgagggcgggagctgcgcagcgctccactcggccggcagcggagccgcagccaccagccgcccgcgccctccagccccgtccgggagtccccggcccgctgcggtgccgtgagtacctccaaccccctgcgccccggagggaggccgaggggcttagccaccagggctcggaagtgggggccgaatccggtgcgagacccaaggagaggggagcagagccggagttggggagactgtggctgagaactgtgtcttcctggagactaggctggcattttgactttggggttgctgaaaagccaggagtcaaaatgactgagcgctttgactgccaccattgcaacgaatctctctttggcaagaagtacatcctgcgggaggagagcccctactgcgtggtgtgctttgagaccctgttcgccaacacctgcgaggagtgtgggaagcccatcggctgtgactgcaaggtacccgcaagatggagtacaagggcagcagctggcatgagacctgcttcatctgccaccgctgccagcagccaattggaaccaagagtttcatccccaaagacaatcagaatttctgtgtgccctgctatgagaaacaacatgccatgcagtgcgttcagtgcaaaaagcccatcaccacgggaggggtcacttaccgggagcagccctggcacaaggagtgcttcgtgtgcaccgcctgcaggaagcagctgtctgggcagcgcttcacagctcgcgatgactttgcctactgcctgaactgcttctgtgacttgtatgccaagaagtgtgctgggtgcaccaaccccatcagcggacttggtggcacaaaatacatctcctttgaggaacggcagtggcataacgactgctttaactgtaagaagtgctccctctcactggtggggcgtggcttcctcacagagagggacgacatcctgtgccccgactgtgggaaagacatctgaattcaacacagagaagttgctgcttgtgatctcacacacagatttttatgttttctttctcacccaggcaatcttgccttctggtttcttccagccacattgagactttcttctagtgcttttcagtgatactcacgtttgcttaaaccctttagtgctttgtgatagttcagtcccagggaaagagaaaactcgccctaggccctaggtgggaagatggtttgaaatttttgtaatcgagtaaggcacacccaaatgtaaaaatccttttgaatgatgcctttataaatctttctctcactgtctatttaagtgcaattaacatatgtcacgaacttgaaagttttctaaactcaataaggtaatgaccagttgttatttacagctctgtaacctcccgttgcgtcaagtctaaaccaagattatgtgacttgcaataaagttattcagaacag

SEQ ID NO: 135256 - DNA, 1426 bp, Homo sapiens
  Payload ID: 6429
  Gene Symbol: FHL2
  Gene Name: four and a half LIM domains 2
  Uniprot ID: Q14192
  ENST ID: ENST00000393352
  CDS Start-End: 130-969
cagctgcacagaaggttggggccatccaaccaggcagtccgcctgcacagcagctgtccctgctcatcgggctggaggacagaagacagaaccctaaaaccacaggttgctgaaaagccaggagtcaaaatgactgagcgctttgactgccaccattgcaacgaatctctctttggcaagaagtacatcctgcgggaggagagcccctactgcgtggtgtgctttgagaccctgttcgccaacacctgcgaggagtgtgggaagcccatcggctgtgactgcaaggacttgtcttacaaggaccggcactggcatgaagcctgtttccactgctcgcagtgcagaaactcactggtggacaagccctttgctgccaaggaggaccagctgctctgtacagactgctattccaacgagtactcatccaagtgccaggaatgcaagaagaccatcatgccaggtacccgcaagatggagtacaagggcagcagctggcatgagacctgcttcatctgccaccgctgccagcagccaattggaaccaagagtttcatccccaaagacaatcagaatttctgtgtgccctgctatgagaaacaacatgccatgcagtgcgttcagtgcaaaaagcccatcaccacgggaggggtcacttaccgggagcagccctggcacaaggagtgcttcgtgtgcaccgcctgcaggaagcagctgtctgggcagcgcttcacagctcgcgatgactttgcctactgcctgaactgcttctgtgacttgtatgccaagaagtgtgctgggtgcaccaaccccatcagcggacttggtggcacaaaatacatctcctttgaggaacggcagtggcataacgactgctttaactgtaagaagtgctccctctcactggtggggcgtggcttcctcacagagagggacgacatcctgtgccccgactgtgggaaagacatctgaattcaacacagagaagttgctgcttgtgatctcacacacagatttttatgttttctttctcacccaggcaatcttgccttctggtttcttccagccacattgagactttcttctagtgcttttcagtgatactcacgtttgcttaaaccctttagtgctttgtgatagttcagtcccagggaaagagaaaactcgccctaggccctaggtgggaagatggtttgaaatttttgtaatcgagtaaggcacacccaaatgtaaaaatccttttgaatgatgcctttataaatctttctctcactgtctatttaagtgcaattaacatatgtcacgaacttgaaagttttctaaactcaataaggtaatgaccagttgttatttacagctctgtaacctcccgttgcgtcaagtctaaaccaagattatgtgacttgcaataaagttattcagaacagaa

SEQ ID NO: 135257 - DNA, 1531 bp, Homo sapiens
  Payload ID: 6429
  Gene Symbol: FHL2
  Gene Name: four and a half LIM domains 2
  Uniprot ID: Q14192
  ENST ID: ENST00000393353
  CDS Start-End: 235-1074
actcggccggcagcggagccgcagccaccagccgcccgcgccctccagccccgtccgggagtccccggcccgctgcggtgccgtgagtacctccaaccccctgcgccccggagggaggccgaggggcttagccaccagggctcggaagtgggggccgaatccggtgcgagacccaaggagaggggagcagagccggagttggggagactggttgctgaaaagccaggagtcaaaatgactgagcgctttgactgccaccattgcaacgaatctctctttggcaagaagtacatcctgcgggaggagagcccctactgcgtggtgtgctttgagaccctgttcgccaacacctgcgaggagtgtgggaagcccatcggctgtgactgcaaggacttgtcttacaaggaccggcactggcatgaagcctgtttccactgctcgcagtgcagaaactcactggtggacaagccctttgctgccaaggaggaccagctgctctgtacagactgctattccaacgagtactcatccaagtgccaggaatgcaagaagaccatcatgccaggtacccgcaagatggagtacaagggcagcagctggcatgagacctgcttcatctgccaccgctgccagcagccaattggaaccaagagtttcatccccaaagacaatcagaatttctgtgtgccctgctatgagaaacaacatgccatgcagtgcgttcagtgcaaaaagcccatcaccacgggaggggtcacttaccgggagcagccctggcacaaggagtgcttcgtgtgcaccgcctgcaggaagcagctgtctgggcagcgcttcacagctcgcgatgactttgcctactgcctgaactgcttctgtgacttgtatgccaagaagtgtgctgggtgcaccaaccccatcagcggacttggtggcacaaaatacatctcctttgaggaacggcagtggcataacgactgctttaactgtaagaagtgctccctctcactggtggggcgtggcttcctcacagagagggacgacatcctgtgccccgactgtgggaaagacatctgaattcaacacagagaagttgctgcttgtgatctcacacacagatttttatgttttctttctcacccaggcaatcttgccttctggtttcttccagccacattgagactttcttctagtgcttttcagtgatactcacgtttgcttaaaccctttagtgctttgtgatagttcagtcccagggaaagagaaaactcgccctaggccctaggtgggaagatggtttgaaatttttgtaatcgagtaaggcacacccaaatgtaaaaatccttttgaatgatgcctttataaatctttctctcactgtctatttaagtgcaattaacatatgtcacgaacttgaaagttttctaaactcaataaggtaatgaccagttgttatttacagctctgtaacctcccgttgcgtcaagtctaaaccaagattatgtgacttgcaataaagttattcagaacagaa

SEQ ID NO: 135258 - DNA, 1367 bp, Homo sapiens
  Payload ID: 6429
  Gene Symbol: FHL2
  Gene Name: four and a half LIM domains 2
  Uniprot ID: Q14192
  ENST ID: ENST00000408995
  CDS Start-End: 106-945
ctcggccggcagcggagccgcagccaccagccgcccgcgccctccagccccgtccgggagtccccggcccgctgcggtgccgttgctgaaaagccaggagtcaaaatgactgagcgctttgactgccaccattgcaacgaatctctctttggcaagaagtacatcctgcgggaggagagcccctactgcgtggtgtgctttgagaccctgttcgccaacacctgcgaggagtgtgggaagcccatcggctgtgactgcaaggacttgtcttacaaggaccggcactggcatgaagcctgtttccactgctcgcagtgcagaaactcactggtggacaagccctttgctgccaaggaggaccagctgctctgtacagactgctattccaacgagtactcatccaagtgccaggaatgcaagaagaccatcatgccaggtacccgcaagatggagtacaagggcagcagctggcatgagacctgcttcatctgccaccgctgccagcagccaattggaaccaagagtttcatccccaaagacaatcagaatttctgtgtgccctgctatgagaaacaacatgccatgcagtgcgttcagtgcaaaaagcccatcaccacgggaggggtcacttaccgggagcagccctggcacaaggagtgcttcgtgtgcaccgcctgcaggaagcagctgtctgggcagcgcttcacagctcgcgatgactttgcctactgcctgaactgcttctgtgacttgtatgccaagaagtgtgctgggtgcaccaaccccatcagcggacttggtggcacaaaatacatctcctttgaggaacggcagtggcataacgactgctttaactgtaagaagtgctccctctcactggtggggcgtggcttcctcacagagagggacgacatcctgtgccccgactgtgggaaagacatctgaattcaacacagagaagttgctgcttgtgatctcacacacagatttttatgttttctttctcacccaggcaatcttgccttctggtttcttccagccacattgagactttcttctagtgcttttcagtgatactcacgtttgcttaaaccctttagtgctttgtgatagttcagtcccagggaaagagaaaactcgccctaggccctaggtgggaagatggtttgaaatttttgtaatcgagtaaggcacacccaaatgtaaaaatccttttgaatgatgcctttataaatctttctctcactgtctatttaagtgcaattaacatatgtcacgaacttgaaagttttctaaactcaataaggtaatgaccagttgttatttacagctctgtaacctcccgttgcgtcaagtctaaaccaaga

SEQ ID NO: 135259 - DNA, 1601 bp, Homo sapiens
  Payload ID: 6429
  Gene Symbol: FHL2
  Gene Name: four and a half LIM domains 2
  Uniprot ID: Q14192
  ENST ID: ENST00000409807
  CDS Start-End: 336-1175
tcagcctcagtgactcaggcagcctcctttgtcagcaccgggcctgagtcgctaagcggctctctgactcagatgccctgaggtacaaagttccttgagcttgggtgaatggaaacattagacattgggttcttctgtgcggttttattatgagaatttgatcaaagccacatttattaagtgtccatctcaagttgcattatactgagttcgcttcctcaagatgaccatctgaaacaaaacacgtgtgctttctctagtggctgagaactgtgtcttcctggagactaggctggcattttgactttggggttgctgaaaagccaggagtcaaaatgactgagcgctttgactgccaccattgcaacgaatctctctttggcaagaagtacatcctgcgggaggagagcccctactgcgtggtgtgctttgagaccctgttcgccaacacctgcgaggagtgtgggaagcccatcggctgtgactgcaaggacttgtcttacaaggaccggcactggcatgaagcctgtttccactgctcgcagtgcagaaactcactggtggacaagccctttgctgccaaggaggaccagctgctctgtacagactgctattccaacgagtactcatccaagtgccaggaatgcaagaagaccatcatgccaggtacccgcaagatggagtacaagggcagcagctggcatgagacctgcttcatctgccaccgctgccagcagccaattggaaccaagagtttcatccccaaagacaatcagaatttctgtgtgccctgctatgagaaacaacatgccatgcagtgcgttcagtgcaaaaagcccatcaccacgggaggggtcacttaccgggagcagccctggcacaaggagtgcttcgtgtgcaccgcctgcaggaagcagctgtctgggcagcgcttcacagctcgcgatgactttgcctactgcctgaactgcttctgtgacttgtatgccaagaagtgtgctgggtgcaccaaccccatcagcggacttggtggcacaaaatacatctcctttgaggaacggcagtggcataacgactgctttaactgtaagaagtgctccctctcactggtggggcgtggcttcctcacagagagggacgacatcctgtgccccgactgtgggaaagacatctgaattcaacacagagaagttgctgcttgtgatctcacacacagatttttatgttttctttctcacccaggcaatcttgccttctggtttcttccagccacattgagactttcttctagtgcttttcagtgatactcacgtttgcttaaaccctttagtgctttgtgatagttcagtcccagggaaagagaaaactcgccctaggccctaggtgggaagatggtttgaaatttttgtaatcgagtaaggcacacccaaatgtaaaaatccttttgaatgatgcctttataaatctttctctcactgtctatttaagtgcaattaacatatgtcacgaacttgaaagttttctaaactcaataaggtaatgaccagttgttatttacagctctgtaacctcccgttgcgtcaagtctaaaccaagattat

SEQ ID NO: 135260 - DNA, 4881 bp, Homo sapiens
  Payload ID: 6429
  Gene Symbol: FHL2
  Gene Name: four and a half LIM domains 2
  ENST ID: ENST00000409177
  CDS Start-End: 123-1310
actttggttttcccgccctggaggggaatccaagatgtctaactagtcttctggccccgagagggagaggtggggataggaccttcctttagtcccctccgtagtggaacgaaggattctttatggtcatctgtggtgttcatttcgtaaagaagcatctgcagggtaagaaggaaaaacgtccaccttgcaaatatatcccaggcacatgcctcctgagaagtgaccccctcctccctccgcctcccccggcacgtcctggggcttctccagtctcccgctcctgggaccaggcagagatcccggcgtgggcagacccctgccaccgcgcccaggcctcgtccgaaactcgcgcccgagagcccacgccggaggcgacgctcccgataactactgtgctcccaagacccggagggcacgaagaaaggagccctggcaaacaaagggttgctgaaaagccaggagtcaaaatgactgagcgctttgactgccaccattgcaacgaatctctctttggcaagaagtacatcctgcgggaggagagcccctactgcgtggtgtgctttgagaccctgttcgccaacacctgcgaggagtgtgggaagcccatcggctgtgactgcaaggacttgtcttacaaggaccggcactggcatgaagcctgtttccactgctcgcagtgcagaaactcactggtggacaagccctttgctgccaaggaggaccagctgctctgtacagactgctattccaacgagtactcatccaagtgccaggaatgcaagaagaccatcatgccaggtacccgcaagatggagtacaagggcagcagctggcatgagacctgcttcatctgccaccgctgccagcagccaattggaaccaagagtttcatccccaaagacaatcagaatttctgtgtgccctgctatgagaaacaacatgccatgcagtgcgttcagtgcaaaaagcccatcaccacgggaggggtcacttaccgggagcagccctggcacaaggagtgcttcgtgtgcaccgcctgcaggaagcagctgtctgggcagcgcttcacagctcgcgatgactttgcctactgcctgaactgcttctgtgacttgtatgccaagaagtgtgctgggtgcaccaaccccatcagcggacttggtggcacaaaatacatctcctttgaggaacggcagtggcataacgactgctttaactgtaagaagtgctccctctcactggtggggcgtggcttcctcacagagagggacgacatcctgtgccccgactgtgggaaagacatctgaattcaacacagagaagttgctgcttgtgatctcacacacagatttttatgttttctttctcacccaggcaatcttgccttctggtttcttccagccacattgagactttcttctagtgcttttcagtgatactcacgtttgcttaaaccctttagtgctttgtgatagttcagtcccagggaaagagaaaactcgccctaggccctaggtgggaagatggtttgaaatttttgtaatcgagtaaggcacacccaaatgtaaaaatccttttgaatgatgcctttataaatctttctctcactgtctatttaagtgcaattaacatatgtcacgaacttgaaagttttctaaactcaataaggtaatgaccagttgttatttacagctctgtaacctcccgttgcgtcaagtctaaaccaagattatgtgacttgcaataaagttattcagaacagaatcttttgccaggcacagagtgtgaaatcatgattacaggtcgaggcactgagtctaagtaacactttattgcatggtcccatggtcactgtatgaagtgcagttccaatgttccaatggcctggggcattgccaactggaacagcatcacaccctttaaaggaagccttcggctgggcacggtggctcacgcctgtaatcccagcactttgggaggccaaggcgggtggatcatgaggtcaggagatcaagaccatcctggctaacatggtgaaaccccgtctctacgaaaaatacaaaaaattagccgggtgtggtggtgagcgcctgtagtcccagctactcgggaggctgaggcaggagaatggcatgaacccgggaggcagagcttgcagtgagctgagatggcaccactgaactccagcctggaagacaaagagactccgtctcaaaaaaaaaaagccttcagtcagcaccaggcacctcttccttgctaccttctctcccttttttttttttttttttgagacagagtctcgctctgtcgcccaggctaaagtgcaatggcacaatctcagctcactgcaacctccacttcccgcgttcaagcgattctcctgccctcagcctcctgagtagctgggattacaggcacccaccattatgcccggctaatttttgtatttttagtagagatggggtttcaccatgttaggctggtcttgaactcctgacctcaggtgatccacctgcctcggtcccccaaagtgctgggattataggcatgagccaccgcacccagctaccttctctgtctttcccatactctttctcttggaatgtaatcctctgcatttgacacagtaacataaactgacagtgaagccaattttcaggtcatttttcttggcagagcttatcggctctgtcccagtgttatggatccacatcttacaccgacttccataaagtgaaagattgcacaaggacataagcaacttgaggccagagacgacatcctgttcatctttatgttctcaacaccctcgcaactgagggcacactgggagccttcagtgtttctgaaaagggcagtaaagcaggagagacacacagtcattacagtaaaaataacattctgagctactagtgtggcagtagtctgtggaataatctcagatagcagtatacagttgggaagcacggagccaatgtatgggatagaacattgcacagttctctttagaatgggagcatcagtgacctttttgtccttagttttctaagacaatgcaatataataaaatgataggctgagcaacagaaaaatttggtggaaatcaagtctgatatatgctgagcatatgtgaaatcagtttcttaatctgagtgttagtcactgttagaatgtttgataatgtctggaatgagtcttttggttttatagttgacttgaggttttgcttaaaaagaataatttcatcctttgttagttgttttgctgttttctacttcataatataaaagtaaaagcactccaaatttcattttggaacatcttacttgttcctcattaaaaccatagactctcccaaccttaaattacccattctaaaattaatggttagggggaattccacttctagtaaatagctccaattggactaattctcctccaaattaacagtcattctggacaaaatatttatttaattgttaagaacactggagcacgatccaaagcaggcagatattggagggcagtagacacttggaagaagagaacgacactgggtgattttcctgtttcggccttttatccaatggcaggcccccgccagggatctaaaactctgttaggaaacctgcagtcttactggcctgaggaaccagaggccagagttcgggacaaacagcctctggaaagtgaggaagaaaatcctgaaaaggagagccccaagttcgtcgcatgaacttagaaatttctggctgacaactgaaccgtgtatacttaggccagactccaagcagcccagccaaggctaaaagcattgactgacaggactttacagatagtggtttgcagggcttagctgaccgaccctcttcctactgaaggaaattacttgtatataaaccacacaacacaaagtctctgaaaatttccccagaagcatacaacaaataaacattcattcaggaaaatccactactaagtcttagaaagaacagtgagtctgtggcatttgagccacagcctcatcctatcccatccccactccccagcttcatgtgacaaactctattctggaccaatgcagccaaaaattaaggggtctctcttcctccagctaccagtctagggctttgccccaggtgcgacaggctgagaatcgtagagctccaattgcccctaccctagcctgcttagtgcggaggctccacattgggaggggcaatctgagaagaccagcggctatcaacccactcacagagaagggatgtcagtcctggagaagcaggctgctgtccagcccccagaggagatccaggctctgagactggtaacccagcagttatgcccaaggggactggtatttggtacggagaacgagaaatctttgcctaaggggattgtcaaaaacaataagacatcttaccagtgagccattaaggaaggggctggtaactccatgctattagtagcaaaaagcaaaatgacagaccagccagaagtttaacacagaaaaccagagaaagagatagccaagaagagccctcctggaatctggtttatccttgaggttcgggaagtatgtatggacagggctgtatccactcaggagcaatcagatgtgaaacaaacttgaaagcattctctaaggcatacacagatccatcagcaaagagcagaaatcttattagctcaaagtgcttaagcagaacctctgaccaaacactggctgaacacataaatgtgtttgttcaaagaactaaaggaaatcatatttaaaaaaggaaggtaaaggaacaattacagttgttcctccatatccatggattcctcatctgtggattcaaccaactgtggatcaaaagtatttaggaaaaaaaa

SEQ ID NO: 135261 - DNA, 574 bp, Homo sapiens
  Payload ID: 6429
  Gene Symbol: FHL2
  Gene Name: four and a half LIM domains 2
  ENST ID: ENST00000447958
  CDS Start-End: 516-574
tttattaagtgtccatctcaagttgcattatactgagttcgcttcctcaagatgaccatctgaaacaaaacacgtgtgctttctctagtggctgagaactgtgtcttcctggagactaggctggcattttgactttgggacggagtctcgctttgtcgcccaggctggagtgcagtggcacgatctcagctcactgcaagctctacctcttggttcacgccattctcctgccccagcctcccaagtagctgggactacaggtgcccgccaccacacccggataattttttttttgtatttttagtagagatggggtttcaccgtgttagccaggatggtctcaatctcctgacctcgtgtttcacccgcctcagcctcccaaagtgctgggattacaggcgtgagccaccgcacctggccagattttttttgtttttgtttttttctgtcctggtcctgtagaatcagaggaagtggaaaacacatatcaggttgctgaaaagccaggagtcaaaatgactgagcgctttgactgccaccattgcaacgaatctctctttggcaagaagtacat

SEQ ID NO: 135262 - DNA, 886 bp, Homo sapiens
  Payload ID: 6429
  Gene Symbol: FHL2
  Gene Name: four and a half LIM domains 2
  ENST ID: ENST00000452732
  CDS Start-End: 76-240
tggctgagaactgtgtcttcctggagactaggctggcattttgactttggggttgctgaaaagccaggagtcaaaatgactgagcgctttgactgccaccattgcaacgaatctctctttggcaagaagtacatcctgcgggaggagagcccctactgcgtggtgtgctttgagaccctgttcgccaacacctgcgaggagtgtgggaagcccatcggctgtgactgcaaggcatgctgatgtgctctttcctccatctggggacttaatgaccggagcactggctgtggtgacatctagtggctttgctttcctgttgaccttggagatttctctctcagtttttcttgaaggacttgtcttacaaggaccggcactggcatgaagcctgtttccactgctcgcagtgcagaaactcactggtggacaagccctttgctgccaaggaggaccagctgctctgtacagactgctattccaacgagtactcatccaagtgccaggaatgcaagaagaccatcatgccaggtacccgcaagatggagtacaagggcagcagctggcatgagacctgcttcatctgccaccgctgccagcagccaattggaaccaagagtttcatccccaaagacaatcagaatttctgtgtgccctgctatgagaaacaacatgccatgcagtgcgttcagtgcaaaaagcccatcaccacgggaggggtcacttaccgggagcagccctggcacaaggagtgcttcgtgtgcaccgcctgcaggaagcagctgtctgggcagcgcttcacagctcgcgatgactttgcctactgcctgaactgcttctgtgacttgtatgccaagaagtgtgctgggtgcaccaaccccatcagcgg

SEQ ID NO: 135263 - DNA, 1876 bp, Homo sapiens
  Payload ID: 6429
  Gene Symbol: FHL2
  Gene Name: four and a half LIM domains 2
  ENST ID: ENST00000530340
  CDS Start-End: 129-563
agggtacgggccgggaccgccgcagcccggggcgggggcacggcaaccgcgaggcctgggggcgcccgccccccgcgccccacgcccggtgccagcgagccgaggcgtgcatctccttatatggtcaaatgacacggcggggtttctcgagggcgggagctgcgcagcgctccactcggccggcagcggagccgcagccaccagccgcccgcgccctccagccccgtccgggagtccccggcccgctgcggtgccgtgagtacctccaaccccctgcgccccggagggaggccgaggggcttagccaccagggctcggaagtgggggccgaatccggtgcgagacccaaggagaggggagcagagccggagttggggagactgtggctgagaactgtgtcttcctggagactaggctggcattttgactttgggacggagtctcgctttgtcgcccaggctggagtgcagtggcacgatctcagctcactgcaagctctacctcttggttcacgccattctcctgccccagcctcccaagtagctgggactacaggttgctgaaaagccaggagtcaaaatgactgagcgctttgactgccaccattgcaacgaatctctctttggcaagaagtacatcctgcgggaggagagcccctactgcgtggtgtgctttgagaccctgttcgccaacacctgcgaggagtgtgggaagcccatcggctgtgactgcaaggacttgtcttacaaggaccggcactggcatgaagcctgtttccactgctcgcagtgcagaaactcactggtggacaagccctttgctgccaaggaggaccagctgctctgtacagactgctattccaacgagtactcatccaagtgccaggaatgcaagaagaccatcatgccaggtacccgcaagatggagtacaagggcagcagctggcatgagacctgcttcatctgccaccgctgccagcagccaattggaaccaagagtttcatccccaaagacaatcagaatttctgtgtgccctgctatgagaaacaacatgccatgcagtgcgttcagtgcaaaaagcccatcaccacgggaggggtcacttaccgggagcagccctggcacaaggagtgcttcgtgtgcaccgcctgcaggaagcagctgtctgggcagcgcttcacagctcgcgatgactttgcctactgcctgaactgcttctgtgacttgtatgccaagaagtgtgctgggtgcaccaaccccatcagcggacttggtggcacaaaatacatctcctttgaggaacggcagtggcataacgactgctttaactgtaagaagtgctccctctcactggtggggcgtggcttcctcacagagagggacgacatcctgtgccccgactgtgggaaagacatctgaattcaacacagagaagttgctgcttgtgatctcacacacagatttttatgttttctttctcacccaggcaatcttgccttctggtttcttccagccacattgagactttcttctagtgcttttcagtgatactcacgtttgcttaaaccctttagtgctttgtgatagttcagtcccagggaaagagaaaactcgccctaggccctaggtgggaagatggtttgaaatttttgtaatcgagtaaggcacacccaaatgtaaaaatccttttgaatgatgcctttataaatctttctctcactgtctatttaagtgcaattaacatatgtcacgaacttgaaagttttctaaactcaataaggtaatgaccagttgttatttacagctctgtaacctcccgttgcgtcaagtctaaaccaagattatgtgacttgcaataaagttattcagaacagaa

SEQ ID NO: 135264 - DNA, 759 bp, Homo sapiens
  Payload ID: 6429
  Gene Symbol: FHL2
  Gene Name: four and a half LIM domains 2
  ENST ID: ENST00000607522
  CDS Start-End: 140-337
agctggctggcagctgcacagaaggttggggccatccaaccaggcagtccgcctgcacagcagctgtccctgctcatcgggctggaggacagaagacagaaccctaaaaccacaggttgctgaaaagccaggagtcaaaatgactgagcgctttgactgccaccattgcaacgaatctctctttggcaagaagtacatcctgcgggaggagagcccctactgcgtggtgtgctttgagaccctgttcgccaacacctgcgaggagtgtgggaagcccatcggctgtgactgcaaggtacctgctgcgggcctctgcgggtccccggcgctcccctaggaaacacgggtttctctgtggtttgtgctgaagccctgatccaccactgaagtctgtctcttgagccccctctgaggggcgtggaccctgcgtgtagcctttcggaagcttcttccctctagcgaatgtgatctctgcccacaagcactgggtgagggccttgccaggacttttgtgcttagtatctctaagtacattttctgtattctagcaattagtgcccttatctaactacccagctgcctaccaatactggaactttcttaagggtggtgctctcttcctcttgtctgtttgccccgtggtgagtaacgtggagcaggtgctgtgctcagtcaatatttgatgaatgaatgtgtacatgagagaaccagagttggttcctggataaatgggcacataaaagcacaaagtccttggaa

SEQ ID NO: 135265 - DNA, 1647 bp, Homo sapiens
  Payload ID: 6430
  Gene Symbol: FHL3
  Gene Name: four and a half LIM domains 3
  Uniprot ID: Q13643
  ENST ID: ENST00000373016
  CDS Start-End: 170-1012
cacggtccgtctgcagtcggcagcctcgccggcagctcgctcggcccccgcttggcccggcccgcaggtaggagccgccgagggacgcggcgcccggttcccggccccgcctgcgccgcgcgctccccgctcccgccgcccgcttcgagggttctctccccttgccaccatgagcgagtcatttgactgtgcaaaatgcaacgagtccctgtatggacgcaagtacatccagacagacagcggcccctactgtgtgccctgctatgacaatacctttgccaacacctgtgctgagtgccagcagcttatcgggcatgactcgagggagctgttctatgaagaccgccatttccacgagggctgcttccgctgctgccgctgccagcgctcactagccgatgaacccttcacctgccaggacagtgagctgctctgcaatgactgctactgcagtgcgttttcctcgcagtgctccgcttgtggggagactgtcatgcctgggtcccggaagctggaatatggaggccagacatggcatgagcactgcttcctgtgcagtggctgtgaacagccactgggctcccgttcttttgtgcccgacaagggtgctcactactgcgtgccctgctatgagaacaagtttgctcctcgctgcgcccgctgcagcaagacgctgacacagggtggagtgacataccgtgatcagccgtggcatcgagaatgtctggtctgtaccggatgccagacgcccctggcagggcagcagttcacctcccgggatgaagatccctactgtgtggcctgttttggagaactctttgcacctaagtgcagcagctgcaagcgccccatcgtaggactcggtggaggcaagtatgtgtcctttgaagaccgacactggcaccacaactgcttctcctgcgcccgctgctctacctccctggtgggccagggcttcgtaccggatggagaccaagtgctctgccagggctgtagccaggcagggccctaagccagggctcctggacccaggctttcccataccacgggcccaggactgtggctccttttctaaaccacctctgggactcagctccccccgccaaaaaaaatgggtctccttctgggctccaggattgtctccccactccagcatccccaaactggtactccctgacccagggccccaaacctgggctcttacagagcctccatgagtcaagccccctccccacacctggactccagaattcaccctctcccctgcagtctgggttcccagactgagtcctctccccaaatcagggctctagacccgagccctccaaacctggactctgggacttaggcccccttaaatctagacttctctttataggtttcaggtctcctatgggtgcctgggaagtccttgaaagtggactgttctcaggcttgacctgccccaccccatccccgcggttgaggctgtgggggcagcagatcaggagcccactgataaggggccctagggtacagggtgctgcccagcaggtcgccaccgagtgtcttctcattttatttcagctccattttgcccatagatgggcagaggggtgagattggctcatcccccttccagattctgcaataaagcggtgtgaggaa

SEQ ID NO: 135266 - DNA, 2031 bp, Homo sapiens
  Payload ID: 6431
  Gene Symbol: FHL5
  Gene Name: four and a half LIM domains 5
  Uniprot ID: Q5TD97
  ENST ID: ENST00000326771
  CDS Start-End: 381-1235
tgcaagtccagagagcagggaactaccttgagtattctactcaaacttatgtctcagagttccccaatttcccaagaagggagagatagaggccacaatccagggggccatctcttaaggtaccaataattttgcagcccagtaggagtcatgtacacggtataagacttggaggaaatgcagggacccttctgttttctcctgcaaagttgaaaaagctgcatgcagttggaagggatcttcagatggtgctggtgactttctgttccttttggagttgacatgcatgtggattggaggaaaaataatcaacatatattctcctttcgtactgtttaaatcacaggaagaagcggctttaagacaaagatcaaaccaaaatgacaactgctcacttttactgtcaatactgcacagcatcacttcttgggaagaaatatgtactaaaggatgacagtccatactgtgttacatgttatgatcgtgtattttctaactattgcgaggaatgcaaaaaaccaattgaatctgattctaaggatctttgttacaaagaccggcactggcatgaaggatgcttcaagtgcaccaaatgcaatcactctttggtggaaaagccttttgctgccaaggatgagcgcctgctgtgcacggagtgctattctaacgagtgctcctccaagtgcttccactgcaagaggaccatcatgcctggttcccgcaaaatggaatttaagggaaactactggcatgaaacctgttttgtgtgtgagaattgccgacaacctatagggacaaagcctttgatctccaaagagagtggcaattattgtgtgccatgttttgagaaggagtttgctcactactgcaacttttgtaagaaggtgataacttcaggtgggataacattttgtgaccagctatggcataaagagtgttttctgtgtagtggctgtaggaaagatctctgtgaagaacagttcatgtccagagacgactatccattctgcgtggactgctacaaccatctttatgccaacaagtgtgtagcctgttccaaacccattagtggtctcacaggtgccaagtttatctgctttcaagacagccagtggcatagcgaatgctttaactgcgggaaatgctctgtctccttggtgggtaaaggcttcctgacccagaacaaggaaatcttctgccaaaaatgtggctccggaatggacactgacatctaggagacagtccttgcccacctaaaatccattttgccttcgttgtcactaaagccagaactcagttgcggtcttatttttgacttaagttttagaaaatattcatgtagtttagagtggaaaagtttttgcacacattttgatcgaactatattctaagcacacaaaaagcacagtagaacagaaatgaatatatgctaaatcacaaagacaactctccttgcaaaatactgcactctgctgttagaagcagaggaaaatatctcttcataatcaaatatatgacatatacctaggagctgtggatgtaattactgaagaatgaggtttttcatacctgaagagtaaaagaaaaactaagagatcaaactgagaggtatacatgaggctagtgtttgcattcctggttatatgtaatgtgataaattagctatgaatggtaaaagaacaaaactgatcagagtaaattcattagcaattatcacatttaagaattgttatcatttaaaaatcatcctttttttcacacatactgactgtagaattaaaaaacaaagctacaatttgccctcatacacactgcttccacagcttgctagttctgtgtttactcaatggaatatgagaactgaggacattatggctctcataatctgcataggtataaagaggatcatttctacctagggatagccaaagcatgggtttcaacacgttttgtattaaatatattttcaaagtccacagtgatttttctaaacgcttacagattccatgaaataaaagtctattctttcaa

SEQ ID NO: 135267 - DNA, 779 bp, Homo sapiens
  Payload ID: 6431
  Gene Symbol: FHL5
  Gene Name: four and a half LIM domains 5
  ENST ID: ENST00000450218
  CDS Start-End: 150-779
tgcaagtccagagagcagggaactaccttgagtattctactcaaacttatgtctcagagttccccaatttcccaagaagggagagatagaggccacaatccagggggccatctcttaaggtaccaataattttgcaggatcaaaccaaaatgacaactgctcacttttactgtcaatactgcacagcatcacttcttgggaagaaatatgtactaaaggatgacagtccatactgtgttacatgttatgatcgtgtattttctaactattgcgaggaatgcaaaaaaccaattgaatctgattctaaggatctttgttacaaagaccggcactggcatgaaggatgcttcaagtgcaccaaatgcaatcactctttggtggaaaagccttttgctgccaaggatgagcgcctgctgtgcacggagtgctattctaacgagtgctcctccaagtgcttccactgcaagaggaccatcatgcctggttcccgcaaaatggaatttaagggaaactactggcatgaaacctgttttgtgtgtgagaattgccgacaacctatagggacaaagcctttgatctccaaagagagtggcaattattgtgtgccatgttttgagaaggagtttgctcactactgcaacttttgtaagaaggtgataacttcaggtgggataacattttgtgaccagctatggcataaagagtgttttctgtgtagtggctgtaggaaagatctctgtgaagaacagttcatgtccagagacgactatccattctgc

SEQ ID NO: 135268 - DNA, 1904 bp, Homo sapiens
  Payload ID: 6431
  Gene Symbol: FHL5
  Gene Name: four and a half LIM domains 5
  Uniprot ID: Q5TD97
  ENST ID: ENST00000541107
  CDS Start-End: 186-1040
aggaagcaggcagagcggggaaggctgagtccacactgcaagtccagagagcagggaactaccttgagtattctactcaaacttatgtctcagagttccccaatttcccaagaagggagagatagaggccacaatccagggggccatctcttaaggtaccaataattttgcaggatcaaaccaaaatgacaactgctcacttttactgtcaatactgcacagcatcacttcttgggaagaaatatgtactaaaggatgacagtccatactgtgttacatgttatgatcgtgtattttctaactattgcgaggaatgcaaaaaaccaattgaatctgattctaaggatctttgttacaaagaccggcactggcatgaaggatgcttcaagtgcaccaaatgcaatcactctttggtggaaaagccttttgctgccaaggatgagcgcctgctgtgcacggagtgctattctaacgagtgctcctccaagtgcttccactgcaagaggaccatcatgcctggttcccgcaaaatggaatttaagggaaactactggcatgaaacctgttttgtgtgtgagaattgccgacaacctatagggacaaagcctttgatctccaaagagagtggcaattattgtgtgccatgttttgagaaggagtttgctcactactgcaacttttgtaagaaggtgataacttcaggtgggataacattttgtgaccagctatggcataaagagtgttttctgtgtagtggctgtaggaaagatctctgtgaagaacagttcatgtccagagacgactatccattctgcgtggactgctacaaccatctttatgccaacaagtgtgtagcctgttccaaacccattagtggtctcacaggtgccaagtttatctgctttcaagacagccagtggcatagcgaatgctttaactgcgggaaatgctctgtctccttggtgggtaaaggcttcctgacccagaacaaggaaatcttctgccaaaaatgtggctccggaatggacactgacatctaggagacagtccttgcccacctaaaatccattttgccttcgttgtcactaaagccagaactcagttgcggtcttatttttgacttaagttttagaaaatattcatgtagtttagagtggaaaagtttttgcacacattttgatcgaactatattctaagcacacaaaaagcacagtagaacagaaatgaatatatgctaaatcacaaagacaactctccttgcaaaatactgcactctgctgttagaagcagaggaaaatatctcttcataatcaaatatatgacatatacctaggagctgtggatgtaattactgaagaatgaggtttttcatacctgaagagtaaaagaaaaactaagagatcaaactgagaggtatacatgaggctagtgtttgcattcctggttatatgtaatgtgataaattagctatgaatggtaaaagaacaaaactgatcagagtaaattcattagcaattatcacatttaagaattgttatcatttaaaaatcatcctttttttcacacatactgactgtagaattaaaaaacaaagctacaatttgccctcatacacactgcttccacagcttgctagttctgtgtttactcaatggaatatgagaactgaggacattatggctctcataatctgcataggtataaagaggatcatttctacctagggatagccaaagcatgggtttcaacacgttttgtattaaatatattttcaaagtccacagtgatttttctaaacgcttacagattccatgaaataaaagtctattctttcaagtggagctaaccaggataatctttgtccccaaaggcaaacctttaaaataaatagatcattaaatctt

SEQ ID NO: 135269 - DNA, 2450 bp, Homo sapiens
  Payload ID: 6432
  Gene Symbol: FJX1
  Gene Name: four jointed box 1
  Uniprot ID: Q86VR8
  ENST ID: ENST00000317811
  CDS Start-End: 219-1532
acagcgaaatacaaaagcagctgggaagcggcggggactcgagttcccagcgccgggcggagcgccggacagagccccgcagcgccccgcggccgcgatggggccgaagcgcccgaagccccggagcccacaaactgccgggcccgcctcgccgccgggacccgggtgcctgggctcggcttgaagcggcggcggcgcaccggcacagccgcgggagcatgggcaggaggatgcggggcgccgccgccaccgcggggctctggctgctggcgctgggctcgctgctggcgctgtggggagggctcctgccgccgcggaccgagctgcccgcctcccggccgcccgaagaccgactcccacggcgcccggcccggagcggcggccccgcgcccgcgcctcgcttccctctgcccccgcccctggcgtgggacgcccgcggcggctccctgaaaactttccgggcgctgctcaccctggcggccggcgcggacggcccgccccggcagtcccggagcgagcccaggtggcacgtgtcagccaggcagccccggccggaggagagcgccgcggtgcacgggggcgtcttctggagccgcggcctggaggagcaggtgcccccgggcttttcggaggcccaggcggcggcgtggctggaggcggctcgcggcgcccggatggtggccctggagcgcgggggttgcgggcgcagctccaaccgactggcccgttttgccgacggcacccgcgcctgcgtgcgctacggcatcaacccggagcagattcagggcgaggccctgtcttactatctggcgcgcctgctgggcctccagcgccacgtgccgccgctggcactggctcgggtggaggctcggggcgcgcagtgggcgcaggtgcaggaggagctgcgcgctgcgcactggaccgagggcagcgtggtgagcctgacacgctggctgcccaacctcacggacgtggtggtgcccgcgccctggcgctcggaggacggccgtctgcgccccctccgggatgccgggggtgagctggccaacctcagccaggcggagctggtggacctagtacaatggaccgacttaatccttttcgactacctgacggccaacttcgaccggctcgtaagcaacctcttcagcctgcagtgggacccgcgcgtcatgcagcgtgccaccagcaacctgcaccgcggtccgggcggggcgctggtctttctggacaatgaggcgggcttggtgcacggctaccgggtagcaggcatgtgggacaagtataacgagccgctgttgcagtcagtgtgcgtgttccgcgagcggaccgcgcggcgcgtcctggagctgcaccgcggacaggacgccgcggcccggctgctgcgcctctaccggcgccacgagcctcgcttccccgagctggccgcccttgcagacccccacgctcagctgctacagcgccgcctcgacttcctcgccaagcacattttgcactgtaaggccaagtacggccgccggtctgggacttagtgtcaccgggaggaaaagagagagatctggggctggggtatggatgatggggggaagggcggtcgcctctgccactgtcagggaccagccggccaacgcccacccgcaaaggtgtctaaaaacttcagcttttcacccacctgcccctttctttcaatcccacgctgtttcctttcaaagttctgggaggacgaactcaccgaggcgagaagtgtaacattctctccacccagcttataaaaggattctttactgtgccagcacggggattggatccgaagaaactggctactggggtttggcccccgagtggccgtccctgtgggagatgcaccccattcttgggccccccctcattccctttccgaaaaaggaaaacttgcgtttgagccgttgagctaattctgcaattttctaccaaacagagcgctggtggccccggagcagggctgtgacattggctggtggagcccccttcctgtgttctccctttgttccagcgccgcgatggtgagatcactgttccaagcagggggacggctcgcgataggacaaagagagcaggacctccagactctggggagccctgcagaccttgacaatttgcctgactcattcctgacctcttgtcattttggcctgaaggctacaaattcagggtcagctgtatgcactaagtcaaataatgaatttcttcctccctctcgcaaccgaccaaaattttgacaacgatgatgttcaccagaaggaaaaaaaaaaatcagttttatgcactttattttgttttgattttcattttttattaagaaaaaattttattttacagaatttaccttctctgtatatatgtgcataaagtgtggtgtaaatatactaaacaaacttatatttcaataaaagggagtttaaaatttataa

SEQ ID NO: 135270 - DNA, 3538 bp, Homo sapiens
  Payload ID: 6433
  Gene Symbol: FOXL2NB
  Gene Name: FOXL2 neighbor
  Uniprot ID: Q6ZUU3
  ENST ID: ENST00000383165
  CDS Start-End: 132-659
actttttgtaaacgccccgcacagcctggaccggcctgcccccgcccagcgagcctcaggggcccagccgacagccaggctcacgcgcccttgaaatctgccggtactcgctctgcgggctgggctgggagatgacgaggaccccggtggggtctgcccgcacccggccaaagcccaggaagctcgggccccagcgaggaaaggcgctccaagcctcctcgcggctttcagaatccccagccctggtgaagaagaggatgcctgatgcgtgcaccctgggaagggctggaatcggtctccccaagatgtgccttcacatggctgtccggcattcgaaggctcagaaaacagggccgggaatcctgcaacagcggcagaagccgcccgcgcctcgggcttccggcggcccagctctactagggaagcgtcgcggctgctctgaggcaggcagcgcttcgctagaaccactcagctcgtcccgcgccgccgccggctgcctgaaccaggttccgctgtcccctttcctagcgggaccccgaaacacccggcggcttcccgctcctgagcgggagagaatagagcttgctgcaaccctctgcttggagggatggcctctgcggtgcttggctagcaaagggaagcttcactgtgtctattagtacatccccatacactccacgcctcaacaactgtcagcactcactccctcccggcccctcacagggccctttgcacccacacctcagggactcggtgtccctccactcaggtcacgttactccatccacttctctctccttctccctctgtcaactccaaatcccctctagttctccctcccctcctacttctctcacactcaccagctacacgtactaattcagattttgcacatgttggtggaaaacatgtcaagccaatgtgcagaccctaaggcttttcacacgctgctcactttcgcatctcacggtgcagaaggaccaatgggctccaggtttacaagcctgactccgagaagcctgttgattctctgatgtccttggcctgtgattcgggtgactgggctgccacctgggtgttttcatgatgggactgccgcacagaccacagagaagctcaggtactgagcacgttccagatacactttaacatgcacaggccactcacacaggctttatctctgtctcgaaactctgctgagtttgctgctcagaccaacaaggtgcagcagcagacacccacatagcaccaggtctgaagccagtgggtattagtctgcctggttgggattagcaaagtcagttactcacatatgtgcttgggagagaataggggagtggagagagagagagagatattgaggaagaggaaagagaagcgacctcctactctgggaagaactcacacatgagagctgtttcctgttgttaagtgtctcactgagctcccctctttctcccccaggaagggcttgagaggcagtagaccagagctctgggctcctctttaccttgctgatgttggggtatgagtcctccaacaccattttgtcccaaggagtatgtgccccatcgtcaatcaggcagaatgcagggcagttgtcggcctttttcatggtggaggccaactgggaaaaaggcagaagggtctgggtcctgggccaagtgaggccctcttccctccaaagacccgtgggatgctctcagaggcggattctagggtggtgggagctgctgacaagtttcctctgatatccctcatgacatctatggcccaaagccattttgttcagctctgaacagtgagtgccttgccagtaggcctcaggcttgctggggaacatgatgtgttcttaaaagttgccttgttgcctttctccacacccagactgtaagcgctgatgggcagagactctgccctccacttctcactcagtgctccccaccaggatgggcttaatgccttttaatagaattagaaaatggttctgctggacagaattgggaaatgccactttccttataatgaagttataatgaagttagaatttccaagaaagggactgtagctgaggaaaagcggtttgatcattgacagccagctcaggatctgagagttctttgccatttggggttattatagctgcatggccatggtgctgaaccttaggcaagggcaaggacacctccctagttcccagtcatggtgaggacctgtctgaaacattcaaactagactttactggaaacagagaagtctctgcattcagggcagctggcttgcaaggtaaggcctgcagtctccacccgcacgctaacccatgaggggatgccagagagagcccttcccccttggtcctcattcctggctcaattttctcccacaaagcgggcactttctaaagatgataggcaactgccatggaggaaggcagttttagatgcctagctggcacaaagtccagaggaagggagggagaagggctgagttttgtattactgttctacctttggagattttcctcatgccaagatagggtgtgtgtgtgtgtgtgtgtgtatgtgtgtgtgtatgtgtgcactataactttatgaaacactttttttttttttgagacagggtctcactctgttgcccaagctggagtgcagtggtgcaatcttggcttaccgcagtctccacctcccaggctcaagtgatcctcccatctcagcctcagcctcccaagtagctgggactatgggtgtgagccaacacactcagctaattttttttttttttttttggtatttttggtagagacagggttttaccatgtgggcccaactggtcttgagctcctgagctcagggtgatttgcctgcttcaacttcccaaagtgttgggattacaggtgtgagccaccatgcccagtcagttttttattttttatttaaacagttttgggggaacaggtggtttttgcttacatggataagttctttaatggtaatttctgagattttggtgcacttgtcacccgagcattgtacacggtacccagtgtgtaatcttttatccctcatccccctcctacgcttccccccccgagtccccattatataattctttttttcttctttttgagacagagtctcactctgttgcccaggctggagtgcagtggcatgaacttggcttactgcagcctcctgagttcaagtgattctcctgcctgaacctcctgtgtagctgggactacaggcatgcaccaccatgcccagctaatttttgtattttttgtagagatggggtttcaccatgttggccaggctagtcttgaactcctaacctcaagtgatctgcctattttggcctcccaaagtgttgggattacaggcgtgcgccactgcgcctggtccattatgtcattcttatgcctttgcatcttcatagcttagctcccacttataaatgaaaacacaggatatttggttttccatacttgagttacttcacttagtataatggtctccagctccatccaggttgctgtgaa

SEQ ID NO: 135271 - DNA, 974 bp, Homo sapiens
  Payload ID: 6433
  Gene Symbol: FOXL2NB
  Gene Name: FOXL2 neighbor
  ENST ID: ENST00000470680
  CDS Start-End: 132-257
actttttgtaaacgccccgcacagcctggaccggcctgcccccgcccagcgagcctcaggggcccagccgacagccaggctcacgcgcccttgaaatctgccggtactcgctctgcgggctgggctgggagatgacgaggaccccggtggggtctgcccgcacccggccaaagcccaggaagctcgggccccagcgaggaaaggcgctccaagcctcctcgcggctttcagaggaacagaatccccagccctggtgaagaagaggatgcctgatgcgtgcaccctgggaagggctggaatcggtctccccaagatgtgccttcacatggctgtccggcattcgaaggctcagaaaacagggccgggaatcctgcaacagcggcagaagccgcccgcgcctcgggcttccggcggcccagctctactagggaagcgtcgcggctgctctgaggcaggcagcgcttcgctagaaccactcagctcgtcccgcgccgccgccggctgcctgaaccaggttccgctgtcccctttcctagcgggaccccgaaacacccggcggcttcccgctcctgagcgggagagaatagagcttgctgcaaccctctgcttggagggatggcctctgcggtgcttggctagcaaagggaagcttcactgtgtctattagtacatccccatacactccacgcctcaacaactgtcagcactcactccctcccggcccctcacagggccctttgcacccacacctcagggactcggtgtccctccactcaggtcacgttactccatccacttctctctccttctccctctgtcaactccaaatcccctctagttctccctcccctcctacttctctcacactcaccagctacacgtactaattcagattttgcacatgttggtggaaaacatgtcaagccaatgtgcagaccctaaggcttttcacacgctgctcactttcgcatctc

SEQ ID NO: 135272 - DNA, 1681 bp, Homo sapiens
  Payload ID: 6434
  Gene Symbol:
  Gene Name: FP325317.1
  ENST ID: ENST00000539936
  CDS Start-End: 333-830
tggactggggacacagggatagctgagccccagctgggggtggaagctgagacagggacagtcacagaggaacaagatcaagatgcgctttaactgagaagcccccaaggcagaggctgagaatcagaagacatttcagcagacatctacaaatctgaaggacaaaacatggttcaagcatctgggcacaggcggtccacccgtggctccaaaatggtctcctggtccgtgatagcaaagatccaggaaatatggtgcgaggaagatgagaggaagatggagcgagagttcctggctgagttcatgagcacatatgtcatgatggagcccacatgaacgcagctgtgagcttcactaactgtgcactgggccgtgtgccctggaggaagtttccagtctatgtgctggggcagttcctgggctccttcctggcggctgccaccatctacagactcttctacatggccattctccacttttcgggtggagagctgatggtgaccggtcccgttgctacagctggcatttttgccacctaccttcctgatcacatgacattgtggcggggcttcctgaatgaggagtggctgaccgggatgctccagctgtgtctcttcgccatcacggaccgggagaaaaacccagcactgccaggaacacacgcgctggtgataggcatcctcgtggtcatcatcagggtgtcccatggcatgaacacaggatatgccatcaatccatcccgggacctgcccccccgcatcttcaccttcattgctggttggggcaaacaggtcttcaggtacttcccctgcccaggcccattcctttgagattttctgtggggcccctgtgtgttgaggtgtggggggtgatgtgaggggcagcacaggagggtcctgcagagcccccaggtggcctggggagcaggagtgagtcccaacatttccccaggccagtacagatacagatcctgcacctgcactgagtgtcaaccctgtccctgaatcgggctgaggctgaccagggccccgggttgggggtgtttcctgggttagcctgaggatgactcctctgctcaaccagtcttggcccgaggtggatgagggtgctgtcctgggcatcagccccctcagctggcctctgcctcttgcctgcagcaatggggagaacttgtggtgggtgccagtggtggcaccacttctgggtgcctctctaggtggcatcatctacctggtcttcattggctccaccatcccacgggagccactgaaattggaggactctgtggcatatgaagaccatgggataactgtattgcccaagatgggatctcatgaacccatgatctctccccttaccctcatctctatgagccctgccaacagatcttcagtccaccctgccccacccttacatgaatccatggccctagagcacttctaagcagagattatttgtgatcccatcccttccccaataaagagaagcttgtcccacagcagtacccccacttcctgggggcctcctgtggttgggcttccctcctgggttcttccaggagctctagggctatgtcttagcccaaggtgtagaggtgaggcacctcaagtctttcatgccctgggaactggggtgccccagggggagaatggggaagaactgacctgcgccctcagtagga

SEQ ID NO: 135273 - DNA, 1195 bp, Homo sapiens
  Payload ID: 6435
  Gene Symbol: FPGT-TNNI3K
  Gene Name: FPGT-TNNI3K readthrough
  ENST ID: ENST00000370893
  CDS Start-End: 16-471
agggaaggtggggctatggcagctgctagggaccctccggaagtatcgctgcgagaagccacccagcgaaaattgcggaggttttccgagctaagaggcaaacttgtagcacgtggagaattctgggacatagttgcaataacagcggctgatgaaaaacaggaacttgcttacaaccaacagctgtcagaaaagctgaaaagaaaggagttaccccttggagttcaatatcacgtttttgtggatcctgctggagccaaaattggaaatggaggatcaacactttgtgcccttcaatgtttggaaaagctatatggagataaatggaattcttttaccatcttattaattcactctgatgaatggaagaaaaaagtcagtgaatcatatgttatcacaatagaaagattagaagatgacctgcagatcaaggaaaaagaactgacagaactaaggaatatatttgggtaatggattggtgacaggaagaaatgaagaaaaagagaaggcaggaggagaaagaaagacagaaagggcaccttagagtaccattgtctgattatatcctcctctgtgctgcctctaatctttatcaacataacagcacttactacatggtgttgtttttatccatttataggtctatctccccactagtatatgtgttcattaaaggcagctttttttcttatttagccttatttatatttgtacttatttgtaaaacaaactaataacttagggcttaccatatgccagaaatgcttctacgtatctttttgtgcatcagcttatataatcctaatggtgtatatgtaaagtgctttagcacagtgtctggcacatggcaaaccctcaaaaatgttagttaacacttaatcattattgtttatgttaacaaccctctgaagtaagtgttgcaattgccatgttatacctggagaaaatgaggctaatcaaattaaactggcttgaactagattaaacaatttgtatgatttacctaggattgcatccatctttatttgatttcaaaatgtatcatattcataatcttggttatgaatattatacaacctttttgaaaaaactatggaagtgatggctctccacatgtgacttcaaatgttttcaattaaattattttgtttcaatagtttttatcataataaattttaagactatgttttgctaa

SEQ ID NO: 135274 - DNA, 7566 bp, Homo sapiens
  Payload ID: 6435
  Gene Symbol: FPGT-TNNI3K
  Gene Name: FPGT-TNNI3K readthrough
  ENST ID: ENST00000370895
  CDS Start-End: 36-2129
gtgctgtgcggcgcggtctcagggaaggtggggctatggcagctgctagggaccctccggaagtatcgctgcgagaagccacccagcgaaaattgcggaggttttccgagctaagaggcaaacttgtagcacgtggagaattctgggacatagttgcaataacagcggctgatgaaaaacaggaacttgcttacaaccaacagctgtcagaaaagctgaaaagaaaggagttaccccttggagttcaatatcacgtttttgtggatcctgctggagccaaaattggaaatggaggatcaacactttgtgcccttcaatgtttggaaaagctatatggagataaatggaattcttttaccatcttattaattcactctgatgaatggaagaaaaaagtcagtgaatcatatgttatcacaatagaaagattagaagatgacctgcagatcaaggaaaaagaactgacagaactaaggaatatatttggctctgatgaagccttcagtaaagtcaatttaaattaccgcactgaaaatgggctgtctctacttcatttatgttgcatttgtggaggcaagaaatcacatattcgaactcttatgttgaaagggctccgcccatctcgactgacaagaaatggatttacagccttgcatttagcagtttacaaggataatgcagaattgatcacttctctgcttcacagtggagctgatatacagcaggttggatacggtggcctcactgccctccatattgctacaatagctggccacctagaggctgctgatgtgctgttgcaacatggagctaatgtcaatattcaagatgcagtttttttcactccattgcatattgcagcgtactatggacatgaacaggtaactcgccttcttttgaaatttggtgctgatgtaaatgtaagtggtgaagttggagatagacccctccacctagcatctgcaaaaggattcttgaatattgcaaaactcttgatggaagaaggcagcaaagcagatgtgaatgctcaagataatgaagaccatgtcccactccatttctgttctcgatttggacaccatgatatagttaagtatctgctgcaaagtgatttggaagttcaacctcatgttgttaatatctatggagatacccccttacacctggcatgctacaatggcaaatttgaagttgccaaggaaatcatccaaatatcaggaacagaaagtctgactaaggaaaacatcttcagtgaaacagcttttcatagtgcttgtacctatggcaagagcattgacctagtcaaatttcttcttgatcagaatgtcataaacatcaaccaccaaggaagggatgggcacactggattacactctgcttgctaccacggtcacattcgcctggttcagttcttactggataatggagctgatatgaatctagtggcttgtgatcccagcaggtctagtggtgaaaaagatgagcagacatgtttgatgtgggcttatgaaaaagggcatgatgccattgtcacactcctgaagcattataagagaccacaagatgaattgccctgtaatgaatattctcagcctggaggagatggctcctatgtgtctgttccatcacccttggggaagattaaaagcatgacaaaagagaaggcagatattctcctcctaagagctggattgccttcacatttccatcttcagctctcagaaattgagttccatgagattattggctcaggttcttttgggaaagtatataaaggacgatgcagaaataaaatagtggctataaaacgttatcgagccaatacctactgctccaagtcagatgtggatatgttttgccgagaggtgtccattctctgccagctcaatcatccctgcgtaattcagtttgtgggtgcttgcttgaatgatcccagccagtttgccattgtcactcaatacatatcagggggttctctgttctccctccttcatgagcagaagaggattcttgatttgcagtctaaattaattattgcagtagatgttgccaaaggcatggagtaccttcacaacctgacacagccaattatacatcgtgacttgaacaggtatttttttcctaaataatgaactcagaagggtatgactaactgggagtttaagacagatttcagtgaagatacattttagacttattgcagatcagggtactctgtggttaagaggacaggctaccataagcttaggcgatagaaagttttgtcattgtcttttaaggagtagaaagctgtataactgcttctcagggatcttttaaatctatgaagaatattcacaaatatagtaatatctgtaagatgcaccagctaactagttcccaggtcagtaaggtcacatcaagcagtgagctaaatggctattaaaaaaatgatatgtctcctataaagtgaagtgttggagtagctcctgatataaaattatctgaaacgtactttgtgctaccgtaaattcagcttaaccacaacagcttatttacctagttatcaggtaaagaggatttcatgtgaaacaaatataaaatcagagtgttccagtggtggaaccccaagtgacctcaaaacttttcctaaatagtgaaaactttctctgagtaaagtcttataggaaaggccaatatacaaaatggagcagtgttgggtgaaggtaaagtggggaggagaaaactctatttacttcccatttcccactgctaaggagagagattcctgcaccacctctgtggaagcccaaaggtgctgtagagaatagttggacaaacactgatttagtttatgaagcaagtcagattattccacatcaatcactttcattttatgatagtcaataagattcaaatagattgtgtatatagtcctttatagaagctttacagttctgaagctagtaaatattgattactctagtcagtcatttggtcaacaactatgtttgaacatatatgtttaaagactattttcagcacagtagagcttacaaagtgggacgttcatagactacattcagggagttttcacactctatgtagaggagaaaaatatttacctaaatgtatttgaggtataaaataataagttatatacaagatttagtacaaaaatttcaggaacaagaatattaattgcttctgaggattctaacaacaactctatggaagggatgacatatgagcttggtcctgaaagatgggtagtttggaagagcatcctataggcttagggaagacataataaaatgcatagagattagaaagttaaaggtatatataggaactatagtttcattttagtatacaaagtgtataaatgtatgtaatgtgtataatgtaagaagtggacaactggaaaaaggtatagaaaaatagaaaaagagcacagacaccagtgaatgctattactaaggtatttcagattttttttcctgtaaggagaccataaagaggtttgagctgaaaatcacaaatttggagctatattattgaaagatgaatccagcatctggtaaaatatcaacttgaagggaaagtcaagaaactagtgagggagttgttgcagtaatctagataagaagtaacgaaaagcagaatttcaccggtggcagtggatatgaaaggaagagacatgtcaactttaaataacaaaatacagagtttattcaagctcaaagcttgaggatcattacccatgagcatggactcaagttgtcctgaatacatactccaattagcagtggttacaagatagtttttaagaaaaaaaaaaaaaaaaaaaaaagcagtttttaagttgtttacaaagaatttacataaataatataaactattgattggttgtaccttgttctttaatcaaaaattataggaacataaagataatgggtaacacagctagtcaggaacaaaatacctttacactattgccccagggaaatggagattggagagatgactaaagtcccatgctcatgtctctctgggcctgataaattttgtgttgctcatacagctcagactgccctcagctatttttctcttctcagatagatatgaaagataggagagataaatcagatacgtgagtggtagaatcttaaatattgaaagtaaatgtaaataagtctcaatctatttataattatttactagttttcacataaaagtcatttcttaatttttagctattagttctttacctttcttaatttcaaaccaaacatttacgttaacaaacatttaactatttcagacacagatttagatgataaattagcataatataaaccgatgattttgagttttaagagtattatctttccatcccaaacatttttgcacatggtattaaaacaaatgagtaatcattgcaataagtaatcattgcaagttttctctagctgtaactcttcatttgtggggccattatatattctgttgccctgagttatgtgcaagttgttaccaccagttgtcaggcaggaccaaaaatataaatgttgattaaaataaaaacagaacatttactatatagctgatataagtttatatctacaatttttgctgcctctaatctaacctaaatgcttaattgcatcaaaaagtttttaaatcttatgaaacaccattttgtaggtgccttcattatgacagagtcccaaactattgtatcaattatttgtagactattttctatcaatctttaatctggtagcaacagcaaaacattgtttttcagatgcatgcatatgtagcattctacatggctcaaaagagcctgggtcctttccctcagagagcttactgcactacttggcaaataagacatatgcccagaaagcaactagagttccactttatatagaaaataattaagggtcaaaatgatgaaagagcaactttcagaggatttcaagtaagtcaaagatgaaagttgagtagaatgcttcttagcctatgtggagctaaacgtagagtttgaagaacaggcattaatcttttctcaggcttttcacagcatactaacctctgctttagcatggtacctagaaagtctcactcaaagaagtagagagaaagatgcacatcagagactgggaaactcatacacttatttgcatttgtattgacatggtgtgtttatatttttatattccccattagcctgggcaagtcagggtttcaggggcagagactgctctcttcatctcacattttctgaactaagcattgtgtcttacacagagaagatgtctaattaatattttttaactgaaccaaattattgtggatttctatgagtgtcatttcacgaagcaatgacctaattggtataagtatgactacttgtgtatagcatccaacttgcccaataacttttataattttaaagggaaaaggatgtttgagcccacgggatggggcacttttatatttgagtttgtggttgttgcaattgtttgagtgaaaaaaaagaactctacttttcccatggcaagcaaagccagctgagggtttgtaccatccagttctgaaagttaattttgatcttcagtaaatgtcccttggcatctgcaggggattggttccaggacctctcatggataccaaagtctgagaatgctcaagtccctggtattaattgctgtagcatttgcatatttcctatgcacatcctctcctgtactttaaatcattgaaagagtacctataatatctagtacaatgtaaatgctctgtaaatagtttttgcactatattgtctagggaataatgacaaaggaaaaagagtctatacatcttcagtacagacacaatctttaaaaaaattttttgatccatggttagttgaatccacagaagtgaaacctatggatttagagggccaactatatatactaaggaaaagttcaaggaaggagtaagaaagtagttattttcaatgtaaatgatgataatgataatacctaccatttatttatcaccatatgaaaggagctttgctaagtttttcatgctttcatttaaccacgcaactctatgggatagttgttattatttccattttacagataaggaaactgactaaagagactaagtctgtagtattctgtatcttctactgtaacaacaacaacagcaaaaccatgtgagaagagagagatagaaggagcgtactgatgatattgaatgggcatcagcaatatttatcagccttactctctgtactttaatcttttaaaaagtcaattcctgtgacccaaacaatttctcatatcatcttatgcttctgtgttcctgctttatttcttctttcacactccatgttctgctggtgtggaacagatgttgcatagaaagcatgcagataggttttgtttggcccatagtgtttaaatattttgaaaatgttcataattcaagcaggaatgtacctctctaatttgctgtagacctcaccacctaccaacttatatttggtctaatttatacattcattttgtggcattggagtttgctagtcattatttatagcttaaaggatttaaactttttacttaatactagaagctgtgtgtttttcttggaaaagtatatttttcaaattgtttgacactgaagcagaaacatcactgcaaacatacatggatcaaatacatgatattctccttctataaagatatagtattatatgttatattaacactgtaaggaattaaatagtgataacctccatcacaaagtgcacatggcattcacatgaaatatgtatatgaaatcattttataaactgtgaagcaccatacaaaatgcattttttattactcttaattcctcatttgttccctttaatattggggatggaaaaacactccacaattaaaaccacctttgcaaaaactacaactgagaaaattatgactgaaagatctgacttgactccactttgcttctaacctgcaagctgttcttgttcattcatggacataggccaaaataactttgggaggaacttgaaactaagacaataatagccctttcacaaaacaaacctctttcctgcctggggactacactaccttcataggactaacaaattagccacaagattagaaataatggtttaggaatcacatagctggagactgaaagattagaaacctccccagattgcttctggggataaatcactattgcaaaacctaagatcagtgcttgagatattttgcagatgctgtacaggatggctcagctgctaccacccagactgataaactgggtcatctggtctcctggccccaggagactgactcagcatcaagaggacaactttgacaccctatgatatcatctccaacccaaccaatcagcagtccccactttcagacccctacccaccaagttttccttaaaacccccatcctcaagtttttgagaagactgatttgagtaataataacactcttctctcctgtacagctggctgtgcgtgaattaaacttttctctattgcaa

SEQ ID NO: 135275 - DNA, 2752 bp, Homo sapiens
  Payload ID: 6435
  Gene Symbol: FPGT-TNNI3K
  Gene Name: FPGT-TNNI3K readthrough
  ENST ID: ENST00000370899
  CDS Start-End: 38-2569
gcgtgctgtgcggcgcggtctcagggaaggtggggctatggcagctgctagggaccctccggaagtatcgctgcgagaagccacccagcgaaaattgcggaggttttccgagctaagaggcaaacttgtagcacgtggagaattctgggacatagttgcaataacagcggctgatgaaaaacaggaacttgcttacaaccaacagctgtcagaaaagctgaaaagaaaggagttaccccttggagttcaatatcacgtttttgtggatcctgctggagccaaaattggaaatggaggatcaacactttgtgcccttcaatgtttggaaaagctatatggagataaatggaattcttttaccatcttattaattcactctgatgaatggaagaaaaaagtcagtgaatcatatgttatcacaatagaaagattagaagatgacctgcagatcaaggaaaaagaactgacagaactaaggaatatatttggctctgatgaagccttcagtaaagtcaatttaaattaccgcactgaaaatgggctgtctctacttcatttatgttgcatttgtggaggcaagaaatcacatattcgaactcttatgttgaaagggctccgcccatctcgactgacaagaaatggatttacagccttgcatttagcagtttacaaggataatgcagaattgatcacttctctgcttcacagtggagctgatatacagcaggttggatacggtggcctcactgccctccatattgctacaatagctggccacctagaggctgctgatgtgctgttgcaacatggagctaatgtcaatattcaagatgcagtttttttcactccattgcatattgcagcgtactatggacatgaacaggtaactcgccttcttttgaaatttggtgctgatgtaaatgtaagtggtgaagttggagatagacccctccacctagcatctgcaaaaggattcttgaatattgcaaaactcttgatggaagaaggcagcaaagcagatgtgaatgctcaagataatgaagaccatgtcccactccatttctgttctcgatttggacaccatgatatagttaagtatctgctgcaaagtgatttggaagttcaacctcatgttgttaatatctatggagatacccccttacacctggcatgctacaatggcaaatttgaagttgccaaggaaatcatccaaatatcaggaacagaaagtctgactaaggaaaacatcttcagtgaaacagcttttcatagtgcttgtacctatggcaagagcattgacctagtcaaatttcttcttgatcagaatgtcataaacatcaaccaccaaggaagggatgggcacactggattacactctgcttgctaccacggtcacattcgcctggttcagttcttactggataatggagctgatatgaatctagtggcttgtgatcccagcaggtctagtggtgaaaaagatgagcagacatgtttgatgtgggcttatgaaaaagggcatgatgccattgtcacactcctgaagcattataagagaccacaagatgaattgccctgtaatgaatattctcagcctggaggagatggctcctatgtgtctgttccatcacccttggggaagattaaaagcatgacaaaagagaaggcagatattctcctcctaagagctggattgccttcacatttccatcttcagctctcagaaattgagttccatgagattattggctcaggttcttttgggaaagtatataaaggacgatgcagaaataaaatagtggctataaaacgttatcgagccaatacctactgctccaagtcagatgtggatatgttttgccgagaggtgtccattctctgccagctcaatcatccctgcgtaattcagtttgtgggtgcttgcttgaatgatcccagccagtttgccattgtcactcaatacatatcagggggttctctgttctccctccttcatgagcagaagaggattcttgatttgcagtctaaattaattattgcagtagatgttgccaaaggcatggagtaccttcacaacctgacacagccaattatacatcgtgacttgaacagtcacaatattcttctctatgaggatgggcatgctgtggtggcagattttggagaatcaagatttctacagtctctggatgaagacaacatgacaaaacaacctgggaacctccgttggatggctcctgaggtgttcacgcagtgcactcggtacaccatcaaagcagatgtcttcagctatgctctgtgtctgtgggaaattctcactggcgaaattccattcgctcatctcaagccagcggctgcggcagcagacatggcttaccaccacatcagacctcccattggctattccattcccaagcccatatcatctctgctgatacgagggtggaacgcatgtcctgaagcaaaatccagaccaagtcattacccagtctcatctgtgtacacagaaactcttaagaagaaaaatgaagatcgttttgggatgtggattgagtatctcagaagataacctcttatcctggccattcaacctgatgtgttacatgtttatttgtttagaatcttccatcactaccaaaatgttagctccatgaaagcggtcctttttgtttattttgttcactgctataacactaacatctaaagctggatgcttaagaatgtttgttgagtaaatgaatgaataccagta

SEQ ID NO: 135276 - DNA, 517 bp, Homo sapiens
  Payload ID: 6435
  Gene Symbol: FPGT-TNNI3K
  Gene Name: FPGT-TNNI3K readthrough
  ENST ID: ENST00000534632
  CDS Start-End: 31-517
gtgcggcgcggtctcagggaaggtggggctatggcagctgctagggaccctccggaagtatcgctgcgagaagccacccagcgaaaattgcggaggttttccgagctaagaggcaaacttgtagcacgtggagaattctgggacatagttgcaataacagcggctgatgaaaaacaggaacttgcttacaaccaacagctgtcagaaaagctgaaaagaaaggagttaccccttggagttcaatatcacgtttttgtggatcctgctggagccaaaattggaaatggaggatcaacactttgtgcccttcaatgtttggaaaagctatatggagataaatggaattcttttaccatcttattaattcactctgggcatgatgccattgtcacactcctgaagcattataagagaccacaagatgaattgccctgtaatgaatattctcagcctggaggagatggctcctatgtgtctgttccatcacccttggggaagattaaaagcatgacaaaag

SEQ ID NO: 135277 - DNA, 2855 bp, Homo sapiens
  Payload ID: 6435
  Gene Symbol: FPGT-TNNI3K
  Gene Name: FPGT-TNNI3K readthrough
  ENST ID: ENST00000557284
  CDS Start-End: 6-2855
ggcgcatgcgtgctgtgcggcgcggtctcagggaaggtggggctatggcagctgctagggaccctccggaagtatcgctgcgagaagccacccagcgaaaattgcggaggttttccgagctaagaggcaaacttgtagcacgtggagaattctgggacatagttgcaataacagcggctgatgaaaaacaggaacttgcttacaaccaacagctgtcagaaaagctgaaaagaaaggagttaccccttggagttcaatatcacgtttttgtggatcctgctggagccaaaattggaaatggaggatcaacactttgtgcccttcaatgtttggaaaagctatatggagataaatggaattcttttaccatcttattaattcactctgatgaatggaagaaaaaagtcagtgaatcatatgttatcacaatagaaagattagaagatgacctgcagatcaaggaaaaagaactgacagaactaaggaatatatttggctctgatgaagccttcagtaaagtcaatttaaattaccgcactgaaaatgggctgtctctacttcatttatgttgcatttgtggaggcaagaaatcacatattcgaactcttatgttgaaagggctccgcccatctcgactgacaagaaatggatttacagccttgcatttagcagtttacaaggataatgcagaattgatcacttctctgcttcacagtggagctgatatacagcaggttggatacggtggcctcactgccctccatattgctacaatagctggccacctagaggctgctgatgtgctgttgcaacatggagctaatgtcaatattcaagatgcagtttttttcactccattgcatattgcagcgtactatggacatgaacaggtaactcgccttcttttgaaatttggtgctgatgtaaatgtaagtggtgaagttggagatagacccctccacctagcatctgcaaaaggattcttgaatattgcaaaactcttgatggaagaaggcagcaaagcagatgtgaatgctcaagataatgaagaccatgtcccactccatttctgttctcgatttggacaccatgatatagttaagtatctgctgcaaagtgatttggaagttcaacctcatgttgttaatatctatggagatacccccttacacctggcatgctacaatggcaaatttgaagttgccaaggaaatcatccaaatatcaggaacagaaagtctgactaaggaaaacatcttcagtgaaacagcttttcatagtgcttgtacctatggcaagagcattgacctagtcaaatttcttcttgatcagaatgtcataaacatcaaccaccaaggaagggatgggcacactggattacactctgcttgctaccacggtcacattcgcctggttcagttcttactggataatggagctgatatgaatctagtggcttgtgatcccagcaggtctagtggtgaaaaagatgagcagacatgtttgatgtgggcttatgaaaaagggcatgatgccattgtcacactcctgaagcattataagagaccacaagatgaattgccctgtaatgaatattctcagcctggaggagatggctcctatgtgtctgttccatcacccttggggaagattaaaagcatgacaaaagagaaggcagatattctcctcctaagagctggattgccttcacatttccatcttcagctctcagaaattgagttccatgagattattggctcaggttcttttgggaaagtatataaaggacgatgcagaaataaaatagtggctataaaacgttatcgagccaatacctactgctccaagtcagatgtggatatgttttgccgagaggtgtccattctctgccagctcaatcatccctgcgtaattcagtttgtgggtgcttgcttgaatgatcccagccagtttgccattgtcactcaatacatatcagggggttctctgttctccctccttcatgagcagaagaggattcttgatttgcagtctaaattaattattgcagtagatgttgccaaaggcatggagtaccttcacaacctgacacagccaattatacatcgtgacttgaacagtcacaatattcttctctatgaggatgggcatgctgtggtggcagattttggagaatcaagatttctacagtctctggatgaagacaacatgacaaaacaacctgggaacctccgttggatggctcctgaggtgttcacgcagtgcactcggtacaccatcaaagcagatgtcttcagctatgctctgtgtctgtgggaaattctcactggcgaaattccattcgctcatctcaagccagcggctgcggcagcagacatggcttaccaccacatcagacctcccattggctattccattcccaagcccatatcatctctgctgatacgagggtggaacgcatgtcctgaaggaagacccgaattttctgaagttgtcatgaagttagaagagtgtctctgcaacattgagctgatgtctcctgcatcaagtaacagcagtgggtctctctcaccttcttcttcttctgattgcctggtgaaccggggaggacctggccggagtcatgtggcagcattaagaagtcgtttcgaattggaatatgctctaaatgcaaggtcctatgctgctttgtcccaaagtgctggacaatattcctctcaaggtctgtctttggaggagatgaaaagaagtcttcaatacacacccattgacaaatatggctatgtatccgatcccatgagctcaatgcattttcattcttgccgaaatagtagcagctttgaggacagcagctga

SEQ ID NO: 135278 - DNA, 174 bp, Homo sapiens
  Payload ID: 6436
  Gene Symbol: FHIT
  Gene Name: fragile histidine triad
  ENST ID: ENST00000341848
  CDS Start-End: 1-174
gtccttgtgtgcccgctgcggccagtggagcgcttccatgacctgcgtcctgatgaagtggccgatttgtttcagacgacccagagagtcgggacagtggtggaaaaacatttccatgggacctctctcaccttttccatgcaggatggccccgaagccggacagactgtgaag

SEQ ID NO: 135279 - DNA, 1634 bp, Homo sapiens
  Payload ID: 6436
  Gene Symbol: FHIT
  Gene Name: fragile histidine triad
  Uniprot ID: P49789
  ENST ID: ENST00000468189
  CDS Start-End: 372-815
gaattgcagtccccgctctgctctgtccggtcacaggactttttgccctctgttcccgggtccctcaggcggccacccagtgggcacactcccaggcggcgctccggccccgcgctccctccctctgcctttcattcccagctgtcaacatcctggaagctttgaagctcaggaaagaagagaaatccactgagaacagtctgtaaaggtccgtagtgctatctacatccagacggtggaagggagagaaagagaaagaaggtatcctaggaatacctgcctgcttagaccctctataaaagctctgtgcatcctgccactgaggactccgaagaggtagcagtcttctgaaagacttcaactgtgaggacatgtcgttcagatttggccaacatctcatcaagccctctgtagtgtttctcaaaacagaactgtccttcgctcttgtgaataggaaacctgtggtaccaggacatgtccttgtgtgcccgctgcggccagtggagcgcttccatgacctgcgtcctgatgaagtggccgatttgtttcagacgacccagagagtcgggacagtggtggaaaaacatttccatgggacctctctcaccttttccatgcaggatggccccgaagccggacagactgtgaagcacgttcacgtccatgttcttcccaggaaggctggagactttcacaggaatgacagcatctatgaggagctccagaaacatgacaaggaggactttcctgcctcttggagatcagaggaggaaatggcagcagaagccgcagctctgcgggtctactttcagtgacacaggtaaagactgcatttcgtcattacccagaccctcccgtgggcctcaggaaagaggctgcactctcagaatggggatgcacaaaaacaccttcaccagcatccttgggtggtggctgcaaaggacaaagagctggaggggagaaaaccctggcccttgagtactgtattcccagcctcccagtctcttccaactctcctgcctcttcactctcttcttccaagccagtgcccccagcccaccaccacctttctccagtctttcctgcggtggtgctcctccagaatccaatgttcacaaagcagaccttctgtcatgcacaacttcttgtttaaaaggtcaaccccaacttaacttaaaggtgtgacatggcccttaggctcaagtctgtctgcaaagccctgtaaaccagctttctctgcctccctaacacgcccccgggcaaactcctctgctttcactgagtggactcttctcttcagttgctatttggtaaattgcccttcatgtttccctttatgttcggctcctaggaagctcaggccacagggaaaagtcaaggcttgatagaattaatctttgtcttaatgatgactaactgttgagagatcataggtttaagactctggtagaaagatagctatagccaatttccttgtcaaaatgcttctactccaaatttttatgcagtgtctaacgagctcatgcctagatctatctggcaatctatattatccctcctagtctcagttcacatagtagactgctggaatgactgagggtgatgtttggcctgtaaacaaaaagtgttaaaga

SEQ ID NO: 135280 - DNA, 1033 bp, Homo sapiens
  Payload ID: 6436
  Gene Symbol: FHIT
  Gene Name: fragile histidine triad
  Uniprot ID: P49789
  ENST ID: ENST00000476844
  CDS Start-End: 326-769
cctctgttcccgggtccctcaggcggccacccagtgggcacactcccaggcggcgctccggccccgcgctccctccctctgcctttcattcccagctgtcaacatcctggaagctttgaagctcaggaaagaagagaaatccactgagaacagtctgtaaaggtccgtagtgctatctacatccagacggtggaagggagagaaagagaaagaaggtatcctaggaatacctgcctgcttagaccctctataaaagctctgtgcatcctgccactgaggactccgaagaggtagcagtcttctgaaagacttcaactgtgaggacatgtcgttcagatttggccaacatctcatcaagccctctgtagtgtttctcaaaacagaactgtccttcgctcttgtgaataggaaacctgtggtaccaggacatgtccttgtgtgcccgctgcggccagtggagcgcttccatgacctgcgtcctgatgaagtggccgatttgtttcagacgacccagagagtcgggacagtggtggaaaaacatttccatgggacctctctcaccttttccatgcaggatggccccgaagccggacagactgtgaagcacgttcacgtccatgttcttcccaggaaggctggagactttcacaggaatgacagcatctatgaggagctccagaaacatgacaaggaggactttcctgcctcttggagatcagaggaggaaatggcagcagaagccgcagctctgcgggtctactttcagtgacacagatcctgaattccagcaaaagagctattgccaaccagtttgaagaccgccccccgcctctccccaagaggaactgaatcagcatgaaaatgcagtttcttcatctcaccatcctgtattcttcaaccagtgatcccccacctcggtcactccaactcccttaaaatacctagacctaaacggctcagacaggcagatttgaggtttccccctgtctccttattcggcagccttatgattaaacttccttctctgctgcaa

SEQ ID NO: 135281 - DNA, 1081 bp, Homo sapiens
  Payload ID: 6436
  Gene Symbol: FHIT
  Gene Name: fragile histidine triad
  Uniprot ID: P49789
  ENST ID: ENST00000492590
  CDS Start-End: 363-806
tccccgctctgctctgtccggtcacaggactttttgccctctgttcccgggtccctcaggcggccacccagtgggcacactcccaggcggcgctccggccccgcgctccctccctctgcctttcattcccagctgtcaacatcctggaagctttgaagctcaggaaagaagagaaatccactgagaacagtctgtaaaggtccgtagtgctatctacatccagacggtggaagggagagaaagagaaagaaggtatcctaggaatacctgcctgcttagaccctctataaaagctctgtgcatcctgccactgaggactccgaagaggtagcagtcttctgaaagacttcaactgtgaggacatgtcgttcagatttggccaacatctcatcaagccctctgtagtgtttctcaaaacagaactgtccttcgctcttgtgaataggaaacctgtggtaccaggacatgtccttgtgtgcccgctgcggccagtggagcgcttccatgacctgcgtcctgatgaagtggccgatttgtttcagacgacccagagagtcgggacagtggtggaaaaacatttccatgggacctctctcaccttttccatgcaggatggccccgaagccggacagactgtgaagcacgttcacgtccatgttcttcccaggaaggctggagactttcacaggaatgacagcatctatgaggagctccagaaacatgacaaggaggactttcctgcctcttggagatcagaggaggaaatggcagcagaagccgcagctctgcgggtctactttcagtgacacagatgtttttcagatcctgaattccagcaaaagagctattgccaaccagtttgaagaccgccccccgcctctccccaagaggaactgaatcagcatgaaaatgcagtttcttcatctcaccatcctgtattcttcaaccagtgatcccccacctcggtcactccaactcccttaaaatacctagacctaaacggctcagacaggcagatttgaggtttccccctgtctccttattcggcagccttatgattaaacttccttctctgctgcaa

SEQ ID NO: 135282 - DNA, 601 bp, Homo sapiens
  Payload ID: 6436
  Gene Symbol: FHIT
  Gene Name: fragile histidine triad
  ENST ID: ENST00000488467
  CDS Start-End: 366-601
cctctgttcccgggtccctcaggcggccacccagtgggcacactcccaggcggcgctccggccccgcgctccctccctctgcctttcattcccagctgtcaacatcctggaagctttgaagctcaggaaagaagagaaatccactgagaacagtctgtaaaggtccgtagtgctatctacatccagacggtggaagggagagaaagagaaagaaggtatcctaggaatacctgcctgcttagaccctctataaaagctctgtgcatcctgccactgaggactccgaagaggtagcagtcttctgaaaggtaccgtgactggatcacatggagccccaggatttttagtacttcaactgtgaggacatgtcgttcagatttggccaacatctcatcaagccctctgtagtgtttctcaaaacagaactgtccttcgctcttgtgaataggaaacctgtggtaccaggacatgtccttgtgtgcccgctgcggccagtggagcgcttccatgacctgcgtcctgatgaagtggccgatttgtttcagacgacccagagagtcgggacagtggtggaaaaacatttccatgggacctctctcac

SEQ ID NO: 135283 - DNA, 3089 bp, Homo sapiens
  Payload ID: 6437
  Gene Symbol: FRA10AC1
  Gene Name: fragile site, folic acid type, rare, fra(10)(q23.3) or fra(10)(q24.2) candidate 1
  Uniprot ID: Q70Z53
  ENST ID: ENST00000359204
  CDS Start-End: 199-1146
acccgtagggagaggcgggttgcgggcggcggcggcggcggcggcggcggtggtggttgtggcgaggctgtgcggcagggcgcacgggacctgtgctgcagcggctctctcaggccgtgggtcgtcgctgcagctgccgggaaagaaggaaacgacgactccgggggcgaacttggcacacagggaggaagggaaaggatgcatggtcatggaggctatgattctgattttagtgatgatgaacgctgtggagaatccagcaaaaggaaaaaaaggacagttgaagatgacttactgctccaaaaaccatttcagaaagaaaaacatggaaaggtggcccataaacaagttgcagcagaattgctggatagggaagaagcaagaaatagaaggtttcatctcatagctatggatgcttatcaaagacatacaaagttcgtaaatgactatattttatactatggtggcaaaaaagaagacttcaagcgtttgggggaaaatgacaagacagacttggatgttatacgagaaaatcatagattcctatggaatgaggaggacgaaatggacatgacttgggagaagagacttgctaagaaatactatgataaattatttaaggaatactgcatagcagatctcagtaaatataaagaaaataagtttggatttaggtggcgagtagaaaaagaagtaatttcaggaaaaggtcaatttttctgtggaaataaatattgtgataaaaaagaaggcttaaagagttgggaagttaattttggttatattgagcatggtgagaagagaaatgcacttgttaaattaaggttatgccaagaatgttccattaaattaaatttccatcacaggagaaaagaaatcaagtcaaaaaaaagaaaagataaaaccaaaaaagactgtgaagagtcatcacataaaaaatccagattatcttctgcagaagaggcctccaagaaaaaagataaaggacattcatcttcaaagaaatctgaagattctctacttagaaactctgatgaggaagaaagtgcttcagaatctgaactttggaagggtccactaccagagacagatgaaaaatcacaggaagaagaatttgatgagtattttcaggatttgtttctatgagacgagagagagaagcctccgctccttaatgtgaaacttcatgaagttttaaacttcatgcaatttgaaattccatataagtttttatctgcaagttacagcttgtgtggtttgtctttggaaataaaaatccaggttctctcagaatgtcagaggctttggaagttcattagttcaattaaagactttcctgtcctttaaatatcttttcaattgcttatctacaattctgttttatttgtagctcctagaggatagagctggacagattccattgttcctacattttgtaggttttttttcactgccttcattatgtatcttctcttgccttcattattttattttattatttcttctttttctcttttttagagccaccaatactggatttgtttgtttttcatttttttcttttgtggaaacggagtcctcctgtgttgcccaggctggtattcaaactcctggccttatgcattcctcccaccctggcctcccagagtgctgggattacaggtgtgagccaccatgctctgccaattattttaaattactaggattaaagtatattatgtatgtctttaacttctttctttcccattgataaactggcacccttcttttaagtacctgctctcccattaccacctatttccagctgctttttgaggttttttgcttgcctgtctcttgcttccttcttaacctctaccacttaagagagtttgttataatcaaatttgacttcctagcctgtggataatttactattaagtaaattattaccacagggagccagtgaggtcccagtagtctaaaacagttcatgtgttcacaaaaattgcctccccggcagagattatgcagtaagataatttaactgaataatactatgtgcatgtatcttgcctcagatatactcatgcaaatatgaatatacctctgatatggtttggctctgtgtccccacccaaatctcatcttgaatgtgtactcccataattcccacattttataggagggatccagtgagagataatttgaatcaagggggcggtttcccccatattgttcttgtggtagtgaataagtctcacaagatctgatggttttatcaggggcttctgcttttgcatccttctcattttcttttgctgctgccatgtaagaagtgccttttgcctcccaccatgattctgaggctttcccagccatgtggaactgtaagtccaattaaacctctttttcttccccagtctctggtatgtctttatcagcagtgtgaaaatggactaatagaacttctatgcagaaatataaaatgtaacttcttaacataaggtcctagtcgcaagggtctatggaggtgcttcaggagatccaagcctttttagaatctgtgcaaacttctgtgtatgttttttggaggaaaagtccataaatttcaaattttcaaaaatcagattttcaaaaggatttattgatttctgaaaactagcaaagatctgcttttataaagagcaaatagatggatagatataggagaagatgcttgacttgatgaataagagaaaggacatatagaaaatgaactgaacataagcaagtattttattgaagatatactattttaaataacatttaaacacggaatgattggcaataaactgcaaaatgagtaatttggtatcattttaaaatggttattatcagagattttccttttattaaacagttattcattaattccacaaatatttatcaggcttctattatatgtgaggcactgagctgggcatggctgtaaaggaaccatctaggaagtaattatgcaatcatttctgaacctgtttcagaaaagtaaatcagtgttgggtttatcagtgtttaacattgtttgatagtcccctcacttcttgaataaattgttttttttcacctca

SEQ ID NO: 135284 - DNA, 4333 bp, Homo sapiens
  Payload ID: 6438
  Gene Symbol: FMR1
  Gene Name: fragile X mental retardation 1
  Uniprot ID: Q06787
  ENST ID: ENST00000218200
  CDS Start-End: 230-2065
acttccggtggagggccgcctctgagcgggcggcgggccgacggcgagcgcgggcggcggcggtgacggaggcgccgctgccagggggcgtgcggcagcgcggcggcggcggcggcggcggcggcggcggaggcggcggcggcggcggcggcggcggcggctgggcctcgagcgcccgcagcccacctctcgggggcgggctcccggcgctagcagggctgaagagaagatggaggagctggtggtggaagtgcggggctccaatggcgctttctacaaggcatttgtaaaggatgttcatgaagattcaataacagttgcatttgaaaacaactggcagcctgataggcagattccatttcatgatgtcagattcccacctcctgtaggttataataaagatataaatgaaagtgatgaagttgaggtgtattccagagcaaatgaaaaagagccttgctgttggtggttagctaaagtgaggatgataaagggtgagttttatgtgatagaatatgcagcatgtgatgcaacttacaatgaaattgtcacaattgaacgtctaagatctgttaatcccaacaaacctgccacaaaagatactttccataagatcaagctggatgtgccagaagacttacggcaaatgtgtgccaaagaggcggcacataaggattttaaaaaggcagttggtgccttttctgtaacttatgatccagaaaattatcagcttgtcattttgtccatcaatgaagtcacctcaaagcgagcacatatgctgattgacatgcactttcggagtctgcgcactaagttgtctctgataatgagaaatgaagaagctagtaagcagctggagagttcaaggcagcttgcctcgagatttcatgaacagtttatcgtaagagaagatctgatgggtctagctattggtactcatggtgctaatattcagcaagctagaaaagtacctggggtcactgctattgatctagatgaagatacctgcacatttcatatttatggagaggatcaggatgcagtgaaaaaagctagaagctttctcgaatttgctgaagatgtaatacaagttccaaggaacttagtaggcaaagtaataggaaaaaatggaaagctgattcaggagattgtggacaagtcaggagttgtgagggtgaggattgaggctgaaaatgagaaaaatgttccacaagaagaggaaattatgccaccaaattcccttccttccaataattcaagggttggacctaatgccccagaagaaaaaaaacatttagatataaaggaaaacagcacccatttttctcaacctaacagtacaaaagtccagaggggtatggtaccatttgtttttgtgggaacaaaggacagcatcgctaatgccactgttcttttggattatcacctgaactatttaaaggaagtagaccagttgcgtttggagagattacaaattgatgagcagttgcgacagattggagctagttctagaccaccaccaaatcgtacagataaggaaaaaagctatgtgactgatgatggtcaaggaatgggtcgaggtagtagaccttacagaaatagggggcacggcagacgcggtcctggatatacttcaggaactaattctgaagcatcaaatgcttctgaaacagaatctgaccacagagacgaactcagtgattggtcattagctccaacagaggaagagagggagagcttcctgcgcagaggagacggacggcggcgtggagggggaggaagaggacaaggaggaagaggacgtggaggaggcttcaaaggaaacgacgatcactcccgaacagataatcgtccacgtaatccaagagaggctaaaggaagaacaacagatggatcccttcagatcagagttgactgcaataatgaaaggagtgtccacactaaaacattacagaatacctccagtgaaggtagtcggctgcgcacgggtaaagatcgtaaccagaagaaagagaagccagacagcgtggatggtcagcaaccactcgtgaatggagtaccctaaactgcataattctgaagttatatttcctataccatttccgtaattcttattccatattagaaaactttgttaggccaaagacaaatagtaggcaagatggcacagggcatgaaatgaacacaaattatgctaagaattttttattttttggtattggccataagcaacaattttcagatttgcacaaaaagataccttaaaatttgaaacattgcttttaaaactacttagcacttcagggcagattttagttttattttctaaagtactgagcagtgatattctttgttaatttggaccattttcctgcattgggtgatcattcaccagtacattctcagtttttcttaatatatagcatttatggtaatcatattagacttctgttttcaatctcgtatagaagtcttcatgaaatgctatgtcatttcatgtcctgtgtcagtttatgttttggtccacttttccagtattttagtggaccctgaaatgtgtgtgatgtgacatttgtcattttcattagcaaaaaaagttgtatgatctgtgccttttttatatcttggcaggtaggaatattatatttggatgcagagttcagggaagataagttggaaacactaaatgttaaagatgtagcaaaccctgtcaaacattagtactttatagaagaatgcatgctttccatatttttttccttacataaacatcaggttaggcagtataaagaataggacttgtttttgtttttgttttgttgcactgaagtttgataaatagtgttattgagagagatgtgtaatttttctgtatagacaggagaagaaagaactatcttcatctgagagaggctaaaatgttttcagctaggaacaaatcttcctggtcgaaagttagtaggatatgcctgctctttggcctgatgaccaattttaacttagagctttttttttttaattttgtctgccccaagttttgtgaaatttttcatattttaatttcaagcttattttggagagataggaaggtcatttccatgtatgcataataatcctgcaaagtacaggtactttgtctaagaaacattggaagcaggttaaatgttttgtaaactttgaaatatatggtctaatgtttaagcagaattggaaaagactaagatcggttaacaaataacaacttttttttctttttttcttttgttttttgaagtgttggggtttggttttgttttttgagtcttttttttttaagtgaaatttattgaggaaaaatatgtgaaggaccttcactctaagatgttatatttttcttaaaaagtaactcctagtaggggtaccactgaatctgtacagagccgtaaaaactgaagttctgcctctgatgtattttgtgagtttgtttctttgaattttcattttacagttacttttccttgcatacaaacaagcatataaaatggcaacaaactgcacatgatttcacaaatattaaaaagtcttttaaaaagtattgccaaacattaatgttgatttctagttatttattctgggaatgtatagtatttgaaaacagaaattggtaccttgcacacatcatctgtaagctgtttggttttaaaatactgtagataattaaccaaggtagaatgaccttgtaatgtaactgctcttgggcaatattctctgtacatattagcgacaacagattggattttatgttgacatttgtttggttatagtgcaatatattttgtatgcaagcagtttcaataaagtttgatcttcctctgctaaattgatgttgatgcaatccttacaaatgattgcttttaaaattttaagctaggaaaagaaatctatagaaagtgttctgttacaaaatgtaactgttaccattggaaatttcacgtcataggaagttagcctttatctaccaactttcaagaacttgtttaataaagcgaaaaactcaaccaaatggtacaaaaccacagtgtaccattaaaatatgcactaagtctcttttttacaaaggctgtattcagcaaggcgctaacttgcttaaatgtgaattactaacttctaaaactgtactttgattcacatgttttcaaatggagttggagttcattcatattacaatatttgtgtgctaaacgtgtatgtttttcagttcaaagtcatgatgtttttaaaatcttattaaagtttcaaaaatctgaagattgtttatctagatgtaaatttttattaaaaagttgcacttatg

SEQ ID NO: 135285 - DNA, 1295 bp, Homo sapiens
  Payload ID: 6438
  Gene Symbol: FMR1
  Gene Name: fragile X mental retardation 1
  ENST ID: ENST00000334557
  CDS Start-End: 129-1022
ggcggcggcggcggcggcggcggcggcggaggcggcggcggcggcggcggcggcggcggctgggcctcgagcgcccgcagcccacctctcgggggcgggctcccggcgctagcagggctgaagagaagatggaggagctggtggtggaagtgcggggctccaatggcgctttctacaaggcatttgtaaaggatgttcatgaagattcaataacagttgcatttgaaaacaactggcagcctgataggcagattccatttcatgatgtcagattcccacctcctgtaggttataataaagatataaatgaaagtgatgaagttgaggtgtattccagagcaaatgaaaaagagccttgctgttggtggttagctaaagtgaggatgataaagggtgagttttatgtgatagaatatgcagcatgtgatgcaacttacaatgaaattgtcacaattgaacgtctaagatctgttaatcccaacaaacctgccacaaaagatactttccataagatcaagctggatgtgccagaagacttacggcaaatgtgtgccaaagaggcggcacataaggattttaaaaaggcagttggtgccttttctgtaacttatgatccagaaaattatcagcttgtcattttgtccatcaatgaagtcacctcaaagcgagcacatatgctgattgacatgcactttcggagtctgcgcactaagttgtctctgataatgagaaatgaagaagctagtaagcagctggagagttcaaggcagcttgcctcgagatttcatgaacagtttatcgtaagagaagatctgatgggtctagctattggtactcatggtgctaatattcagcaagctagaaaagtacctggggtcactgctattgatctagatgaagatacctgcacatttcatatttatggagaggatcaggatgcagtgaaaaaagctagaagctttctcgaatttgctgaagatgtaatacaagttccaaggaacttagtagggttgaagatctgaacataggttacttaaatctaaaaagttccaaagctagaagaaacttcagatgtctctgggactttctgcaaagtcaatagtaattcttcattttgacttgagtagtgttttatcaccatcaccatcgtgagtatcagcaaatatttaggagctcttcaccaatactcctaaatgctgcagatatctttagtagaacatatcaaaaccaggtgcagttttatcaagaaagctacatatgtttttaatttgtaaataaaattgggacatactgcc

SEQ ID NO: 135286 - DNA, 1774 bp, Homo sapiens
  Payload ID: 6438
  Gene Symbol: FMR1
  Gene Name: fragile X mental retardation 1
  Uniprot ID: Q06787
  ENST ID: ENST00000370470
  CDS Start-End: 1-1773
atggaggagctggtggtggaagtgcggggctccaatggcgctttctacaaggcatttgtaaaggatgttcatgaagattcaataacagttgcatttgaaaacaactggcagcctgataggcagattccatttcatgatgtcagattcccacctcctgtaggttataataaagatataaatgaaagtgatgaagttgaggtgtattccagagcaaatgaaaaagagccttgctgttggtggttagctaaagtgaggatgataaagggtgagttttatgtgatagaatatgcagcatgtgatgcaacttacaatgaaattgtcacaattgaacgtctaagatctgttaatcccaacaaacctgccacaaaagatactttccataagatcaagctggatgtgccagaagacttacggcaaatgtgtgccaaagaggcggcacataaggattttaaaaaggcagttggtgccttttctgtaacttatgatccagaaaattatcagcttgtcattttgtccatcaatgaagtcacctcaaagcgagcacatatgctgattgacatgcactttcggagtctgcgcactaagttgtctctgataatgagaaatgaagaagctagtaagcagctggagagttcaaggcagcttgcctcgagatttcatgaacagtttatcgtaagagaagatctgatgggtctagctattggtactcatggtgctaatattcagcaagctagaaaagtacctggggtcactgctattgatctagatgaagatacctgcacatttcatatttatggagaggatcaggatgcagtgaaaaaagctagaagctttctcgaatttgctgaagatgtaatacaagttccaaggaacttagtaggcaaagtaataggaaaaaatggaaagctgattcaggagattgtggacaagtcaggagttgtgagggtgaggattgaggctgaaaatgagaaaaatgttccacaagaagaggaaattatgccaccaaattcccttccttccaataattcaagggttggacctaatgccccagaagaaaaaaaacatttagatataaaggaaaacagcacccatttttctcaacctaacagtacaaaagtccagagggtgttagtggcttcatcagttgtagcaggggaatcccagaaacctgaactcaaggcttggcagggtatggtaccatttgtttttgtgggaacaaaggacagcatcgctaatgccactgttcttttggattatcacctgaactatttaaaggaagtagaccagttgcgtttggagagattacaaattgatgagcagttgcgacagattggagctagttctagaccaccaccaaatcgtacagataaggaaaaaagctatgtgactgatgatggtcaaggaatgggtcgaggtagtagaccttacagaaatagggggcacggcagacgcggtcctggatatacttcagctccaacagaggaagagagggagagcttcctgcgcagaggagacggacggcggcgtggagggggaggaagaggacaaggaggaagaggacgtggaggaggcttcaaaggaaacgacgatcactcccgaacagataatcgtccacgtaatccaagagaggctaaaggaagaacaacagatggatcccttcagaatacctccagtgaaggtagtcggctgcgcacgggtaaagatcgtaaccagaagaaagagaagccagacagcgtggatggtcagcaaccactcgtgaatggagtaccctaaa

SEQ ID NO: 135287 - DNA, 4125 bp, Homo sapiens
  Payload ID: 6438
  Gene Symbol: FMR1
  Gene Name: fragile X mental retardation 1
  ENST ID: ENST00000370471
  CDS Start-End: 230-1843
acttccggtggagggccgcctctgagcgggcggcgggccgacggcgagcgcgggcggcggcggtgacggaggcgccgctgccagggggcgtgcggcagcgcggcggcggcggcggcggcggcggcggcggaggcggcggcggcggcggcggcggcggcggctgggcctcgagcgcccgcagcccacctctcgggggcgggctcccggcgctagcagggctgaagagaagatggaggagctggtggtggaagtgcggggctccaatggcgctttctacaaggcatttgtaaaggatgttcatgaagattcaataacagttgcatttgaaaacaactggcagcctgataggcagattccatttcatgatgtcagattcccacctcctgtaggttataataaagatataaatgaaagtgatgaagttgaggtgtattccagagcaaatgaaaaagagccttgctgttggtggttagctaaagtgaggatgataaagggtgagttttatgtgatagaatatgcagcatgtgatgcaacttacaatgaaattgtcacaattgaacgtctaagatctgttaatcccaacaaacctgccacaaaagatactttccataagatcaagctggatgtgccagaagacttacggcaaatgtgtgccaaagaggcggcacataaggattttaaaaaggcagttggtgccttttctgtaacttatgatccagaaaattatcagcttgtcattttgtccatcaatgaagtcacctcaaagcgagcacatatgctgattgacatgcactttcggagtctgcgcactaagttgtctctgataatgagaaatgaagaagctagtaagcagctggagagttcaaggcagcttgcctcgagatttcatgaacagtttatcgtaagagaagatctgatgggtctagctattggtactcatggtgctaatattcagcaagctagaaaagtacctggggtcactgctattgatctagatgaagatacctgcacatttcatatttatggagaggatcaggatgcagtgaaaaaagctagaagctttctcgaatttgctgaagatgtaatacaagttccaaggaacttagtaggcaaagtaataggaaaaaatggaaagctgattcaggagattgtggacaagtcaggagttgtgagggtgaggattgaggctgaaaatgagaaaaatgttccacaagaagaggaaattatgccaccaaattcccttccttccaataattcaagggttggacctaatgccccagaagaaaaaaaacatttagatataaaggaaaacagcacccatttttctcaacctaacagtacaaaagtccagagggtgttagtggcttcatcagttgtagcaggggaatcccagaaacctgaactcaaggcttggcagggtatggtaccatttgtttttgtgggaacaaaggacagcatcgctaatgccactgttcttttggattatcacctgaactatttaaagctccaacagaggaagagagggagagcttcctgcgcagaggagacggacggcggcgtggagggggaggaagaggacaaggaggaagaggacgtggaggaggcttcaaaggaaacgacgatcactcccgaacagataatcgtccacgtaatccaagagaggctaaaggaagaacaacagatggatcccttcagatcagagttgactgcaataatgaaaggagtgtccacactaaaacattacagaatacctccagtgaaggtagtcggctgcgcacgggtaaagatcgtaaccagaagaaagagaagccagacagcgtggatggtcagcaaccactcgtgaatggagtaccctaaactgcataattctgaagttatatttcctataccatttccgtaattcttattccatattagaaaactttgttaggccaaagacaaatagtaggcaagatggcacagggcatgaaatgaacacaaattatgctaagaattttttattttttggtattggccataagcaacaattttcagatttgcacaaaaagataccttaaaatttgaaacattgcttttaaaactacttagcacttcagggcagattttagttttattttctaaagtactgagcagtgatattctttgttaatttggaccattttcctgcattgggtgatcattcaccagtacattctcagtttttcttaatatatagcatttatggtaatcatattagacttctgttttcaatctcgtatagaagtcttcatgaaatgctatgtcatttcatgtcctgtgtcagtttatgttttggtccacttttccagtattttagtggaccctgaaatgtgtgtgatgtgacatttgtcattttcattagcaaaaaaagttgtatgatctgtgccttttttatatcttggcaggtaggaatattatatttggatgcagagttcagggaagataagttggaaacactaaatgttaaagatgtagcaaaccctgtcaaacattagtactttatagaagaatgcatgctttccatatttttttccttacataaacatcaggttaggcagtataaagaataggacttgtttttgtttttgttttgttgcactgaagtttgataaatagtgttattgagagagatgtgtaatttttctgtatagacaggagaagaaagaactatcttcatctgagagaggctaaaatgttttcagctaggaacaaatcttcctggtcgaaagttagtaggatatgcctgctctttggcctgatgaccaattttaacttagagctttttttttttaattttgtctgccccaagttttgtgaaatttttcatattttaatttcaagcttattttggagagataggaaggtcatttccatgtatgcataataatcctgcaaagtacaggtactttgtctaagaaacattggaagcaggttaaatgttttgtaaactttgaaatatatggtctaatgtttaagcagaattggaaaagactaagatcggttaacaaataacaacttttttttctttttttcttttgttttttgaagtgttggggtttggttttgttttttgagtcttttttttttaagtgaaatttattgaggaaaaatatgtgaaggaccttcactctaagatgttatatttttcttaaaaagtaactcctagtaggggtaccactgaatctgtacagagccgtaaaaactgaagttctgcctctgatgtattttgtgagtttgtttctttgaattttcattttacagttacttttccttgcatacaaacaagcatataaaatggcaacaaactgcacatgatttcacaaatattaaaaagtcttttaaaaagtattgccaaacattaatgttgatttctagttatttattctgggaatgtatagtatttgaaaacagaaattggtaccttgcacacatcatctgtaagctgtttggttttaaaatactgtagataattaaccaaggtagaatgaccttgtaatgtaactgctcttgggcaatattctctgtacatattagcgacaacagattggattttatgttgacatttgtttggttatagtgcaatatattttgtatgcaagcagtttcaataaagtttgatcttcctctgctaaattgatgttgatgcaatccttacaaatgattgcttttaaaattttaagctaggaaaagaaatctatagaaagtgttctgttacaaaatgtaactgttaccattggaaatttcacgtcataggaagttagcctttatctaccaactttcaagaacttgtttaataaagcgaaaaactcaaccaaatggtacaaaaccacagtgtaccattaaaatatgcactaagtctcttttttacaaaggctgtattcagcaaggcgctaacttgcttaaatgtgaattactaacttctaaaactgtactttgattcacatgttttcaaatggagttggagttcattcatattacaatatttgtgtgctaaacgtgtatgtttttcagttcaaagtcatgatgtttttaaaatcttattaaagtttcaaaaatctgaagattgtttatctagatgtaaatttttattaaaaagttgcacttatg

SEQ ID NO: 135288 - DNA, 4308 bp, Homo sapiens
  Payload ID: 6438
  Gene Symbol: FMR1
  Gene Name: fragile X mental retardation 1
  Uniprot ID: Q06787
  ENST ID: ENST00000370475
  CDS Start-End: 129-2027
ggcggcggcggcggcggcggcggcggcggaggcggcggcggcggcggcggcggcggcggctgggcctcgagcgcccgcagcccacctctcgggggcgggctcccggcgctagcagggctgaagagaagatggaggagctggtggtggaagtgcggggctccaatggcgctttctacaaggcatttgtaaaggatgttcatgaagattcaataacagttgcatttgaaaacaactggcagcctgataggcagattccatttcatgatgtcagattcccacctcctgtaggttataataaagatataaatgaaagtgatgaagttgaggtgtattccagagcaaatgaaaaagagccttgctgttggtggttagctaaagtgaggatgataaagggtgagttttatgtgatagaatatgcagcatgtgatgcaacttacaatgaaattgtcacaattgaacgtctaagatctgttaatcccaacaaacctgccacaaaagatactttccataagatcaagctggatgtgccagaagacttacggcaaatgtgtgccaaagaggcggcacataaggattttaaaaaggcagttggtgccttttctgtaacttatgatccagaaaattatcagcttgtcattttgtccatcaatgaagtcacctcaaagcgagcacatatgctgattgacatgcactttcggagtctgcgcactaagttgtctctgataatgagaaatgaagaagctagtaagcagctggagagttcaaggcagcttgcctcgagatttcatgaacagtttatcgtaagagaagatctgatgggtctagctattggtactcatggtgctaatattcagcaagctagaaaagtacctggggtcactgctattgatctagatgaagatacctgcacatttcatatttatggagaggatcaggatgcagtgaaaaaagctagaagctttctcgaatttgctgaagatgtaatacaagttccaaggaacttagtaggcaaagtaataggaaaaaatggaaagctgattcaggagattgtggacaagtcaggagttgtgagggtgaggattgaggctgaaaatgagaaaaatgttccacaagaagaggaaattatgccaccaaattcccttccttccaataattcaagggttggacctaatgccccagaagaaaaaaaacatttagatataaaggaaaacagcacccatttttctcaacctaacagtacaaaagtccagagggtgttagtggcttcatcagttgtagcaggggaatcccagaaacctgaactcaaggcttggcagggtatggtaccatttgtttttgtgggaacaaaggacagcatcgctaatgccactgttcttttggattatcacctgaactatttaaaggaagtagaccagttgcgtttggagagattacaaattgatgagcagttgcgacagattggagctagttctagaccaccaccaaatcgtacagataaggaaaaaagctatgtgactgatgatggtcaaggaatgggtcgaggtagtagaccttacagaaatagggggcacggcagacgcggtcctggatatacttcaggaactaattctgaagcatcaaatgcttctgaaacagaatctgaccacagagacgaactcagtgattggtcattagctccaacagaggaagagagggagagcttcctgcgcagaggagacggacggcggcgtggagggggaggaagaggacaaggaggaagaggacgtggaggaggcttcaaaggaaacgacgatcactcccgaacagataatcgtccacgtaatccaagagaggctaaaggaagaacaacagatggatcccttcagatcagagttgactgcaataatgaaaggagtgtccacactaaaacattacagaatacctccagtgaaggtagtcggctgcgcacgggtaaagatcgtaaccagaagaaagagaagccagacagcgtggatggtcagcaaccactcgtgaatggagtaccctaaactgcataattctgaagttatatttcctataccatttccgtaattcttattccatattagaaaactttgttaggccaaagacaaatagtaggcaagatggcacagggcatgaaatgaacacaaattatgctaagaattttttattttttggtattggccataagcaacaattttcagatttgcacaaaaagataccttaaaatttgaaacattgcttttaaaactacttagcacttcagggcagattttagttttattttctaaagtactgagcagtgatattctttgttaatttggaccattttcctgcattgggtgatcattcaccagtacattctcagtttttcttaatatatagcatttatggtaatcatattagacttctgttttcaatctcgtatagaagtcttcatgaaatgctatgtcatttcatgtcctgtgtcagtttatgttttggtccacttttccagtattttagtggaccctgaaatgtgtgtgatgtgacatttgtcattttcattagcaaaaaaagttgtatgatctgtgccttttttatatcttggcaggtaggaatattatatttggatgcagagttcagggaagataagttggaaacactaaatgttaaagatgtagcaaaccctgtcaaacattagtactttatagaagaatgcatgctttccatatttttttccttacataaacatcaggttaggcagtataaagaataggacttgtttttgtttttgttttgttgcactgaagtttgataaatagtgttattgagagagatgtgtaatttttctgtatagacaggagaagaaagaactatcttcatctgagagaggctaaaatgttttcagctaggaacaaatcttcctggtcgaaagttagtaggatatgcctgctctttggcctgatgaccaattttaacttagagctttttttttttaattttgtctgccccaagttttgtgaaatttttcatattttaatttcaagcttattttggagagataggaaggtcatttccatgtatgcataataatcctgcaaagtacaggtactttgtctaagaaacattggaagcaggttaaatgttttgtaaactttgaaatatatggtctaatgtttaagcagaattggaaaagactaagatcggttaacaaataacaacttttttttctttttttcttttgttttttgaagtgttggggtttggttttgttttttgagtcttttttttttaagtgaaatttattgaggaaaaatatgtgaaggaccttcactctaagatgttatatttttcttaaaaagtaactcctagtaggggtaccactgaatctgtacagagccgtaaaaactgaagttctgcctctgatgtattttgtgagtttgtttctttgaattttcattttacagttacttttccttgcatacaaacaagcatataaaatggcaacaaactgcacatgatttcacaaatattaaaaagtcttttaaaaagtattgccaaacattaatgttgatttctagttatttattctgggaatgtatagtatttgaaaacagaaattggtaccttgcacacatcatctgtaagctgtttggttttaaaatactgtagataattaaccaaggtagaatgaccttgtaatgtaactgctcttgggcaatattctctgtacatattagcgacaacagattggattttatgttgacatttgtttggttatagtgcaatatattttgtatgcaagcagtttcaataaagtttgatcttcctctgctaaattgatgttgatgcaatccttacaaatgattgcttttaaaattttaagctaggaaaagaaatctatagaaagtgttctgttacaaaatgtaactgttaccattggaaatttcacgtcataggaagttagcctttatctaccaactttcaagaacttgtttaataaagcgaaaaactcaaccaaatggtacaaaaccacagtgtaccattaaaatatgcactaagtctcttttttacaaaggctgtattcagcaaggcgctaacttgcttaaatgtgaattactaacttctaaaactgtactttgattcacatgttttcaaatggagttggagttcattcatattacaatatttgtgtgctaaacgtgtatgtttttcagttcaaagtcatgatgtttttaaaatcttattaaagtttcaaaaatctgaagattgtttatctagatgtaaatttttattaaaaagttgcacttatgaaaaagcaaaaaa

SEQ ID NO: 135289 - DNA, 3437 bp, Homo sapiens
  Payload ID: 6438
  Gene Symbol: FMR1
  Gene Name: fragile X mental retardation 1
  ENST ID: ENST00000370477
  CDS Start-End: 218-1966
gggccgcctctgagcgggcggcgggccgacggcgagcgcgggcggcggcggtgacggaggcgccgctgccagggggcgtgcggcagcgcggcggcggcggcggcggcggcggcggcggaggcggcggcggcggcggcggcggcggcggctgggcctcgagcgcccgcagcccacctctcgggggcgggctcccggcgctagcagggctgaagagaagatggaggagctggtggtggaagtgcggggctccaatggcgctttctacaaggcatttgtaaaggatgttcatgaagattcaataacagttgcatttgaaaacaactggcagcctgataggcagattccatttcatgatgtcagattcccacctcctgtaggttataataaagatataaatgaaagtgatgaagttgaggtgtattccagagcaaatgaaaaagagccttgctgttggtggttagctaaagtgaggatgataaagggtgagttttatgtgatagaatatgcagcatgtgatgcaacttacaatgaaattgtcacaattgaacgtctaagatctgttaatcccaacaaacctgccacaaaagatactttccataagatcaagctggatgtgccagaagacttacggcaaatgtgtgccaaagaggcggcacataaggattttaaaaaggcagttggtgccttttctgtaacttatgatccagaaaattatcagcttgtcattttgtccatcaatgaagtcacctcaaagcgagcacatatgctgattgacatgcactttcggagtctgcgcactaagttgtctctgataatgagaaatgaagaagctagtaagcagctggagagttcaaggcagcttgcctcgagatttcatgaacagtttatcgtaagagaagatctgatgggtctagctattggtactcatggtgctaatattcagcaagctagaaaagtacctggggtcactgctattgatctagatgaagatacctgcacatttcatatttatggagaggatcaggatgcagtgaaaaaagctagaagctttctcgaatttgctgaagatgtaatacaagttccaaggaacttagtaggcaaagtaataggaaaaaatggaaagctgattcaggagattgtggacaagtcaggagttgtgagggtgaggattgaggctgaaaatgagaaaaatgttccacaagaagaggaaattatgccaccaaattcccttccttccaataattcaagggttggacctaatgccccagaagaaaaaaaacatttagatataaaggaaaacagcacccatttttctcaacctaacagtacaaaagtccagaggggtatggtaccatttgtttttgtgggaacaaaggacagcatcgctaatgccactgttcttttggattatcacctgaactatttaaaggaagtagaccagttgcgtttggagagattacaaattgatgagcagttgcgacagattggagctagttctagaccaccaccaaatcgtacagataaggaaaaaagctatgtgactgatgatggtcaaggaatgggtcgaggtagtagaccttacagaaatagggggcacggcagacgcggtcctggatatacttcagaatctgaccacagagacgaactcagtgattggtcattagctccaacagaggaagagagggagagcttcctgcgcagaggagacggacggcggcgtggagggggaggaagaggacaaggaggaagaggacgtggaggaggcttcaaaggaaacgacgatcactcccgaacagataatcgtccacgtaatccaagagaggctaaaggaagaacaacagatggatcccttcagaatacctccagtgaaggtagtcggctgcgcacgggtaaagatcgtaaccagaagaaagagaagccagacagcgtggatggtcagcaaccactcgtgaatggagtaccctaaactgcataattctgaagttatatttcctataccatttccgtaattcttattccatattagaaaactttgttaggccaaagacaaatagtaggcaagatggcacagggcatgaaatgaacacaaattatgctaagaattttttattttttggtattggccataagcaacaattttcagatttgcacaaaaagataccttaaaatttgaaacattgcttttaaaactacttagcacttcagggcagattttagttttattttctaaagtactgagcagtgatattctttgttaatttggaccattttcctgcattgggtgatcattcaccagtacattctcagtttttcttaatatatagcatttatggtaatcatattagacttctgttttcaatctcgtatagaagtcttcatgaaatgctatgtcatttcatgtcctgtgtcagtttatgttttggtccacttttccagtattttagtggaccctgaaatgtgtgtgatgtgacatttgtcattttcattagcaaaaaaagttgtatgatctgtgccttttttatatcttggcaggtaggaatattatatttggatgcagagttcagggaagataagttggaaacactaaatgttaaagatgtagcaaaccctgtcaaacattagtactttatagaagaatgcatgctttccatatttttttccttacataaacatcaggttaggcagtataaagaataggacttgtttttgtttttgttttgttgcactgaagtttgataaatagtgttattgagagagatgtgtaatttttctgtatagacaggagaagaaagaactatcttcatctgagagaggctaaaatgttttcagctaggaacaaatcttcctggtcgaaagttagtaggatatgcctgctctttggcctgatgaccaattttaacttagagctttttttttttaattttgtctgccccaagttttgtgaaatttttcatattttaatttcaagcttattttggagagataggaaggtcatttccatgtatgcataataatcctgcaaagtacaggtactttgtctaagaaacattggaagcaggttaaatgttttgtaaactttgaaatatatggtctaatgtttaagcagaattggaaaagactaagatcggttaacaaataacaacttttttttctttttttcttttgttttttgaagtgttggggtttggttttgttttttgagtcttttttttttaagtgaaatttattgaggaaaaatatgtgaaggaccttcactctaagatgttatatttttcttaaaaagtaactcctagtaggggtaccactgaatctgtacagagccgtaaaaactgaagttctgcctctgatgtattttgtgagtttgtttctttgaattttcattttacagttacttttccttgcatacaaacaagcatataaaatggcaacaaactgca

SEQ ID NO: 135290 - DNA, 3699 bp, Homo sapiens
  Payload ID: 6438
  Gene Symbol: FMR1
  Gene Name: fragile X mental retardation 1
  ENST ID: ENST00000439526
  CDS Start-End: 129-1907
ggcggcggcggcggcggcggcggcggcggaggcggcggcggcggcggcggcggcggcggctgggcctcgagcgcccgcagcccacctctcgggggcgggctcccggcgctagcagggctgaagagaagatggaggagctggtggtggaagtgcggggctccaatggcgctttctacaaggcatttgtaaaggatgttcatgaagattcaataacagttgcatttgaaaacaactggcagcctgataggcagattccatttcatgatgtcagattcccacctcctgtaggttataataaagatataaatgaaagtgatgaagttgaggtgtattccagagcaaatgaaaaagagccttgctgttggtggttagctaaagtgaggatgataaagggtgagttttatgtgatagaatatgcagcatgtgatgcaacttacaatgaaattgtcacaattgaacgtctaagatctgttaatcccaacaaacctgccacaaaagatactttccataagatcaagctggatgtgccagaagacttacggcaaatgtgtgccaaagaggcggcacataaggattttaaaaaggcagttggtgccttttctgtaacttatgatccagaaaattatcagcttgtcattttgtccatcaatgaagtcacctcaaagcgagcacatatgctgattgacatgcactttcggagtctgcgcactaagttgtctctgataatgagaaatgaagaagctagtaagcagctggagagttcaaggcagcttgcctcgagatttcatgaacagtttatcgtaagagaagatctgatgggtctagctattggtactcatggtgctaatattcagcaagctagaaaagtacctggggtcactgctattgatctagatgaagatacctgcacatttcatatttatggagaggatcaggatgcagtgaaaaaagctagaagctttctcgaatttgctgaagatgtaatacaagttccaaggaacttagtagtaataggaaaaaatggaaagctgattcaggagattgtggacaagtcaggagttgtgagggtgaggattgaggctgaaaatgagaaaaatgttccacaagaagaggaaattatgccaccaaattcccttccttccaataattcaagggttggacctaatgccccagaagaaaaaaaacatttagatataaaggaaaacagcacccatttttctcaacctaacagtacaaaagtccagaggggtatggtaccatttgtttttgtgggaacaaaggacagcatcgctaatgccactgttcttttggattatcacctgaactatttaaaggaagtagaccagttgcgtttggagagattacaaattgatgagcagttgcgacagattggagctagttctagaccaccaccaaatcgtacagataaggaaaaaagctatgtgactgatgatggtcaaggaatgggtcgaggtagtagaccttacagaaatagggggcacggcagacgcggtcctggatatacttcaggaactaattctgaagcatcaaatgcttctgaaacagaatctgaccacagagacgaactcagtgattggtcattagctccaacagaggaagagagggagagcttcctgcgcagaggagacggacggcggcgtggagggggaggaagaggacaaggaggaagaggacgtggaggaggcttcaaaggaaacgacgatcactcccgaacagataatcgtccacgtaatccaagagaggctaaaggaagaacaacagatggatcccttcagaatacctccagtgaaggtagtcggctgcgcacgggtaaagatcgtaaccagaagaaagagaagccagacagcgtggatggtcagcaaccactcgtgaatggagtaccctaaactgcataattctgaagttatatttcctataccatttccgtaattcttattccatattagaaaactttgttaggccaaagacaaatagtaggcaagatggcacagggcatgaaatgaacacaaattatgctaagaattttttattttttggtattggccataagcaacaattttcagatttgcacaaaaagataccttaaaatttgaaacattgcttttaaaactacttagcacttcagggcagattttagttttattttctaaagtactgagcagtgatattctttgttaatttggaccattttcctgcattgggtgatcattcaccagtacattctcagtttttcttaatatatagcatttatggtaatcatattagacttctgttttcaatctcgtatagaagtcttcatgaaatgctatgtcatttcatgtcctgtgtcagtttatgttttggtccacttttccagtattttagtggaccctgaaatgtgtgtgatgtgacatttgtcattttcattagcaaaaaaagttgtatgatctgtgccttttttatatcttggcaggtaggaatattatatttggatgcagagttcagggaagataagttggaaacactaaatgttaaagatgtagcaaaccctgtcaaacattagtactttatagaagaatgcatgctttccatatttttttccttacataaacatcaggttaggcagtataaagaataggacttgtttttgtttttgttttgttgcactgaagtttgataaatagtgttattgagagagatgtgtaatttttctgtatagacaggagaagaaagaactatcttcatctgagagaggctaaaatgttttcagctaggaacaaatcttcctggtcgaaagttagtaggatatgcctgctctttggcctgatgaccaattttaacttagagctttttttttttaattttgtctgccccaagttttgtgaaatttttcatattttaatttcaagcttattttggagagataggaaggtcatttccatgtatgcataataatcctgcaaagtacaggtactttgtctaagaaacattggaagcaggttaaatgttttgtaaactttgaaatatatggtctaatgtttaagcagaattggaaaagactaagatcggttaacaaataacaacttttttttctttttttcttttgttttttgaagtgttggggtttggttttgttttttgagtcttttttttttaagtgaaatttattgaggaaaaatatgtgaaggaccttcactctaagatgttatatttttcttaaaaagtaactcctagtaggggtaccactgaatctgtacagagccgtaaaaactgaagttctgcctctgatgtattttgtgagtttgtttctttgaattttcattttacagttacttttccttgcatacaaacaagcatataaaatggcaacaaactgcacatgatttcacaaatattaaaaagtcttttaaaaagtattgccaaacattaatgttgatttctagttatttattctgggaatgtatagtatttgaaaacagaaattggtaccttgcacacatcatctgtaagctgtttggttttaaaatactgtagataattaaccaaggtagaatgaccttgtaatgtaactgctcttgggcaatattctctgtacatattagcgacaacagattggattttatgttgacatttgtttggttatagtgcaatatattttgtatgcaagcagtttcaataaagtttgatcttcctctgcta

SEQ ID NO: 135291 - DNA, 4271 bp, Homo sapiens
  Payload ID: 6438
  Gene Symbol: FMR1
  Gene Name: fragile X mental retardation 1
  Uniprot ID: Q06787
  ENST ID: ENST00000440235
  CDS Start-End: 230-1990
acttccggtggagggccgcctctgagcgggcggcgggccgacggcgagcgcgggcggcggcggtgacggaggcgccgctgccagggggcgtgcggcagcgcggcggcggcggcggcggcggcggcggcggaggcggcggcggcggcggcggcggcggcggctgggcctcgagcgcccgcagcccacctctcgggggcgggctcccggcgctagcagggctgaagagaagatggaggagctggtggtggaagtgcggggctccaatggcgctttctacaaggcatttgtaaaggatgttcatgaagattcaataacagttgcatttgaaaacaactggcagcctgataggcagattccatttcatgatgtcagattcccacctcctgtaggttataataaagatataaatgaaagtgatgaagttgaggtgtattccagagcaaatgaaaaagagccttgctgttggtggttagctaaagtgaggatgataaagggtgagttttatgtgatagaatatgcagcatgtgatgcaacttacaatgaaattgtcacaattgaacgtctaagatctgttaatcccaacaaacctgccacaaaagatactttccataagatcaagctggatgtgccagaagacttacggcaaatgtgtgccaaagaggcggcacataaggattttaaaaaggcagttggtgccttttctgtaacttatgatccagaaaattatcagcttgtcattttgtccatcaatgaagtcacctcaaagcgagcacatatgctgattgacatgcactttcggagtctgcgcactaagttgtctctgataatgagaaatgaagaagctagtaagcagctggagagttcaaggcagcttgcctcgagatttcatgaacagtttatcgtaagagaagatctgatgggtctagctattggtactcatggtgctaatattcagcaagctagaaaagtacctggggtcactgctattgatctagatgaagatacctgcacatttcatatttatggagaggatcaggatgcagtgaaaaaagctagaagctttctcgaatttgctgaagatgtaatacaagttccaaggaacttagtaggcaaagtaataggaaaaaatggaaagctgattcaggagattgtggacaagtcaggagttgtgagggtgaggattgaggctgaaaatgagaaaaatgttccacaagaagaggaaattatgccaccaaattcccttccttccaataattcaagggttggacctaatgccccagaagaaaaaaaacatttagatataaaggaaaacagcacccatttttctcaacctaacagtacaaaagtccagaggggtatggtaccatttgtttttgtgggaacaaaggacagcatcgctaatgccactgttcttttggattatcacctgaactatttaaaggaagtagaccagttgcgtttggagagattacaaattgatgagcagttgcgacagattggagctagttctagaccaccaccaaatcgtacagataaggaaaaaagctatgtgactgatgatggtcaaggaatgggtcgaggtagtagaccttacagaaatagggggcacggcagacgcggtcctggatatacttcagctccaacagaggaagagagggagagcttcctgcgcagaggagacggacggcggcgtggagggggaggaagaggacaaggaggaagaggacgtggaggaggcttcaaaggaaacgacgatcactcccgaacagataatcgtccacgtaatccaagagaggctaaaggaagaacaacagatggatcccttcagatcagagttgactgcaataatgaaaggagtgtccacactaaaacattacagaatacctccagtgaaggtagtcggctgcgcacgggtaaagatcgtaaccagaagaaagagaagccagacagcgtggatggtcagcaaccactcgtgaatggagtaccctaaactgcataattctgaagttatatttcctataccatttccgtaattcttattccatattagaaaactttgttaggccaaagacaaatagtaggcaagatggcacagggcatgaaatgaacacaaattatgctaagaattttttattttttggtattggccataagcaacaattttcagatttgcacaaaaagataccttaaaatttgaaacattgcttttaaaactacttagcacttcagggcagattttagttttattttctaaagtactgagcagtgatattctttgttaatttggaccattttcctgcattgggtgatcattcaccagtacattctcagtttttcttaatatatagcatttatggtaatcatattagacttctgttttcaatctcgtatagaagtcttcatgaaatgctatgtcatttcatgtcctgtgtcagtttatgttttggtccacttttccagtattttagtggaccctgaaatgtgtgtgatgtgacatttgtcattttcattagcaaaaaaagttgtatgatctgtgccttttttatatcttggcaggtaggaatattatatttggatgcagagttcagggaagataagttggaaacactaaatgttaaagatgtagcaaaccctgtcaaacattagtactttatagaagaatgcatgctttccatatttttttccttacataaacatcaggttaggcagtataaagaataggacttgtttttgtttttgttttgttgcactgaagtttgataaatagtgttattgagagagatgtgtaatttttctgtatagacaggagaagaaagaactatcttcatctgagagaggctaaaatgttttcagctaggaacaaatcttcctggtcgaaagttagtaggatatgcctgctctttggcctgatgaccaattttaacttagagctttttttttttaattttgtctgccccaagttttgtgaaatttttcatattttaatttcaagcttattttggagagataggaaggtcatttccatgtatgcataataatcctgcaaagtacaggtactttgtctaagaaacattggaagcaggttaaatgttttgtaaactttgaaatatatggtctaatgtttaagcagaattggaaaagactaagatcggttaacaaataacaacttttttttctttttttcttttgttttttgaagtgttggggtttggttttgttttttgagtcttttttttttaagtgaaatttattgaggaaaaatatgtgaaggaccttcactctaagatgttatatttttcttaaaaagtaactcctagtaggggtaccactgaatctgtacagagccgtaaaaactgaagttctgcctctgatgtattttgtgagtttgtttctttgaattttcattttacagttacttttccttgcatacaaacaagcatataaaatggcaacaaactgcacatgatttcacaaatattaaaaagtcttttaaaaagtattgccaaacattaatgttgatttctagttatttattctgggaatgtatagtatttgaaaacagaaattggtaccttgcacacatcatctgtaagctgtttggttttaaaatactgtagataattaaccaaggtagaatgaccttgtaatgtaactgctcttgggcaatattctctgtacatattagcgacaacagattggattttatgttgacatttgtttggttatagtgcaatatattttgtatgcaagcagtttcaataaagtttgatcttcctctgctaaattgatgttgatgcaatccttacaaatgattgcttttaaaattttaagctaggaaaagaaatctatagaaagtgttctgttacaaaatgtaactgttaccattggaaatttcacgtcataggaagttagcctttatctaccaactttcaagaacttgtttaataaagcgaaaaactcaaccaaatggtacaaaaccacagtgtaccattaaaatatgcactaagtctcttttttacaaaggctgtattcagcaaggcgctaacttgcttaaatgtgaattactaacttctaaaactgtactttgattcacatgttttcaaatggagttggagttcattcatattacaatatttgtgtgctaaacgtgtatgtttttcagttcaaagtcatgatgtttttaaaatcttattaaagtttcaaaaatctgaagattgtttatctagatgtaaatttttattaaaaagttgcacttatgaaaaagcaaaaaa

SEQ ID NO: 135292 - DNA, 1352 bp, Homo sapiens
  Payload ID: 6438
  Gene Symbol: FMR1
  Gene Name: fragile X mental retardation 1
  ENST ID: ENST00000621987
  CDS Start-End: 186-1079
ggccgcctctgagcgggcggcgggccgacggcgagcgcgggcggcggcggtgacggaggcggcggcggcggcggcggcggcggcggaggcggcggcggcggcggcggcggcggcggctgggcctcgagcgcccgcagcccacctctcgggggcgggctcccggcgctagcagggctgaagagaagatggaggagctggtggtggaagtgcggggctccaatggcgctttctacaaggcatttgtaaaggatgttcatgaagattcaataacagttgcatttgaaaacaactggcagcctgataggcagattccatttcatgatgtcagattcccacctcctgtaggttataataaagatataaatgaaagtgatgaagttgaggtgtattccagagcaaatgaaaaagagccttgctgttggtggttagctaaagtgaggatgataaagggtgagttttatgtgatagaatatgcagcatgtgatgcaacttacaatgaaattgtcacaattgaacgtctaagatctgttaatcccaacaaacctgccacaaaagatactttccataagatcaagctggatgtgccagaagacttacggcaaatgtgtgccaaagaggcggcacataaggattttaaaaaggcagttggtgccttttctgtaacttatgatccagaaaattatcagcttgtcattttgtccatcaatgaagtcacctcaaagcgagcacatatgctgattgacatgcactttcggagtctgcgcactaagttgtctctgataatgagaaatgaagaagctagtaagcagctggagagttcaaggcagcttgcctcgagatttcatgaacagtttatcgtaagagaagatctgatgggtctagctattggtactcatggtgctaatattcagcaagctagaaaagtacctggggtcactgctattgatctagatgaagatacctgcacatttcatatttatggagaggatcaggatgcagtgaaaaaagctagaagctttctcgaatttgctgaagatgtaatacaagttccaaggaacttagtagggttgaagatctgaacataggttacttaaatctaaaaagttccaaagctagaagaaacttcagatgtctctgggactttctgcaaagtcaatagtaattcttcattttgacttgagtagtgttttatcaccatcaccatcgtgagtatcagcaaatatttaggagctcttcaccaatactcctaaatgctgcagatatctttagtagaacatatcaaaaccaggtgcagttttatcaagaaagctacatatgtttttaatttgtaaataaaattgggacatactgcc

SEQ ID NO: 135293 - DNA, 1864 bp, Homo sapiens
  Payload ID: 6438
  Gene Symbol: FMR1
  Gene Name: fragile X mental retardation 1
  ENST ID: ENST00000621453
  CDS Start-End: 230-1864
acttccggtggagggccgcctctgagcgggcggcgggccgacggcgagcgcgggcggcggcggtgacggaggcgccgctgccagggggcgtgcggcagcgcggcggcggcggcggcggcggcggcggcggaggcggcggcggcggcggcggcggcggcggctgggcctcgagcgcccgcagcccacctctcgggggcgggctcccggcgctagcagggctgaagagaagatggaggagctggtggtggaagtgcggggctccaatggcgctttctacaaggcatttgtaaaggatgttcatgaagattcaataacagttgcatttgaaaacaactggcagcctgataggcagattccatttcatgatgtcagattcccacctcctgtaggttataataaagatataaatgaaagtgatgaagttgaggtgtattccagagcaaatgaaaaagagccttgctgttggtggttagctaaagtgaggatgataaagggtgagttttatgtgatagaatatgcagcatgtgatgcaacttacaatgaaattgtcacaattgaacgtctaagatctgttaatcccaacaaacctgccacaaaagatactttccataagatcaagctggatgtgccagaagacttacggcaaatgtgtgccaaagaggcggcacataaggattttaaaaaggcagttggtgccttttctgtaacttatgatccagaaaattatcagcttgtcattttgtccatcaatgaagtcacctcaaagcgagcacatatgctgattgacatgcactttcggagtctgcgcactaagttgtctctgataatgagaaatgaagaagctagtaagcagctggagagttcaaggcagcttgcctcgagatttcatgaacagtttatcgtaagagaagatctgatgggtctagctattggtactcatggtgctaatattcagcaagctagaaaagtacctggggtcactgctattgatctagatgaagatacctgcacatttcatatttatggagaggatcaggatgcagtgaaaaaagctagaagctttctcgaatttgctgaagatgtaatacaagttccaaggaacttagtaggcaaagtaataggaaaaaatggaaagctgattcaggagattgtggacaagtcaggagttgtgagggtgaggattgaggctgaaaatgagaaaaatgttccacaagaagagggtatggtaccatttgtttttgtgggaacaaaggacagcatcgctaatgccactgttcttttggattatcacctgaactatttaaaggaagtagaccagttgcgtttggagagattacaaattgatgagcagttgcgacagattggagctagttctagaccaccaccaaatcgtacagataaggaaaaaagctatgtgactgatgatggtcaaggaatgggtcgaggtagtagaccttacagaaatagggggcacggcagacgcggtcctggatatacttcaggaactaattctgaagcatcaaatgcttctgaaacagaatctgaccacagagacgaactcagtgattggtcattagctccaacagaggaagagagggagagcttcctgcgcagaggagacggacggcggcgtggagggggaggaagaggacaaggaggaagaggacgtggaggaggcttcaaaggaaacgacgatcactcccgaacagataatcgtccacgtaatccaagagaggctaaaggaagaacaacagatggatcccttcagatacctccagtgaaggtagtcggctgcgcacgggtaaagatcgtaaccagaagaaagagaagccagacagcgtggatggtcagcaaccactcgtga

SEQ ID NO: 135294 - DNA, 571 bp, Homo sapiens
  Payload ID: 6438
  Gene Symbol: FMR1
  Gene Name: fragile X mental retardation 1
  ENST ID: ENST00000475038
  CDS Start-End: 1-307
gtctctgataatgagaaatgaagaagctagtaagcagctggagagttcaaggcagcttgcctcgagatttcatgaacagtttatcgtaagagaagatctgatgggtctagctattggtactcatggtgctaatattcagcaagctagaaaagtacctggggtcactgctattgatctagatgaagatacctgcacatttcatatttatggagaggatcaggatgcagtgaaaaaagctagaagctttctcgaatttgctgaagatgtaatacaagttccaaggaacttagtagggttgaagatctgaacataggttacttaaatctaaaaagttccaaagctagaagaaacttcagatgtctctgggactttctgcaaagtcaatagtaattcttcattttgacttgagtagtgttttatcaccatcaccatcgcaaagtaataggaaaaaatggaaagctgattcaggagattgtggacaagtcaggagttgtgagggtgaggattgaggctgaaaatgagaaaaatgttccacaagaagaggaaattatgccaccaaattcccttcctt

SEQ ID NO: 135295 - DNA, 1409 bp, Homo sapiens
  Payload ID: 6438
  Gene Symbol: FMR1
  Gene Name: fragile X mental retardation 1
  ENST ID: ENST00000616614
  CDS Start-End: 225-455
cggtggagggccgcctctgagcgggcggcgggccgacggcgagcgcgggcggcggcggtgacggaggcgccgctgccagggggcgtgcggcagcgcggcggcggcggcggcggcggcggcggcggaggcggcggcggcggcggcggcggcggcggctgggcctcgagcgcccgcagcccacctctcgggggcgggctcccggcgctagcagggctgaagagaagatggaggagctggtggtggaagtgcggggctccaatggcgctttctacaaggcatttgtaaaggatgttcatgaagattcaataacagttgcatttgaaaacaagctgtctccatcgggtttctgtggtttaggagaccccaccatcccagtgcatgctgataacgtcatactgatcagcatccagctacccacagcaagaattgaccacctcgtgggatctaaaatttaaagggggaaaactggcagcctgataggcagattccatttcatgatgtcagattcccacctcctgtaggttataataaagatataaatgaaagtgatgaagttgaggtgtattccagagcaaatgaaaaagagccttgctgttggtggttagctaaagtgaggatgataaagggtgagttttatgtgatagaatatgcagcatgtgatgcaacttacaatgaaattgtcacaattgaacgtctaagatctgttaatcccaacaaacctgccacaaaagatactttccataagatcaagctggatgtgccagaagacttacggcaaatgtgtgccaaagaggcggcacataaggattttaaaaaggcagttggtgccttttctgtaacttatgatccagaaaattatcagcttgtcattttgtccatcaatgaagtcacctcaaagcgagcacatatgctgattgacatgcactttcggagtctgcgcactaagttgtctctgataatgagaaatgaagaagctagtaagcagctggagagttcaaggcagcttgcctcgagatttcatgaacagtttatcgtaagagaagatctgatgggtctagctattggtactcatggtgctaatattcagcaagctagaaaagtacctggggtcactgctattgatctagatgaagatacctgcacatttcatatttatggagaggatcaggatgcagtgaaaaaagctagaagctttctcgaatttgctgaagatgtaatacaagttccaaggaacttagtaggcaaagtaataggaaaaaatggaaagctgattcaggagattgtggacaagtcaggagttgtgagggtgaggattgaggctgaaaatgagaaaaatgttccacaagaagaggaaattatgccaccaaattcccttccttccaataattcaagggttggacctaatgccc

SEQ ID NO: 135296 - DNA, 470 bp, Homo sapiens
  Payload ID: 6438
  Gene Symbol: FMR1
  Gene Name: fragile X mental retardation 1
  ENST ID: ENST00000463120
  CDS Start-End: 1-360
gatgatggtcaaggaatgggtcgaggtagtagaccttacagaaatagggggcacggcagacgcggtcctggatatacttcaggaactaattctgaagcatcaaatgcttctgaaacagaatctgaccacagagacgaactcagtgattggtcattagctccaacagaggaagagagggagagcttcctgcgcagaggagacggacggcggcgtggagggggaggaagaggacaaggaggaagaggacgtggaggaggcttcaaaggaaacgacgatcactcccgaacagataatcgtccacgtaatccaagagaggctaaaggaagaacaacagatggatcccttcagaagaagacatgataggattgtgagtttttctctaactttggatgcagtgagatgaccagtgtgttccagttaaagaagaagagtgttttaaaatcataaaccaaataaagaatcctacctta

SEQ ID NO: 135297 - DNA, 1648 bp, Homo sapiens
  Payload ID: 6438
  Gene Symbol: FMR1
  Gene Name: fragile X mental retardation 1
  ENST ID: ENST00000616382
  CDS Start-End: 63-1322
tcgagcgcccgcagcccacctctcgggggcgggctcccggcgctagcagggctgaagagaagatggaggagctggtggtggaagtgcggggctccaatggcgctttctacaaggcatttgtaaaggatgttcatgaagattcaataacagttgcatttgaaaacaactggcagcctgataggcagattccatttcatgatgtcagattcccacctcctgtaggttataataaagatataaatgaaagtgatgaagttgaggtgtattccagagcaaatgaaaaagagccttgctgttggtggttagctaaagtgaggatgataaagggtgagttttatgtgatagaatatgcagcatgtgatgcaacttacaatgaaattgtcacaattgaacgtctaagatctgttaatcccaacaaacctgccacaaaagatactttccataagatcaagctggatgtgccagaagacttacggcaaatgtgtgccaaagaggcggcacataaggattttaaaaaggcagttggtgccttttctgtaacttatgatccagaaaattatcagcttgtcattttgtccatcaatgaagtcacctcaaagcgagcacatatgctgattgacatgcactttcggagtctgcgcactaagttgtctctgataatgagaaatgaagaagctagtaagcagctggagagttcaaggcagcttgcctcgagatttcatgaacagtttatcgtaagagaagatctgatgggtctagctattggtactcatggtgctaatattcagcaagctagaaaagtacctggggtcactgctattgatctagatgaagatacctgcacatttcatatttatggagaggatcaggatgcagtgaaaaaagctagaagctttctcgaatttgctgaagatgtaatacaagttccaaggaacttagtaggcaaagtaataggaaaaaatggaaagctgattcaggagattgtggacaagtcaggagttgtgagggtgaggattgaggctgaaaatgagaaaaatgttccacaagaagaggaaattatgccaccaaattcccttccttccaataattcaagggttggacctaatgccccagaagaaaaaaaacatttagatataaaggaaaacagcacccatttttctcaacctaacagtacaaaagtccagaggggtatggtaccatttgtttttgtgggaacaaaggacagcatcgctaatgccactgttcttttggattatcacctgaactatttaaaggaagtagaccagttgcgtttggagagacgatcactcccgaacagataatcgtccacgtaatccaagagaggctaaaggaagaacaacagatggatcccttcagatcagagttgactgcaataatgaaaggagtgtccacactaaaacattacagaatacctccagtgaaggtagtcggctgcgcacgggtaaagatcgtaaccagaagaaagagaagccagacagcgtggatggtcagcaaccactcgtgaatggagtaccctaaactgcataattctgaagttatatttcctataccatttccgtaattcttattccatattagaaaactttgttaggccaaagacaaatagtaggcaagatggcacagggca

SEQ ID NO: 135298 - DNA, 776 bp, Homo sapiens
  Payload ID: 6438
  Gene Symbol: FMR1
  Gene Name: fragile X mental retardation 1
  ENST ID: ENST00000495717
  CDS Start-End: 19-776
agcagggctgaagagaagatggaggagctggtggtggaagtgcggggctccaatggcgctttctacaaggcatttgtaaaggatgttcatgaagattcaataacagttgcatttgaaaacaactggcagcctgataggcagattccatttcatgatgtcagattcccacctcctgtaggttataataaagatataaatgaaagtgatgaagttgagttttatgtgatagaatatgcagcatgtgatgcaacttacaatgaaattgtcacaattgaacgtctaagatctgttaatcccaacaaacctgccacaaaagatactttccataagatcaagctggatgtgccagaagacttacggcaaatgtgtgccaaagaggcggcacataaggattttaaaaaggcagttggtgccttttctgtaacttatgatccagaaaattatcagcttgtcattttgtccatcaatgaagtcacctcaaagcgagcacatatgctgattgacatgcactttcggagtctgcgcactaagttgtctctgataatgagaaatgaagaagctagtaagcagctggagagttcaaggcagcttgcctcgagatttcatgaacagtttatcgtaagagaagatctgatgggtctagctattggtactcatggtgctaatattcagcaagctagaaaagtacctggggtcactgctattgatctagatgaagatacctgcacatttcatatttatggagaggatcaggatgcagtgaaaaaagctagaag

SEQ ID NO: 135299 - DNA, 1832 bp, Homo sapiens
  Payload ID: 6438
  Gene Symbol: FMR1
  Gene Name: fragile X mental retardation 1
  ENST ID: ENST00000621447
  CDS Start-End: 58-153
cgcccgcagcccacctctcgggggcgggctcccggcgctagcagggctgaagagaagatggaggagctggtggtggaagtgcggggctccaatggcgctttctacaagcattgggacttcggagagctccactgttctgggcgagggctgtgaagaaagagtagtaagaagcggtagtcggcaccaaatcacaatggcaactgatttttagtggcttctctttgtggatttcggaggagattttagatccaaaagtttcaggaagaccctaacatggcccagcagtgcattgaagaagttgatcatcgtgaatattcgcgtccccctttttgttaaacggggtaaattcaggaatgcacatgcttcagcgtctaaaaccattagcagcgctgctacttaaaaattgtgtgtgtgtgtttaagtttccaaagacctaaatatatgccatgaaacttcaggtaattaactgagagtatattattactagggcattttttttttaactgagcgaaaatatttttgtgcccctaagaacttgaccacatttcctttgaatttgtggtgttgcagtggactgaattgttgaggctttatataggcattcatgggtttactgtgctttttaaagttacaccattgcagatcaactaacacctttcagttttaaaaggaagatttacaaatttgatgtagcagtagtgcgtttgttggtatgtaggtgctgtataaattcatctataaattctcatttccttttgaatgtctataacctctttcaataatatcccaccttactacagtattttggcaatagaaggtgcgtgtggaaggaaggctggaaaatagctattagcagtgtccaacacaattcttaaatgtattgtagaatggcttgaatgtttcagacaggacacgtttggctataggaaaataaacaattgactttattctgtgtttaccaattttatgaagacatttggagatcagtatatttcataaatgagtaaagtatgtaaactgttccatactttgagcacaaagataaagccttttgctgtaaaaggaggcaaaaggtaaccccgcgtttatgttcttaacagtctcatgaatatgaaattgtttcagttgactctgcagtcaaaattttaatttcattgattttattgatccataatttcttctggtgagtttgcgtagaatcgttcacggtcctagattagtggttttggtcactagatttctggcactaataactataatacatatacatatatatgtgtgagtaacggctaatggttaggcaagattttgattgacctgtgatataaacttagattggatgccactaaagtttgcttatcacagagggcaagtagcacattatggccttgaagtacttattgttctcttccagcaacttatgatttgctccagtgattttgcttgcacactgactggaatataagaaatgccttctatttttgctattaattccctccttttttgttttgttttgtaacgaagttgtttaacttgaaggtgaatgaagaataggttggttgccccttagttccctgaggagaaatgttaatacttgaacaagtgtgtgtcagacaaattgctgttatgtttatttaattaagtttgatttctaagaaaatctcaaatggtctgcactgatggaagaacagtttctgtaacaaaaaagcttgaaatttttatatgacttataatactgctgtgagttttaaaagtaaagcaaaagtaaactgagttgcttgtccagtgggatggacaggaaagatgtgaaataaaaaccaatgaaaaatgaa

SEQ ID NO: 135300 - DNA, 1021 bp, Homo sapiens
  Payload ID: 6439
  Gene Symbol: FMR1NB
  Gene Name: fragile X mental retardation 1 neighbor
  Uniprot ID: Q8N0W7
  ENST ID: ENST00000370467
  CDS Start-End: 75-842
ggaagcttctgggccacggactgccggaccgttgggctgtgaggcagcgtctcagcgaggcggcacccggagccatgtcttcacataggaggaaagcgaaggggaggaataggagaagtcaccgtgccatgcgtgtggctcacttagagctggcaacttatgagttggcggcaactgagtcgaatcccgagagcagccatcctggatacgaggccgccatggctgacaggcctcagccaggatggcgggaatctctaaagatgcgggtcagcaaaccctttgggatgctcatgctctccatttggatcctgctgttcgtgtgctactacctgtcctactacctgtgctccgggtcctcatattttgtgcttgcaaatggacatatcctgcccaacagtgaaaatgctcatggccaatctctggaagaagattccgcattggaagctttgctgaattttttctttccaacaacttgcaatctgagggaaaatcaggtggcaaagccttgtaatgagctgcaagatcttagtgagagtgaatgtttgagacacaaatgctgtttttcatcatcggggaccacgagcttcaaatgttttgctccatttagagatgtgcctaaacagatgatgcaaatgtttgggcttggtgcgatcagccttatcctggtatgtctgcccatttattgccgctctcttttctggaggagcgaaccggccgatgatttacaaaggcaggacaacagagttgtaacgggtttgaagaaacaaagaaggaagcgaaagaggaagtctgaaatgttacagaaagcagcaagaggacgtgaggaacatggtgacgagtagcaagagaccaaagcattattttcccctcaagacaacagaaaccattcagagcagaggggactgtctcagccatgcaaacctcatggagcattttggaaagttaaaaattgattcttatttttgtcatgtttactttcaaacatgaaataaaattgagttctgttttcatgcatcaaacc

SEQ ID NO: 135301 - DNA, 562 bp, Homo sapiens
  Payload ID: 6439
  Gene Symbol: FMR1NB
  Gene Name: fragile X mental retardation 1 neighbor
  ENST ID: ENST00000489034
  CDS Start-End: 1-257
tcaaatgttttgctccatttagagatgtgcctaaacagatgatgcaaatgtttgggcttggtgcgatcagccttatcctggtatgtctgcccatttattgccgctctcttttctggaggagcgaaccggccgatgatttacaaaggcaggacaacagagttgtaacgggtttgaagaaacaaagaaggaagcgaaagaggaagtctgaaatgttacagaaagcagcaagaggacgtgaggaacatggtgacgagtagcaagagaccaaagtgtttgcttgagcaagtcctttaactttcttgggcttcatttcaccaatcttcagaatgagaaggttgatttgatgaataggaaaagtgatttatctcagaagaaaaaaaagaaaatctttatataagcattattttcccctcaagacaacagaaaccattcagagcagaggggactgtctcagccatgcaaacctcatggagcattttggaaagttaaaaattgattcttatttttgtcatgtttactttcaaacatgaaataaaattgagttctgttttcatgcatcaaa

SEQ ID NO: 135302 - DNA, 3277 bp, Homo sapiens
  Payload ID: 6440
  Gene Symbol: FXR1
  Gene Name: fragile X mental retardation, autosomal homolog 1
  Uniprot ID: P51114
  ENST ID: ENST00000305586
  CDS Start-End: 804-2414
aaagccggtgatgcagggtgcgcagggatcccacctggagagtcggggcggcacgttgagaccccaggggtgaagggcgggggatcccaatcccagccctgttttcccctcccctttccccgcctccttctcgcccctcccccctcctcccctctggttggaaagtttctagaatctcttcccagcggcctttgcggttccaacatggcggagctgacggtggaggttcgcggctctaacggggctttctacaagtcaattcacaatgaatcaaatgtccccattttggaactctgaagtatttataattgatctctatacatatctacaatctactgcttgtttctacttagactttgactccattactcattttgcctcacaaagtgagttggtactttgacaaaggttggaaaggacactagccacctgtgtgtgcactgaaatcatgtacgcttgaacatttggaattttatgtccagccataatccacttgcatatgcactttgtggaaactgtggtcttcagaactctggaagaatgagaatggcggagtggaaaagagtcctggatttgaagtaaacagatgagaattctagggatttatcaaagatgttcatgaagactcccttacagttgtttttgaaaataattggcaaccagaacgccaggttccatttaatgaagttagattaccaccaccacctgatataaaaaaagaaattagtgaaggagatgaagtagaggtatattcaagagcaaatgaccaagagccatgtgggtggtggttggctaaagttcggatgatgaaaggagaattttatgtcattgaatatgctgcttgtgacgctacttacaatgaaatagtcacatttgaacgacttcggcctgtcaatcaaaataaaactgtcaaaaaaaataccttctttaaatgcacagtggatgttcctgaggatttgagagaggcgtgtgctaatgaaaatgcacataaagattttaagaaagcagtaggagcatgcagaattttttaccatccagaaacaacacagctaatgatactgtctgccagtgaagcaactgtgaagagagtaaacatcttaagtgacatgcatttgcgaagtattcgtacgaagttgatgcttatgtccagaaatgaagaggccactaagcatttagaatgcacaaaacaacttgcagcagcttttcatgaggaatttgttgtgagagaagatttaatgggcctggcaataggaacacatggtagtaacatccagcaagctaggaaggttcctggagttaccgccattgagctagatgaagatactggaacattcagaatctacggagagagtgctgatgctgtaaaaaaggctagaggtttcttggaatttgtggaggattttattcaggttcctaggaatctcgttggaaaagtaattggaaaaaatggcaaagttattcaagaaatagtggacaaatctggtgtggttcgagtgagaattgaaggggacaatgaaaataaattacccagagaagacggtatggttccatttgtatttgttggcactaaagaaagcattggaaatgtgcaggttcttctagagtatcatattgcctatctaaaggaagtagaacagctaagaatggaacgcctacagattgatgaacagctgcgacagattggttctaggtcttatagcggaagaggcagaggtcgtcggggacctaattacacctccggttatggtacaaattctgagctgtctaacccctctgaaacggaatctgagcgtaaagacgagctgagtgattggtcattggcaggagaagatgatcgagacagccgacatcagcgtgacagcaggagacgcccaggaggaagaggcagaagtgtttcagggggtcgaggtcgtggtggaccacgtggtggcaaatcctccatcagttctgtgctcaaagatccagacagcaatccatacagcttacttgataatacagaatcagatcagactgcagacactgatgccagcgaatctcatcacagtactaaccgtcgtaggcggtctcgtagacgaaggactgatgaagatgctgttctgatggatggaatgactgaatctgatacagcttcagttaatgaaaatgggctagtcacagttgcagattatatttctagagctgagtctcagagcagacaaagaaacctcccaagggaaactttggctaaaaacaagaaagaaatggcaaaagatgtgattgaagagcatggtccttcagaaaaggcaataaacggcccaactagtgcttctggcgatgacatttctaagctacagcgtactccaggagaagaaaagattaataccttaaaagaagaaaacactcaagaagcagcagtcctgaatggtgtttcataaactgaagaagttcctagtttacagttcttttacattacatttacaatagtgcttgtacaagcttgccaaagatagaatatggatcgccagtctttacatcgcactttcagttcctccatttggaattcaaaaaggggagggatcctgaagaaatcatatgttaaacatactttgacacctactgtgttataaaatatatcatcagatgtgccttgagaatagtatatgtaacattaaaaaaaagttgctggctataggaaatgttattttgttttcaaaatatggcagagatggggggtggtgggtggggtgggatccctaacgtaatattctttatgaaagcattagctgcttttgttacatttttaatatgcaaccacttcttcacctgaggaaaactagaatgaaatgcagtctaaaatattttgcactgaattgtaatttcttcattagtttagtctggaaactggtctgttttaatgtgttttttaaatgctgtatgtagaggaaaatctgcagaccactggaatacatttgttaaactctcatctgcagggacactgggcgatacttggcagtgactgttctaccttgaggctttgtttggtttatttattaaagtgtacagtatttaaaaatcaaacatagctttagttaaaacactaagctgaattagtcatgtccattcagacataacctgaactactgaaaagatcaatttccagaaggtttattctgtataaactacatgttagtcttcagtagagtatcttttttttttccttttttttttttttatttcggttgtttgatgtgcaatatgtttttgtatgcaggtagtaaataaactttgatcttccatt

SEQ ID NO: 135303 - DNA, 8711 bp, Homo sapiens
  Payload ID: 6440
  Gene Symbol: FXR1
  Gene Name: fragile X mental retardation, autosomal homolog 1
  Uniprot ID: P51114
  ENST ID: ENST00000357559
  CDS Start-End: 385-2250
atgccgatgcgccgggcaggctgtgcctgggcagttcattctgtggcagctggaggcactactcggccgccgcggtgcgaactgcgggcactgtggggcggagacctaggggcgggtcaacaaaggtcgggcgattgtgtctggaggcaaatccgacgtagacggcggcaggcggagcccaaagccggtgatgcagggtgcgcagggatcccacctggagagtcggggcggcacgttgagaccccaggggtgaagggcgggggatcccaatcccagccctgttttcccctcccctttccccgcctccttctcgcccctcccccctcctcccctctggttggaaagtttctagaatctcttcccagcggcctttgcggttccaacatggcggagctgacggtggaggttcgcggctctaacggggctttctacaagggatttatcaaagatgttcatgaagactcccttacagttgtttttgaaaataattggcaaccagaacgccaggttccatttaatgaagttagattaccaccaccacctgatataaaaaaagaaattagtgaaggagatgaagtagaggtatattcaagagcaaatgaccaagagccatgtgggtggtggttggctaaagttcggatgatgaaaggagaattttatgtcattgaatatgctgcttgtgacgctacttacaatgaaatagtcacatttgaacgacttcggcctgtcaatcaaaataaaactgtcaaaaaaaataccttctttaaatgcacagtggatgttcctgaggatttgagagaggcgtgtgctaatgaaaatgcacataaagattttaagaaagcagtaggagcatgcagaattttttaccatccagaaacaacacagctaatgatactgtctgccagtgaagcaactgtgaagagagtaaacatcttaagtgacatgcatttgcgaagtattcgtacgaagttgatgcttatgtccagaaatgaagaggccactaagcatttagaatgcacaaaacaacttgcagcagcttttcatgaggaatttgttgtgagagaagatttaatgggcctggcaataggaacacatggtagtaacatccagcaagctaggaaggttcctggagttaccgccattgagctagatgaagatactggaacattcagaatctacggagagagtgctgatgctgtaaaaaaggctagaggtttcttggaatttgtggaggattttattcaggttcctaggaatctcgttggaaaagtaattggaaaaaatggcaaagttattcaagaaatagtggacaaatctggtgtggttcgagtgagaattgaaggggacaatgaaaataaattacccagagaagacggtatggttccatttgtatttgttggcactaaagaaagcattggaaatgtgcaggttcttctagagtatcatattgcctatctaaaggaagtagaacagctaagaatggaacgcctacagattgatgaacagctgcgacagattggttctaggtcttatagcggaagaggcagaggtcgtcggggacctaattacacctccggttatggtacaaattctgagctgtctaacccctctgaaacggaatctgagcgtaaagacgagctgagtgattggtcattggcaggagaagatgatcgagacagccgacatcagcgtgacagcaggagacgcccaggaggaagaggcagaagtgtttcagggggtcgaggtcgtggtggaccacgtggtggcaaatcctccatcagttctgtgctcaaagatccagacagcaatccatacagcttacttgataatacagaatcagatcagactgcagacactgatgccagcgaatctcatcacagtactaaccgtcgtaggcggtctcgtagacgaaggactgatgaagatgctgttctgatggatggaatgactgaatctgatacagcttcagttaatgaaaatgggctagtcacagttgcagattatatttctagagctgagtctcagagcagacaaagaaacctcccaagggaaactttggctaaaaacaagaaagaaatggcaaaagatgtgattgaagagcatggtccttcagaaaaggcaataaacggcccaactagtgcttctggcgatgacatttctaagctacagcgtactccaggagaagaaaagattaataccttaaaagaagaaaacactcaagaagcagcagtcctgaatggtgtttcataaactgaagaagttcctagtttacagttcttttacattacatttacaatagtgcttgtacaagcttgccaaagatagaatatggatcgccagtctttacatcgcactttcagttcctccatttggaattcaaaaaggggagggatcctgaagaaatcatatgttaaacatactttgacacctactgtgttataaaatatatcatcagatgtgccttgagaatagtatatgtaacattaaaaaaaagttgctggctataggaaatgttattttgttttcaaaatatggcagagatggggggtggtgggtggggtgggatccctaacgtaatattctttatgaaagcattagctgcttttgttacatttttaatatgcaaccacttcttcacctgaggaaaactagaatgaaatgcagtctaaaatattttgcactgaattgtaatttcttcattagtttagtctggaaactggtctgttttaatgtgttttttaaatgctgtatgtagaggaaaatctgcagaccactggaatacatttgttaaactctcatctgcagggacactgggcgatacttggcagtgactgttctaccttgaggctttgtttggtttatttattaaagtgtacagtatttaaaaatcaaacatagctttagttaaaacactaagctgaattagtcatgtccattcagacataacctgaactactgaaaagatcaatttccagaaggtttattctgtataaactacatgttagtcttcagtagagtatcttttttttttccttttttttttttttatttcggttgtttgatgtgcaatatgtttttgtatgcaggtagtaaataaactttgatcttccatttgctgaatttttttaactttctactttttacaccaattgttgcaaaatagttggagctattaataggcttaggatagtatactttgctttttaaaaagcatttatacttgctcataaatagcattaaaatgtcagttggccatttaatcattttgtaatgaatcatctgaaatctttacacaagtttaggctgttagatgcataggtaattaataatacatgtgataattagcaaaaaaacctaacaaaattctaatcaaaggcaactttggaagacaatgggggatagaagggatgacaagcaatttttaaataataggccaatgatttgctttattcattctcaacttattttgaaggctctcatatcagtgaccaaaaatcagttattaaactttatgtatatattttagccagagcttaatttttatgaagataaagacatgaagtttaacaatggacaacagttagtacagctaattgtgaggtcaagtaattgttagacataggggaaggctttgttccacaatattatatggaccactgaacaagaatgacagccctttgttatcacttggcatatgaaaagtgttgtgtgcatagtttgtgttaattttttatgtgcataaaaatgtgattttaatttatatgctctgaaggataattcagggtatagttaaaaatgtacaatgtgccagttcagtatatataaccctagccctcaaattattctgattaaggttaaaatgtgctggtattacgtgctttttcctgaggccttctgattggttcttggtaacagaattttaaagtaaggtgtgagtagtgcaactcctgtcctttatatataaagatatcaagtaatttcatgtcctgatatttaaaaaaattacccacaaatgtgtttttttaaatcgatcaaagctagcaacaggttaaattgtctcagttctcttacataattgggttaaaaattataaggtattagaagaattttaattaatgccaaattggtaaatatggtgtaaaaaaaaaaaaaaagacttttcattttctcccacatagaatagtcagatatattaaacatcccttttccataaagatggtttcaatgggaatggaagaaacaaaatcttaaaagagtgagtatagctgaaccaattcttcattctagcaataaccacactaagttcattactttacaaatgactaaacccaatgtcttgtcctttaaaaaatataggtagtgcagaattgtgataaatacgcatttgtttttttagagagccccactccccaaagggtagccattaattcaggtagccttttaaatgtatttgagagggttccgtctttttggctgctatcctagttaggtgagatgttgctatgggaagaacttgccactatacactaaacagacacttaagcaaaagatgtattctggagcctggcacagtagcttatgtctttggttctagctactcaggagcctgaggtgggagcatcatttgaactcagttctgggccactgagaccctctttaaagagaaggaaaaaaaggtattctggaagatcttgtgcagttgcaacaatgtttcagcatatatatgtgaattcatatatgacacctgaacggaatcatgaagtaacagctgagattatatggtggcaaaaatgacctgcttttcctgaagctttgggaggcctaggattcttgctttaggcatcacctttgttaagccttaaagggggctacaacttgtgcaaaatggtgtctctggtaacacttcagaaataattggcaaaagtgtaataggaatacacaaatctttattttgaaataatcttgtattttaatgtggaattagaagcagcacatcaaactggtgagttcacagaaacttacctgagatgatgctgggttccattgctgttgtgctaagtcacgtatttttgtagctgctgttagctgtgtctagcgttttgtaacctaaggagggtcttatagaagttggtatgttaactaaatcttggactgggaaacagcaccatttgtatcctctgcaaacagatttacgcttttgaggctcaaaccaactagtgttctcatgggctgttgcctaaggacagataaacatggaaaacaggctatgtccagggacagatgattggtggttaagaattacagtaaaggaaaattacacctggattttcttctgtaaagtttcaaggaacttggatttgaactgtgaatctactgttttggcaaaaaatctcaaagaaaaggatgtttgttactgtctcagtcttcctgtctttgctacacgatttggatcccttacgctttttcgttaagaatatctgtctgctatagtgaatttgctagccccttatttttttttttaattttagttctttattagaacgtgtacttgaatggactgtagttgctcataacccatgttaatctctgatagtatttgggttttatttcaggagcttttgcaataaagcagtaactgcaatctgctaaagtcagactgttagcaagtggtgttaaaactgatttaagtccattacactgaacagtaggaaattaccacttttgtaaggctcaaaaatgatcaactattaacagtttcttatggttcagtctaattacaaatttttaaaaagtttatcagtgtatcatttcagattcatctgtatcttctgtaatattatttccagtactgaggtaaggtacacaaaaattcccctggaaaaactatattctagttttgtaagatgatttcccacagtccatttgcttatttcttcctttgataattcaaaaagatgctttaggtaatggtacagaattagaagctgctattttagctctattaactttttctctatggtttcaattttatccaaccagagagggctggcctagttggtatctttaaggcccttccagtagtaatttgagtctagtcacatgtcagaccctgagcaacacctaaccaaatgcccaagtattctcataaggagtatgctgaatttaagtggtgtttgttttacatatgtatccatcccagacattttcaactatgctgaatgcaatctataagatattccaaacaaggacaaagtaatttttcacaagtcttacagccccactattaagtatgctactaattagcttcttgaatttctttgtatttcagtgattgggatgttctttttttttgggaaagtttttttacccctttgtaccctcttaattggattaactgtaaaatgtacatattaattttctagttttagagaccattttcattaaaaatattttccaatagtttttctagataaacaatttatacttaattgttgcttggttgcttacatttcaacctctaggcttcctttttcagctaacttggctgtcttcaggttgtaaagaaaaatgtaaacatatatttgaaatttcattaactgaaactgctgtaaggtgttagcaaatgttaaccataacagattatcccatatcattggactgttctattattgggtcaggaataataggtgacacaggatagaagctcttcctatatatatcttgttgctaaggcagtagttggctctaagctgataaacagcacactgtacagcagtccaaaaactaaaaccagagcttaggtcattcaagttaactggtactcaaggttactcattccaggatactttacataaccaaaaacctaggagagcattctacattgtaattttttttttactttgtttacataaaatttacagggttttgtttttttaagcttagtctgttctttgacattgttgattcatgttctaaattttcatcagatttaacatgtttggaggttcttgtgcactcaatgtgaacctactacaagcttctgaactgcaaaaccttttttttaggtcactgtcaacagaaagatgccttatagaatttctcatgattgaaacagaactctgcattctaacctaaaacccctctaaccctttaaatgaagcattatgcctgcgtgaaattttatttttagacatttctgatactaggttttctttacgggggggcatacatattcagtatactgaatttatacagctttcagtgtggcaatatattaagaagctagttccctaatttttctcagttctcattggttttccatttaaatgtttccgtaagtactctcatcatttggaaaatacttgatggcaggagaacttgcttaaaactaaaggtggagaaagagttaacttccaggacaacccattatagctcacttcttaccaacaaagcagtttttatacagcaccttaggactcatttctaatgtcaacccagatggccagtaaaggcaagggaagaggctaagtgactcacaaaaatctctgatattgaggtctaatgtgaaggctatagataggaattccccacaaacttctaatgaggactaatatgaacagcaaattggagaagacaccaaggacctaattttagtttcactagccgtgggaccttagaaaaaagaccatttgctctggacttttgtttcccaagccataaaatgtggaagaatcttcacaatttcaagttggtcatgtatatttcccttttacagagaaagctgaagcctcgaggctcagatttacctggcttctgtttacctggcttctgcagaagtttaacttgtaacctacctctcattcccaaagtgtgtttaatcatgccgccttctttaaaatatatctggaagcaccaatgagtaaagacaaaggccccaagctagatctgtagagataagtactagactcacatctcagtactatcaaggaaaacatgcttaggttatcagaattgtgaaggccatagtacaaaaagttaagagaacggaactcaggatctgagaaagatcagccattctcagcatgttgccttggctgcttaaccttactaaacttccatttcctcacatgtaaaatgtacatcataataactagtctactgagataagggaagaatacttagcacagtgctagtacactgtaagtactcaaatgttacagatccaagtattttgtaagaaaataccagcaaaagataaaagtttttttatggatcgtatttgtatcaatcacctacatgatctagagccctcacatggataacatttaaatgttcagtttgcctaatagccttcaatgaaacacggattcttctacttaaaaaaggtaagcctggagaaaataaaactgattactatgcaagaaaaaaatgtgctctgctgtgctccttggtatttttaagtggtttccattgtcttaacacctgtcttaaaacgggtatgttgtttgcactgaaccctcaaaagtatttatacctattaagttaaatttccctttttagagttaatgcttcattgcctgtcggcatattatcactatctgtctttgaaaaattttcttttaagtctcaactatttcttcataaagctcttgttcagagaaacattttttgatttgtccaatggactgaaataaaaggttagtaaaccaaaa

SEQ ID NO: 135304 - DNA, 2651 bp, Homo sapiens
  Payload ID: 6440
  Gene Symbol: FXR1
  Gene Name: fragile X mental retardation, autosomal homolog 1
  Uniprot ID: P51114
  ENST ID: ENST00000445140
  CDS Start-End: 15-1634
tttgcggttccaacatggcggagctgacggtggaggttcgcggctctaacggggctttctacaagggatttatcaaagatgttcatgaagactcccttacagttgtttttgaaaataattggcaaccagaacgccaggttccatttaatgaagttagattaccaccaccacctgatataaaaaaagaaattagtgaaggagatgaagtagaggtatattcaagagcaaatgaccaagagccatgtgggtggtggttggctaaagttcggatgatgaaaggagaattttatgtcattgaatatgctgcttgtgacgctacttacaatgaaatagtcacatttgaacgacttcggcctgtcaatcaaaataaaactgtcaaaaaaaataccttctttaaatgcacagtggatgttcctgaggatttgagagaggcgtgtgctaatgaaaatgcacataaagattttaagaaagcagtaggagcatgcagaattttttaccatccagaaacaacacagctaatgatactgtctgccagtgaagcaactgtgaagagagtaaacatcttaagtgacatgcatttgcgaagtattcgtacgaagttgatgcttatgtccagaaatgaagaggccactaagcatttagaatgcacaaaacaacttgcagcagcttttcatgaggaatttgttgtgagagaagatttaatgggcctggcaataggaacacatggtagtaacatccagcaagctaggaaggttcctggagttaccgccattgagctagatgaagatactggaacattcagaatctacggagagagtgctgatgctgtaaaaaaggctagaggtttcttggaatttgtggaggattttattcaggttcctaggaatctcgttggaaaagtaattggaaaaaatggcaaagttattcaagaaatagtggacaaatctggtgtggttcgagtgagaattgaaggggacaatgaaaataaattacccagagaagacggtatggttccatttgtatttgttggcactaaagaaagcattggaaatgtgcaggttcttctagagtatcatattgcctatctaaaggaagtagaacagctaagaatggaacgcctacagattgatgaacagctgcgacagattggttctaggtcttatagcggaagaggcagaggtcgtcggggacctaattacacctccggttatggtacaaattctgagctgtctaacccctctgaaacggaatctgagcgtaaagacgagctgagtgattggtcattggcaggagaagatgatcgagacagccgacatcagcgtgacagcaggagacgcccaggaggaagaggcagaagtgtttcagggggtcgaggtcgtggtggaccacgtggtggcaaatcctccatcagttctgtgctcaaagatccagacagcaatccatacagcttacttgataatacagaatcagatcagactgcagacactgatgccagcgaatctcatcacagtactaaccgtcgtaggcggtctcgtagacgaaggactgatgaagatgctgttctgatggatggaatgactgaatctgatacagcttcagttaatgaaaatgggctaggcaaaagatgtgattgaagagcatggtccttcagaaaaggcaataaacggcccaactagtgcttctggcgatgacatttctaagctacagcgtactccaggagaagaaaagattaataccttaaaagaagaaaacactcaagaagcagcagtcctgaatggtgtttcataaactgaagaagttcctagtttacagttcttttacattacatttacaatagtgcttgtacaagcttgccaaagatagaatatggatcgccagtctttacatcgcactttcagttcctccatttggaattcaaaaaggggagggatcctgaagaaatcatatgttaaacatactttgacacctactgtgttataaaatatatcatcagatgtgccttgagaatagtatatgtaacattaaaaaaaagttgctggctataggaaatgttattttgttttcaaaatatggcagagatggggggtggtgggtggggtgggatccctaacgtaatattctttatgaaagcattagctgcttttgttacatttttaatatgcaaccacttcttcacctgaggaaaactagaatgaaatgcagtctaaaatattttgcactgaattgtaatttcttcattagtttagtctggaaactggtctgttttaatgtgttttttaaatgctgtatgtagaggaaaatctgcagaccactggaatacatttgttaaactctcatctgcagggacactgggcgatacttggcagtgactgttctaccttgaggctttgtttggtttatttattaaagtgtacagtatttaaaaatcaaacatagctttagttaaaacactaagctgaattagtcatgtccattcagacataacctgaactactgaaaagatcaatttccagaaggtttattctgtataaactacatgttagtcttcagtagagtatcttttttttttccttttttttttttttatttcggttgtttgatgtgcaatatgtttttgtatgcaggtagtaaataaactttgatcttccatt

SEQ ID NO: 135305 - DNA, 571 bp, Homo sapiens
  Payload ID: 6440
  Gene Symbol: FXR1
  Gene Name:: fragile X mental retardation, autosomal homolog 1
  ENST ID: ENST00000484790
  CDS Start-End: 345-571
aaccctggacctggccactcttctctggcggaagcaggttccgtgcgggccctacagcagcatccaagcccctgtcctctcggcacctgagttcttgtttggcatccaggaagaattaggtcacccacacggattgaaagggatttatcaaagatgttcatgaagactcccttacagttgtttttgaaaataattggcaaccagaacgccaggttccatttaatgaagttagattaccaccaccacctgatataaaaaaagaaattagtgaaggagatgaagtagaggtatattcaagagcaaatgaccaagagccatgtgggtggtggttggctaaagttcggatgatgaaaggagaattttatgtcattgaatatgctgcttgtgacgctacttacaatgaaatagtcacatttgaacgacttcggcctgtcaatcaaaataaaactgtcaaaaaaaataccttctttaaatgcacagtggatgttcctgaggatttgagagaggcgtgtgctaatgaaaatgcacataaagattttaagaaagcagtaggagcatgcagaatttttta

SEQ ID NO: 135306 - DNA, 562 bp, Homo sapiens
  Payload ID: 6440
  Gene Symbol: FXR1
  Gene Name: fragile X mental retardation, autosomal homolog 1
  ENST ID: ENST00000484042
  CDS Start-End: 110-562
tttagcgtagaagcaatttaattttaattagtttttttccaatttagaagataatacatggtcactgaggtaattttggaactcagcaaaaactagaagttgccttgagatgagagctgttaacattttagtgtatttctttggttttttttggtggtttttcaatgtacagggatttatcaaagatgttcatgaagactcccttacagttgtttttgaaaataattggcaaccagaacgccaggttccatttaatgaagttagattaccaccaccacctgatataaaaaaagaaattagtgaaggagatgaagtagaggtatattcaagagcaaatgaccaagagccatgtgggtggtggttggctaaagttcggatgatgaaaggagaattttatgtcattgaatatgctgcttgtgacgctacttacaatgaaatagtcacatttgaacgacttcggcctgtcaatcaaaataaaactgtcaaaaaaaataccttctttaaatgcacagtggatgttcctgaggatttgagagaggcgtgtgctaatgaaaatgcacat

SEQ ID NO: 135307 - DNA, 739 bp, Homo sapiens
  Payload ID: 6440
  Gene Symbol: FXR1
  Gene Name: fragile X mental retardation, autosomal homolog 1
  ENST ID: ENST00000482125
  CDS Start-End: 1-739
gtacaaattctgagctgtctaacccctctgaaacggaatctgagcgtaaagacgagctgagtgattggtcattggcaggagaagatgatcgagacagccgacatcagcgtgacagcaggagacgcccaggaggaagaggcagaagtgtttcagggggtcgaggtcgtggtggaccacgtggtggcaaatcctccatcagttctgtgctcaaagatccagacagcaatccatacagcttacttgataatacagaatcagatcagactgcagacactgatgccagcgaatctcatcacagtactaaccgtcgtaggcggtctcgtagacgaaggactgatgaagatgctgttctgatggatggaatgactgaatctgatacagcttcagttaatgaaaatgggctagatgatagtgaaaaaaaaccccagcgacgcaatcgtagccgcaggcgtcgcttcaggggtcaggcagaagatagacagccagtcacagttgcagattatatttctagagctgagtctcagagcagacaaagaaacctcccaagggaaactttggctaaaaacaagaaagaaatggcaaaagatgtgattgaagagcatggtccttcagaaaaggcaataaacggcccaactagtgcttctggcgatgacatttctaagctacagcgtactccaggagaagaaaagattaataccttaaaagaagaaaacactcaagaagcagcagtcctgaatgg

SEQ ID NO: 135308 - DNA, 1996 bp, Homo sapiens
  Payload ID: 6440
  Gene Symbol: FXR1
  Gene Name: fragile X mental retardation, autosomal homolog 1
  ENST ID: ENST00000480918
  CDS Start-End: 84-1910
gtgtagtgttttgagtccggcttccatttagcgtagaagcaatttaattttaattagtttttttccaatttagaagataatacatggtcactgagggatttatcaaagatgttcatgaagactcccttacagttgtttttgaaaataattggcaaccagaacgccaggttccatttaatgaagttagattaccaccaccacctgatataaaaaaagaaattagtgaaggagatgaagtagaggtatattcaagagcaaatgaccaagagccatgtgggtggtggttggctaaagttcggatgatgaaaggagaattttatgtcattgaatatgctgcttgtgacgctacttacaatgaaatagtcacatttgaacgacttcggcctgtcaatcaaaataaaactgtcaaaaaaaataccttctttaaatgcacagtggatgttcctgaggatttgagagaggcgtgtgctaatgaaaatgcacataaagattttaagaaagcagtaggagcatgcagaattttttaccatccagaaacaacacagctaatgatactgtctgccagtgaagcaactgtgaagagagtaaacatcttaagtgacatgcatttgcgaagtattcgtacgaagttgatgcttatgtccagaaatgaagaggccactaagcatttagaatgcacaaaacaacttgcagcagcttttcatgaggaatttgttgtgagagaagatttaatgggcctggcaataggaacacatggtagtaacatccagcaagctaggaaggttcctggagttaccgccattgagctagatgaagatactggaacattcagaatctacggagagagtgctgatgctgtaaaaaaggctagaggtttcttggaatttgtggaggattttattcaggttcctaggaatctcgttggaaaagtaattggaaaaaatggcaaagttattcaagaaatagtggacaaatctggtgtggttcgagtgagaattgaaggggacaatgaaaataaattacccagagaagacggtatggttccatttgtatttgttggcactaaagaaagcattggaaatgtgcaggttcttctagagtatcatattgcctatctaaaggaagtagaacagctaagaatggaacgcctacagattgatgaacagctgcgacagattggttctaggtcttatagcggaagaggcagaggtcgtcggggacctaattacacctccggttatggtacaaattctgagctgtctaacccctctgaaacggaatctgagcgtaaagacgagctgagtgattggtcattggcaggagaagatgatcgagacagccgacatcagcgtgacagcaggagacgcccaggaggaagaggcagaagtgtttcagggggtcgaggtcgtggtggaccacgtggtggcaaatcctccatcagttctgtgctcaaagatccagacagcaatccatacagcttacttgataatacagaatcagatcagactgcagacactgatgccagcgaatctcatcacagtactaaccgtcgtaggcggtctcgtagacgaaggactgatgaagatgctgttctgatggatggaatgactgaatctgatacagcttcagttaatgaaaatgggctagtcacagttgcagattatatttctagagctgagtctcagagcagacaaagaaacctcccaagggaaactttggctaaaaacaagaaagaaatggcaaaagatgtgattgaagagcatggtccttcagaaaaggcaataaacggcccaactagtgcttctggcgatgacatttctaagctacagcgtactccaggagaagaaaagattaataccttaaaagaagaaaacactcaagaagcagcagtcctgaatggtgtttcataaactgaagaagttcctagtttacagttcttttacattacatttacaatagtgcttgtacaagcttgccaaagatagaatatggatcg

SEQ ID NO: 135309 - DNA, 572 bp, Homo sapiens
  Payload ID: 6440
  Gene Symbol: FXR1
  Gene Name: fragile X mental retardation, autosomal homolog 1
  ENST ID: ENST00000465551
  CDS Start-End: 291-572
gaagtctacccaaggatccccagcgaaagggagccatagtccgaggctctggctgcctgcctgtttggagctttgatggcctcgagggatttatcaaagatgttcatgaagactcccttacagttgtttttgaaaataattggcaaccagaacgccaggttccatttaatgaagttagattaccaccaccacctgatataaaaaaagaaattagtgaaggagatgaagtagaggtatattcaagagcaaatgaccaagagccatgtgggtggtggttggctaaagttcggatgatgaaaggagaattttatgtcattgaatatgctgcttgtgacgctacttacaatgaaatagtcacatttgaacgacttcggcctgtcaatcaaaataaaactgtcaaaaaaaataccttctttaaatgcacagtggatgttcctgaggatttgagagaggcgtgtgctaatgaaaatgcacataaagattttaagaaagcagtaggagcatgcagaattttttaccatccagaaacaacacagctaatgatactgtctgccagtgaagcaactgtgaag

SEQ ID NO: 135310 - DNA, 365 bp, Homo sapiens
  Payload ID: 6440
  Gene Symbol: FXR1
  Gene Name: fragile X mental retardation, autosomal homolog 1
  ENST ID: ENST00000491674
  CDS Start-End: 149-208
tgagaccccaggggtgaagggcgggggatcccaatcccagccctgttttcccctcccctttccccgcctccttctcgcccctcccccctcctcccctctggttggaaagtttctagaatctcttcccagcggcctttgcggttccaacatggcggagctgacggtggaggttcgcggctctaacggggctttctacaaggccatttaagcacccgtctaaaaaaaaatgagtagatcttcatagtaaggtaggatctacaagacacaaactgaagagaaaagcgaagttcagaacaaattgtagcaaatgtttaacaatttaaaggagatttgtatattattaaaattacattttttcctgtgaa

SEQ ID NO: 135311 - DNA, 570 bp, Homo sapiens
  Payload ID: 6440
  Gene Symbol: FXR1
  Gene Name: fragile X mental retardation, autosomal homolog 1
  ENST ID: ENST00000469882
  CDS Start-End: 213-570
gaactggagagaatgaaccctggacctggccactcttctctggcggaagcaggttccgtgcgggccctacagcagcatccaagcccctgtcctctcggcacctgagttcttgtttggcatccaggaagaattaggtcacccacacggattgaaaggtatattcaagagcaaatgaccaagagccatgtgggtggtggttggctaaagttcggatgatgaaaggagaattttatgtcattgaatatgctgcttgtgacgctacttacaatgaaatagtcacatttgaacgacttcggcctgtcaatcaaaataaaactgtcaaaaaaaataccttctttaaatgcacagtggatgttcctgaggatttgagagaggcgtgtgctaatgaaaatgcacataaagattttaagaaagcagtaggagcatgcagaattttttaccatccagaaacaacacagctaatgatactgtctgccagtgaagcaactgtgaagagagtaaacatcttaagtgacatgcatttgcgaagtattcgtacgaagttgatgcttatgtccagaaatgaagagg

SEQ ID NO: 135312 - DNA, 824 bp, Homo sapiens
  Payload ID: 6440
  Gene Symbol: FXR1
  Gene Name: fragile X mental retardation, autosomal homolog 1
  ENST ID: ENST00000484958
  CDS Start-End: 454-824
catggcggagctgacggtggaggttcgcggctctaacggggctttctacaagtcaattcacaatgaatcaaatgtccccattttggaactctgaagtatttataattgatctctatacatatctacaatctactgcttgtttctacttagactttgactccattactcattttgcctcacaaagtgagttggtactttgacaaaggttggaaaggacactagccacctgtgtgtgcactgaaatcatgtacgcttgaacatttggaattttatgtccagccataatccacttgcatatgcactttgtggaaactgtggtcttcagaactctggaagaatgagaatggcggagtggaaaagagtcctggatttgaagtaaacagatgagaattctaggtatattcaagagcaaatgaccaagagccatgtgggtggtggttggctaaagttcggatgatgaaaggagaattttatgtcattgaatatgctgcttgtgacgctacttacaatgaaatagtcacatttgaacgacttcggcctgtcaatcaaaataaaactgtcaaaaaaaataccttctttaaatgcacagtggatgttcctgaggatttgagagaggcgtgtgctaatgaaaatgcacataaagattttaagaaagcagtaggagcatgcagaattttttaccatccagaaacaacacagctaatgatactgtctgccagtgaagcaactgtgaagagagtaaacatcttaagtgacatgcatttgcgaagtattcgtacgaagttgatgcttatgtccagaaatgaagaggccactaagcattt

SEQ ID NO: 135313 - DNA, 1989 bp, Homo sapiens
  Payload ID: 6440
  Gene Symbol: FXR1
  Gene Name: fragile X mental retardation, autosomal homolog 1
  ENST ID: ENST00000468861
  CDS Start-End: 218-1582
ctttgcggttccaacatggcggagctgacggtggaggttcgcggctctaacggggctttctacaagttggcaaccagaacgccaggttccatttaatgaagttagattaccaccaccacctgatataaaaaaagaaattagtgaaggagatgaagtagaggtatattcaagagcaaatgaccaagagccatgtgggtggtggttggctaaagttcggatgatgaaaggagaattttatgtcattgaatatgctgcttgtgacgctacttacaatgaaatagtcacatttgaacgacttcggcctgtcaatcaaaataaaactgtcaaaaaaaataccttctttaaatgcacagtggatgttcctgaggatttgagagaggcgtgtgctaatgaaaatgcacataaagattttaagaaagcagtaggagcatgcagaattttttaccatccagaaacaacacagctaatgatactgtctgccagtgaagcaactgtgaagagagtaaacatcttaagtgacatgcatttgcgaagtattcgtacgaagttgatgcttatgtccagaaatgaagaggccactaagcatttagaatgcacaaaacaacttgcagcagcttttcatgaggaatttgttgtgagagaagatttaatgggcctggcaataggaacacatggtagtaacatccagcaagctaggaaggttcctggagttaccgccattgagctagatgaagatactggaacattcagaatctacggagagagtgctgatgctgtaaaaaaggctagaggtttcttggaatttgtggaggattttattcaggttcctaggaatctcgttggaaaagtaattggaaaaaatggcaaagttattcaagaaatagtggacaaatctggtgtggttcgagtgagaattgaaggggacaatgaaaataaattacccagagaagacggtatggttccatttgtatttgttggcactaaagaaagcattggaaatgtgcaggttcttctagagtatcatattgcctatctaaaggaagtagaacagctaagaatggaacgcctacagattgatgaacagctgcgacagattggttctaggtcttatagcggaagaggcagaggtcgtcggggacctaattacacctccggttatggtacaaattctgagctgtctaacccctctgaaacggaatctgagcgtaaagacgagctgagtgattggtcattggcaggagaagatgatcgagacagccgacatcagcgtgacagcaggagacgcccaggaggaagaggcagaagtgtttcagggggtcgaggtcgtggtggaccacgtggtggcaaatcctccatcagttctgtgctcaaagatccagacagcaatccatacagcttacttgataatacagaatcagatcagactgcagacactgatgccagcgaatctcatcacagtactaaccgtcgtaggcggtctcgtagacgaaggactgatgaagatgctgttctgatggatggaatgactgaatctgatacagcttcagttaatgaaaatgggctaggcaaaagatgtgattgaagagcatggtccttcagaaaaggcaataaacggcccaactagtgcttctggcgatgacatttctaagctacagcgtactccaggagaagaaaagattaataccttaaaagaagaaaacactcaagaagcagcagtcctgaatggtgtttcataaactgaagaagttcctagtttacagttcttttacattacatttacaatagtgcttgtacaagcttgccaaagatagaatatggatcgccagtctttacatcgcactttcagttcctccatttggaattcaaaaaggggagggatcctgaagaaatcatatgttaaacatactttgacacctactgtgttataaaatatatcatcagatgtgccttgagaatagtatatgtaacattaaaaaaaagttgctggct

SEQ ID NO: 135314 - DNA, 1768 bp, Homo sapiens
  Payload ID: 6440
  Gene Symbol: FXR1
  Gene Name: fragile X mental retardation, autosomal homolog 1
  ENST ID: ENST00000491062
  CDS Start-End: 16-1488
ctttgcggttccaacatggcggagctgacggtggaggttcgcggctctaacggggctttctacaaggtatattcaagagcaaatgaccaagagccatgtgggtggtggttggctaaagttcggatgatgaaaggagaattttatgtcattgaatatgctgcttgtgacgctacttacaatgaaatagtcacatttgaacgacttcggcctgtcaatcaaaataaaactgtcaaaaaaaataccttctttaaatgcacagtggatgttcctgaggatttgagagaggcgtgtgctaatgaaaatgcacataaagattttaagaaagcagtaggagcatgcagaattttttaccatccagaaacaacacagctaatgatactgtctgccagtgaagcaactgtgaagagagtaaacatcttaagtgacatgcatttgcgaagtattcgtacgaagttgatgcttatgtccagaaatgaagaggccactaagcatttagaatgcacaaaacaacttgcagcagcttttcatgaggaatttgttgtgagagaagatttaatgggcctggcaataggaacacatggtagtaacatccagcaagctaggaaggttcctggagttaccgccattgagctagatgaagatactggaacattcagaatctacggagagagtgctgatgctgtaaaaaaggctagaggtttcttggaatttgtggaggattttattcaggttcctaggaatctcgttggaaaagtaattggaaaaaatggcaaagttattcaagaaatagtggacaaatctggtgtggttcgagtgagaattgaaggggacaatgaaaataaattacccagagaagacggtatggttccatttgtatttgttggcactaaagaaagcattggaaatgtgcaggttcttctagagtatcatattgcctatctaaaggaagtagaacagctaagaatggaacgcctacagattgatgaacagctgcgacagattggttctaggtcttatagcggaagaggcagaggtcgtcggggacctaattacacctccggttatggtacaaattctgagctgtctaacccctctgaaacggaatctgagcgtaaagacgagctgagtgattggtcattggcaggagaagatgatcgagacagccgacatcagcgtgacagcaggagacgcccaggaggaagaggcagaagtgtttcagggggtcgaggtcgtggtggaccacgtggtggcaaatcctccatcagttctgtgctcaaagatccagacagcaatccatacagcttacttgataatacagaatcagatcagactgcagacactgatgccagcgaatctcatcacagtactaaccgtcgtaggcggtctcgtagacgaaggactgatgaagatgctgttctgatggatggaatgactgaatctgatacagcttcagttaatgaaaatgggctaggcaaaagatgtgattgaagagcatggtccttcagaaaaggcaataaacggcccaactagtgcttctggcgatgacatttctaagctacagcgtactccaggagaagaaaagattaataccttaaaagaagaaaacactcaagaagcagcagtcctgaatggtgtttcataaactgaagaagttcctagtttacagttcttttacattacatttacaatagtgcttgtacaagcttgccaaagatagaatatggatcgccagtctttacatcgcactttcagttcctccatttggaat

SEQ ID NO: 135315 - DNA, 2957 bp, Homo sapiens
  Payload ID: 6441
  Gene Symbol: FXR2
  Gene Name: fragile X mental retardation, autosomal homolog 2
  Uniprot ID: P51116
  ENST ID: ENST00000250113
  CDS Start-End: 336-2357
aggctgtggagcggcagcggcagcagcgggtcccgggactgaggcagcagcgggggcggcggcgggcggaagctgaggtgacgaaggcagcggcggcggcggccgtttccctcacggtggcggagaccaaggcggcggcggcggacggggagcggcccggccccggccccctgctcgttggctgtggcagggccgccgtggggccggcccggctcccgccccccgcggctccccctccggctcctcctccggggagacgccgggggcctggcccggcccgcactcagactgctgctgcagccgccgccgggggagtcggaggcggtggcggcgccatgggcggcctggcctctgggggggatgtggagccgggactgcccgtcgaggtgcgcggctccaacggggccttctacaagggctttgtgaaggatgtccatgaagactctgtcaccatcttctttgaaaacaactggcagagtgagagacaaattccttttggggatgtccggctaccacctccagctgactataataaggagatcacagaaggggatgaagtggaggtttattctcgagccaatgaacaggaaccttgtggctggtggctggcccgggtgcggatgatgaagggagatttctatgtcattgaatatgctgcctgtgatgccacctacaatgaaattgttaccctggagcgacttcggccagttaatcccaatccccttgcaaccaaaggcagcttcttcaaggttaccatggctgtgcccgaggatctgagagaagcctgctccaatgaaaacgtccataaagagttcaagaaagccctgggagccaactgcatctttctcaacatcacaaacagtgagctcttcattctgtcaaccacagaagcccctgtgaagcgagcatctctgctgggtgatatgcatttccgaagcctgcgcaccaaactgctacttatgtcccgcaatgaagaagctaccaagcacctagagacaagcaagcagttggcagcagccttccaagaggagttcacagtgcgagaggacctgatgggactggcaattgggactcacggtgccaacatccagcaggcccgaaaagtacctggggtgaccgccattgagttgggtgaagagacctgcactttccgcatctatggggagactcccgaggcttgccgacaggcccgaagctaccttgagttttctgaggactcagtgcaagtgcccaggaacctggttggcaaagtgattggaaagaacgggaaagtgatccaggagattgtggataaatctggtgtggtgagggttcgagtggaaggtgataatgacaagaagaaccccagggaggagggaatggttcccttcatttttgttggcacccgagagaacatcagcaatgcccaggctttgctggagtatcacctctcctacctgcaggaggtagagcagcttcgcttggagaggctacaaattgatgagcagcttcggcagattgggctgggctttcgccctcctgggagtgggcggggcagcggtggcagcgacaaggctggatatagcactgatgagagctcctcctcctccctccatgcgactcgaacctatgggggcagctatgggggccgtggccgtggccggaggacaggcggtcctgcctatggccccagctcagatgtgtctacagcttcagagactgagtcagagaagagagaggagcccaaccgagctgggcctggcgacagggatcccccaacccgaggggaagaaagccggaggcggccgactgggggccggggtaggggacccccacctgccccccggcccacttcgagatacaattcttcatctattagctcagtgctgaaggatccagacagtaatccctacagcctattggacacgtctgaaccagagcccccggttgattcagaacctggggaaccccccccagcaagtgccaggcgccgccgctcccgccgccgccgcactgatgaagacaggaccgtcatggatggaggcctggaatcagatgggcccaacatgacagagaatggcctggaagatgaatcaagacctcaacgtcgtaatcgcagccgccgccgccgtaaccgtggtaatcggactgatggctctatcagtggagaccgccagccagtgactgtggctgactatatctcacgagcagagtctcagagccgccagaggccacccctggaacgcactaaaccctcagaagactctctttcaggacagaagggtgactctgtcagcaagcttcctaagggcccctcggagaatggggagctctccgcccccttggagttgggtagtatggtgaatggggtttcataaaacctccaacctgcacccctcccttctccatctcgcttgctgcccaacaccatggccctcacaggcccaactgacctgcgctggagctgctcttatctaggggggaggggggtggcacagcagcttgggtaccccccaacctccaggagctagtggaggggtgtgtaacagggtcataccccctccctcttgtccaccctacccccagggtaaggggagcctctctccttccccatcagactggatgtgcctttatcctctaatgccccaatctctctctgaacacccccattctccacctgttggtggggggtgctcctcgacccacccagatttgaccgttcagggggcctcccctgctatccctcctcccatcctgtaccccccatttctggggcctcatcactgtggaagacggggatagtaagagataagtgggtgggaggcacggggaaggttttggagtagaaccaggggtgtgtatgaaggggggtgacaaggtccccctggggaggggaccaaccttgtctggtggatgagaaggcgtatttatttttcactgtacagtatttaaaaagagaataaaaaaatccaaatggc

SEQ ID NO: 135316 - DNA, 565 bp, Homo sapiens
  Payload ID: 6441
  Gene Symbol: FXR2
  Gene Name: fragile X mental retardation, autosomal homolog 2
  ENST ID: ENST00000571597
  CDS Start-End: 211-565
gtggaggctgtggagcggcagcggcagcagcgggtcccgggactgaggcagcagcgggggcggcggcgggcggaagctgagggctttgtgaaggatgtccatgaagactctgtcaccatcttctttgaaaacaagtaagaccttgggaatagagaatccagcatactaggtcctagaaggagagtggagaagagggggcagctgagtcctatgagctggcagagtgagagacaaattccttttggggatgtccggctaccacctccagctgactataataaggagatcacagaaggggatgaagtggaggtttattctcgagccaatgaacaggaaccttgtggctggtggctggcccgggtgcggatgatgaagggagatttctatgtcattgaatatgctgcctgtgatgccacctacaatgaaattgttaccctggagcgacttcggccagttaatcccaatccccttgcaaccaaaggcagcttcttcaaggttaccatggctgtgcccgaggatctgagagaagcctgctccaatgaaaacgtccataaagagttcaaga

SEQ ID NO: 135317 - DNA, 6126 bp, Homo sapiens
  Payload ID: 6442
  Gene Symbol: FREM1
  Gene Name: FRAS1 related extracellular matrix 1
  ENST ID: ENST00000380875
  CDS Start-End: 817-4824
acacaaaaagccttacaaatggaagaactaaggtggtacttaaaaacagcaccttaggatctagttccatcctatcttttcccttaaatgccatgacaaaagttaaaacgggccctgtcccttctgaatgctgggcttctcatctaaatttaaataaaaacctttgaagatgggaatgtgttggaagaaaagaagggcagaaaaaaagtgtgttggaagagtctgtggagtcctgaggcttggcgctcaggaagtttgcaaagctgcagcagctgccttggagaagaccagcaaagaaagtggagtgtgtatgtgaacttcaattctgtattttctgtgaggtgggttaatggatttttagtaaaaagaaatctcaaacacagctgacctgaaagactggaatttcagctctcttccttcccggggttctttttcctcccccttcctctcaaagccctttaaaccagattgctgtgtcagtgactcttatcctgcccgccagttccaagggtttctaactttttgtcttggaaaggaaaaccactacctgattagaaaagcacttgggaagcccattaatcttgccggcgttgtcaggagtgatcagcgagttttattaaaagccctgggattgcctgaaaggcccccttgtctgactttgaaatgaaaggggcatgttaagatctcggggcacattgtcaggacccctcaccctgccccttggactatgagctgaccctccaggaggaagcacagaagccctcctttgttaaagggatttcgccggtggacagagaagagttgggccctgtcagcatgaactctctgagttggggggctgcgaatgccgtgctgctgctgctcctcctggcctgggccagccccaccttcatcagcatcaaccgcggggtgagggtgatgaagggccactctgccttcctgtcaggagatgacctgaagtttgccatccctaaagagaaagatgcctgcaaagtggaagttgtgatgaatgagccaataacccagagggttgggaaactcactccacaggtctttgactgccatttccttcccaacgaagtcaagtatgttcacaatggttgtccaattcttgatgaagacacagtgaagctcagactttacagatttactgaaagagataccttcatagaaacttttatcctgtgggtctatctcctggaaccagactgtaacatcatccatatgagtaacaatgtgctggaggtgcctgaattcaatggcttgtcccaagcgattgataaaaatctgctcagattcgattatgataggatggctagcctggaatgtaccgtcagcctggacactgcgagaactcggctgccagcccatggccagatggttctcggggagcctcgaccagaagaacctcgtggagatcagccacacagttttttcccagagtcccaactgagagcaaaactgaagtgtccaggtgggagctgtaccccaggattaaagaaaataggaagcctcaaagtgagctgtgaggagttcctgctgatgggccttcgttatcagcatctggatcccccttcacccaacattgattatatctccatccaactggacctcacagataccaggagcaaaattgtgtacaagtcagagagtgcgtggctgcctgtctatatcagagctggaattccgaatcagattccaaaggctgcattcatggccgtgtttattctggaagtggatcagttcatcctgacctccttgactacatcagttctggactgtgaagaagatgagacccctaaacccttgctggtgttcaacattactaaagccccgctccagggctatgtgactcacctgttggatcacaccagaccaatctcctcattcacctggaaagatctcagtgacatgcagatcgcctatcagccaccaaacagcagccattctgagaggagacatgatgaggtagaattggaggtatacgacttcttctttgaaaggagtgcacctatgacagtccacatctccatcagaacagcagatacaaatgccccccgtgtatcctggaatacaggtctgagtctccttgaggggcagtctcgagccatcacttgggaacagtttcaggttgtcgacaatgacgacattggtgctgtccggctagtcaccgttggtggcctgcagcatggatggctgactttaagaggggggaaagggtttctcttcaccgtggctgacctccaggctggagttgttcgctatcatcatgatgacagcgactccaccaaagacttcgtggtcttccggatatttgatggccatcacagcatccgtcacaaattccccatcaacgtcttgcccaaagatgatagtcccccgttcctcataaccaatgttgtgattgaactggaggaggggcagaccatcctgatccagggatccatgctgcgagcttcagatgtggacgccagtgatgactacatcttcttcaatatcacaaagcctccacaggctggggagatcatgaagaagccagggccaggactgataggctatcctgtccatggcttccttcagagggatttgtttaatggaatcatttattatcgtcattttggtggagaaatctttgaagattcttttcaatttgtcctgtgggacagccatgaacctccaaatctttcagtgccacaggtggcaacaatccatataactccagtggatgaccagcttccaaaagaggctcctggagtttctcggcatttggttgtcaaggaaactgaggtggcctatataactaagaaacagctacattttatagattcagaatcatatgacagggagctggtctacacaataactactcctccatttttctccttcagccacagacacttggatgctgggaaattatttatggtggacagcataccaaaagtagttaagaatcctacggccctggagctgaggtcattcactcagcatgctgtgaactatatgaaagtggcctacatgccccccatgcaagacattggtccccattgcagagatgtccagttcacattttctgtcagtaaccaacatggcggtactttgcatgggatctgctttaacattacaatcctcccagtggacaatcaagttcctgaggcgttcaccaaccctctgaaagtgactgagggaggtcaaagcatcatcagcacagagcacattctaatttctgatgcagataccaagctggacaatattgacctctccctgcgggaattgcctctgcacggaagggtggagctgaatggatttcctctaaattcagggggcacattttcttggggcgatctccataccttaaaagttaggtatcaacatgatggaactgaagttcttcaggatgacctactcttggaggtcaccgatggcacaaattcagcagaatttgtactacatgttgaggtattccctgtcaacgatgagccaccagtcttaaaggctgacctcatgcctgtcatgaattgctcagagggaggagaggtggtcatcacctctgaatacatttttgctactgatgtggacagcgataacttgaagttgatgtttgtgattgctcgcgaacctcagcatggggtggtgaggagagctggagtcacagtggatcagttctctcagagagatgttatctcagaggccgtgacatacaaacacacaggtggcgagattggcctgatgccttgttttgacaccattacattggtggtttcggatggagaggctggcccttttgtgaatggctgttgctacaatggacccaatccatctgttccacttcatgcgtcctttccagtgtatgatctcaacatcacggtatacccagtagacaaccagccaccttccattgcaataggtcccgtgtttgttgtagatgagggctgctcaacagcccttactgttaaccatttgtccgccactgaccctgacactgcagcagatgacttggaatttgttttggtttctcctcctcagtttggctacctcgaaaatatactcccttctgtgggttttgaaaaaagcaatattggcataagtatagattcatttcagtggaaagacatgaacgcttttcacattaactatgtgcagtccaggcatctgaggatagaaccaactgccgaccagttcacggtgtacgtcacagatgggaagcatcactccttggagataccattttctattataatcaaccccacaaatgatgaagctcctgactttgtagtgcagaatattactgtgtgtgagggtcagatgaaagagctggactcttccatcatcagcgctgtggacctggacattccccaggatgccctgctgttcagcatcactcaaaagccacgccatggcctcctcatcgatagggggtttagcaaagacttctctgagaataagcagccagccaaccctcaccagaaacatgcacctgttcacagcttttccatggaactcctcaagactggaatgaggttgacgtacatgcatgatgactcagagagccttgctgatgattttacaatccaattgtcagatgggaaacataagatacttaaaaccatttcagtagaggtcatcccagttaatgatgaaaaaccaatgctgagcaagaaggctgaaattgcaatgaatatgggtgaaactcgtattatttccagtgctattctttcagccatagatgaagactcacccagggagaagatttactatgtatttgaaaggcttccccaaaatgggcaacttcagcttaaggaatgtcaactaagatgtggaatatagcaattacctatgacggattagaggaagatgatgaggtctttgaagtaattctgaactcccctgtgaatgcagttcttggcacaaagacaaaagctgcagtgaaaattttggactcaaaaggaggacaatgccatccttcatattcctccaaccaaagcaagcacagcacatgggagaagggcatttggcatctgctgcccccagggtcttcctcatccaccacttctggttcctttcatctggaaagaagacctcttccatcttccatgcagctagcagtcatcaggggagacaccctgcggggctttgattctacagatctttctcaaaggaagcttaggacccgtgggaatggcaaaacagttcgtccatcctctgtttatagaaatggaacagacatcatctataattatcatgggatagtttccttgaaactggaggatgacagtttcccaactcacaaaaggaaggccaaagtatccatcattagtcagccacaaaagacaatcaaagtggcagaactgcctcaagcagataaggtggaatccacaactgactcacacttccccagacaggaccagttgccctcatttccaaagaactgcactctggaattaaagggactcttccattttgaagaaggcatccagaagctgtatcagtgcaatgggatcgcctggaaagcctggagtccccaaaccaaggatgtggaagacaaatcctgtccagccgggtggcaccagcactcaggctactgtcacatcttgatcacagagcagaaaggcacctggaatgcggctgcccaagcttgcagggaacaatacctgggcaaccttgtaactgtattctccaggcagcacatgcggtggctctgggacattggtgggagaaagtccttttggataggtttgaacgaccaagtgcatgctggccactgggagtggatcggtggtgaacctgttgccttcaccaatgggagaagagggccctctcaacgctccaagcttggaaagagctgtgttttggttcaaagacaagggaaatggcaaacaaaagactgtaggagagccaaacctcataattatgtgtgttccagaaaactctaaatataacagaccctacagggggccacctggagtttgtcacctatttattcacaggatctgtgaatattgctccatagaaaacaaattgttatgattgagtgggtatacctttgtgattctgtctagtgaaaatgggacatttttaatagtgccagaaagattgataaataaatattttttacaagataagatacaa

SEQ ID NO: 135318 - DNA, 7324 bp, Homo sapiens
  Payload ID: 6442
  Gene Symbol: FREM1
  Gene Name: FRAS1 related extracellular matrix 1
  Uniprot ID: Q5H8C1
  ENST ID: ENST00000380880
  CDS Start-End: 785-7324
ttagtacaaaactagtagtgagaaaggaagctgggaagagactgggaagaggcaaccgacctcattaacaaaagctcagttttgtccctgcggacccaaccagcagaaggcacggggctagcggtggctgtccgccagggaggtcgggctctgtgtaaacagtagaaggcatctttatcatgcccttctcacagggagtcctgaggcttggcgctcaggaagtttgcaaagctgcagcagctgccttggagaagaccagcaaagaaagtggagtgtgtatgtgaacttcaattctgtattttctgtgaggtgggttaatggatttttagtaaaaagaaatctcaaacacagctgacctgaaagactggaatttcagctctcttccttcccggggttctttttcctcccccttcctctcaaagccctttaaaccagattgctgtgtcagtgactcttatcctgcccgccagttccaagggtttctaactttttgtcttggaaaggaaaaccactacctgattagaaaagcacttgggaagcccattaatcttgccggcgttgtcaggagtgatcagcgagttttattaaaagccctgggattgcctgaaaggcccccttgtctgactttgaaatgaaaggggcatgttaagatctcggggcacattgtcaggacccctcaccctgccccttggactatgagctgaccctccaggaggaagcacagaagccctcctttgttaaagggatttcgccggtggacagagaagagttgggccctgtcagcatgaactctctgagttggggggctgcgaatgccgtgctgctgctgctcctcctggcctgggccagccccaccttcatcagcatcaaccgcggggtgagggtgatgaagggccactctgccttcctgtcaggagatgacctgaagtttgccatccctaaagagaaagatgcctgcaaagtggaagttgtgatgaatgagccaataacccagagggttgggaaactcactccacaggtctttgactgccatttccttcccaacgaagtcaagtatgttcacaatggttgtccaattcttgatgaagacacagtgaagctcagactttacagatttactgaaagagataccttcatagaaacttttatcctgtgggtctatctcctggaaccagactgtaacatcatccatatgagtaacaatgtgctggaggtgcctgaattcaatggcttgtcccaagcgattgataaaaatctgctcagattcgattatgataggatggctagcctggaatgtaccgtcagcctggacactgcgagaactcggctgccagcccatggccagatggttctcggggagcctcgaccagaagaacctcgtggagatcagccacacagttttttcccagagtcccaactgagagcaaaactgaagtgtccaggtgggagctgtaccccaggattaaagaaaataggaagcctcaaagtgagctgtgaggagttcctgctgatgggccttcgttatcagcatctggatcccccttcacccaacattgattatatctccatccaactggacctcacagataccaggagcaaaattgtgtacaagtcagagagtgcgtggctgcctgtctatatcagagctggaattccgaatcagattccaaaggctgcattcatggccgtgtttattctggaagtggatcagttcatcctgacctccttgactacatcagttctggactgtgaagaagatgagacccctaaacccttgctggtgttcaacattactaaagccccgctccagggctatgtgactcacctgttggatcacaccagaccaatctcctcattcacctggaaagatctcagtgacatgcagatcgcctatcagccaccaaacagcagccattctgagaggagacatgatgaggtagaattggaggtatacgacttcttctttgaaaggagtgcacctatgacagtccacatctccatcagaacagcagatacaaatgccccccgtgtatcctggaatacaggtctgagtctccttgaggggcagtctcgagccatcacttgggaacagtttcaggttgtcgacaatgacgacattggtgctgtccggctagtcaccgttggtggcctgcagcatggatggctgactttaagaggggggaaagggtttctcttcaccgtggctgacctccaggctggagttgttcgctatcatcatgatgacagcgactccaccaaagacttcgtggtcttccggatatttgatggccatcacagcatccgtcacaaattccccatcaacgtcttgcccaaagatgatagtcccccgttcctcataaccaatgttgtgattgaactggaggaggggcagaccatcctgatccagggatccatgctgcgagcttcagatgtggacgccagtgatgactacatcttcttcaatatcacaaagcctccacaggctggggagatcatgaagaagccagggccaggactgataggctatcctgtccatggcttccttcagagggatttgtttaatggaatcatttattatcgtcattttggtggagaaatctttgaagattcttttcaatttgtcctgtgggacagccatgaacctccaaatctttcagtgccacaggtggcaacaatccatataactccagtggatgaccagcttccaaaagaggctcctggagtttctcggcatttggttgtcaaggaaactgaggtggcctatataactaagaaacagctacattttatagattcagaatcatatgacagggagctggtctacacaataactactcctccatttttctccttcagccacagacacttggatgctgggaaattatttatggtggacagcataccaaaagtagttaagaatcctacggccctggagctgaggtcattcactcagcatgctgtgaactatatgaaagtggcctacatgccccccatgcaagacattggtccccattgcagagatgtccagttcacattttctgtcagtaaccaacatggcggtactttgcatgggatctgctttaacattacaatcctcccagtggacaatcaagttcctgaggcgttcaccaaccctctgaaagtgactgagggaggtcaaagcatcatcagcacagagcacattctaatttctgatgcagataccaagctggacaatattgacctctccctgcgggaattgcctctgcacggaagggtggagctgaatggatttcctctaaattcagggggcacattttcttggggcgatctccataccttaaaagttaggtatcaacatgatggaactgaagttcttcaggatgacctactcttggaggtcaccgatggcacaaattcagcagaatttgtactacatgttgaggtattccctgtcaacgatgagccaccagtcttaaaggctgacctcatgcctgtcatgaattgctcagagggaggagaggtggtcatcacctctgaatacatttttgctactgatgtggacagcgataacttgaagttgatgtttgtgattgctcgcgaacctcagcatggggtggtgaggagagctggagtcacagtggatcagttctctcagagagatgttatctcagaggccgtgacatacaaacacacaggtggcgagattggcctgatgccttgttttgacaccattacattggtggtttcggatggagaggctggcccttttgtgaatggctgttgctacaatggacccaatccatctgttccacttcatgcgtcctttccagtgtatgatctcaacatcacggtatacccagtagacaaccagccaccttccattgcaataggtcccgtgtttgttgtagatgagggctgctcaacagcccttactgttaaccatttgtccgccactgaccctgacactgcagcagatgacttggaatttgttttggtttctcctcctcagtttggctacctcgaaaatatactcccttctgtgggttttgaaaaaagcaatattggcataagtatagattcatttcagtggaaagacatgaacgcttttcacattaactatgtgcagtccaggcatctgaggatagaaccaactgccgaccagttcacggtgtacgtcacagatgggaagcatcactccttggagataccattttctattataatcaaccccacaaatgatgaagctcctgactttgtagtgcagaatattactgtgtgtgagggtcagatgaaagagctggactcttccatcatcagcgctgtggacctggacattccccaggatgccctgctgttcagcatcactcaaaagccacgccatggcctcctcatcgatagggggtttagcaaagacttctctgagaataagcagccagccaaccctcaccagaaacatgcacctgttcacagcttttccatggaactcctcaagactggaatgaggttgacgtacatgcatgatgactcagagagccttgctgatgattttacaatccaattgtcagatgggaaacataagatacttaaaaccatttcagtagaggtcatcccagttaatgatgaaaaaccaatgctgagcaagaaggctgaaattgcaatgaatatgggtgaaactcgtattatttccagtgctattctttcagccatagatgaagactcacccagggagaagatttactatgtatttgaaaggcttccccaaaatgggcaacttcagcttaagatagggagggactgggttcctctctcccctggcatgaaatgcactcaggaggaagtggatctgaacttgctgagatacacacacaccggggcaatggattcccagaatcaagatagcttcaccttctacctttgggatggcaacaacaggtcccctgctcttgactgtcaaatcaccatcaaggacatggaaaaaggtgatattgtcatccttacaaaaccactcgtggtgtctaaaggtgatagaggtttcttaacaaccaccacgctcctggctgtggacggaacagacaagcctgaggaactgctctatgtcatcacctcccctccgcgatatggccagatcgaatatgttcactatcctggagttcccattacaaacttcagccaaatggatgtagtggggcagacagtttgctatgtacacaagagcaaggtgactgtctccagtgacagattcagattcatcatcagcaatggactgcggaccgagcacggggtgtttgagatcacactggagactgtggacagagccctgcctgtggtaaccaggaacaaggggttgagactggcccaaggggccgtgggcctgctttcccctgacctccttcagctgaccgaccctgatacacctgcggagaacctcaccttcctcttggttcagctcccccagcatggccagctctacctgtgggggacagggctacttcaacacaatttcacccagcaggatgtggacagcaagaatgtggcctatcggcactcaggaggggactcccagactgactgctttactttcatggccacagatgggacaaaccaaggctttattgtgaatgggagagtgtgggaagaacctgttttattcaccattcaggtagaccaattggacaaaacagctcctcgtatcacactcttgcattccccttctcaagtggggctcctgaaaaatggctgctacgggatttacatcacttcccgcgtgttgaaggcatcagaccctgacactgaggacgatcagatcatctttaaaattctacaaggcccaaaacatggacatctggagaacacaacaacaggtgaatttatccatgagaaatttagccaaaaggacttaaacagtaagactattctttacatcataaacccatctttggaagtaaattcagataccgtggaatttcaaatcatggaccccacagggaactcggccactcctcaaattttggaactgaagtggtctcatattgaatggtcacagaccgaatatgaagtctgtgagaatgtgggtttgttgcccttggaaattatcagaaggggatattccatggactcggcctttgtgggtataaaggtcaaccaagtgtcagctgcagttggaaaagatttcaccgtgattccatctaaactgattcagtttgacccaggaatgtcaactaagatgtggaatatagcaattacctatgacggattagaggaagatgatgaggtctttgaagtaattctgaactcccctgtgaatgcagttcttggcacaaagacaaaagctgcagtgaaaattttggactcaaaaggaggacaatgccatccttcatattcctccaaccaaagcaagcacagcacatgggagaagggcatttggcatctgctgcccccagggtcttcctcatccaccacttctggttcctttcatctggaaagaagacctcttccatcttccatgcagctagcagtcatcaggggagacaccctgcggggctttgattctacagatctttctcaaaggaagcttaggacccgtgggaatggcaaaacagttcgtccatcctctgtttatagaaatggaacagacatcatctataattatcatgggatagtttccttgaaactggaggatgacagtttcccaactcacaaaaggaaggccaaagtatccatcattagtcagccacaaaagacaatcaaagtggcagaactgcctcaagcagataaggtggaatccacaactgactcacacttccccagacaggaccagttgccctcatttccaaagaactgcactctggaattaaagggactcttccattttgaagaaggcatccagaagctgtatcagtgcaatgggatcgcctggaaagcctggagtccccaaaccaaggatgtggaagacaaatcctgtccagccgggtggcaccagcactcaggctactgtcacatcttgatcacagagcagaaaggcacctggaatgcggctgcccaagcttgcagggaacaatacctgggcaaccttgtaactgtattctccaggcagcacatgcggtggctctgggacattggtgggagaaagtccttttggataggtttgaacgaccaagtgcatgctggccactgggagtggatcggtggtgaacctgttgccttcaccaatgggagaagagggccctctcaacgctccaagcttggaaagagctgtgttttggttcaaagacaagggaaatggcaaacaaaagactgtaggagagccaaacctcataattatgtgtgttccagaaaactctaa

SEQ ID NO: 135319 - DNA, 2481 bp, Homo sapiens
  Payload ID: 6442
  Gene Symbol: FREM1
  Gene Name: FRAS1 related extracellular matrix 1
  Uniprot ID: Q5H8C1
  ENST ID: ENST00000380894
  CDS Start-End: 90-2237
agtctgcagggaggaaagtcagaattagatattcaagatggccgcctctgatggagtccctggcactcactcaagcttgcatttggtagatggtgacacaagaatccatgctgaaggctgccttgcctctctttaccagattcatcatcagcaatggactgcggaccgagcacggggtgtttgagatcacactggagactgtggacagagccctgcctgtggtaaccaggaacaaggggttgagactggcccaaggggccgtgggcctgctttcccctgacctccttcagctgaccgaccctgatacacctgcggagaacctcaccttcctcttggttcagctcccccagcatggccagctctacctgtgggggacagggctacttcaacacaatttcacccagcaggatgtggacagcaagaatgtggcctatcggcactcaggaggggactcccagactgactgctttactttcatggccacagatgggacaaaccaaggctttattgtgaatgggagagtgtgggaagaacctgttttattcaccattcaggtagaccaattggacaaaacagctcctcgtatcacactcttgcattccccttctcaagtggggctcctgaaaaatggctgctacgggatttacatcacttcccgcgtgttgaaggcatcagaccctgacactgaggacgatcagatcatctttaaaattctacaaggcccaaaacatggacatctggagaacacaacaacaggtgaatttatccatgagaaatttagccaaaaggacttaaacagtaagactattctttacatcataaacccatctttggaagtaaattcagataccgtggaatttcaaatcatggaccccacagggaactcggccactcctcaaattttggaactgaagtggtctcatattgaatggtcacagaccgaatatgaagtctgtgagaatgtgggtttgttgcccttggaaattatcagaaggggatattccatggactcggcctttgtgggtataaaggtcaaccaagtgtcagctgcagttggaaaagatttcaccgtgattccatctaaactgattcagtttgacccaggaatgtcaactaagatgtggaatatagcaattacctatgacggattagaggaagatgatgaggtctttgaagtaattctgaactcccctgtgaatgcagttcttggcacaaagacaaaagctgcagtgaaaattttggactcaaaaggaggacaatgccatccttcatattcctccaaccaaagcaagcacagcacatgggagaagggcatttggcatctgctgcccccagggtcttcctcatccaccacttctggttcctttcatctggaaagaagacctcttccatcttccatgcagctagcagtcatcaggggagacaccctgcggggctttgattctacagatctttctcaaaggaagcttaggacccgtgggaatggcaaaacagttcgtccatcctctgtttatagaaatggaacagacatcatctataattatcatgggatagtttccttgaaactggaggatgacagtttcccaactcacaaaaggaaggccaaagtatccatcattagtcagccacaaaagacaatcaaagtggcagaactgcctcaagcagataaggtggaatccacaactgactcacacttccccagacaggaccagttgccctcatttccaaagaactgcactctggaattaaagggactcttccattttgaagaaggcatccagaagctgtatcagtgcaatgggatcgcctggaaagcctggagtccccaaaccaaggatgtggaagacaaatcctgtccagccgggtggcaccagcactcaggctactgtcacatcttgatcacagagcagaaaggcacctggaatgcggctgcccaagcttgcagggaacaatacctgggcaaccttgtaactgtattctccaggcagcacatgcggtggctctgggacattggtgggagaaagtccttttggataggtttgaacgaccaagtgcatgctggccactgggagtggatcggtggtgaacctgttgccttcaccaatgggagaagagggccctctcaacgctccaagcttggaaagagctgtgttttggttcaaagacaagggaaatggcaaacaaaagactgtaggagagccaaacctcataattatgtgtgttccagaaaactctaaatataacagaccctacagggggccacctggagtttgtcacctatttattcacaggatctgtgaatattgctccatagaaaacaaattgttatgattgagtgggtatacctttgtgattctgtctagtgaaaatgggacatttttaatagtgccagaaagattgataaataaatattttttacaagataagatacaatttttgtatctcaataccttttaaaataaatgccagcagtattataaa

SEQ ID NO: 135320 - DNA, 1421 bp, Homo sapiens
  Payload ID: 6442
  Gene Symbol: FREM1
  Gene Name: FRAS1 related extracellular matrix 1
  Uniprot ID: Q5H8C1
  ENST ID: ENST00000427623
  CDS Start-End: 2-670
gatgctggatgagtccttggcagtcaggaggtccaaaaaatgcaaagaaatgataatgcactgggagaagaaagaagatattgacatcgtgaacacagtagaccaattggacaaaacagctcctcgtatcacactcttgcattccccttctcaagtggggctcctgaaaaatggctgctacgggatttacatcacttcccgcgtgttgaaggcatcagaccctgacactgaggacgatcagatcatctttaaaattctacaaggcccaaaacatggacatctggagaacacaacaacaggtgaatttatccatgagaaatttagccaaaaggacttaaacagtaagactattctttacatcataaacccatctttggaagtaaattcagataccgtggaatttcaaatcatggaccccacagggaactcggccactcctcaaattttggaactgaagtggtctcatattgaatggtcacagaccgaatatgaagtctgtgagaatgtgggtttgttgcccttggaaattatcagaaggggatattccatggactcggcctttgtgggtataaaggtcaaccaagtgtcagctgcagttggaaaagatttcaccgtgattccatctaaactgattcagtttgacccaggttcgtccatcctctgtttatagaaatggaacagacatcatctataattatcatgggatagtttccttgaaactggaggatgacagtttcccaactcacaaaaggaaggccaaagtatccatcattagtcagccacaaaagacaatcaaagtggcagaactgcctcaagcagataaggtggaatccacaactgactcacacttccccagacaggaccagttgccctcatttccaaagaactgcactctggaattaaagggactcttccattttgaagaaggcatccagaagctgtatcagtgcaatgggatcgcctggaaagcctggagtccccaaaccaaggatgtggaagacaaatcctgtccagccgggtggcaccagcactcaggctactgtcacatcttgatcacagagcagaaaggcacctggaatgcggctgcccaagcttgcagggaacaatacctgggcaaccttgtaactgtattctccaggcagcacatgcggtggctctgggacattggtgggagaaagtccttttggataggtttgaacgaccaagtgcatgctggccactgggagtggatcggtggtgaacctgttgccttcaccaatgggagaagagggccctctcaacgctccaagcttggaaagagctgtgttttggttcaaagacaagggaaatggcaaacaaaagactgtaggagagccaaacctcataattatgtgtgttccagaaaactctaaatataacagaccctacagggggccacctgg

SEQ ID NO: 135321 - DNA, 10086 bp, Homo sapiens
  Payload ID: 6442
  Gene Symbol: FREM1
  Gene Name: FRAS1 related extracellular matrix 1
  Uniprot ID: Q5H8C1
  ENST ID: ENST00000422223
  CDS Start-End: 817-7356
acacaaaaagccttacaaatggaagaactaaggtggtacttaaaaacagcaccttaggatctagttccatcctatcttttcccttaaatgccatgacaaaagttaaaacgggccctgtcccttctgaatgctgggcttctcatctaaatttaaataaaaacctttgaagatgggaatgtgttggaagaaaagaagggcagaaaaaaagtgtgttggaagagtctgtggagtcctgaggcttggcgctcaggaagtttgcaaagctgcagcagctgccttggagaagaccagcaaagaaagtggagtgtgtatgtgaacttcaattctgtattttctgtgaggtgggttaatggatttttagtaaaaagaaatctcaaacacagctgacctgaaagactggaatttcagctctcttccttcccggggttctttttcctcccccttcctctcaaagccctttaaaccagattgctgtgtcagtgactcttatcctgcccgccagttccaagggtttctaactttttgtcttggaaaggaaaaccactacctgattagaaaagcacttgggaagcccattaatcttgccggcgttgtcaggagtgatcagcgagttttattaaaagccctgggattgcctgaaaggcccccttgtctgactttgaaatgaaaggggcatgttaagatctcggggcacattgtcaggacccctcaccctgccccttggactatgagctgaccctccaggaggaagcacagaagccctcctttgttaaagggatttcgccggtggacagagaagagttgggccctgtcagcatgaactctctgagttggggggctgcgaatgccgtgctgctgctgctcctcctggcctgggccagccccaccttcatcagcatcaaccgcggggtgagggtgatgaagggccactctgccttcctgtcaggagatgacctgaagtttgccatccctaaagagaaagatgcctgcaaagtggaagttgtgatgaatgagccaataacccagagggttgggaaactcactccacaggtctttgactgccatttccttcccaacgaagtcaagtatgttcacaatggttgtccaattcttgatgaagacacagtgaagctcagactttacagatttactgaaagagataccttcatagaaacttttatcctgtgggtctatctcctggaaccagactgtaacatcatccatatgagtaacaatgtgctggaggtgcctgaattcaatggcttgtcccaagcgattgataaaaatctgctcagattcgattatgataggatggctagcctggaatgtaccgtcagcctggacactgcgagaactcggctgccagcccatggccagatggttctcggggagcctcgaccagaagaacctcgtggagatcagccacacagttttttcccagagtcccaactgagagcaaaactgaagtgtccaggtgggagctgtaccccaggattaaagaaaataggaagcctcaaagtgagctgtgaggagttcctgctgatgggccttcgttatcagcatctggatcccccttcacccaacattgattatatctccatccaactggacctcacagataccaggagcaaaattgtgtacaagtcagagagtgcgtggctgcctgtctatatcagagctggaattccgaatcagattccaaaggctgcattcatggccgtgtttattctggaagtggatcagttcatcctgacctccttgactacatcagttctggactgtgaagaagatgagacccctaaacccttgctggtgttcaacattactaaagccccgctccagggctatgtgactcacctgttggatcacaccagaccaatctcctcattcacctggaaagatctcagtgacatgcagatcgcctatcagccaccaaacagcagccattctgagaggagacatgatgaggtagaattggaggtatacgacttcttctttgaaaggagtgcacctatgacagtccacatctccatcagaacagcagatacaaatgccccccgtgtatcctggaatacaggtctgagtctccttgaggggcagtctcgagccatcacttgggaacagtttcaggttgtcgacaatgacgacattggtgctgtccggctagtcaccgttggtggcctgcagcatggatggctgactttaagaggggggaaagggtttctcttcaccgtggctgacctccaggctggagttgttcgctatcatcatgatgacagcgactccaccaaagacttcgtggtcttccggatatttgatggccatcacagcatccgtcacaaattccccatcaacgtcttgcccaaagatgatagtcccccgttcctcataaccaatgttgtgattgaactggaggaggggcagaccatcctgatccagggatccatgctgcgagcttcagatgtggacgccagtgatgactacatcttcttcaatatcacaaagcctccacaggctggggagatcatgaagaagccagggccaggactgataggctatcctgtccatggcttccttcagagggatttgtttaatggaatcatttattatcgtcattttggtggagaaatctttgaagattcttttcaatttgtcctgtgggacagccatgaacctccaaatctttcagtgccacaggtggcaacaatccatataactccagtggatgaccagcttccaaaagaggctcctggagtttctcggcatttggttgtcaaggaaactgaggtggcctatataactaagaaacagctacattttatagattcagaatcatatgacagggagctggtctacacaataactactcctccatttttctccttcagccacagacacttggatgctgggaaattatttatggtggacagcataccaaaagtagttaagaatcctacggccctggagctgaggtcattcactcagcatgctgtgaactatatgaaagtggcctacatgccccccatgcaagacattggtccccattgcagagatgtccagttcacattttctgtcagtaaccaacatggcggtactttgcatgggatctgctttaacattacaatcctcccagtggacaatcaagttcctgaggcgttcaccaaccctctgaaagtgactgagggaggtcaaagcatcatcagcacagagcacattctaatttctgatgcagataccaagctggacaatattgacctctccctgcgggaattgcctctgcacggaagggtggagctgaatggatttcctctaaattcagggggcacattttcttggggcgatctccataccttaaaagttaggtatcaacatgatggaactgaagttcttcaggatgacctactcttggaggtcaccgatggcacaaattcagcagaatttgtactacatgttgaggtattccctgtcaacgatgagccaccagtcttaaaggctgacctcatgcctgtcatgaattgctcagagggaggagaggtggtcatcacctctgaatacatttttgctactgatgtggacagcgataacttgaagttgatgtttgtgattgctcgcgaacctcagcatggggtggtgaggagagctggagtcacagtggatcagttctctcagagagatgttatctcagaggccgtgacatacaaacacacaggtggcgagattggcctgatgccttgttttgacaccattacattggtggtttcggatggagaggctggcccttttgtgaatggctgttgctacaatggacccaatccatctgttccacttcatgcgtcctttccagtgtatgatctcaacatcacggtatacccagtagacaaccagccaccttccattgcaataggtcccgtgtttgttgtagatgagggctgctcaacagcccttactgttaaccatttgtccgccactgaccctgacactgcagcagatgacttggaatttgttttggtttctcctcctcagtttggctacctcgaaaatatactcccttctgtgggttttgaaaaaagcaatattggcataagtatagattcatttcagtggaaagacatgaacgcttttcacattaactatgtgcagtccaggcatctgaggatagaaccaactgccgaccagttcacggtgtacgtcacagatgggaagcatcactccttggagataccattttctattataatcaaccccacaaatgatgaagctcctgactttgtagtgcagaatattactgtgtgtgagggtcagatgaaagagctggactcttccatcatcagcgctgtggacctggacattccccaggatgccctgctgttcagcatcactcaaaagccacgccatggcctcctcatcgatagggggtttagcaaagacttctctgagaataagcagccagccaaccctcaccagaaacatgcacctgttcacagcttttccatggaactcctcaagactggaatgaggttgacgtacatgcatgatgactcagagagccttgctgatgattttacaatccaattgtcagatgggaaacataagatacttaaaaccatttcagtagaggtcatcccagttaatgatgaaaaaccaatgctgagcaagaaggctgaaattgcaatgaatatgggtgaaactcgtattatttccagtgctattctttcagccatagatgaagactcacccagggagaagatttactatgtatttgaaaggcttccccaaaatgggcaacttcagcttaagatagggagggactgggttcctctctcccctggcatgaaatgcactcaggaggaagtggatctgaacttgctgagatacacacacaccggggcaatggattcccagaatcaagatagcttcaccttctacctttgggatggcaacaacaggtcccctgctcttgactgtcaaatcaccatcaaggacatggaaaaaggtgatattgtcatccttacaaaaccactcgtggtgtctaaaggtgatagaggtttcttaacaaccaccacgctcctggctgtggacggaacagacaagcctgaggaactgctctatgtcatcacctcccctccgcgatatggccagatcgaatatgttcactatcctggagttcccattacaaacttcagccaaatggatgtagtggggcagacagtttgctatgtacacaagagcaaggtgactgtctccagtgacagattcagattcatcatcagcaatggactgcggaccgagcacggggtgtttgagatcacactggagactgtggacagagccctgcctgtggtaaccaggaacaaggggttgagactggcccaaggggccgtgggcctgctttcccctgacctccttcagctgaccgaccctgatacacctgcggagaacctcaccttcctcttggttcagctcccccagcatggccagctctacctgtgggggacagggctacttcaacacaatttcacccagcaggatgtggacagcaagaatgtggcctatcggcactcaggaggggactcccagactgactgctttactttcatggccacagatgggacaaaccaaggctttattgtgaatgggagagtgtgggaagaacctgttttattcaccattcaggtagaccaattggacaaaacagctcctcgtatcacactcttgcattccccttctcaagtggggctcctgaaaaatggctgctacgggatttacatcacttcccgcgtgttgaaggcatcagaccctgacactgaggacgatcagatcatctttaaaattctacaaggcccaaaacatggacatctggagaacacaacaacaggtgaatttatccatgagaaatttagccaaaaggacttaaacagtaagactattctttacatcataaacccatctttggaagtaaattcagataccgtggaatttcaaatcatggaccccacagggaactcggccactcctcaaattttggaactgaagtggtctcatattgaatggtcacagaccgaatatgaagtctgtgagaatgtgggtttgttgcccttggaaattatcagaaggggatattccatggactcggcctttgtgggtataaaggtcaaccaagtgtcagctgcagttggaaaagatttcaccgtgattccatctaaactgattcagtttgacccaggaatgtcaactaagatgtggaatatagcaattacctatgacggattagaggaagatgatgaggtctttgaagtaattctgaactcccctgtgaatgcagttcttggcacaaagacaaaagctgcagtgaaaattttggactcaaaaggaggacaatgccatccttcatattcctccaaccaaagcaagcacagcacatgggagaagggcatttggcatctgctgcccccagggtcttcctcatccaccacttctggttcctttcatctggaaagaagacctcttccatcttccatgcagctagcagtcatcaggggagacaccctgcggggctttgattctacagatctttctcaaaggaagcttaggacccgtgggaatggcaaaacagttcgtccatcctctgtttatagaaatggaacagacatcatctataattatcatgggatagtttccttgaaactggaggatgacagtttcccaactcacaaaaggaaggccaaagtatccatcattagtcagccacaaaagacaatcaaagtggcagaactgcctcaagcagataaggtggaatccacaactgactcacacttccccagacaggaccagttgccctcatttccaaagaactgcactctggaattaaagggactcttccattttgaagaaggcatccagaagctgtatcagtgcaatgggatcgcctggaaagcctggagtccccaaaccaaggatgtggaagacaaatcctgtccagccgggtggcaccagcactcaggctactgtcacatcttgatcacagagcagaaaggcacctggaatgcggctgcccaagcttgcagggaacaatacctgggcaaccttgtaactgtattctccaggcagcacatgcggtggctctgggacattggtgggagaaagtccttttggataggtttgaacgaccaagtgcatgctggccactgggagtggatcggtggtgaacctgttgccttcaccaatgggagaagagggccctctcaacgctccaagcttggaaagagctgtgttttggttcaaagacaagggaaatggcaaacaaaagactgtaggagagccaaacctcataattatgtgtgttccagaaaactctaaatataacagaccctacagggggccacctggagtttgtcacctatttattcacaggatctgtgaatattgctccatagaaaacaaattgttatgattgagtgggtatacctttgtgattctgtctagtgaaaatgggacatttttaatagtgccagaaagattgataaataaatattttttacaagataagatacaatttttgtatctcaataccttttaaaataaatgccagcagtattataaagtgtaaggtttgtttattccagaagaccctcacccttaccccattccaaatctcagggagcaccagtctcatagtccttggatttttttaaaaaaaatttttggtcccgttacctctaatgaatttattctgaaatatgtatcgtaggtgctcctaccactttagtctgagtgaagctaactctactagttcattaaaccaaagttgaaccgcaaagttgtccctttggagccctttaaatgtgaaatctaagattagaggctggggttgaaaaagagaattttctatgatgaaaaagaaagactttagatgaaagaatcttgtaggtggaggctcatctacaaagctgtagttcaggtaagaattcggggggctggctgtactcagagttctactcatcactattcatgaaacagatctccctttccaatttgagtgttggcattgtaccatcccaaagctaatgattgggtttccccagccttacagagtcatgagaaatttcaagtaacataatctgttcctctgtgtttattgtactgacaagcatttctcagggacacttgggataaggagtatatatgaatgatggttgacacatggaagaaaaatactgcttcctcagaaatgtcctgatgaactgtgctgatgaacagagaaaaataataccgaaaacagagcccctgaaagcctacattctcggaaaggattttgaggaattttgagccaccttaaatctttaatatttgcagaaatgccatgttaactagattctctaacggaaaggtaccttattaatttataatctcaggtgagtggaacatttttgtaacaatgaagtatgttgcagcgttaccagaactcccttctgaaatcaaggtttaacagttataggaaattagaatgtctgaaacatttatttaaagtttttctcttttcataatcactgagaaatatggttgtgccaaatgtcacttgctctatgagcaccaatgtaacttcagaatcaaattggggttatcaagtaggctagagctctggtgctggttttattataaaaataccttgagtgttgtagacactaaaactgcttgaagaaagtcagttcagtttctgggatataaaaacatggcaagctttttttatttcagttcatttatcaaggttgtaattaatagaaacatttagaaagagatattggaatatgatccagacattctgtctattacttaaatctaaacataattatagtgtcagagggtccttacctgagatgtcgcaggtgggctccagattggcataatgtacaggttctctgtgagacacaagcagtttctggcatttaaccaaaagatgccacacctatcctcttaccagctcctttcaaattccttctggtccacaggcttcttgcagtatggaaatgtgagatttgggctaaagaaaaaatagttgtttacctaaagggttaagtcctaggaaggaagtagaagtttgggaaatgagggattcaagggccactccttccactggaactctaaaactatataaaccatctaaaactggaaatctagaactatgtcaactgtgtagaaccttgtcagcatggcagatttattatacatttctgcaatataaatgataaatgatactgaactaattgcaaatgttagcataaagagtgttttgatttttataacaattagaaatgctacaagaatatttaaaaatattcctgatcatgaaagcattaatcaaattagaaaatccaagtcattttaagaagataaaaatagaaattcaggcaagtttgggtgatgggcggtattcatcacaaccttcattttattcttacaattgagctttgactcagggggaaaagaagtaaatgattgtcaaggttccctctgccttgattgatagtttctgatgggagtgggaaggaaggaattggagtaatgggtagaatgggaatgagagattacgggagagagagatgagatgggttgaacagaagaggatgggaactgatggtagctaggaaggaaagcgtcaagaaggacctgaatgtacccagcttttctccccaaacttcaataccacctcaggaaaaggcccactgtgtccaggggcgtcagtccagctcaatagtgtctagcttttcagaatcttctgattgtttggtctttaacaaaaacatagcatctatttgctaacaataaacttaagcaacatatgataatcatttcatctccttccaagaagtggtgaaaatgaaccaggtgacattaatttaacttctgtttttgtttatttttaatacaaccaaaaagatatgcacatattttaatttacattatggtactgtataatttaaaccataaactggtgctgattaatttctgcaacaaagcagcatattaaatgtactacatctagtgttgtagcaaaattaataaacttgttttaagttctgagacactttc

SEQ ID NO: 135322 - DNA, 6729 bp, Homo sapiens
  Payload ID: 6443
  Gene Symbol: FREM3
  Gene Name: FRAS1 related extracellular matrix 3
  Uniprot ID: P0C091
  ENST ID: ENST00000329798
  CDS Start-End: 1-6420
atggcgggggcttctcggcacccgactgggacgccccggcagctccttgtggcgctcgcctgcctgctcttgagtcgccccgcgctgcagggacgggcatcctcacttgggaccgagcccgacccggcgctttacctgcccgcccggggtgcgcttgacggcactcgccccgacggccccagcgtgctgattgccaaccctggactccgggtgcccctgggtcgttccctttggctcgacccgctccgggatctggtgattggagtgcagccgggggaccggtgcgaagtcacggtactggacgccctgccgcggctcaagggcgcgctctccccgcgccgcttcccctgcaccttcgggccccgccaagtccagtacactcacttcggctcccacagccccggacgcgcccgggtgctgctgcagctgcgctacgacgccccgactcacactctggtgctgcccttcacgctggcggtggacttggtcttctcccagctggagctggtgacgcgtaacaggcctttggtagtggagaagctgcgaagctggagccgcgccatagacaggagagtgctggacttcgcctccctgaagtctggagccacggccacccgcaggtgccggcttaccccacttcctcacgaggacggccccctgcccaagtacgggcgcttggtggacgcggtgggggcccctctccccaggggcaagggcgtagactgtgaggctttcctccgtgctggggtgcgctatcagcacacagccacctcctcgcccaaccgtgactacgtgcccatgatggtggagctgctggggcctgagggccaagacgctgggtccgcgggtgtgctggtccgcgagcacttccagctgctcgtgaggatccgcggcggagccgagaacacaccgcccaggcccagcttcatggccacgatgatgatggaggtggatccactggtgctgacagccctgacgcctgacgcactggccgcggaggacgtcgagtcagaccctggtgacctggtgttcaacattctgaacgcccccactcacccaccagggcacccggggcaacagggctacgtggtcagcaccgacgaccctctagggcttccagtctccttcttcacccagcaggagctgagggagctgaagattgcctatcagccccctgcagagaactcccatggggagcgcctctttcagctggagctggaggtggtggacggagacggcgccgcctcagacccctttgccttcatggtgacagtgaaatccatgaatactctggtcccagtggctagccataacaggggacttgtgctttttgaaggtcagtcaaggcccttgtccagcacccacagcattcctatcagtgataaagataacctggaagaggtgaaaatggctgcagtcaggggcttgagacatgggcagctggtggtgtttggggcacctgctgggtgcaagtatttcacaccagcggacctggcagcagggcgagtggtgtatcagcatgatggcagcaacacctacagtgacaatatcatcttccggatggaggacgggcaccaccaagtggacttcctctttcccctcaccatcctacctgtggatgatgaaccaccaatggtcaatactaacacaggactctcactcactgaagggcaggtggtccagatctctccctttgtactgagtgctactgatattgactctgaggactcaaccatccactttgtgctggagaaccagcccctaaaaggaaatgaggaagagcctcagtgggagttggcccctggttcctcccactcaggccactacctgggggacctgttgctgcagcaggctgaactacctctctcaactgaagatgaagactggcactacatggaaaaggaagggctttatgagaaagtggtgactgagtggctacagagagacataatggaagggagactcttctaccgccatcttggaccacacagccctcaatctgtaatggtccagctggctttccatgtgcaggatgaccatgacccacccaatctctccaaacagcacattttcaccatcaaggtccaaccagtggatatactgagtccacagctgtatccaggaactacactagaaatgactgtacaagaataccaactcactcacttccagaagaatttcctccgatacattgaccaggactctgatgaccagaacctatggtacaccctactgacactcccgactgacacagatggcaaccaccaagtccgggctggagaaattgtgctcactgattcaccagacacactcatcatgcactttacccaagcccaggtaaatcagcataaagttgcctaccagcctccacagaaattgggtattgcaccacgggttgtgcagtttacttaccaggtggaagatgctgcaggcaatagcgtgccaggcacattcacattattcctgcaacctgtggacaaccagcccccagaagtcaccaacagaggctttgctatcttagagggaggcagctttaacctcagcagtaatgagctgcatgttacagacccagacacagacattgaccaaattgtcttcatattagtccggggtccccaacatggacacttgcagtactttaaaagatgtatggtcccaggggaatctttcatgcaagctgatgttattaacgggagtgtctcttaccagcatggcagagaccagacgactaccagtgacactttccatctggaagtaagtgatggggtgcaccatatacccatcaccatcccaatttctgtgcatcccaatgtggctaacagaagtcctaggatctctctcagaagtagttcattattggatgtttctatagacgtactagagaataaagccactgaaattaccatgggtgtcatccatggcaaaaggaaggatgtaggtgacttgatgctgtctttcattgtaaaggacagccccaaactgggcactattctggtaaatggtttgcccacagaacgattcacccaagaggatctcatcaatgggagagtagcctatgcccacactgcaggtgaagttggttttcaaaagcagcacgatgccttcagcctcatcctctccaaagattcttaccaatgggtagtggggaatagcataatagagaaagtacaggtacaagtaactgtgctgcctgtggacaatgtgggacccaaggtcttcgtcggggagtccttcattgtctatgaaggtgagaagaactccttgaccttacaacatctccatgttgaagatgtggacactcatcaagatgaactcctctgcacagtgactagtcagccagcctctggctacctggaaaagattgcatcagctcctggttcaaaaatgtcccagtctggtagccctatcagtgctttctccctcagagatatccaagtgaggcatatcaattatgtacagagtattcacaagggagtagagccacaagaggaccaattcaccttttattgctctgatggcatcaacttctccccaaatgtcttcttccctataatcatcctacccaccaatgatgagcagcctaaactttttgcccatgagtttaaggtactagaggggatgagcctggtcatagacacccagctgcttaatggagcagatgctgacctgccaccaaatgagctccactttcaactcacagccctccctcggcatggacgaatcatacagcagctggctacaggcagccagcccatccacagcttcaccctcaaggagatccaggaggcctccaccattgtgtatgagcatgatgactcagagacaaaagaggacagttttgaggtctggctgagtgacggcaagcacacaacccacaggaaggtacccattgtagtgaccctagtggatgatgaaactcctcacctgactgtcaacaatgggctgaaggtagagaaaggacactctgagatcatcacaaatcggatcctcaaggccacagatcttgactcagatgataaaagcctcagttttgtcctccattctgggcctcaacaagggcttctacagaggctgagaaaacccagaggagaagtgaggaacaatcttactctgggaatgaactttacccaggatgagattaacagaggcctcatctgctatatccacacaggccaagaagggattgttgacattatcaagtttgatgttactgatggggttaacactttgacagaccactacttctatgtcaccattggcaacttagacagcgtcttccctgaggtaatcagcaaaaggatcaccttgatagaaggtgccagagtgacccttaccaacaatctgcttaccaacagtgacatcaacagctctgatgaacatcactttagcattacacgggctccaagcctgggtcacttagaaagttctgactatgctggggaacccattgcctctttcactcaacttcaattggctagcaacaaaatatcctatgtccatacttcaaatgatgagaaaaagatggacagcttcgaatttcaagtgatcggcgaactctaccctgtgttcagaaccttcaggatcttcatcactgatgtggataataagaaacctatcttgaccatccatagactaacactacagaaagaggatagccaactgatcactctccttgagttgacagtggaagacagtgataccccagatgaccttattctctttaccatcacccaggtccccatgcatggcaagattttgtacaatggtagccgtcccgtgaccactttcaccaagcaagacctgaacaagaacctgattagctacaagcatgacggcagtgagaccactgaagatagtttctccttgactgtgacagacggcactcacactgatttctatgtcctaccagacactgccctggcgacacacaaacctcaagtaatgagggtccagataagatcattagacaataggcttccccagattactaccaacaggggtgccccagccttgaagcgccttcacactggacacatgggcttcctgattaccagcaagtctctgaaggcagaagatcaggacagtccccacaggcttctgaagtataaagtgaccagaggaccagagcatggcttcattatcaaaactggccttggaaaccagagcactcgagtgtttacacaagctgacattgatgagatgaagatatcctatgtcttgaatgagggcagcaacgcatcaaaggacatcttctatttctctgttgaagacaatggaggaaataaactaacaaatcagcctttccatctaaactgggcttggatttgtttggagaaagagtactacattgtggatgaagattccacattcttagaagtgacccttacacgcagaggataccttggagaaacatcatttatcagcattggtaccaaagatgaaactgcaaaaaaagacaaagatttcaaatggaagaccaataaacagatccagttcaatcctggacagactacagccacatggagggtgagaattatacctgacaatgaatatgagacttcagagaccttccagatcattctgtctgaacctctcatggctgtactggagtttccagaaatggcaacggttgaaattgtagaccctggagatgaatcaacagtttatattccagaggcggaatacaaaatagaagaggacattggggaacttttgattccagtaagacgatctggagatgcaagccaggaactaatcgtcatttgctccacacgtcaaggttctgccacaggcacgatttcttccacagtgttattctctgattacatctcacgtccagaagaccacaccagcatcctccactttgacaagaatgagacacagaagacctgccaggtcctgatcattgatgactccctttatgaagaggaggaatccttcagcgtttcacttaggctgccagtgggaggacagctgggagccagattccccaccactaaggtgactattctggctgatcgttatgatgaacctgtcctgcactttggggatgctgaatatcacgtcaatgaaagtgctcgctacgtggaggtttgtgtttggagaagaggcactgatctttcccaaccatcatccatcgccgtgcgctccagaaagtcagagcaggagtcagcagaagctggaacagattatgttggtatcagccgaaacctggactttgctccaggcgtgcgcatgcagacattccaagtgaccatccttgatgacctgggacagcctaccttggaaggcccagagaagtttgaattacttcttcagatgcctatgggtgcagtgcttggagaaccaaataaaactaccattttcatcgaggacaccatcacggactgtaagcagagtgcttgtagttcctttgattgaaagactttaagagggaaaaaaacagccaagatatgtctcctaacaacagaatgaaactctactgtttatagatcttagcaattctgggatatcagtgatattgtactgtcattggtgttatattctggtgatatgtggaaatgtaatttatatgactgcatggagatagaaatatatatacctagaaaacattgagcccacaaataattagactgtgttcatgttctttttctattttgttttactttgtttctgaggcaagtaagaaatccactgtgatcaattaaatcaaaagttaagatcaaagaa

SEQ ID NO: 135323 - DNA, 16070 bp, Homo sapiens
  Payload ID: 6444
  Gene Symbol: FREM2
  Gene Name: FRAS1 related extracellular matrix protein 2
  Uniprot ID: Q5SZK8
  ENST ID: ENST00000280481
  CDS Start-End: 217-9726
ggacggcctgggaaggcttcggctcctcggctgcggctccagcccggacggcgccgcgcaactttgccatccttctggcccagccccggctacaggaggaccccgcgggcaacgcgcggagttcctggcacttcccggcggtgtctcttgttgtctgcccggggaccgacttcgcatgctctcaggctgacctgtccaagcccgaacaccgggaccatgcactcagccgggactcccgggttatcctcgcgccggacaggcaactccaccagctttcaaccaggaccgccaccgccgccccggctgctgctgctgctgctgcttctcctgtcactggtaagccgcgtcccggcacagcccgctgccttcggcagggcgttgctgtcccctggtctcgcgggggctgcaggggtccctgctgaggaggccatagtgctggcgaaccgcggactccgggtgcctttcggccgtgaagtctggctggatcccctgcatgacctggtgttgcaggtgcagcccggggaccgctgcgcggtttcggtactagacaacgacgcactggcccagcgaccgggccgcctgagtcccaagcgcttcccgtgcgactttggccctggcgaggtgcgctactctcacctgggcgcgcgcagcccgtctcgggaccgcgtccggctgcagctgcgctatgacgcgcccggaggggcagtagtgctaccactggtactggaggtggaggtggtcttcacccagctggaggttgtgactcggaacttgcctctggtcgtggaagagctgctggggaccagcaatgccctggacgcgcggagcctggagttcgccttccagcccgagacagaggagtgccgcgtgggcatcctgtccggcttgggcgcgctgcctcgctatggagaactcctccactacccgcaggtccctggaggagccagagagggaggcgccccggagactctcctgatggactgcaaagctttccaggaactaggcgtgcgctatcgccacacagccgccagtcgctcaccaaacagggactggatacccatggtggtggagctgcgttcacgaggggctcctgtgggcagccctgctttgaaacgcgagcacttccaggttctggtgaggatccgaggaggggccgagaacactgcacccaagcccagtttcgtggccatgatgatgatggaggtggaccagtttgtactgacggccctgaccccagacatgctggcagccgaggatgctgagtctccctctgacctgttgatcttcaaccttacttctccattccagcctggccagggctacttggtgagcaccgatgatcgcagcctgcccctttcctccttcactcagagggatctgcggctcctgaagattgcctaccagcccccttctgaagactctgaccaggagcgcctctttgaactggaattggaggtagtggatctagaaggagcagcttcagacccttttgccttcatggtagtggtgaagcccatgaacacaatggctccggtggtcacccggaataccggtcttattctctatgagggtcagtctcggcccctcacaggccctgcaggcagtggtccgcaaaacttggtcatcagcgatgaggatgacctagaagcagtgcggctagaggtggtggctgggctccggcatggtcaccttgtcattctgggtgcttccagtggcagctctgctcccaagagctttacagtggctgagctggcagccggccaggtggtctaccagcatgatgacagagacggctcgctgagcgacaacctggtgcttcgcatggtggatggaggaggcaggcaccaggtacagtttctgttccccatcaccttagtgcctgtggatgaccagccacctgttctcaatgccaacacggggctgacactggcagagggtgaaacagtgcccatcctgcccctttccctgagtgcaactgacatggattcagatgattctctgctgctttttgtgctggagtcacccttcttaactacggggcatctgcttctccgccaaactcaccctccccatgagaagcaggaacttctcagaggcctttggaggaaggagggggcattttatgagcgaacagtgacagagtggcagcagcaggacataacagagggcaggctgttctatagacactctgggccccatagtcctgggccagtcacagaccagttcacatttagagtccaggataaccatgaccctcctaatcagtccgggctacagcggtttgtgattcgtatccatcctgtggatcgcctccctccggagctgggcagtggctgtccccttcgtatggtggtacaggaatcccagctcacaccactgaggaagaagtggctgcgctacactgacctggacacagatgaccgagaactacgttacacagtgactcagccccccacagacacagacgaaaatcacctgccagccccactgggtaccttggtcttgactgacaacccctcagtcgtggtgacccattttacccaagcccagatcaaccatcataaaattgcttacagacccccgggtcaagaactgggcgtggctactcgagtggcccagttccagttccaggtggaagaccgagctgggaatgtggctccaggtacctttaccctttacttgcatcccgtggacaaccagccacctgagatcctcaacaccggcttcactattcaggagaagggtcaccacatcctgagtgagacagagttgcacgtgaatgatgtagacactgatgttgcccatatctctttcactctcactcaggcacccaaacatggccacatgagagtgtctggacagatcctgcatgtagggggtctcttccacttggaggacataaaacagggccgagtttcctatgcccataatggggacaagtccctgactgatagctgctccttggaagtcagtgacagacatcatgtggtgcccatcactctcagagtaaatgtccggccagtggatgatgaagtgcccatactgagccatcctactggcactctggagtcctatctagatgtcttagaaaatggggctactgaaatcactgccaatgttattaaggggaccaatgaggaaactgatgacttgatgttgactttcctcttggaagatccacctttgtatggggaaatcttggtcaatggcattccagcagagcagtttactcaaagggacatcttggagggctctgttgtatatacccacaccagtggtgagataggcctattgcctaaagcggattcttttaacctgagtctgtcagatatgtctcaagaatggagaattggtggcaatactatccaaggagttactatatgggtgaccatcctgcctgttgatagccaggccccagaaatctttgtaggtgaacagttgatagtaatggaaggtgataaaagtgttataacatcagtgcatataagtgctgaagatgtcgactccctgaatgatgacatcttgtgcactatagttattcagcctacttcaggttatgttgaaaacatttctccagcaccaggctctgagaaatcaagagcagggattgccataagtgctttcaacttgaaagatctcaggcagggccacataaactatgtccagagtgtccataaaggggtggaacctgtggaggaccgatttgtatttcgttgttctgatggcattaacttttcagagagacagttcttccccattgtaatcattcccaccaatgatgaacagccagagatgtttatgagagaatttatggtgatggaaggcatgagtctggtaattgatacacccattctcaatgctgctgatgctgatgttcccctggatgatttaactttcactattacccaattccccactcatggtcacatcatgaatcagctgataaatggcacggttttggtcgaaagcttcaccttggatcagatcatagagagttccagcattatttatgagcatgatgactccgagacccaggaagacagttttgtgattaaactaacagatgggaagcactctgtggaaaagacggtcctcattatagttatccctgttgatgatgagacgcccagaatgactatcaataatggactagaaatagaaattggggataccaagattatcaacaacaaaatattaatggcaacagatttagattcagaagacaaatctttggtttatattattcgttatgggccaggacatggcttattacagagacgaaaacctactggtgcctttgaaaatatcacactgggcatgaattttacccaggatgaagtagacagaaacttaattcagtatgtccatttggggcaagagggcattcgggacctaattaaatttgatgtgactgatggaataaatcccctcatagatcgttacttttatgtgtccatcgggagcattgacattgtcttccctgatgtgataagtaagggagtgtccttgaaagaaggtggcaaagtcactcttacaacagacctactaagcactagtgacttgaacagtcctgatgaaaacttggtttttaccatcaccagggctcccatgcgaggtcacctggaatgcacggatcagcctggtgtgtccatcacgtctttcactcagctgcaactggctggaaacaaaatctactacatccacacagctgatgatgaagtgaaaatggacagttttgagtttcaagtcaccgatggacgtaaccctgtctttcggacattccgtatctccattagcgatgtggacaataaaaagccagtggtcaccatccacaagctggttgtcagtgaaagtgaaaacaagctgattactccttttgagctcactgtcgaagacagagatactcctgacaagctcctgaaattcactatcacccaggtgcctattcatggccatctcctattcaacaataccagacctgtcatggtttttaccaagcaagacttgaatgaaaacttaatcagctacaaacatgatggcactgagtcaagtgaagatagcttctccttcacagtgactgatggcacccatacagacttctatgtttttcctgatacggtgtttgaaacaaggagaccccaagtgatgaagatccaggtcttggctgttgacaacagtgtcccccaaatcgcagtgaataagggggcctctacacttcgcactctagccactggccacttggggttcatgatcacaagcaaaatattgaaagtggaggacagagacagcttacacatttctcttagatttatcgtgacagaggcccctcaacatggatatcttctcaacctggacaaaggcaaccacagcatcactcagttcacacaagctgacattgatgacatgaaaatatgctatgtcttaagagaaggggctaatgccacaagtgatatgttctattttgcagttgaagatggtggtggaaacaagttaacgtaccagaattttcgtctgaattgggcatggatctcctttgaaaaggaatattacctggtcaatgaggactccaaatttctagatgttgttcttaaacgtagaggttacttgggagaaacttcttttataagtattggcacaagagacagaactgcagaaaaagacaaagacttcaagggcaaagcacagaaacaagtgcagttcaacccaggccagaccagggccacatggcgagtgcggatcctgagtgatggggagcatgagcagtctgaaacctttcaggtggtactctcagagcccgtgctggctgccttggaattccccacagtcgccactgttgagatcgttgatccaggagatgagccaactgtgtttattccccagtccaaatactccgttgaagaagatgttggtgagctgttcattcccatcaggaggagcggagatgtgagccaggagttgatggtggtctgttatacccaacaaggaacagcaactggaactgtgccgacttccgtgttgtcttactctgattacatatccaggcctgaggaccacaccagtgttgtccgctttgacaaagatgaacgggagaaactgtgtcggatagtcataattgatgactctttgtacgaggaggaggaaaccttccatgtccttctgagcatgcccatggggggaagaatcggatcagagttcccaggggctcaagttacaatcgttcctgacaaagatgatgaacccatcttttacttcggtgatgtggaatactctgtggatgagagtgctggctatgtggaagtgcaggtgtggagaacgggcactgacctgtccaagtcttctagtgtcacagtgaggtctcggaaaacagatcctccctctgcagatgctggaacagactatgtgggcatcagccgtaatttagattttgcacctggagtcaacatgcagcctgttcgtgttgtcattctggatgaccttggacaaccagcgctggagggaattgagaaatttgaactggtgcttcgcatgcctatgaacgcagcccttggcgagcccagcaaagccacagtgtccataaatgactctgtctccgatttgcctaagatgcaattcaaagaacgaatatatactggcagcgaaagtgatgggcagatagttacaatgatccataggactggggatgtccagtacagatcttcagtgagatgctacacccggcaggggtctgcacaggtgatgatggactttgaagaacgcccaaacactgatacctccatcatcacattcctccctggtgagacagaaaagccctgcattcttgagctgatggacgatgtgctctatgaggaggtagaggagctccgcctggtactcggcactccacaaagcaactctccctttggggctgcagttggtgaacaaaatgaaactctcataaggatccgagatgatgctgataagactgttattaaatttggagaaaccaaatttagtgtcactgaacccaaagaacctggagagtcggtggttataagaattccagtgattcgccaaggagacacttcaaaggtttccattgtgagagtccacaccaaggatggctcggccacctctggagaagactaccaccctgtgtcagaagaaattgagtttaaggaaggggaaacccagcacgtggttgaaatcgaagttacctttgacggggtgagagagatgagagaggccttcactgttcacctaaaacctgatgaaaatatgatagcagagatgcagttgacgaaagccattgtgtacatagaagaaatgagcagcatggcagatgtcacttttccttctgtccctcaaattgtatccctgttgatgtatgacgacacttccaaagctaaggagagtgctgaacccatgtctggctatcctgtcatctgtatcacagcttgcaaccccaaatattcagactacgataaaacaggctctatctgtgcaagtgagaacatcaatgacactttgacgcggtaccggtggctgattagtgcacctgcgggccctgacggtgtgaccagccctatgagagaagtggacttcgacaccttttttacgtcatccaagatggtcacactggactccatatactttcagcctggctcccgggtacagtgcgcagctcgtgctgtgaacaccaatggggatgaaggcctggagctcatgagccctattgtaaccatcagcagagaagaaggtctttgtcagccccgtgtacctggggttgttggagcagagccgttctcagctaaattgcgctacacaggccctgaggatgcagactacacaaaccttatcaagctcactgtcacaatgccacacatagatggcatgctccccgtgatctccactagagagctttccaactttgagctcaccctcagccctgatggcacaagagttggaaaccacaagtgctccaacctcctggattatactgaagtgaagactcattatggtttcttgactgatgctaccaaaaatccagaaataattggagagacatatccttaccagtacagcttgtccatcagaggttccactaccttgcgcttctaccggaacctgaacctagaggcctgtttatgggagttcgttagctactatgacatgtcagaactccttgctgactgtggtggcaccattggaacagatggacaggtcctaaacctagtgcagtcctatgtgacccttcgagtccctctgtatgtttcctacgtgttccattcccccgtgggggtaggaggctggcagcattttgacttgaagtcagagcttcgtctaacttttgtgtacgacaccgccatcttgtggaatgatggaattggcagccccccagaggctgaacttcaaggttctctctatccaaccagcatgcgcatcggtgatgaggggcgcttggccgtgcacttcaagacagaggctcagttccatggcttatttgtgctgtcacatcccgcatcctttacaagctcagtgatcatgtcagctgatcatccaggcctgacattttccctccgcctcataaggagtgaaccaacctataaccagccagtacagcagtggagctttgtctctgactttgccgtacgtgactactcagggacctatactgtgaagctggtgccatgcactgccccatcacatcaggaataccgcctgccagtcacctgcaaccccagagaacctgtcacctttgaccttgacatccgattccaacaggtcagtgatccagtggctgctgagtttagcttgaacacccaaatgtacctgctctctaagaagagtctctggttgtctgatggatccatgggattcgggcaagagagtgatgttgcttttgcagaaggtgatataatttatggtcgtgtcatggtggatcctgtccagaatctgggtgactccttttactgcagcattgagaaggtgtttctatgcactggagctgatggctatgttcccaagtatagtccaatgaatgcagaatatggctgcttagccgactctccttcactcttatatagatttaaaattgtggacaaagctcagccagagacacaagcgaccagttttggaaatgtcctatttaatgccaaactagcagtggatgaccctgaagccattctcttagtgaatcagcctggatctgatggatttaaagtcgactcaacaccactctttcaggtcgctctaggccgagaatggtatatacatacgatctatacagtgagatcgaaagacaatgccaatcgaggtattggcaaaagaagtgtggagtaccattctctggtgagtcaaggaaagccccaatccaccaccaagagccggaagaagagagagatcaggagcacaccctcactggcatgggagattggtgctgaaaacagtcgaggaacaaacatccagcacattgccctggaccgcaccaagaggcagatcccccatgggagagcacctccagatggcatcctcccctgggagctcaacagccccagctctgcagtcagcctggtcactgtggtgggaggcaccacggtagggttactcaccatctgcctcactgtcattgcagtgctgatgtgcaggggcaaggaaagtttcagggggaaggatgccccgaaaggctccagcagcagtgagcccatggtgcccccacagagccatcacaatgacagctcagaagtttgatgactgcaggtagaattcaaccttttccgtaagtgcctcggaaaagatcacaatggaaccttaaatacttctggtaaaccatagagaatggaggatggctgtgatgaagctgcttagagaatatgactgtactaatggagtttgatttgaattctccatactcttttttgcatcaaaggacaaattaaggcatctttcctcttgccccaaaggcagcaacaacgtactcatatgtacacagagccatgatgtgaggaatgtactcctcattttagacatattctctatgcagtggagataaatctattaaaaggtgctaacagactctcttacaagtgtaagaggaatctactgttgctatgttagtgtgaatgttgaaggtgcaattatcacattgtttattaattgtataacagattattactagaaaggtttttgttgctagtctggaaaactggtgaacacactgtttattatgacaagttttcaaataggtgaagacagcatagaattatgaccagggtggctcaacccacaaatcaactgatctactacttgggagacagtggaaggaaagatagagggaaggaagttcactcacttgaatttgaattgcttctcattctcatcagactctccttgttttgtttgcatatttaattttaaattaaaccaaagaatatgttaattctgaaagagatttttaagagatgctgctctgttttggcatatagtgagtaatggtagagctcttgcatggtaatataccttattggtgctcaacatttgtgggaaattagagggttggtgagattttggtgatgaataaatgccatagagttagagtcactacaagacaatgttctctaagaactgagcctagatgtttgcagtattgaacccataaatgataataagaaacattgttacagatggtgaagggagaaagtggtatttattaatataatgtgtataatcagagtgcctcttatacatactttatagaataaaggaacattttgacagatgaggttatccctcggagtagcgtaatcacacaataacatttagaacttaaattggctacaggacattttattagctttctatccagcatctggtccaaacgatgggactctctgcaactatcattccagaaatggtcttggaggtggccagaatcattgaccatatttttatttggttcaagaagacatcgctctggcatccccagttcagtgaactggtacaatgtggtccctctcaatatttaaaaatataatttgtaacagtgcttaccattcacctcccaaagccaaggaacttgagtgagcttccttggcaagcctcccattgcctttctgcatcaatgtgtttgttaccaaatagcagaaatttcgcttagaaggggaaaacttcagctttccaaaagctagtaaacatgtttcaaagaaaaataaggtcaggagaaaaagaataatgcctacagattatccttcagatgctggctagaatcccctttgacttctagccataagctggccacattggacatcttggtcactgcagaattttaaaaggcaaacttctcagaacagatgtgcacatcttaatttggtgtctgtaagtatcaaccatttcttgatcaagataaggaagcaacactgatactgagagagaggtcatatgtccaatagttgcctttcttctcttaggcagctctgcacttcatgttcagttttttaaaaatagactgtagtatcctttcattggagaatttacaaaaatatcatctacagctcaaaagtcccactaacggcttatatgaacagaaagtactgtgtagcccaggagtttatttagcaagataaatagtggtaatttcttaatcattcccctttcctttgctttaccttctggcagatgcttagctacttctttggctacctcataatttgtatgggaatgaacatgaattagggaacttcaaatagtgcgtagacttttccctacttaccattgggttcaattgatgtagactgttagagcaagtatactcaatcaacttgctgatattttagtagttaacagcttccgagcctatcatgcaatttggagtctgtcaatgaatatagcaatcggtgaagcattactgtacgaagtctgttttcaggctttgggtcaagctggttttataccaaatttcactctacaatgcatattctaatgaagctactttatataaattggagagcttataaaatgcagaacatttctatcctatcctaccaaatatttatccttctctgtcctctattctcttactctcctctctccctttttccttccctttattcccttgaaaaaagagaatctgtgggaaataggcagatatagctttttaaaatataaagtacttgggattttgcattatttttcttaatatctatttactaagtatgtaatttaatatacattaattattttttgaaactcttgttagtgggaagaatatggtaaattttttgttaaataaaatagacccttatgtttagcattttgtttttagagaactattctggtactatcagaacaaatacataaaataacttcccatagagaacaggatatagcaataatagctccttagatactcagtggcttctgactccaatcaaggtcttgttgatattatatagtaaaaataaaaccaaaaataaatattattcaagtggctcttctaagcatgtgaatcatgaagcactgaaatatgtattttaatgatgatcttatttattcccatttttgcccttagttaacatttactggtgctcacctaggattggctattctgagggattgcatagaaaccaagctccacttgctgtccttgggaaggttataactgaatgcagctctttatttggactaaagtgtcaggatatgcattagattctctcctgaaccaaaaacacaacagtcattatctgtgaaccataatttaaaaatctttctagaataacaacagcagactccactcttgtttgtctaaaagagccctactgggtatggatcattctgatgacagatttatacaaaatgattcaaaccagtaacttagtaaaattgaccttcgcaaaacctcactgggggagtgccttgtagagctgtgggtgggactgcacattcttttcctcttagtaaaagataggcccactttattccaagaataacacttagcacataaactcttcttccagctcgttagcagcattagcaccttctgaattccaccctctcagaagaatccacagtgtttgaacaatttgcataaaggtcagctagcatcctgctgccaagccactgcatagcatttgtgataagaaggaccaactctaggctcaatatgaagggatttagttctgtaagcagcaaaaaagcttctttatcaagtcatcttacctctaattcttttccagtgtgccaactccaaagtcaacattaaaaatgtaaatggacctgtgtaaatatcacagagagcttttccttatacatctcaatgctgagagttaaaatattcccaggttaaaatttttttaaagtaccaataatagagctaaatacaatgacatttgcttttaaaaggtggatattttatttctgctttttgaaaatacttatttagtattgacttggaagccaatttggtcctttaataagtaaagaaaataatatgtttaaaaatgtaaatgttttacaaatttgaaactttcataattgtattaatcagaaaacaagcacattgccattctttgaaactcatgtttctagacatgacagcagtaataaaaggatgaaaacaagtgtcttcactaagcgtatggccaataaatgggacccaaacgttcaatctgttcagtttaccaaggttcagaaatacgtaatttagcaggaaactataaataccagtgctatcacagccacacatacacacacacagacataaaataaccaaacatctcatttctaggaaagagataacactaaaggcatcataggtttaactgaaatacgttatatgaagttttacaaaaaggtcaacagaaagctcatttgtgaaaacatactctcatgggagcttctttaacattagttcagaggttaatatatttcctggaggtgttttcctagaattgattgcactattgcatggtaataacatttaattgttaaggaaacattatatataggttcaaattatcccttaatgttgatttctccccttttccatggattttgatactaagaaacaaaatgctttgagattttggtaactattttgattttgataaaacatgttaaaatagaaggacatgatatttttctatagtttccatcaggaagagtacatcagaaacttctccataaggaaagaaaactgactctctcttgaactagtgttgacaaaatacactaatgtctttcttaattttattttattaggagaaaaatcagaatattaaatttgcaaacttttgaacagcagtaatagctccttagacactcagtatctttcttccctatctttcaagcacatttaatttctttcccctggtatttgtttgctttgtgttttttcaatattttgtttgctaaagaacaataacaacaacaaagctggtccagccctgacacctacttttgctttttttctttctttcttttaatttgttgaactataggtttctttctgagatgtatttttcattcttccaataatgctctctttttcatttcaaaaccattaccactttcaatatgtaattaacatcctcattcatcagaaagctggtaagtccacacagcatttgtgcagtatcccttctgtgtaaaatgttaaggctttcagatgaaagaaaaaagaacttcctgcaaaagatcaaaagcatcatactaaataaaatgatgacaatatgtgccttgatttttctctcaatggaggttcaacattgacatttaagatgtaaaaaaaattactttgatggtttaattaagaataataagtcaaatatcacatgtatgtagttcttttggatgaccgaataccttaaaatgaactaaataactgaaataaagtgttaaaatgttaacagcgttgaagtttttaaaattataattatcaaatgcacaatgttcttttactatgccaaatgttgcctacactgattacatgattgtcacagtttaagtgaatttctactatggatctttattttccccaatgtttggatcatcctctcagataagaattgtcagtattgcacctcaagaaagaagaaaaaataagaatgtaaatttttaaaagctagcattaaaagtaaagagcagtacaataaaaatcacttaaaatagagaaaggcaactactgagtaagaagaaaagataatttctgtaaaagctaaatttatgcacattacaaaaagtagtcaagtcagtcttccattgtgacttcaggaattcaaatgcaagttgttggcaaaatatatatatacacacacacacacatacacacacatatatgtacatacatatatatatagagagagagagatagattttttttttttgagacagagtttcgctcttgttgcccaggctggagtgcaatggaatgatcttggctcaccgcaacctccgcctccagggttcaagtgattctcctgcctcaacctcctgagtagctggaattacaggtgcccactaccatgcctggctagtttttgtatttttagtagagacagggtttctccatgttggtcaggctgatctcgaactcccaacctcagatgatcctcccgcctccacctcccaaagtactggaattacaatggcgtgagccaccacaagatatttttaaagcccatttgtctataaaagaaaactcttggacaaggagctttgtgttttataattgtattacgtgcctgcttccttaccaagtgccctccataacactaagtaaatttatatttatctagcctctgagtgacatatctgtgtgtaatggaattatttgcagaatttaatagccttttttattttcgcatgagaatttttcaaaaactatcagggtctagttttatcatacatttactaagttactacatattggtggatattgacgtttattcctgggaatctaattttgcaaacaatttggagccattcagtcataaattcatgtcaacaataagtcttgctgccgcttgtgtttcataactacgcttgctttccttcaaaatataccaagtgtgtaatataaataaagcccatatcaatataaa

SEQ ID NO: 135324 - DNA, 3330 bp, Homo sapiens
  Payload ID: 6445
  Gene Symbol: FRAS1
  Gene Name: Fraser extracellular matrix complex subunit 1
  ENST ID: ENST00000264899
  CDS Start-End: 31-984
ggctcctccatcgtgggtgccgaggcggcgatgggtgtcctcaaagtgtggctcgggctggccctagcgttggcggaatttgcagtattgcctcatcattccgaaggtgcttgtgtctatcaggattccttgttggcggatgccacaatttggaagcccgattcatgccagagctgccgttgccatggtgatattgttatctgcaaacctgctgtttgcagaaaccctcaatgtgcctttgagaagggagaagtgcttcaaatagctgccaaccaatgctgtcctgagtgtgttttgaggactccaggatcttgccatcatgaaaagaaaatccatgagcatgggacagaatgggcctcttctccatgtagtgtgtgctcttgcaatcatggggaagtccgatgtaccccccaaccatgcccaccgctgtcatgtggacaccaggagctggcattcatccctgaaggaagctgctgcccagtttgtgtgggccttgggaaaccctgttcctatgaaggccatgtgtttcaggatggggaggactggcggctgagccggtgtgccaaatgtctgtgtagaaatggggttgcccagtgcttcacagctcagtgtcagcctctattttgtaaccaggatgagactgtagtccgagtccctggaaaatgttgcccgcagtgctctgcaagatcctgctctgcagctggccaagtatacgagcatggtgagcagtggagcgaaaatgcctgcaccacgtgtatatgtgaccggggtgaggtcaggtgtcacaagcaggcctgcctgcccctgagatgcggaaagggtcagagcagggctcggcgtcatgggcaatgctgtgaggaatgtgtgtctcctgccttggcctcccaaagtgttgggattacaggcatgagccaccatgcccagtcactacttgggccatttttgactcaaataaagaagccacatttctcctgtttagagtgataaatttaagaaaaaagtaaaaattggaaggaattttagccgttccttctggaaaccctgaactgtatagcctaatgattattgggtcactggccgcttagacctctctcagcttctgttgcctagaggaataaaatctgaggggtaaaatttaaaaaaattcatgttattgaagaaaaaaaaatggtgttgagctcttctttcaaatgaattctaataaatatgacactgtctataattcaggaagttaatagccttttaattttggatctgatttttgcaaagggtcatggagaagggaaggggaaagcctgttgccttcagatctgctagctgcacttttctgtgttgatgtatatccaggcaatgtttgaagacacaagggttttcttggtctcctctctctagaataacattgtgatgacaatttcaaatcaatcagttagactcaaattaaaatcaagtaaaaaacaagacatctatcatttagatattgcttactcttcccctgggccttttgcagtgtttggggttgggatgagaggagtaatctgagccagcattttctgtggagctctgaatggtaactgggcatctcggtacctgaatggtggtacccaagcgcctcagtgcctgaatcccacctgagcatcatagtatctgaatggtacctgagctctgaatggtcctggagcatcacaatagccctggtgctctatcccaggggctgggctctgacccatgcagaggttcccttaagaaactgggaggtccaatgaaaacatgctgcaaatgtttcttcgattaaaagatacacagttaacactacagatgtttttagattaaaagatatgcatttaacattttcttatgtagtgaaagagggttcctcatgcaggatatgccagatagaatggttttgaaactagctggagcttaaggtagaatctctgcttctgtattgtcacttgccctagtaacagaagttatgatcagagactcctaataaaacaaccagtggttctatgttatataaattattgtaagtttttttgcatattatctcatttgattccttttggaaatggcagggcaggtatatccatttatagatgagaaatagtcagtgaggaaacggatctgacccaggccttccaattcctggtcttgtgcttatcccactctcccaactttatcctcaaatacattttctttttttttgccgaaaatgataccttgttttctagttcagcctagtaagcaggaattgatagatcaaggtaaaaatgctctcttgatgttgatgcaggtgatcgttttggccctgaaactgccagtgacctagaggcatcatttcctattcaagacgtcctggaaaactacatttactactttcagagtgttcatgaaagcattgagccaacccatgatatttttagtttttatgtgagtgatggaaccagtcgttcagaaattcacagcatcaatatcaccattgaggtaaagactttggaagttggaaaggttgagcccttgaccacaatatttcacaccattagagagctttctttatagggactcaaaagcaaagaagattggatttgaccttcaaaattgaaggtcgttcttaaaatatagccttcaggaatcttgtagaattaaggttggcatttggggaaggcttgagttagaaatctaaatttccatttcaggattgaatttatttgttcggtgtgaaaaacagtttgtgaaggtcagagatgctttgccagtctcatatataaatgaaaacttacatatgtctatgtttctctgaaattgtgtttggttctatatgcatatttgccttttcttattttactgcatttatttatttaattgtaacatcaaagaaatgtgttccttgatgctgtatttattctcatttgagcaactacacaggcttgctctaccgagagagagacacaggggaggggaaagataaatctcagaatgaaataccctctgccttgggaaaataaaatgtaaagaaccctctgcactcttaagggtcagtggtggaaaggggctggcaccagggcagggagacagctttagagacccacactttcaaatatagtgtccttctacaggtactgtggtatgcttagcattttctaagagagttctgagttatattagtatggtcttttatcttcaaagtatgttaatacttgtacttgtcaaagcacatatccatatttttggtctagaaaatatggtcattgtacttacggaagatatctgagaaaacttttatgaaatgtccatcagcttcttttgaagggggcattttgttgcctggac

SEQ ID NO: 135325 - DNA, 7142 bp, Homo sapiens
  Payload ID: 6445
  Gene Symbol: FRAS1
  Gene Name: Fraser extracellular matrix complex subunit 1
  Uniprot ID: Q86XX4
  ENST ID: ENST00000325942
  CDS Start-End: 441-6371
aactttaaaaagctgcttcggacaaaccagagccaggatttccactgtcggggacccgggatcggaagggtctagcccgagggaaatgctggaagatcccatcggccagtgaccagcaactttccggcgagattttgacgcggagaactgtgctctgcctcctcttattctcccaaagctcacgttggcgtcctgccttgcgggggaactcggcgcgctctctgcctgagcagcgagtgaattgaaccccagcccgctccggcgcctccgggctgatgagtgtcgctctccgcccgtccatctctttttcccggaggtaaaggcccgcggtcccccaccttcagtgcgcccgggttccaagcgccggagccagcgttttggcggagccgcttcttggatgctgaaggctgggctcctccatcgtgggtgccgaggcggcgatgggtgtcctcaaagtgtggctcgggctggccctagcgttggcggaatttgcagtattgcctcatcattccgaaggtgcttgtgtctatcaggattccttgttggcggatgccacaatttggaagcccgattcatgccagagctgccgttgccatggtgatattgttatctgcaaacctgctgtttgcagaaaccctcaatgtgcctttgagaagggagaagtgcttcaaatagctgccaaccaatgctgtcctgagtgtgttttgaggactccaggatcttgccatcatgaaaagaaaatccatgagcatgggacagaatgggcctcttctccatgtagtgtgtgctcttgcaatcatggggaagtccgatgtaccccccaaccatgcccaccgctgtcatgtggacaccaggagctggcattcatccctgaaggaagctgctgcccagtttgtgtgggccttgggaaaccctgttcctatgaaggccatgtgtttcaggatggggaggactggcggctgagccggtgtgccaaatgtctgtgtagaaatggggttgcccagtgcttcacagctcagtgtcagcctctattttgtaaccaggatgagactgtagtccgagtccctggaaaatgttgcccgcagtgctctgcaagatcctgctctgcagctggccaagtatacgagcatggtgagcagtggagcgaaaatgcctgcaccacgtgtatatgtgaccggggtgaggtcaggtgtcacaagcaggcctgcctgcccctgagatgcggaaagggtcagagcagggctcggcgtcatgggcaatgctgtgaggaatgtgtgtctcctgccgggagctgctcctatgatggagttgtgcggtaccaggacgaaatgtggaagggctcggcctgtgagttctgcatgtgtgatcatggccaagtgacctgccagactggagagtgtgccaaagtggagtgtgcccgggatgaagaattaattcacttagatggaaagtgttgtcctgaatgcatttcaaggaatggttattgtgtttatgaagaaactggagaatttatgtcatcaaatgctagtgaagttaaacgtattccagagggagagaagtgggaagatggcccttgcaaggtgtgtgagtgccgaggggctcaggtaacttgctacgagccctcttgcccaccatgtccagtgggcacactggccttagaggtgaagggacagtgctgtccagactgcacatcagttcattgccatccagattgtttgacatgctctcagtctccagaccactgtgacctctgccaagatcctaccaagttactgcagaatggatggtgtgtgcacagctgtggactgggtttttaccaagctggcagtctctgtttagcctgccagccccagtgctccacgtgtaccagtgggctggagtgctcatcctgccagcctcccctgctgatgcggcacgggcagtgtgtgcctacctgtggggacggcttctaccaagatcgccattcctgtgcagtctgccatgagtcctgtgcaggttgctggggcccaacggagaagcactgcttggcctgcagagatcccctccacgtgctgagagatggcggctgtgagagcagctgtggaaaaggcttctacaacaggcagggcacctgtagcgcttgtgaccaatcctgtgacagttgtggccccagtagccccaggtgtcttacctgtactgagaagacagtgctgcatgatgggaaatgcatgtctgaatgccctggcgggtactatgctgatgccactggcaggtgcaaagtttgtcataactcatgtgccagctgctctgggcccacaccctctcactgtacagcctgcagcccccccaaggctctgcgtcaaggccactgtctgccccgctgtggagagggtttctactctgaccatggagtctgcaaagcctgtcactcctcctgcctggcttgtatgggtcccgcaccctctcactgtactgggtgtaagaagccagaggaaggactgcaagtggagcagctgtctgacgtgggcatcccctctggcgagtgtctagcccagtgtagagcccatttttacttggagagcactggcatatgtgaagcttgccaccagtcctgtttcagatgtgcagggaaaagcccacataactgcacagactgtgggccttcccatgtgctgttggatgggcagtgcctctcccagtgcccagatggctactttcaccaggaaggtagttgcacagagtgtcacccaacctgcaggcagtgtcatgggccgttggagtctgactgcatctcctgttaccctcacatctctcttaccaatggtaactgcaggaccagctgcagggaagagcagttcctcaacctcgtgggatactgtgctgactgccatcacctgtgccagcactgtgcagctgatctccacaacactgggagcatctgcctcaggtgccagaatgcccactacctgctgctcggggaccactgtgttcctgactgcccttcaggatactatgcagagagaggagcttgtaaaaaatgccactcctcctgcagaacctgccagggcagaggacctttctcctgctcctcatgtgacaccaacctcgtgctgtcccacactggcacctgcagcaccacctgcttccctgggcactatcttgatgacaatcatgtttgccagccatgcaacacacactgtggaagctgtgattcacaggccagctgtacctcctgccgagatccaaacaaggttctgctctttggggaatgtcaatacgagagctgcgccccacagtactatcttgacttctccaccaacacgtgcaaagagtgtgattggagctgcagtgcatgcagtgggcccctgaaaacagactgcctgcagtgcatggatggctatgttctccaggatggggcctgcgtggagcagtgcttgtcatcattttaccaggactcgggcctctgcaagaactgtgacagctactgtctccagtgccaaggtccccatgagtgtacccgctgcaaagggccatttctcctcttggaagcccagtgtgtccaggaatgtgggaaggggtactttgcagatcatgcaaagcacaaatgcacagcctgccctcaggggtgcttgcagtgcagccacagggaccgttgtcacctctgtgaccatgggttctttctgaagagtggcctctgtgtttacaactgtgttcctggcttttctgtccacacctctaatgaaacatgttctggcaaaatacacacccctagtcttcatgtgaatggttccctgatcctcccaattggttcaataaagccactggatttttccctcctgaatgtccaagaccaggagggtagggtcgaagatctcctatttcatgttgtgagcactcccaccaatggtcagctagtgctctcaagaaatggaaaagaggttcagctggacaaggctggccgttttagctggaaagatgtgaacgagaagaaagtgcgttttgtgcacagcaaagaaaaactcaggaaaggttaccttttcctgaaaattagtgaccagcagttcttctctgagccacagctgatcaacatacaagcattttcaacacaggccccctatgtgctgagaaatgaagttctccacattagcagaggagagagggcaaccatcaccacccagatgcttgacatccgagatgatgacaacccacaggatgtggtcattgaaataatcgatcctccacttcatggccaattgcttcagacacttcagtccccggcaacccctatctatcaattccagctggatgaactctctagaggccttctccactatgctcatgatggttcagacagcacatccgatgttgcagtcttgcaggccaatgatggacactccttccataatatactgttccaagtgaagaccgtgcctcagaatgacaggggtcttcagcttgtggctaattcgatggtgtgggttccagaaggggggatgctgcagatcaccaacagaatcttacaggccgaggctcctggtgccagtgctgaagaaatcatctacaagattacacaagactacccccagtttggggaggtggtccttctagtgaatatgcctgcagacagccctgcagatgaagggcagcacctgcctgatgggaggacagctacccccaccagcaccttcacccagcaggacatcaatgaaggcatcgtatggtacaggcactcaggagccccagcccagagcgactccttccgcttcgaggtgtccagtgcctccaatgcccagacccgcctggagagccacatgttcaacatcgcgatcttaccacagacacctgaagcacctaaagtgtctctggaagcatctctccatatgactgctagagaagatggcctgactgttattcagcctcattccctctccttcataaactctgagaagccaagtggaaagattgtctacaacatcactctacctctgcatccaaatcaaggtatcatcgagcaccgggaccaccctcactctcctatccggtatttcacgcaagaggatattaaccagggcaaagtcatgtaccgccctcccccggcagcaccccacctccaggagctcatggccttctcgttcgctggtctcccagaatcagtgaaattccacttcacagtttcagatggagaacacacaagtccggagatggtcctcaccattcacttacttcccagtgatcagcaactgccagtgttccaggtcacagctccacggctggcggtcagcccaggaggcagcacttctgtaggacttcaggtggtagtaagagatgctgagacagcgcccaaagaactcttctttgagcttcggagacctccacagcatggtgtgcttcttaagcatacagctgagttccgaaggccgatggccacaggtgacactttcacctatgaggatgttgagaaaaatgctctacagtatatacatgatggttcctctacccgggaagacagcatggagatctcagtcacagatggcctcacagtgacaatgctggaggtgagagtagaggtgtccctgtcagaagaccgagggcctcgactggctgctggctcctctctgagcattactgttgccagtaaaagcacagccataatcactaggtcacaccttgcttacgtggatgattcttcccccgacccagagatctggattcagttaaattatctgccctcatatggtactctcttaagaatctcaggatctgaggtggaagagctctcagaagtttccaatttcacaatggaagacatcaataacaagaaaatcagatactcagctgtgtttgaaactgatggtcatctggttactgatagcttctatttctctgtctctgacatggaccacaaccatctggataatcagatatttaccatcatgatcactcctgctgaaaatccacctccagtcattgcttttgctgaccttatcacggttgatgagggagggagagcaccactctcatttcaccatttttttgctactgatgatgatgacaacctccagagagatgccatcattaaactaagtgctctgcccaaatatggctgcattgagaacacaggaacaggtgatcgttttggccctgaaactgccagtgacctagaggcatcatttcctattcaagacgtcctggaaaactacatttactactttcagagtgttcatgaaagcattgagccaacccatgatatttttagtttttatgtgagtgatggaaccagtcgttcagaaattcacagcatcaatatcaccattgaggtaaagactttggaagttggaaaggttgagcccttgaccacaatatttcacaccattagagagctttctttatagggactcaaaagcaaagaagattggatttgaccttcaaaattgaaggtcgttcttaaaatatagccttcaggaatcttgtagaattaaggttggcatttggggaaggcttgagttagaaatctaaatttccatttcaggattgaatttatttgttcggtgtgaaaaacagtttgtgaaggtcagagatgctttgccagtctcatatataaatgaaaacttacatatgtctatgtttctctgaaattgtgtttggttctatatgcatatttgccttttcttattttactgcatttatttatttaattgtaacatcaaagaaatgtgttccttgatgctgtatttattctcatttgagcaactacacaggcttgctctaccgagagagagacacaggggaggggaaagataaatctcagaatgaaataccctctgccttgggaaaataaaatgtaaagaaccctctgcactcttaagggtcagtggtggaaaggggctggcaccagggcagggagacagctttagagacccacactttcaaatatagtgtccttctacaggtactgtggtatgcttagcattttctaagagagttctgagttatattagtatggtcttttatcttcaaagtatgttaatacttgtacttgtcaaagcacatatccatatttttggtctagaaaatatggtcattgtacttacggaagatatctgagaaaacttttatgaaatgtccatcagcttcttttgaagggggcattttgttgcctggac

SEQ ID NO: 135326 - DNA, 2125 bp, Homo sapiens
  Payload ID: 6445
  Gene Symbol: FRAS1
  Gene Name: Fraser extracellular matrix complex subunit 1
  ENST ID: ENST00000510944
  CDS Start-End: 1-1279
cactctacctctgcatccaaatcaaggtctcccagaatcagtgaaattccacttcacagtttcagatggagaacacacaagtccggagatggtcctcaccattcacttacttcccagtgatcagcaactgccagtgttccaggtcacagctccacggctggcggtcagcccaggaggcagcacttctgtaggacttcaggtggtagtaagagatgctgagacagcgcccaaagaactcttctttgagcttcggagacctccacagcatggtgtgcttcttaagcatacagctgagttccgaaggccgatggccacaggtgacactttcacctatgaggatgttgagaaaaatgctctacagtatatacatgatggttcctctacccgggaagacagcatggagatctcagtcacagatggcctcacagtgacaatgctggaggtgagagtagaggtgtccctgtcagaagaccgagggcctcgactggctgctggctcctctctgagcattactgttgccagtaaaagcacagccataatcactaggtcacaccttgcttacgtggatgattcttcccccgacccagagatctggattcagttaaattatctgccctcatatggtactctcttaagaatctcaggatctgaggtggaagagctctcagaagtttccaatttcacaatggaagacatcaataacaagaaaatcagatactcagctgtgtttgaaactgatggtcatctggttactgatagcttctatttctctgtctctgacatggaccacaaccatctggataatcagatatttaccatcatgatcactcctgctgaaaatccacctccagtcattgcttttgctgaccttatcacggttgatgagggagggagagcaccactctcatttcaccatttttttgctactgatgatgatgacaacctccagagagatgccatcattaaactaagtgctctgcccaaatatggctgcattgagaacacaggaacaggtgatcgttttggccctgaaactgccagtgacctagaggcatcatttcctattcaagacgtcctggaaaactacatttactactttcagagtgttcatgaaagcattgagccaacccatgatatttttagtttttatgtgagtgatggaaccagtcgttcagaaattcacagcatcaatatcaccattgaggtaaagactttggaagttggaaaggttgagcccttgaccacaatatttcacaccattagagagctttctttatagggactcaaaagcaaagaagattggatttgaccttcaaaattgaaggtcgttcttaaaatatagccttcaggaatcttgtagaattaaggttggcatttggggaaggcttgagttagaaatctaaatttccatttcaggattgaatttatttgttcggtgtgaaaaacagtttgtgaaggtcagagatgctttgccagtctcatatataaatgaaaacttacatatgtctatgtttctctgaaattgtgtttggttctatatgcatatttgccttttcttattttactgcatttatttatttaattgtaacatcaaagaaatgtgttccttgatgctgtatttattctcatttgagcaactacacaggcttgctctaccgagagagagacacaggggaggggaaagataaatctcagaatgaaataccctctgccttgggaaaataaaatgtaaagaaccctctgcactcttaagggtcagtggtggaaaggggctggcaccagggcagggagacagctttagagacccacactttcaaatatagtgtccttctacaggtactgtggtatgcttagcattttctaagagagttctgagttatattagtatggtcttttatcttcaaagtatgttaatacttgtacttgtcaaagcacatatccatatttttggtctagaaaatatggtcattgtacttacggaagatatctgagaaaacttttatgaaatgtccatcagcttcttttgaagggggcattttgttgcctggacttgctctcttttcaaactaactattttgcttgggaagtaaagatggtgccacattaaatgctattttgaggtgaa

SEQ ID NO: 135327 - DNA, 15624 bp, Homo sapiens
  Payload ID: 6445
  Gene Symbol: FRAS1
  Gene Name: Fraser extracellular matrix complex subunit 1
  Uniprot ID: Q86XX4
  ENST ID: ENST00000512123
  CDS Start-End: 441-12479
aactttaaaaagctgcttcggacaaaccagagccaggatttccactgtcggggacccgggatcggaagggtctagcccgagggaaatgctggaagatcccatcggccagtgaccagcaactttccggcgagattttgacgcggagaactgtgctctgcctcctcttattctcccaaagctcacgttggcgtcctgccttgcgggggaactcggcgcgctctctgcctgagcagcgagtgaattgaaccccagcccgctccggcgcctccgggctgatgagtgtcgctctccgcccgtccatctctttttcccggaggtaaaggcccgcggtcccccaccttcagtgcgcccgggttccaagcgccggagccagcgttttggcggagccgcttcttggatgctgaaggctgggctcctccatcgtgggtgccgaggcggcgatgggtgtcctcaaagtgtggctcgggctggccctagcgttggcggaatttgcagtattgcctcatcattccgaaggtgcttgtgtctatcaggattccttgttggcggatgccacaatttggaagcccgattcatgccagagctgccgttgccatggtgatattgttatctgcaaacctgctgtttgcagaaaccctcaatgtgcctttgagaagggagaagtgcttcaaatagctgccaaccaatgctgtcctgagtgtgttttgaggactccaggatcttgccatcatgaaaagaaaatccatgagcatgggacagaatgggcctcttctccatgtagtgtgtgctcttgcaatcatggggaagtccgatgtaccccccaaccatgcccaccgctgtcatgtggacaccaggagctggcattcatccctgaaggaagctgctgcccagtttgtgtgggccttgggaaaccctgttcctatgaaggccatgtgtttcaggatggggaggactggcggctgagccggtgtgccaaatgtctgtgtagaaatggggttgcccagtgcttcacagctcagtgtcagcctctattttgtaaccaggatgagactgtagtccgagtccctggaaaatgttgcccgcagtgctctgcaagatcctgctctgcagctggccaagtatacgagcatggtgagcagtggagcgaaaatgcctgcaccacgtgtatatgtgaccggggtgaggtcaggtgtcacaagcaggcctgcctgcccctgagatgcggaaagggtcagagcagggctcggcgtcatgggcaatgctgtgaggaatgtgtgtctcctgccgggagctgctcctatgatggagttgtgcggtaccaggacgaaatgtggaagggctcggcctgtgagttctgcatgtgtgatcatggccaagtgacctgccagactggagagtgtgccaaagtggagtgtgcccgggatgaagaattaattcacttagatggaaagtgttgtcctgaatgcatttcaaggaatggttattgtgtttatgaagaaactggagaatttatgtcatcaaatgctagtgaagttaaacgtattccagagggagagaagtgggaagatggcccttgcaaggtgtgtgagtgccgaggggctcaggtaacttgctacgagccctcttgcccaccatgtccagtgggcacactggccttagaggtgaagggacagtgctgtccagactgcacatcagttcattgccatccagattgtttgacatgctctcagtctccagaccactgtgacctctgccaagatcctaccaagttactgcagaatggatggtgtgtgcacagctgtggactgggtttttaccaagctggcagtctctgtttagcctgccagccccagtgctccacgtgtaccagtgggctggagtgctcatcctgccagcctcccctgctgatgcggcacgggcagtgtgtgcctacctgtggggacggcttctaccaagatcgccattcctgtgcagtctgccatgagtcctgtgcaggttgctggggcccaacggagaagcactgcttggcctgcagagatcccctccacgtgctgagagatggcggctgtgagagcagctgtggaaaaggcttctacaacaggcagggcacctgtagcgcttgtgaccaatcctgtgacagttgtggccccagtagccccaggtgtcttacctgtactgagaagacagtgctgcatgatgggaaatgcatgtctgaatgccctggcgggtactatgctgatgccactggcaggtgcaaagtttgtcataactcatgtgccagctgctctgggcccacaccctctcactgtacagcctgcagcccccccaaggctctgcgtcaaggccactgtctgccccgctgtggagagggtttctactctgaccatggagtctgcaaagcctgtcactcctcctgcctggcttgtatgggtcccgcaccctctcactgtactgggtgtaagaagccagaggaaggactgcaagtggagcagctgtctgacgtgggcatcccctctggcgagtgtctagcccagtgtagagcccatttttacttggagagcactggcatatgtgaagcttgccaccagtcctgtttcagatgtgcagggaaaagcccacataactgcacagactgtgggccttcccatgtgctgttggatgggcagtgcctctcccagtgcccagatggctactttcaccaggaaggtagttgcacagagtgtcacccaacctgcaggcagtgtcatgggccgttggagtctgactgcatctcctgttaccctcacatctctcttaccaatggtaactgcaggaccagctgcagggaagagcagttcctcaacctcgtgggatactgtgctgactgccatcacctgtgccagcactgtgcagctgatctccacaacactgggagcatctgcctcaggtgccagaatgcccactacctgctgctcggggaccactgtgttcctgactgcccttcaggatactatgcagagagaggagcttgtaaaaaatgccactcctcctgcagaacctgccagggcagaggacctttctcctgctcctcatgtgacaccaacctcgtgctgtcccacactggcacctgcagcaccacctgcttccctgggcactatcttgatgacaatcatgtttgccagccatgcaacacacactgtggaagctgtgattcacaggccagctgtacctcctgccgagatccaaacaaggttctgctctttggggaatgtcaatacgagagctgcgccccacagtactatcttgacttctccaccaacacgtgcaaagagtgtgattggagctgcagtgcatgcagtgggcccctgaaaacagactgcctgcagtgcatggatggctatgttctccaggatggggcctgcgtggagcagtgcttgtcatcattttaccaggactcgggcctctgcaagaactgtgacagctactgtctccagtgccaaggtccccatgagtgtacccgctgcaaagggccatttctcctcttggaagcccagtgtgtccaggaatgtgggaaggggtactttgcagatcatgcaaagcacaaatgcacagcctgccctcaggggtgcttgcagtgcagccacagggaccgttgtcacctctgtgaccatgggttctttctgaagagtggcctctgtgtttacaactgtgttcctggcttttctgtccacacctctaatgaaacatgttctggcaaaatacacacccctagtcttcatgtgaatggttccctgatcctcccaattggttcaataaagccactggatttttccctcctgaatgtccaagaccaggagggtagggtcgaagatctcctatttcatgttgtgagcactcccaccaatggtcagctagtgctctcaagaaatggaaaagaggttcagctggacaaggctggccgttttagctggaaagatgtgaacgagaagaaagtgcgttttgtgcacagcaaagaaaaactcaggaaaggttaccttttcctgaaaattagtgaccagcagttcttctctgagccacagctgatcaacatacaagcattttcaacacaggccccctatgtgctgagaaatgaagttctccacattagcagaggagagagggcaaccatcaccacccagatgcttgacatccgagatgatgacaacccacaggatgtggtcattgaaataatcgatcctccacttcatggccaattgcttcagacacttcagtccccggcaacccctatctatcaattccagctggatgaactctctagaggccttctccactatgctcatgatggttcagacagcacatccgatgttgcagtcttgcaggccaatgatggacactccttccataatatactgttccaagtgaagaccgtgcctcagaatgacaggggtcttcagcttgtggctaattcgatggtgtgggttccagaaggggggatgctgcagatcaccaacagaatcttacaggccgaggctcctggtgccagtgctgaagaaatcatctacaagattacacaagactacccccagtttggggaggtggtccttctagtgaatatgcctgcagacagccctgcagatgaagggcagcacctgcctgatgggaggacagctacccccaccagcaccttcacccagcaggacatcaatgaaggcatcgtatggtacaggcactcaggagccccagcccagagcgactccttccgcttcgaggtgtccagtgcctccaatgcccagacccgcctggagagccacatgttcaacatcgcgatcttaccacagacacctgaagcacctaaagtgtctctggaagcatctctccatatgactgctagagaagatggcctgactgttattcagcctcattccctctccttcataaactctgagaagccaagtggaaagattgtctacaacatcactctacctctgcatccaaatcaaggtatcatcgagcaccgggaccaccctcactctcctatccggtatttcacgcaagaggatattaaccagggcaaagtcatgtaccgccctcccccggcagcaccccacctccaggagctcatggccttctcgttcgctggtctcccagaatcagtgaaattccacttcacagtttcagatggagaacacacaagtccggagatggtcctcaccattcacttacttcccagtgatcagcaactgccagtgttccaggtcacagctccacggctggcggtcagcccaggaggcagcacttctgtaggacttcaggtggtagtaagagatgctgagacagcgcccaaagaactcttctttgagcttcggagacctccacagcatggtgtgcttcttaagcatacagctgagttccgaaggccgatggccacaggtgacactttcacctatgaggatgttgagaaaaatgctctacagtatatacatgatggttcctctacccgggaagacagcatggagatctcagtcacagatggcctcacagtgacaatgctggaggtgagagtagaggtgtccctgtcagaagaccgagggcctcgactggctgctggctcctctctgagcattactgttgccagtaaaagcacagccataatcactaggtcacaccttgcttacgtggatgattcttcccccgacccagagatctggattcagttaaattatctgccctcatatggtactctcttaagaatctcaggatctgaggtggaagagctctcagaagtttccaatttcacaatggaagacatcaataacaagaaaatcagatactcagctgtgtttgaaactgatggtcatctggttactgatagcttctatttctctgtctctgacatggaccacaaccatctggataatcagatatttaccatcatgatcactcctgctgaaaatccacctccagtcattgcttttgctgaccttatcacggttgatgagggagggagagcaccactctcatttcaccatttttttgctactgatgatgatgacaacctccagagagatgccatcattaaactaagtgctctgcccaaatatggctgcattgagaacacaggaacaggtgatcgttttggccctgaaactgccagtgacctagaggcatcatttcctattcaagacgtcctggaaaactacatttactactttcagagtgttcatgaaagcattgagccaacccatgatatttttagtttttatgtgagtgatggaaccagtcgttcagaaattcacagcatcaatatcaccattgagaggaagaacgatgagcctcccaggatgaccttgcagcccctcagagtgcagctgagctcgggagtggtgataagcaattcttctttgagcctgcaagacctggacaccccagataatgagctcatttttgtattgacaaaaaagcctgaccacggtcatgtactctggaggcaaactgcttctgagcctctggagaatgggagagttttagtccagggctcaaccttcacctaccaggatatcctagctgggctggttgggtatgtgcctagtgtccctggcatggtcgtggatgagttccagttctccctcactgatggcctccacgtggacacagggaggatgaagatctacacagaactgcctgcaagtgacacacctcacttggctataaaccaaggcctacagctctcagcagggtctgtagcacgcatcacagaacagcacttgaaagtgacagatattgactcagatgaccatcaggttatgtacatcatgaaggaagatcctggtgcagggcgcctgcagatgatgaagcatggcaacctggagcaaatttctattaaaggccccatccgaagtttcacccaggcagacattagccaaggccacgtagaatatagtcatggaacaggagaacctggagggagctttgcttttaaatttgatgtggttgatggagaaggcaacagattgattgacaagtcattttccatcagcattctagaagacaaatccccaccagtcatcaccaccaataaaggactggtcttggatgaaaactcagtgaagaaaatcaccaccctgcagctgtctgccactgaccaggacagtgggcctacagaattgatctacagaatcaccagacagccccagctgggccacttggaacatgcagcatcaccaggtatccagattagttcctttactcaagctgatctgacttcacgaaatgttcagtatgtccattctagtgaggctgagaaacattcagatgccttcagctttacactgtctgatggagtcagtgaggtgactcagactttccatatcactcttcaccctgtcgatgattcgctgcccgtcgtacagaacttaggaatgcgggtgcaggagggcatgaggaagaccatcacagagtttgagcttaaggcggtggatgctgacacagaggccgagtctgtcacattcaccatcgtgcagcctccacgccatggcaccatcgagcgaaccagcaatgggcagcatttccacctcacctccaccttcaccatgaaagatatctaccagaaccgggtcagctacagccatgacggcagtaactccctcaaggaccggttcaccttcactgtttctgatgggacaaaccccttctttatcattgaggaagggggaaaagagattatgacagcagcacctcagccgttccgagtagacatcctcccggtagatgatggcacgcctagaattgtcaccaacctgggactccagtggctggaatacatggatggcaaggcaaccaacctgatcaccaagaaggaactgctgaccatggacccagacaccgaggacgcgcagcttgtctatgagataacgacgggccctaagcatggctttgtggagaacaagctgcagcctggcagagctgctgccactttcacccaggaggatgtgaacttggggttgattcgttatgtgttgcacaaggagaagatccgtgagatgatggatagttttcagtttctggtgaaagacagtaaacccaatgtggtcagcgacaatgtcttccatatccagtggtcactcatcagctttaaatataccagctacaatgtcagtgagaaggcagggtctgtcagtgtcacggtgcagaggactgggaacctgaaccaatatgccatcgtcctgtgtcgcaccgagcaaggcaccgccagctccagctccagggtcagctcccaacctgggcaacaggactatgtagagtatgctggccaggtccagtttgatgagcgagaggacaccaagtcctgcaccattgtcatcaacgatgatgacgtgtttgaaaatgttgagagtttcactgtggagctcagcatgccagcttatgccctgttaggggaattcacccaggcgaaggtcattatcaacgataccgaggatgaacccacattagagtttgacaagaagatctactgggttaacgagagcgctggttttctgtttgcacctattgaaagaaaaggagatgcaagcagcattgtatctgcaatttgctacacagtccctaagtcagctatgggaagtagcctctatgctctagaatcaggctctgattttaaatctagagggatgtctgccgcgagtcgtgtgatattcgggcctggtgtgaccatgtccacctgtgatgtcatgcttattgatgacagcgagtatgaagaggaagaagagtttgagattgccttggcagatgcctctgacaatgcccgcattggaagggtggcgacagccaaggtgctcattagtggtcccaacgatgcctcgactgtgtccctgggcaacacggctttcactgtcagtgaggacgcaggcacagtaaagattccagttatccgccatggtactgacctctctactttcgcatctgtctggtgtgcaacgcggccctcagacccagcttctgccacaccaggagttgactacgttcccagctctcggaaggtggaatttgggcctggtgtcattgaacagtattgcaccttgactatcttggatgacactcagtatccggtaattgaaggactggagacatttgtggttttcctcagctcagcacaaggagccgaactgaccaaacccttccaggcagtcattgcaattaatgacacattccaagatgtgcccagcatgcagtttgccaaggatttgctcctagtgaaggagaaggagggtgtcctgcatgtccctatcactcggagcggagacctgagctatgagtcatcagtgaggtgctatactcagagccattccgctcaggtcatggaggactttgaggagagacaaaatgcagactcttcacggattacatttctcaaaggggacaaagtgaagaactgtacggtctatatccacgatgactccatgtttgagccagaggaacagttcagggtctacctcggccttcctcttggaaaccactggagtggagctagaattggaaagaataacatggccaccatcaccatatccaatgatgaagatgcccccaccattgagtttgaagaagctgcataccaagtccgggaacccgcaggcccagatgccattgcgattctgaacatcaaggtgatccgcagaggggatcagaacaggacctccaaggttcgctgcagcacgcgggatggctctgcccagtctggtgtggattattacccaaagagccgagtcttgaagttcagtcccggtgtggatcatatcttttttaaagttgagatcctgtccaatgaagaccgggaatggcatgaatctttctcactagtccttggcccagatgacccagtggaagcagttcttggggatgtgactactgccacggtgacaattctagaccaggaggcagcagggagcctcatattgccagcaccacccattgtggtcacacttgctgactatgaccatgtggaagaagttaccaaggaaggagtcaagaaatccccctccccaggctacccactggtctgtgtcaccccctgcgaccctcatttccccagatacgctgtcatgaaggagcgctgcagtgaggccggcatcaaccagacatctgtgcagttcagctgggaagtggctgcccccactgatggcaatggggcccggtctccctttgaaaccatcactgacaacacaccattcaccagtgtcaaccacatggtcctggacagcatttacttcagccggaggttccatgtgcgttgtgtggccaaggctgtggacaaggtgggccatgtggggacccccttaaggagcaacattgttaccattggaacagacagtgctatctgccacacaccagtggtggctgggacatccagaggcttccaggctcagtccttcatcgcaaccttgaaatacctggatgtcaaacataaggagcatccgaacagaatccacatttcggtgcagatcccacaccaggatggaatgctgccccttatctccaccatgccgttgcacaacttacattttctactgtctgagtccatctacagacaccagcacgtctgctccaatttagttaccacctatgacctgagaggcatctcagaggcagggttcctggatgatgtggtctatgatagcactgccctggggcctggctacgatcgccccttccagtttgaccccagcgtgcgagagccgaagaccatccagctctacaaacacctgaacctgaagagctgcgtgtggacctttgatgcttattatgacatgactgagctgattgacgtctgtgggggctctgtaaccgctgacttccaggtgagggactctgcccagtccttcttgacagtgcacgtgcctctatatgtgtcctacatctatgtgacagcccccaggggctgggcctccttggagcaccacaccgagatggagttttctttcttctatgacactgttctctggagaacaggaatccagacagacagcgtgctctctgcaaggcttcagataataagaatctacattcgagaggatggccgtcttgtcattgaattcaagacccatgccaaattcagaggacagtttgtgatggagcatcacactctcccagaagtgaaatctttcgtattgactccagaccacctaggaggaattgaatttgacttgcagctattatggagcgctcagacttttgattctccacatcaactctggagagccacaagctcttataacaggaaggactactcaggagagtacaccatctacctgatcccttgcacagtgcagcccacacagccatgggttgacccaggagagaagcctttggcctgcactgcacatgccccagaaagattcctgatacccattgcattccagcagaccaaccgccctgtgccagttgtgtattcacttaacactgaatttcagctctgcaataatgagaaggtgttcctaatggatcccaatacatctgatatgtcactagcagaaatggattacaaaggagccttttcaaaaggtcaaatcctttatggccgagtactttggaatccagaacaaaatcttaattctgcttacaaactccagctggagaaagtctatctttgtacgggcaaggatggttatgtgcctttctttgatcccacggggacaatctacaatgaagggccccagtatggatgcattcagccaaacaaacacctaaaacacagattcctgctgttggaccgcaatcagccagaggtaactgataagtacttccatgatgtgccttttgaggctcactttgcctctgagttgcctgatttccatgtggtcagtaacatgccaggtgtggatggatttactctaaaagtagatgcactctataaggtggaagcaggacaccagtggtatctccaggtcatctacatcattggccctgacaccatctcagggccccgggtccagcgctctctcacagctccactcagacgcaaccgaagggacctggtagagcccgatggccagctgatccttgatgattccctcatctatgacaatgaaggagaccaagtcaagaatggcaccaatatgaagtccctgaatctggagatgcaagagttggcggtagctgcgtccctgtcacagactggggcgtccattggcagtgccctggctgcaatcatgcttctacttctggtgtttttggtggcttgttttatcaacaggaaatgccagaaacagaggaagaagaagcccgcagaggacattttggaagaatatcctctgaataccaaggtagaagtgcccaagaggcacccggaccgggtggagaagaacgtgaatagacactactgcactgtgcggaacgtcaacatcctgagtgagcctgaggcggcttacacgttcaaaggtgctaaagtcaaaagactgaatctagaagtcagagttcacaacaatttacaagatggaacagaagtttaatggaggagacctatgtgtatttttttctaaaatcatttttataaaatggggggaaatactggtatttttataatctcgcagataaaaaagggaaaactatagctttgagtggcagacagcacacatcacatgcatcaactcacaactgagctacctcattcagcaaagaaccactgagaaccccagagtattacagttatttccgtagatccctttaatagtgtcaacaactgtacacagctccttctgtaaggctggtcttagaaaacaagtactttagtatcaggacaggagttgaacaattaggttagcagatggagatgagaggactgggtagagtaccatggcagatctcagagagaagaagtaggtacgggcctttggttccctcccccagccccagctttctcctacagggcttttcctgagtccccagacagcagagtatgaactgctgacacccagattccattaaaaattctgctaatcgacacaacacatatatttgctcatgatttcacttgacagcgtatgctccttggcctctaattgtactttgcttttccagagccctttttacctggggatttcagtgtgcttaagtaaaatcctctgaaaaccacgggagcctctgcctcctcagccacagagaactccctcctacaaagggggagactgaaacccgagttaaggaggggcctggcaggcgtatcagagcacattagtgatgcccttcaccccagggaggtgtctgttcccaactagtttatgtggcactgagacatccatccctgaccaaggatgctgcgaaacaggatcaatgtactacggccttttaattcaacattgccataaatgctttaaagaaaacccaccacactttcctcctactccggtctttgcccgttcctgtaacagacaatcccatgtcctaggtatggttttttattctgttagtgcttcgggaaagtaagtgattcatttgaataaggcaaattaggagaaagcccaggttggggtgaaatcagacttaacagatacatgctggttctccttgctgtgtgtgacacagcagacagaggcactattcctggtgcagtatttcagggatttctctttgaggggttcttttctggtagctcaggcaattatttttaccatatcagcacatgacaaggccatgaacacatggctctaaaataatttagtgttcaagtatcagcttaactattttgtgtaggctacacacagcttgcttttgtttctcttctgtttctgccttattggcggaaacataagcgtgcatgccatgttgttttgaattggaggcacaatttcattattcgagagtaaaagacatgtcctcttctgatgcatggcacaccatagtcaccaagcaaataacagagccttcacattgtgtaatatttgtatgagaatgactcaagctctttgagaacattccaaactagtaacatttcgctactaaaagctagaaaggatgaactgtgaaaggttctaggcagctctgtgagactccaagctccttgaaagtaggacctttgtgagccacgcctttcattcttcaacagtgccttgcatgtaacaagcactccagaaatgtttgttgaatgaatgaatggtgtcatgggtgaatgatggggagtaaatttaggaaggggaagtgagagagtatggtggcaatatcacaagggaggagagaggaaaacaattatcttctctacttggattatgagataaccttttcttggaggaaagaaacaccgctttacaaaggcatgactctggcggtggtcctaaggaagcatgagcagaaaattcataaaaatgtatcatcagcaggagatgagactatgaattggcatccagaacaggagatttagagcaaaatctaatttagcattctgagatgagtgtcaggttttcaggagagaatgagttggggtgagcccagagtctgaaactcctgactggtcaggtgctacttaagaccagcttgggcaattcagggcagaactcctgtatcagcctcatggacacccagaattggtatctcatggctggagagctgatcagccaggcacagaatctccagaacaacctagagagtgaatgctaatttgtagagcgaacttccatttggcccattatttgtaactgtgtaactgctccaagtgccagaatgcttacacgttaaagcagcacctttccatttgcccacatattcttcttgcacaccccttccattactgctgaataggacattgcatgggaagagtacagaggtggcagaatgaagctagagtgggaaggactaaagactgagccccagagtgctcccagcaaccgccacgtacaaggtctgaaatgacaagggcaagagtgagataggaaactgtgtgtgaaaggaaagcccttgcagtatttctgcctccctttctttctgcctttcaccccactaaatgtatgttattgaatgccagtacttctctagtggatgcacacttgttaaatagtgttaagagatgtggagatgagatatacccctttgatgtagaattattcatttggtttgtttcatacttcattataggaatcaagtaatttgatgactaatgtggattatatttcagtcaaagctctgctttcaatttctctgatttgctcactaatgccttgtgtgtgttttactaaccttttatatcttgccttcaagtgagaaggaacaaacaactctcagtggttactacttgcttttatatgctggctgtgaaggttaaaagaaagaatggtctgtaccattctgctttgctgcccttttattgtaccccaggcctcctagaggactcctgcagattctattgttgggtgggaaatagtgttggaatgtgtttgcacagtcttatgatattcagtctcagtctgctataggtatttgttattcttggatactacacacctgctcagactgagtaaacatttgtggtgctgtcaacctgatttcttgactctcaaatgatttttgtatttccaatatgaatttgtgtgttatgaatttctgatttctccaatagtatatgccactatataaatttgtattaataaatgacagtcttgttggttt

SEQ ID NO: 135328 - DNA, 2217 bp, Homo sapiens
  Payload ID: 6445
  Gene Symbol: FRAS1
  Gene Name: Fraser extracellular matrix complex subunit 1
  ENST ID: ENST00000502446
  CDS Start-End: 1-2000
agggagaagtgcttcaaatagctgccaaccaatgctgtcctgagtgtgttttgaggactccaggatcttgccatcatgaaaagaaaatccatgagcatgggacagaatgggcctcttctccatgtagtgtgtgctcttgcaatcatggggaagtccgatgtaccccccaaccatgcccaccgctgtcatgtggacaccaggagctggcattcatccctgaaggaagctgctgcccagtttgtgtgggccttgggaaaccctgttcctatgaaggccatgtgtttcaggatggggaggactggcggctgagccggtgtgccaaatgtctgtgtagaaatggggttgcccagtgcttcacagctcagtgtcagcctctattttgtaaccaggatgagactgtagtccgagtccctggaaaatgttgcccgcagtgctctgcaagatcctgctctgcagctggccaagtatacgagcatggtgagcagtggagcgaaaatgcctgcaccacgtgtatatgtgaccggggtgaggtcaggtgtcacaagcaggcctgcctgcccctgagatgcggaaagggtcagagcagggctcggcgtcatgggcaatgctgtgaggaatgtgtgtctcctgccgggagctgctcctatgatggagttgtgcggtaccaggacgaaatgtggaagggctcggcctgtgagttctgcatgtgtgatcatggccaagtgacctgccagactggagagtgtgccaaagtggagtgtgcccgggatgaagaattaattcacttagatggaaagtgttgtcctgaatgcatttcaaggaatggttattgtgtttatgaagaaactggagaatttatgtcatcaaatgctagtgaagttaaacgtattccagagggagagaagtgggaagatggcccttgcaaggtgtgtgagtgccgaggggctcaggtaacttgctacgagccctcttgcccaccatgtccagtgggcacactggccttagaggtgaagggacagtgctgtccagactgcacatcagttcattgccatccagattgtttgacatgctctcagtctccagaccactgtgacctctgccaagatcctaccaagttactgcagaatggatggtgtgtgcacagctgtggactgggtttttaccaagctggcagtctctgtttagcctgccagccccagtgctccacgtgtaccagtgggctggagtgctcatcctgccagcctcccctgctgatgcggcacgggcagtgtgtgcctacctgtggggacggcttctaccaagatcgccattcctgtgcagtctgccatgagtcctgtgcaggttgctggggcccaacggagaagcactgcttggcctgcagagatcccctccacgtgctgagagatggcggctgtgagagcagctgtggaaaaggcttctacaacaggcagggcacctgtagcgcttgtgaccaatcctgtgacagttgtggccccagtagccccaggtgtcttacctgtactgagaagacagtgctgcatgatgggaaatgcatgtctgaatgccctggcgggtactatgctgatgccactggcaggtgcaaagtttgtcataactcatgtgccagctgctctgggcccacaccctctcactgtacagcctgcagcccccccaaggctctgcgtcaaggccactgtctgccccgctgtggagagggtttctactctgaccatggagtctgcaaagcctgtcactcctcctgcctggcttgtatgggtcccgcaccctctcactgtactgggtgtaagaagccagaggaaggactgcaagtggagcagctgtctgacgtgggcatcccctctggcgagtgtctagcccagtgtagagcccatttttacttggagagcactggcatatgtgaagggcaaaatctggacttctgtcagaatttagaagtgatttctgctgtttgccttggcatatcatctacagagaattgatgacatcctgaataaataatttgactcaatagccaggccatctatgagtggttgaggagatgaaagggaagtattatagtttcctttctgttcccacaagtagccttgctgttgggtgaatagtttgactctaaagctacgtgaaaaaaaaatcattagtttgtatttttcattgtaaacatatgttcattaaaaaaattttataatacacccacta

SEQ ID NO: 135329 - DNA, 2169 bp, Homo sapiens
  Payload ID: 6445
  Gene Symbol: FRAS1
  Gene Name: Fraser extracellular matrix complex subunit 1
  ENST ID: ENST00000508900
  CDS Start-End: 1-1957
ctgttcctatgaaggccatgtgtttcaggatggggaggactggcggctgagccggtgtgccaaatgtctgtgtagaaatggggttgcccagtgcttcacagctcagtgtcagcctctattttgtaaccaggatgagactgtagtccgagtccctggaaaatgttgcccgcagtgctctgcaagatcctgctctgcagctggccaagtatacgagcatggtgagcagtggagcgaaaatgcctgcaccacgtgtatatgtgaccggggtgaggtcaggtgtcacaagcaggcctgcctgcccctgagatgcggaaagggtcagagcagggctcggcgtcatgggcaatgctgtgaggaatgtgtgtctcctgccgggagctgctcctatgatggagttgtgcggtaccaggacgaaatgtggaagggctcggcctgtgagttctgcatgtgtgatcatggccaagtgacctgccagactggagagtgtgccaaagtggagtgtgcccgggatgaagaattaattcacttagatggaaagtgttgtcctgaatgcatttcaaggaatggttattgtgtttatgaagaaactggagaatttatgtcatcaaatgctagtgaagttaaacgtattccagagggagagaagtgggaagatggcccttgcaaggtgtgtgagtgccgaggggctcaggtaacttgctacgagccctcttgcccaccatgtccagtgggcacactggccttagaggtgaagggacagtgctgtccagactgcacatcagttcattgccatccagattgtttgacatgctctcagtctccagaccactgtgacctctgccaagatcctaccaagttactgcagaatggatggtgtgtgcacagctgtggactgggtttttaccaagctggcagtctctgtttagcctgccagccccagtgctccacgtgtaccagtgggctggagtgctcatcctgccagcctcccctgctgatgcggcacgggcagtgtgtgcctacctgtggggacggcttctaccaagatcgccattcctgtgcagtctgccatgagtcctgtgcaggttgctggggcccaacggagaagcactgcttggcctgcagagatcccctccacgtgctgagagatggcggctgtgagagcagctgtggaaaaggcttctacaacaggcagggcacctgtagcgcttgtgaccaatcctgtgacagttgtggccccagtagccccaggtgtcttacctgtactgagaagacagtgctgcatgatgggaaatgcatgtctgaatgccctggcgggtactatgctgatgccactggcaggtgcaaagtttgtcataactcatgtgccagctgctctgggcccacaccctctcactgtacagcctgcagcccccccaaggctctgcgtcaaggccactgtctgccccgctgtggagagggtttctactctgaccatggagtctgcaaagcctgtcactcctcctgcctggcttgtatgggtcccgcaccctctcactgtactgggtgtaagaagccagaggaaggactgcaagtggagcagctgtctgacgtgggcatcccctctggcgagtgtctagcccagtgtagagcccatttttacttggagagcactggcatatgtgaagcttgccaccagtcctgtttcagatgtgcagggaaaagcccacataactgcacagactgtgggccttcccatgtgctgttggatgggcagtgcctctcccagtgcccagatggctactttcaccaggaaggtagttgcacagagtgtcacccaacctgcaggcagtgtcatgggccgttggagtctgactgcatctcctgttaccctcacatctctcttaccaatggtaactgcaggaccagctgcagggaagagcagttcctcaacctcgtgggatactgtgctggtgagtgaaactcctgtggactcctcggaaatcactgggcagctgccggggctcttcataccaggcttaagggggctctttgtcctcagtttatgagctcttttataggagacatttgtttcatgtctggaaactcatgttactgcttctccttgggcatttagtaaatacttgtggatttaaatagaacttctaataatactcttgcaaatcctgaaaa

SEQ ID NO: 135330 - DNA, 2297 bp, Homo sapiens
  Payload ID: 6445
  Gene Symbol: FRAS1
  Gene Name: Fraser extracellular matrix complex subunit 1
  ENST ID: ENST00000508909
  CDS Start-End: 407-526
aggatttccactgtcggggacccgggatcggaagggtctagcccgagggaaatgctggaagatcccatcggccagtgaccagcaactttccggcgagattttgacgcggagaactgtgctctgcctcctcttattctcccaaagctcacgttggcgtcctgccttgcgggggaactcggcgcgctctctgcctgagcagcgagtgaattgaaccccagcccgctccggcgcctccgggctgatgagtgtcgctctccgcccgtccatctctttttcccggaggtaaaggcccgcggtcccccaccttcagtgcgcccgggttccaagcgccggagccagcgttttggcggagccgcttcttggatgctgaaggctgggctcctccatcgtgggtgccgaggcggcgatgggtgtcctcaaagtgtggctcgggctggccctagcgttggcggaatttgcagtattgcctcatcattccgaaggtgcttgtgtctatcaggattccttgttggcggaaggtggatgagccattggaggtgccagagaggaggaatggcaacactggacttatcatctaattaaactgctgaaatgagagtgtgcttgtttccagggaaactatattaaatactttaaaaagactccatagggagtaagaaatgaccagaagggactaaaaataacttgaaaaacactgaataatctattttggggtgtgtttcttactccataatacccatgcacccctgggctcacaagactttctctaaagtcagcccttgtggaacacagcgtgactgttaaatcaggaatccatcagagggaaactacctaggtaataggtttaactgtgatgtccagtgtgaggaggaaaattaatttttcatttcaaagttttcacacaccttctgttcttttccaactatatcaagtattgaaaaaactctccttttgcatcaccacaagcaaacacatatccttttgaaagttcttcctgggatcaatgacttgactcttcacttcaatttttctgtctgtgaaatggagatgaactatttacttctcaggactgttgtgaagcttaaaggagatgaacatgaagcaactcgtccagtgctgtgacttacagtgctcaataaaggttggctgctattattgttgttctatagcagtgacgactggcaaggttggataaatgactcttcttccctggatcaaaagtgttaagtgttgggattttcctacttgggatacttttgctgagaaatgctgacaaagtgaatcacaaggcactaactcttagcaaatttgaaagaatatttttcaaggataatttaaaaatgtggaatgttgactatatataacactgcaggaaaatccaggctttggagtttgaatcttggcaccactacatacatgctgtgtggtctcagatataatactttatacagccaggtgtcactttcattatctacttaattgggattatatttctcctaggtttgatgtgacagttaactgagaacatacttgtgaaagaacccagaactgtccctgcaaggaacacgtactcacatcattcaggtggtaacaagatgtcggagtagaaatgagtgagttatagagtccagggtcttggttcaggttctggccctgtaattactagctgtatagcttggagtaagtcacttgaatgaaatgaggtctcagtttctaaattagtaaattaagagagttaggttagcttttctccaagattccttagcccagtatcgtgtagtagagctttctgtgatgatgggaatgttccatagctgtgctgtccagtgtggtagctacgagccacatgtggttattgagtacttgaagtgtggctgacgatactgaggaactgaattttaaatttcacttaatgtcaatgaattaaagtttaaatttgagtagccacatatagatagtggctactatattggacagtgcaacattagagttttaaaattcttaacgtactctagtacttaaaatacagcctcatgaatggttctcaccctgggtggaagcttactggagtacttttagcagttgtgagaaaagtaatacaaagtttgttatagtacctaagtttgctgtttttgtttgtttatataatttgaacagttttgaagtcaacacagttacaacactactctctccatattgctaaatatgttttcttttttgttgtcgtggttttttttttaaaccaagcaattgttatggatcaatgctttcttgaataaaagaaaaggagtaaaatt

SEQ ID NO: 135331 - DNA, 2608 bp, Homo sapiens
  Payload ID: 6446
  Gene Symbol: FXN
  Gene Name: frataxin
  Uniprot ID: Q16595
  ENST ID: ENST00000377270
  CDS Start-End: 525-1157
tttacagggcttaactcattttatccttaccacaatcctatgaagtaggaacttttataaaacgcattttataaacaaggcacagagaggttaattaacttgccctctggtcacacagctaggaagtgggcagagtacagatttacacaaggcatccgtctcctggccccacatacccaactgctgtaaacccataccggcggccaagcagcctcaatttgtgcatgcacccacttcccagcaagacagcagctcccaagttcctcctgtttagaattttagaagcggcgggccaccaggctgcagtctcccttgggtcaggggtcctggttgcactccgtgctttgcacaaagcaggctctccatttttgttaaatgcacgaatagtgctaagctgggaagttcttcctgaggtctaacctctagctgctcccccacagaagagtgcctgcggccagtggccaccaggggtcgccgcagcacccagcgctggagggcggagcgggcggcagacccggagcagcatgtggactctcgggcgccgcgcagtagccggcctcctggcgtcacccagcccagcccaggcccagaccctcacccgggtcccgcggccggcagagttggccccactctgcggccgccgtggcctgcgcaccgacatcgatgcgacctgcacgccccgccgcgcaagttcgaaccaacgtggcctcaaccagatttggaatgtcaaaaagcagagtgtctatttgatgaatttgaggaaatctggaactttgggccacccaggctctctagatgagaccacctatgaaagactagcagaggaaacgctggactctttagcagagttttttgaagaccttgcagacaagccatacacgtttgaggactatgatgtctcctttgggagtggtgtcttaactgtcaaactgggtggagatctaggaacctatgtgatcaacaagcagacgccaaacaagcaaatctggctatcttctccatccagtggacctaagcgttatgactggactgggaaaaactgggtgtactcccacgacggcgtgtccctccatgagctgctggccgcagagctcactaaagccttaaaaaccaaactggacttgtcttccttggcctattccggaaaagatgcttgatgcccagccccgttttaaggacattaaaagctatcaggccaagaccccagcttcattatgcagctgaggtctgttttttgttgttgttgttgtttattttttttattcctgcttttgaggacagttgggctatgtgtcacagctctgtagaaagaatgtgttgcctcctaccttgcccccaagttctgatttttaatttctatggaagattttttggattgtcggatttcctccctcacatgataccccttatcttttataatgtcttatgcctatacctgaatataacaacctttaaaaaagcaaaataataagaaggaaaaattccaggagggaaaatgaattgtcttcactcttcattctttgaaggatttactgcaagaagtacatgaagagcagctggtcaacctgctcactgttctatctccaaatgagacacattaaagggtagcctacaaatgttttcaggcttctttcaaagtgtaagcacttctgagctctttagcattgaagtgtcgaaagcaactcacacgggaagatcatttcttatttgtgctctgtgactgccaaggtgtggcctgcactgggttgtccagggagacctagtgctgtttctcccacatattcacatacgtgtctgtgtgtatatatattttttcaatttaaaggttagtatggaatcagctgctacaagaatgcaaaaaatcttccaaagacaagaaaagaggaaaaaaagccgttttcatgagctgagtgatgtagcgtaacaaacaaaatcatggagctgaggaggtgccttgtaaacatgaaggggcagataaaggaaggagatactcatgttgataaagagagccctggtcctagacatagttcagccacaaagtagttgtccctttgtggacaagtttcccaaattccctggacctctgcttccccatctgttaaatgagagaatagagtatggttgattcccagcattcagtggtcctgtcaagcaacctaacaggctagttctaattccctattgggtagatgaggggatgacaaagaacagtttttaagctatataggaaacattgttattggtgttgccctatcgtgatttcagttgaattcatgtgaaaataatagccatccttggcctggcgcggtggctcacacctgtaatcccagcacttttggaggccaaggtgggtggatcacctgaggtcaggagttcaagaccagcctggccaacatgatgaaaccccgtctctactaaaaatacaaaaaattagccgggcatgatggcaggtgcctgtaatcccagctacttgggaggctgaagcggaagaatcgcttgaacccagaggtggaggttgcagtgagccgagatcgtgccattgcactgtaacctgggtgactgagcaaaactctgtctcaaaataataataacaatataataataataa

SEQ ID NO: 135332 - DNA, 980 bp, Homo sapiens
  Payload ID: 6446
  Gene Symbol: FXN
  Gene Name: frataxin
  Uniprot ID: Q16595
  ENST ID: ENST00000396364
  CDS Start-End: 221-736
agtctcccttgggtcaggggtcctggttgcactccgtgctttgcacaaagcaggctctccatttttgttaaatgcacgaatagtgctaagctgggaagttcttcctgaggtctaacctctagctgctcccccacagaagagtgcctgcggccagtggccaccaggggtcgccgcagcacccagcgctggagggcggagcgggcggcagacccggagcagcatgtggactctcgggcgccgcgcagtagccggcctcctggcgtcacccagcccagcccaggcccagaccctcacccgggtcccgcggccggcagagttggccccactctgcggccgccgtggcctgcgcaccgacatcgatgcgacctgcacgccccgccgcgcaagttcgaaccaacgtggcctcaaccagatttggaatgtcaaaaagcagagtgtctatttgatgaatttgaggaaatctggaactttgggccacccaggctctctagatgagaccacctatgaaagactagcagaggaaacgctggactctttagcagagttttttgaagaccttgcagacaagccatacacgtttgaggactatgatgtctcctttgggagtggtgtcttaactgtcaaactgggtggagatctaggaacctatgtgatcaacaagcagacgccaaacaagcaaatctggctatcttctccatccaggttaacgtggctcctgtggctgttccatccctgaggaaaagtgaggaccatgctctccaaacaggccatgtgctggactacctctgtttctgtctcctgggattccaatcagcaagtgagcaacgaagcaacccagacagtgtggttcataggatggctgggtaagtggctgtttgttttttccttactgtggatatgtatcagtgaaggaatctgtagaacattcttgatgggaacatttagtcatatcaagtcaataaattaatgtttaggctggg

SEQ ID NO: 135333 - DNA, 922 bp, Homo sapiens
  Payload ID: 6446
  Gene Symbol: FXN
  Gene Name: frataxin
  Uniprot ID: Q16595
  ENST ID: ENST00000396366
  CDS Start-End: 22-612
gggcggcagacccggagcagcatgtggactctcgggcgccgcgcagtagccggcctcctggcgtcacccagcccagcccaggcccagaccctcacccgggtcccgcggccggcagagttggccccactctgcggccgccgtggcctgcgcaccgacatcgatgcgacctgcacgccccgccgcgcaagttcgaaccaacgtggcctcaaccagatttggaatgtcaaaaagcagagtgtctatttgatgaatttgaggaaatctggaactttgggccacccaggctctctagatgagaccacctatgaaagactagcagaggaaacgctggactctttagcagagttttttgaagaccttgcagacaagccatacacgtttgaggactatgatgtctcctttgggagtggtgtcttaactgtcaaactgggtggagatctaggaacctatgtgatcaacaagcagacgccaaacaagcaaatctggctatcttctccatccaggtatgtagtggacctaagcgttatgactggactgggaaaaactgggtgtactcccacgacggcgtgtccctccatgagctgctggccgcagagctcactaaagccttaaaaaccaaactggacttgtcttccttggcctattccggaaaagatgcttgatgcccagccccgttttaaggacattaaaagctatcaggccaagaccccagcttcattatgcagctgaggtctgttttttgttgttgttgttgtttattttttttattcctgcttttgaggacagttgggctatgtgtcacagctctgtagaaagaatgtgttgcctcctaccttgcccccaagttctgatttttaatttctatggaagattttttggattgtcggatttcctccctcacatgataccccttatcttttat

SEQ ID NO: 135334 - DNA, 856 bp, Homo sapiens
  Payload ID: 6446
  Gene Symbol: FXN
  Gene Name: frataxin
  ENST ID: ENST00000498653
  CDS Start-End: 106-513
aaggaaaaggggacattttgtcctgcggtgcgactgcgggtcaagagttcgaaccaacgtggcctcaaccagatttggaatgtcaaaaagcagagtgtctatttgatgaatttgaggaaatctggaactttgggccacccaggctctctagatgagaccacctatgaaagactagcagaggaaacgctggactctttagcagagttttttgaagaccttgcagacaagccatacacgtttgaggactatgatgtctcctttgggagtggtgtcttaactgtcaaactgggtggagatctaggaacctatgtgatcaacaagcagacgccaaacaagcaaatctggctatcttctccatccagtggacctaagcgttatgactggactgggaaaaactgggtgtactcccacgacggcgtgtccctccatgagctgctggccgcagagctcactaaagccttaaaaaccaaactggacttgtcttccttggcctattccggaaaagatgcttgatgcccagccccgttttaaggacattaaaagctatcaggccaagaccccagcttcattatgcagctgaggtctgttttttgttgttgttgttgtttattttttttattcctgcttttgaggacagttgggctatgtgtcacagctctgtagaaagaatgtgttgcctcctaccttgcccccaagttctgatttttaatttctatggaagattttttggattgtcggatttcctccctcacatgataccccttatcttttataatgtcttatgcctatacctgaatataacaacctttaaaaaagcaaaataataagaaggaaaaattccaggagggaaaatgaa

SEQ ID NO: 135335 - DNA, 359 bp, Homo sapiens
  Payload ID: 6446
  Gene Symbol: FXN
  Gene Name: frataxin
  ENST ID: ENST00000484259
  CDS Start-End: 1-325
accagatttggaatgtcaaaaagcagagtgtctatttgatgaatttgaggaaatctggaactttgggccacccaggagtggtgtcttaactgtcaaactgggtggagatctaggaacctatgtgatcaacaagcagacgccaaacaagcaaatctggctatcttctccatccagtggacctaagcgttatgactggactgggaaaaactgggtgtactcccacgacggcgtgtccctccatgagctgctggccgcagagctcactaaagccttaaaaaccaaactggacttgtcttccttggcctattccggaaaagatgcttgatgcccagccccgttttaaggacattaaaagctat

SEQ ID NO: 135336 - DNA, 2311 bp, Homo sapiens
  Payload ID: 6447
  Gene Symbol: FFAR1
  Gene Name: free fatty acid receptor 1
  Uniprot ID: O14842
  ENST ID: ENST00000246553
  CDS Start-End: 1-903
atggacctgcccccgcagctctccttcggcctctatgtggccgcctttgcgctgggcttcccgctcaacgtcctggccatccgaggcgcgacggcccacgcccggctccgtctcacccctagcctggtctacgccctgaacctgggctgctccgacctgctgctgacagtctctctgcccctgaaggcggtggaggcgctagcctccggggcctggcctctgccggcctcgctgtgccccgtcttcgcggtggcccacttcttcccactctatgccggcgggggcttcctggccgccctgagtgcaggccgctacctgggagcagccttccccttgggctaccaagccttccggaggccgtgctattcctggggggtgtgcgcggccatctgggccctcgtcctgtgtcacctgggtctggtctttgggttggaggctccaggaggctggctggaccacagcaacacctccctgggcatcaacacaccggtcaacggctctccggtctgcctggaggcctgggacccggcctctgccggcccggcccgcttcagcctctctctcctgctcttttttctgcccttggccatcacagccttctgctacgtgggctgcctccgggcactggcccgctccggcctgacgcacaggcggaagctgcgggccgcctgggtggccggcggggccctcctcacgctgctgctctgcgtaggaccctacaacgcctccaacgtggccagcttcctgtaccccaatctaggaggctcctggcggaagctggggctcatcacgggtgcctggagtgtggtgcttaatccgctggtgaccggttacttgggaaggggtcctggcctgaagacagtgtgtgcggcaagaacgcaagggggcaagtcccagaagtaacgccactgctcgggggaaggagcatggggcaggagggcccggctgcttctccaggcccctgcggggggctgcttcggaggaactgcagggcagcctggcccggaggcctccctggagccactcaagcagagagcggcgcctgctgagggcagcaccccagtcaagagaggagcaccgagccagagcacggtggcagggggaggtaagtttgcccctgcacgtgtcgaggaagtttgtcccttcctcgcctatctttctctcccctctgcacgtcctcacctgcctgtcttccgtgggccgcgagcagaggccttgtacttacgggaaggaggaggcagtctgtttctgacccacaggaactgccactccggtgatgcacttgaggacagctactctgaaatcagttcccaggagagaacatttgatttccgagtaggagaggaggcaggaggcaggataatgacgctgttataccatgtgaaactcgcaagggggcagccttggagcttggaacggaggctggcaggaaaagatgcttcagccggggagggaaaatgcaaggtcccgcagtgatgggcaaaggctacggagttgactcttgaacaacgtggggatggggtgccgaaccccacgcagtggaaaatctgtgcatgactttgactcccccaaagttcaactactaatagcctactgttgaccaaaagctttacccagtatataaacaattgagtaagacatatttgaagccaggcacagtggcttatgcctgtaatcccagcactttaggaggccgaggcgggaagactgctcgaagccaggagttcaagagcagcctgggcaagatagtgagacccccacctctacaaataataaaaataaaaataattagctgggcgtggtggtgcgtgcctgtagtcccagctactcaggggtctgaggtgggaggatcccttgagcccaggattgaggctgcaatgccatgatcgcaccactgcactccagcctgggtgacagagcaagatcctgtctctggaaaaaaaagaaaaaagacatattttgtatgttatatatattatgtgctgtattcttacaataaagtaagctagagaaaagtacatgttactgaaaacattattagaaagagaaaataccttcacagcactgtgctgtatttatcaatactgtaagttttgttgtctgtttataagagaagttgtctgtctcaagcggcagtaaccgcggctgcagatctcaatctgtggtagatatcaagcagttcaacccttttttataatgtcatgacttttctttgcttcttggaagcagctctggcatcactagtggccccgcatttggggccaagggggttattcaaagtttacggtattgcattaaacatggtgaaaca

SEQ ID NO: 135337 - DNA, 2051 bp, Homo sapiens
  Payload ID: 6448
  Gene Symbol: FFAR2
  Gene Name: free fatty acid receptor 2
  Uniprot ID: O15552
  ENST ID: ENST00000246549
  CDS Start-End: 1-993
atgctgccggactggaagagctccttgatcctcatggcttacatcatcatcttcctcactggcctccctgccaacctcctggccctgcgggcctttgtggggcggatccgccagccccagcctgcacctgtgcacatcctcctgctgagcctgacgctggccgacctcctcctgctgctgctgctgcccttcaagatcatcgaggctgcgtcgaacttccgctggtacctgcccaaggtcgtctgcgccctcacgagttttggcttctacagcagcatctactgcagcacgtggctcctggcgggcatcagcatcgagcgctacctgggagtggctttccccgtgcagtacaagctctcccgccggcctctgtatggagtgattgcagctctggtggcctgggttatgtcctttggtcactgcaccatcgtgatcatcgttcaatacttgaacacgactgagcaggtcagaagtggcaatgaaattacctgctacgagaacttcaccgataaccagttggacgtggtgctgcccgtgcggctggagctgtgcctggtgctcttcttcatccccatggcagtcaccatcttctgctactggcgttttgtgtggatcatgctctcccagccccttgtgggggcccagaggcggcgccgagccgtggggctggctgtggtgacgctgctcaatttcctggtgtgcttcggaccttacaacgtgtcccacctggtggggtatcaccagagaaaaagcccctggtggcggtcaatagccgtggtgttcagttcactcaacgccagtctggaccccctgctcttctatttctcttcttcagtggtgcgcagggcatttgggagagggctgcaggtgctgcggaatcagggctcctccctgttgggacgcagaggcaaagacacagcagaggggacaaatgaggacaggggtgtgggtcaaggagaagggatgccaagttcggacttcactacagagtagcagtttccctggaccttcagaggtcgcctgggttacacaggagctgggaagcctgggagaggcggagcaggaaggctcccatccagattcagaaatccttagacccagcccaggactgcgactttgaaaaaaatgcctttcaccagcttggtatcccttcctgactgaattgtcctactcaaaggagcataagtcagagatgcacgaagaagtagttaggtatagaagcacctgccgggtgtggtggctcatgcctataatcccagaactttgggaggctgaggcaggtggatcacttgaggtcgggagattgagaacatcctggtcaacatgggaaaaccccgtctctactaaaaatacaaaaaaattagctgggcatggtggcacatgcctataatcccagctactctggaggctgaggcaggagaatccttgaacccgggagttggaggttgcagtgagctgagatcacgccactgcactccagcctagcgacagagcaagactccatttaaaaaaaaaaaaaaaaaaaaaaagaagcaccttcaggctggagaagcagcgtagctaacacaagtccagtccttgtgatgtggctggtagttggggatggccaggctgaagcagagagtcctagagaaatctcgatacaagcttcaaagcaacacctagacactgctctagcggttgatcctggagataaaccaacaagagagagatggaagagaaatactaaatgaggtcaaagaagactcagaaaggttctgagcctggagatgagcagggaggcctcagggcttagacctttaatgataggggtttccctgcattggtttgacctgttgcctttttgatgtgctctgtttgttttcatgtgttgtcttgtctcccctgctaaactgggagctgccaggggtctgggtcttatctccttcctccatggtaccccacacaggccaggatgtggtttggtacccagcaatcagagattggcactccctcatacaggggaaagcaacctggtctagcaaattgaaaataaagatgataaaactctg

SEQ ID NO: 135338 - DNA, 2133 bp, Homo sapiens
  Payload ID: 6448
  Gene Symbol: FFAR2
  Gene Name: free fatty acid receptor 2
  Uniprot ID: O15552
  ENST ID: ENST00000599180
  CDS Start-End: 81-1073
tctgttcctctctcctggaagcttgcagacctcccttcagaaccaatcccaagaagccacctatccggaacaacacaaggatgctgccggactggaagagctccttgatcctcatggcttacatcatcatcttcctcactggcctccctgccaacctcctggccctgcgggcctttgtggggcggatccgccagccccagcctgcacctgtgcacatcctcctgctgagcctgacgctggccgacctcctcctgctgctgctgctgcccttcaagatcatcgaggctgcgtcgaacttccgctggtacctgcccaaggtcgtctgcgccctcacgagttttggcttctacagcagcatctactgcagcacgtggctcctggcgggcatcagcatcgagcgctacctgggagtggctttccccgtgcagtacaagctctcccgccggcctctgtatggagtgattgcagctctggtggcctgggttatgtcctttggtcactgcaccatcgtgatcatcgttcaatacttgaacacgactgagcaggtcagaagtggcaatgaaattacctgctacgagaacttcaccgataaccagttggacgtggtgctgcccgtgcggctggagctgtgcctggtgctcttcttcatccccatggcagtcaccatcttctgctactggcgttttgtgtggatcatgctctcccagccccttgtgggggcccagaggcggcgccgagccgtggggctggctgtggtgacgctgctcaatttcctggtgtgcttcggaccttacaacgtgtcccacctggtggggtatcaccagagaaaaagcccctggtggcggtcaatagccgtggtgttcagttcactcaacgccagtctggaccccctgctcttctatttctcttcttcagtggtgcgcagggcatttgggagagggctgcaggtgctgcggaatcagggctcctccctgttgggacgcagaggcaaagacacagcagaggggacaaatgaggacaggggtgtgggtcaaggagaagggatgccaagttcggacttcactacagagtagcagtttccctggaccttcagaggtcgcctgggttacacaggagctgggaagcctgggagaggcggagcaggaaggctcccatccagattcagaaatccttagacccagcccaggactgcgactttgaaaaaaatgcctttcaccagcttggtatcccttcctgactgaattgtcctactcaaaggagcataagtcagagatgcacgaagaagtagttaggtatagaagcacctgccgggtgtggtggctcatgcctataatcccagaactttgggaggctgaggcaggtggatcacttgaggtcgggagattgagaacatcctggtcaacatgggaaaaccccgtctctactaaaaatacaaaaaaattagctgggcatggtggcacatgcctataatcccagctactctggaggctgaggcaggagaatccttgaacccgggagttggaggttgcagtgagctgagatcacgccactgcactccagcctagcgacagagcaagactccatttaaaaaaaaaaaaaaaaaaaaaaagaagcaccttcaggctggagaagcagcgtagctaacacaagtccagtccttgtgatgtggctggtagttggggatggccaggctgaagcagagagtcctagagaaatctcgatacaagcttcaaagcaacacctagacactgctctagcggttgatcctggagataaaccaacaagagagagatggaagagaaatactaaatgaggtcaaagaagactcagaaaggttctgagcctggagatgagcagggaggcctcagggcttagacctttaatgataggggtttccctgcattggtttgacctgttgcctttttgatgtgctctgtttgttttcatgtgttgtcttgtctcccctgctaaactgggagctgccaggggtctgggtcttatctccttcctccatggtaccccacacaggccaggatgtggtttggtacccagcaatcagagattggcactccctcatacaggggaaagcaacctggtctagcaaattgaaaataaagatgataaaactctgaa

SEQ ID NO: 135339 - DNA, 1796 bp, Homo sapiens
  Payload ID: 6449
  Gene Symbol: FFAR3
  Gene Name: free fatty acid receptor 3
  Uniprot ID: O14843
  ENST ID: ENST00000327809
  CDS Start-End: 202-1242
ccccttttagcatgctgaccagccctggcaacggagctcaaggcatctatgtgccactgctcaacagtgagtgacgtcatgggcacggccaggtctttatcagttctgccggataaatagccaactgcactaggtctggagagacagcaaggtgctgtgcggcagagcatttggggtctcaaagaagcagtggccaccaccatggatacaggccccgaccagtcctacttctccggcaatcactggttcgtcttctcggtgtaccttctcactttcctggtggggctccccctcaacctgctggccctggtggtcttcgtgggcaagctgcagcgccgcccggtggccgtggacgtgctcctgctcaacctgaccgcctcggacctgctcctgctgctgttcctgcctttccgcatggtggaggcagccaatggcatgcactggcccctgcccttcatcctctgcccactctctggattcatcttcttcaccaccatctatctcaccgccctcttcctggcagctgtgagcattgaacgcttcctgagtgtggcccacccactgtggtacaagacccggccgaggctggggcaggcaggtctggtgagtgtggcctgctggctgttggcctctgctcactgcagcgtggtctacgtcatagaattctcaggggacatctcccacagccagggcaccaatgggacctgctacctggagttccggaaggaccagctagccatcctcctgcccgtgcggctggagatggctgtggtcctctttgtggtcccgctgatcatcaccagctactgctacagccgcctggtgtggatcctcggcagagggggcagccaccgccggcagaggagggtggcggggctgttggcggccacgctgctcaacttccttgtctgctttgggccctacaacgtgtcccatgtcgtgggctatatctgcggtgaaagcccggcgtggaggatctacgtgacgcttctcagcaccctgaactcctgtgtcgacccctttgtctactacttctcctcctccgggttccaagccgactttcatgagctgctgaggaggttgtgtgggctctggggccagtggcagcaggagagcagcatggagctgaaggagcagaagggaggggaggagcagagagcggaccgaccagctgaaagaaagaccagtgaacactcacagggctgtggaactggtggccaggtggcctgtgctgaaagctaggtcctccgggggaggagggtgtagctggcatgtcatcctcagggcgcttcctcgctcacgccaggagggacttggagtggcgagctggggcccgatggggcttgggggcagagtagacatctagcctccctaagggtatgcgcgctaaagcccagctctcgatctcacctccatccccatccacccacacactatggattgggctctgggaaggggtcagggtgagaggctgctctggagaacaatgaggtcctcatagcagcaggcagctcctgtgttttcttgagggtggcagaggagctaagagcagtgcccagggtctgagggggctgcccagtgagtggcaggggcaggagaggggagaaccccatcctcagagctgctcccagccagcgagtcaggagcgggggagacagggctccagggatgaggccgcattctgctcccacagcgccttttccagaaagttcccattgctcaataaatgtggatcatcagagacatttatgaacaatgacagaagaaaaattacccaaataaatgtggaagcaagc

SEQ ID NO: 135340 - DNA, 1182 bp, Homo sapiens
  Payload ID: 6449
  Gene Symbol: FFAR3
  Gene Name: free fatty acid receptor 3
  Uniprot ID: O14843
  ENST ID: ENST00000594310
  CDS Start-End: 71-1111
tgctggccagaggccgttagggcccccactaccaactccatgttactctctctcaccagtggccaccaccatggatacaggccccgaccagtcctacttctccggcaatcactggttcgtcttctcggtgtaccttctcactttcctggtggggctccccctcaacctgctggccctggtggtcttcgtgggcaagctgcagcgccgcccggtggccgtggacgtgctcctgctcaacctgaccgcctcggacctgctcctgctgctgttcctgcctttccgcatggtggaggcagccaatggcatgcactggcccctgcccttcatcctctgcccactctctggattcatcttcttcaccaccatctatctcaccgccctcttcctggcagctgtgagcattgaacgcttcctgagtgtggcccacccactgtggtacaagacccggccgaggctggggcaggcaggtctggtgagtgtggcctgctggctgttggcctctgctcactgcagcgtggtctacgtcatagaattctcaggggacatctcccacagccagggcaccaatgggacctgctacctggagttccggaaggaccagctagccatcctcctgcccgtgcggctggagatggctgtggtcctctttgtggtcccgctgatcatcaccagctactgctacagccgcctggtgtggatcctcggcagagggggcagccaccgccggcagaggagggtggcggggctgttggcggccacgctgctcaacttccttgtctgctttgggccctacaacgtgtcccatgtcgtgggctatatctgcggtgaaagcccggcgtggaggatctacgtgacgcttctcagcaccctgaactcctgtgtcgacccctttgtctactacttctcctcctccgggttccaagccgactttcatgagctgctgaggaggttgtgtgggctctggggccagtggcagcaggagagcagcatggagctgaaggagcagaagggaggggaggagcagagagcggaccgaccagctgaaagaaagaccagtgaacactcacagggctgtggaactggtggccaggtggcctgtgctgaaagctaggtcctccgggggaggagggtgtagctggcatgtcatcctcagggcgcttcctcgctcacgccaggagggac

SEQ ID NO: 135341 - DNA, 3605 bp, Homo sapiens
  Payload ID: 6450
  Gene Symbol: FFAR4
  Gene Name: free fatty acid receptor 4
  Uniprot ID: Q5NUL3
  ENST ID: ENST00000371481
  CDS Start-End: 57-1142
agtcgcctcccagatgagcactctctcagaccgctgcgggccgccaggcgccgggaatgtcccctgaatgcgcgcgggcagcgggcgacgcgcccttgcgcagcctggagcaagccaaccgcacccgctttcccttcttctccgacgtcaagggcgaccaccggctggtgctggccgcggtggagacaaccgtgctggtgctcatctttgcagtgtcgctgctgggcaacgtgtgcgccctggtgctggtggcgcgccgacgacgccgcggcgcgactgcctgcctggtactcaacctcttctgcgcggacctgctcttcatcagcgctatccctctggtgctggccgtgcgctggactgaggcctggctgctgggccccgttgcctgccacctgctcttctacgtgatgaccctgagcggcagcgtcaccatcctcacgctggccgcggtcagcctggagcgcatggtgtgcatcgtgcacctgcagcgcggcgtgcggggtcctgggcggcgggcgcgggcagtgctgctggcgctcatctggggctattcggcggtcgccgctctgcctctctgcgtcttcttccgagtcgtcccgcaacggctccccggcgccgaccaggaaatttcgatttgcacactgatttggcccaccattcctggagagatctcgtgggatgtctcttttgttactttgaacttcttggtgccaggactggtcattgtgatcagttactccaaaattttacagatcacaaaggcatcaaggaagaggctcacggtaagcctggcctactcggagagccaccagatccgcgtgtcccagcaggacttccggctcttccgcaccctcttcctcctcatggtctccttcttcatcatgtggagccccatcatcatcaccatcctcctcatcctgatccagaacttcaagcaagacctggtcatctggccgtccctcttcttctgggtggtggccttcacatttgctaattcagccctaaaccccatcctctacaacatgacactgtgcaggaatgagtggaagaaaattttttgctgcttctggttcccagaaaagggagccattttaacagacacatctgtcaaaagaaatgacttgtcgattatttctggctaatttttctttatagccgagtttctcacacctggcgagctgtggcatgcttttaaacagagttcatttccagtaccctccatcagtgcaccctgctttaagaaaatgaacctatgcaaatagacatccacagcgtcggtaaattaaggggtgatcaccaagtttcataatattttccctttataaaaggatttgttggccaggtgcagtggttcatgcctgtaatcccagcagtttgggaggctgaggtgggtggatcacctgaggtcaggagttcgagaccaacctgaccaacatggtgagacccccgtctctactaaaaataaaaaaaaaaattagctgggagtggtggtgggcacctgtaatcctagctacttgggaggctgaaccaggagaatctcttgaacctgggaggcagaggttgcagtgagccgagatcgtgccattgcactccaaccagggcaacaagagtgaaactccatcttaaaaaaaaaaaaaaaaagatttgttatgggttccttttaaatgtgaacttttttagtgtgtttgtaatatgatcaaatttaataaatatttatttatgactgttcagcaatcacatctcctacatataaagccacaccatagtggtttctgaagtgagtcttagaaccgattcaggacgcagatttctcctctgaagggtcacagccaccctgtgccctaccttggactcgcaagggtttaggatcattcgttgatgtcaagagcaattgaagaatttctaaggaacagttaaagatgacttacttttttttttttttcatttataaaaatgctatggacccttttaagagaatcggcatcatgaaatgagagagaaagtaggatggctctgaaatgtttgagagtgagttcaggagtggtttactcctgacgcatccagcagagatgcctcttaagcaccagccatggcagacagtgtcctttgtgctaggaatacagtggtgaaccagacagccatggccctctctcagggaacttaccttcgagtcaggggcagaaaaactaaataaaagtcaataaactatatctatatacagatacctatatatttgagatgagggtcttgctccaatgcccaggctggagtgcaacggcacaatcacggctccctgaagcctcaaatgccttggctcaagcaatcctcccgcctcagcctcccaagtagctgggattacaggcgtgagccgccacgcctggctacaagtcaataaatagtatagcatcacagagcgaataagcactgtgaagaaaatgggacgggggctatggtagtgatgggaatttagatcagatggggaggggcctaaggagacctttctgaggagtgacaaattggatcaaaaggtaagcgacaagaaagggccacctgtgtgaatgggggaagggacacagaagagatgttagtgcaaggaggctgacacgcttgaagggagagtggcgtaagccgactattgatggagcctcctctgcactaggcactgcctttaatgctgagatgaggggtacccggctggggcctgtcagttgaggccagagaaattgcagggttagatcacatagggcctaggagtttattctgttctccaagcccctggaggttggcaactggaggctgacgtgacctgatgaatgtgtgcaaagattaccctggctgctgggcagggaatagactctgaggagcatgagtgaaaatggagaccagttgggcagctgctgaagtgtgacatggggatgggaccttggaggtgagtggcattagggagggattgtgagaaatgacttgtaaatataccttgggaaggtaaaacaaagatgatttattgatgggaaggatggaattgatagaatgtgagggaaagggagaactcaaggggaatactctgattttttagcctgtcattggttggatggtgaagcaggcaacaaaaatgggggggcctgggcaaagattaggggggggggagccaagagtttcatttggagctcatcagtttgaaatctcagtgagacttccaaattgaataggcagttggatgcagagatgtggagcttgggcctggagatgcacattgtttggagatataaatggtgtttatagacctatggttttataatacatcccttggagagatagagagaaaccagagccaaagaccgaacccagggtcactccaccacttggaggctgggccagtggctggaatgcacagcagcacggggcctggtgtatagtaggtgttcaacaaatctttgttgctgaggaaatcagcaccagcagtagtgactgcttatgcagtttctggagcagcttgcttctgaagtcagattcatggatatcacaagctcgaagacaaacgaacagagatgttttgctcactttagttaatagatttgatcaattaaacctgtttttggaagtga

SEQ ID NO: 135342 - DNA, 3653 bp, Homo sapiens
  Payload ID: 6450
  Gene Symbol: FFAR4
  Gene Name: free fatty acid receptor 4
  Uniprot ID: Q5NUL3
  ENST ID: ENST00000371483
  CDS Start-End: 57-1190
agtcgcctcccagatgagcactctctcagaccgctgcgggccgccaggcgccgggaatgtcccctgaatgcgcgcgggcagcgggcgacgcgcccttgcgcagcctggagcaagccaaccgcacccgctttcccttcttctccgacgtcaagggcgaccaccggctggtgctggccgcggtggagacaaccgtgctggtgctcatctttgcagtgtcgctgctgggcaacgtgtgcgccctggtgctggtggcgcgccgacgacgccgcggcgcgactgcctgcctggtactcaacctcttctgcgcggacctgctcttcatcagcgctatccctctggtgctggccgtgcgctggactgaggcctggctgctgggccccgttgcctgccacctgctcttctacgtgatgaccctgagcggcagcgtcaccatcctcacgctggccgcggtcagcctggagcgcatggtgtgcatcgtgcacctgcagcgcggcgtgcggggtcctgggcggcgggcgcgggcagtgctgctggcgctcatctggggctattcggcggtcgccgctctgcctctctgcgtcttcttccgagtcgtcccgcaacggctccccggcgccgaccaggaaatttcgatttgcacactgatttggcccaccattcctggagagatctcgtgggatgtctcttttgttactttgaacttcttggtgccaggactggtcattgtgatcagttactccaaaattttacagacctcggaacacctcctggatgcaagagctgtcgtgactcacagtgagatcacaaaggcatcaaggaagaggctcacggtaagcctggcctactcggagagccaccagatccgcgtgtcccagcaggacttccggctcttccgcaccctcttcctcctcatggtctccttcttcatcatgtggagccccatcatcatcaccatcctcctcatcctgatccagaacttcaagcaagacctggtcatctggccgtccctcttcttctgggtggtggccttcacatttgctaattcagccctaaaccccatcctctacaacatgacactgtgcaggaatgagtggaagaaaattttttgctgcttctggttcccagaaaagggagccattttaacagacacatctgtcaaaagaaatgacttgtcgattatttctggctaatttttctttatagccgagtttctcacacctggcgagctgtggcatgcttttaaacagagttcatttccagtaccctccatcagtgcaccctgctttaagaaaatgaacctatgcaaatagacatccacagcgtcggtaaattaaggggtgatcaccaagtttcataatattttccctttataaaaggatttgttggccaggtgcagtggttcatgcctgtaatcccagcagtttgggaggctgaggtgggtggatcacctgaggtcaggagttcgagaccaacctgaccaacatggtgagacccccgtctctactaaaaataaaaaaaaaaattagctgggagtggtggtgggcacctgtaatcctagctacttgggaggctgaaccaggagaatctcttgaacctgggaggcagaggttgcagtgagccgagatcgtgccattgcactccaaccagggcaacaagagtgaaactccatcttaaaaaaaaaaaaaaaaagatttgttatgggttccttttaaatgtgaacttttttagtgtgtttgtaatatgatcaaatttaataaatatttatttatgactgttcagcaatcacatctcctacatataaagccacaccatagtggtttctgaagtgagtcttagaaccgattcaggacgcagatttctcctctgaagggtcacagccaccctgtgccctaccttggactcgcaagggtttaggatcattcgttgatgtcaagagcaattgaagaatttctaaggaacagttaaagatgacttacttttttttttttttcatttataaaaatgctatggacccttttaagagaatcggcatcatgaaatgagagagaaagtaggatggctctgaaatgtttgagagtgagttcaggagtggtttactcctgacgcatccagcagagatgcctcttaagcaccagccatggcagacagtgtcctttgtgctaggaatacagtggtgaaccagacagccatggccctctctcagggaacttaccttcgagtcaggggcagaaaaactaaataaaagtcaataaactatatctatatacagatacctatatatttgagatgagggtcttgctccaatgcccaggctggagtgcaacggcacaatcacggctccctgaagcctcaaatgccttggctcaagcaatcctcccgcctcagcctcccaagtagctgggattacaggcgtgagccgccacgcctggctacaagtcaataaatagtatagcatcacagagcgaataagcactgtgaagaaaatgggacgggggctatggtagtgatgggaatttagatcagatggggaggggcctaaggagacctttctgaggagtgacaaattggatcaaaaggtaagcgacaagaaagggccacctgtgtgaatgggggaagggacacagaagagatgttagtgcaaggaggctgacacgcttgaagggagagtggcgtaagccgactattgatggagcctcctctgcactaggcactgcctttaatgctgagatgaggggtacccggctggggcctgtcagttgaggccagagaaattgcagggttagatcacatagggcctaggagtttattctgttctccaagcccctggaggttggcaactggaggctgacgtgacctgatgaatgtgtgcaaagattaccctggctgctgggcagggaatagactctgaggagcatgagtgaaaatggagaccagttgggcagctgctgaagtgtgacatggggatgggaccttggaggtgagtggcattagggagggattgtgagaaatgacttgtaaatataccttgggaaggtaaaacaaagatgatttattgatgggaaggatggaattgatagaatgtgagggaaagggagaactcaaggggaatactctgattttttagcctgtcattggttggatggtgaagcaggcaacaaaaatgggggggcctgggcaaagattaggggggggggagccaagagtttcatttggagctcatcagtttgaaatctcagtgagacttccaaattgaataggcagttggatgcagagatgtggagcttgggcctggagatgcacattgtttggagatataaatggtgtttatagacctatggttttataatacatcccttggagagatagagagaaaccagagccaaagaccgaacccagggtcactccaccacttggaggctgggccagtggctggaatgcacagcagcacggggcctggtgtatagtaggtgttcaacaaatctttgttgctgaggaaatcagcaccagcagtagtgactgcttatgcagtttctggagcagcttgcttctgaagtcagattcatggatatcacaagctcgaagacaaacgaacagagatgttttgctcactttagttaatagatttgatcaattaaacctgtttttggaagtga

SEQ ID NO: 135343 - DNA, 1142 bp, Homo sapiens
  Payload ID: 6450
  Gene Symbol: FFAR4
  Gene Name: free fatty acid receptor 4
  ENST ID: ENST00000604414
  CDS Start-End: 40-750
gcactctctcagaccgctgcgggccgccaggcgccgggaatgtcccctgaatgcgcgcgggcagcgggcgacgcgcccttgcgcagcctggagcaagccaaccgcacccgctttcccttcttctccgacgtcaagggcgaccaccggctggtgctggccgcggtggagacaaccgtgctggtgctcatctttgcagtgtcgctgctgggcaacgtgtgcgccctggtgctggtggcgcgccgacgacgccgcggcgcgactgcctgcctggtactcaacctcttctgcgcggacctgctcttcatcagcgctatccctctggtgctggccgtgcgctggactgaggcctggctgctgggccccgttgcctgccacctgctcttctacgtgatgaccctgagcggcagcgtcaccatcctcacgctggccgcggtcagcctggagcgcatggtgtgcatcgtgcacctgcagcgcggcgtgcggggtcctgggcggcgggcgcgggcagtgctgctggcgctcatctggggctattcggcggtcgccgctctgcctctctgcgtcttcttccgagtcgtcccgcaacggctccccggcgccgaccaggaaatttcgatttgcacactgatttggcccaccattcctggagagatctcgtgggatgtctcttttgttactttgaacttcttggtgccaggactggtcattgtgatcagttactccaaaattttacagggtccccactggtgactgactttatgtgaatgagagatgagcttccactggatgaagctactgagatttgagaggttacctgtaacagaagttgctgttaccttaaccttcacagcatcaaacacatcactaactcctaaaaaagactgaaaagggttttaccataactcacagaactaatgcaagacatttgtgtccttaccctcatgaaaattaagcactagcaaccagctccattttatacaaagtaacatttatacccacatctggaccgaggccaagaaaaatgaaaaacaaggaagtggagcagcatttatcttctgactgcatttaaaagatgtcaaaataattggttgaaaaatggaaaggttagtcagtccatgttttcaggtacaaagagataaatt

SEQ ID NO: 135344 - DNA, 2649 bp, Homo sapiens
  Payload ID: 6451
  Gene Symbol: FRAT1
  Gene Name: frequently rearranged in advanced T-cell lymphomas 1
  Uniprot ID: Q92837
  ENST ID: ENST00000371021
  CDS Start-End: 188-1027
attccggctcccgcggctgcaggcgcgcggctagagtgcctggcgggctccggcttccgcgtccgccccggccccggtccagacttagtcttcagctccgcgcccgctccgccgcggcccaccgcgcccgccggcagccgagcccccagcgacgcccgcacagctccgggtgcccagacagggggccatgccgtgccggagggaggaggaagaggaagccggcgaggaggcggagggggaggaagaggaggaggacagcttcctcctactgcagcagtcagtggcgctgggcagctcgggcgaggtggaccggctggtggcccagatcggcgagacgctgcagctggacgcggcgcagcacagcccggcctcgccgtgcgggcccccgggggcgccgctgcgggccccggggcccctggctgcggcggtgccggcggacaaggccaggtccccggcggtgccgctgctgctgccgcccgcgttggcggagactgtgggcccggcgccccctggggtcctgcgctgcgccctgggggaccgcggccgcgtgcggggccgcgctgcgccctactgcgtggccgagctcgccacaggccccagcgcgctgtccccactgccccctcaggccgaccttgatgggcctccgggagctggcaagcagggcatcccgcagccgctgtcgggtccgtgccggcgaggatggctccggggcgccgccgcctcccgccgcctgcagcagcgacgcgggtcccaaccagaaacccgcacaggcgacgacgacccgcaccggcttctgcagcagctagtgctctctggaaacctcatcaaggaggccgtgcgaaggcttcattcgcgacggctgcagttacgtgcaaagcttccccaacgcccgctcctgggacctctgtcggccccggtgcatgaacccccttcgcctcgcagccctcgcgcggcctgcagtgaccctggcgcctccgggagggcgcagctcagaactggcgacggcgttcttgtgcctggcagctaacacgcccggggtggccacagcgccagcctcagactggagggcaaggggttcccttgagggctgcagttctactcaggctggtggagaactctggcttttggaagcgagagtaaaaagctaatgacgaggaaccgaaaaatcgcgagtgtttcgcgggtaactggggttgagggccaaaatatttggaatgaaggactttggccctatttaaggcagattttacagagcgcacctcaaacgtacaagtcagtaggactccttatttggcgtgacccgacctggccgcggagcctgcatttcctcgcagcctctcagtgccctccagccccgcgaccatgtggccacaatccacgcttctccggatcgcggtgcgccggaaccacggaggatgatgccagttacttgctttaccttttcagggctggctcctgatccactttgggggaggagaacatgagtagataatttcagggtgcagcccaatctgccagacttaaaaaaaccatcttgtgtctttggaggtgctgcttaataccaaacatgcggtgccatgaagggaccctttgggggttgaataggagttaacccctgcgctctctttgcaactgtctctcttctcagagtggtgggggaaggctgtacgacacgggtggggaaaggaggtgggggcggggagtattgaatggtggtggaagggtagagaggcgcggagtgaaccccacgccctgtctaaagtgtattttcagagccggcccgcctctcctcggttcaaggtcactgtttcctgggcacgcactgggttgcgggacagagtagccaggttctgccggtgctcggagaagagcgcagtgttttgcaagtgctggagtctcctgaggacacgcgcgtcgccgccaccgcgggtgtgggaaagcgcggacgtgctgggcggctgtgcttcggtaggcgaccaccgcccctggccgcgctccgggctttcacggaaactcccgagaccgggccctgggttcctcctctcctactcggctctgcagtcctactcaagcgggtggctctgggatcctgggggcctgggttgggggctagggagacgccatgtgatggacactccagggacacacagcctagcacagcagcttataatgggctctccggggccatttgcaataacagctgcaattccctggatagacgagttgatttcctccctctgcccctcccccagccatgccagctggcctttgtaagtgcaggaaaccgagtagaaaatgtgaccctccaaatggagaagctgcaggctttgccattgtgaaccatggtgaagtgcttggaacatactgttcactcactctaaaggcgctgagactgtgctgttgttctcgtttttatagtcaatggcttgttcatcatccagatgtggctactgacatatctacacttcgcaccggagtgtctggaattgtggctatcctgattataggattttaacttaactgaaatgcctgctttgaataaatgtgttgggttttttgtttggttttattttatacttgccatcagtgaaaaagatgtacagaacacatttctctgatctccataaacatgaaaacacttgaaatctc

SEQ ID NO: 135345 - DNA, 2213 bp, Homo sapiens
  Payload ID: 6452
  Gene Symbol: FRAT2
  Gene Name: frequently rearranged in advanced T-cell lymphomas 2
  Uniprot ID: O75474
  ENST ID: ENST00000371019
  CDS Start-End: 138-839
aggcgcgtggctcgagtgcctggcgggctccggcttccgcgtccgcccctgctccggcttcgcccgcagctccgcgcccgcgggcaaccaagcccccagcgaagcccgcacagctccgggtgccaggacggggggccatgccgtgccggagggaggaggaagaggaagccggcgaggaggcggagggggaggaagaggaggacgacagcttcctcctgctgcagcagtcggtgacgctgggcagctcgggcgaggtggaccggctggtggcccagatcggcgagacgctgcagctggacgcggcgcaggacagcccggcctcgccgtgcgcgcccccgggggtgccgctgcgggccccggggcccctggctgcggcggtgccggcggacaaggcccggcccccggcggtgccgctgctgctgccgcccgcttcggctgagacggtgggcccggcgccctctggggccctgcgctgcgccctaggggaccgcggccgcgtgcgcggacgcgctgcgccctactgcgtggcggaggtcgccgcaggccccagcgcgctgccggggccgtgccggcgaggatggctcagggacgcggtcacctcccgccgcttgcagcagcgccgatggacccaagccggggcacgcgccggcgacgacgacccgcatcggctcctccagcagctcgtgctctcgggaaacctcatcaaggaagccgtgcggagactccaacgagccgtcgccgcggttgcagccacgggccccgcaagcgcccctgggcccgggggaggccgcagcggacctgaccgcattgccctgcagccctcaggctccttgctctgacgcaggcctcctggaggaggaagtggaggccgctgcgtagacccaacagcgtccagttcctactaactctgagctgaagccgacgtcgccagcctgggagcgaccactttggctgcggggaggcgcgtggggagagatctcaaccagagaagttaccagccgcggcgaggccgtcggagaaaacttaagcgtggagaaatgtatgcgccagggtgcttccgtggggcatgagaatttcccgggccatccaagcccaaggacctgggataaactgggagaactatggcagctacttgcatcgacttgtacctcacttagcccttgggggcgtcgtgagcttggattgtttaaggagggctcaggggtaggaatcgcgatggctttataacaatacttgaaaactaacgacacgcatacattttcttattttctggtggaggagcttagtaagtggtgctacaattgctgtgcaaagaaattccagaggggagaagaatgtaaaagtttggtggtgggtggcttggcattgcccctttttcccaccgattcggtggctggtgaaggtgggagatgtgaactccaattaagggactggagagaggtgaagaattttgcaggtgggagatttggatttgaatgtggacttgtaaatgacttgaccttgccatctgtgttcaaggtcacggtttgctgtggggttcctgggagagcttactcaccccggagtcttttctttctcttgctccaagaagagccctgttggtgctttaccaccgcttggagtctcccgaggacacaaacaggcagagagggacgtgtagggagagttctttcctgttttctgtgctttcctttttacaggactcccggaaggccactcatggccatgccaggagctttctcagaaacagtcataaacgatctcttgagtctctttcttgtcctcccagctgagctttcttattccaccctttctggtgtctataggaatgcatgagagaccctggacgtttttctgctctcttctggccctccatggagtcatgggcctcggcctcggcggctcctcaccctcacaatttatttcctcctcccgtgccagcccttcttttgtgtctgaaaccggttttaaaatgtgactctcccagagaagaagccgctggctgtatgaaacttgacggcgcttttgtaaggtgccacccccaaactttaaggtagctaaaccaatttttaaaagattcaatggcttgttcatcctccagatgtagctattgatgtacacttcgcaacggagtgtctgaaattgtggtggtcctgatttataggatttcataattaaaatgtctgctgaataaatttggcttttgttttgga

SEQ ID NO: 135346 - DNA, 6963 bp, Homo sapiens
  Payload ID: 6453
  Gene Symbol: FZD1
  Gene Name: frizzled class receptor 1
  Uniprot ID: Q9UP38
  ENST ID: ENST00000287934
  CDS Start-End: 518-2461
tccagttctgcgtcggtttcaaggctcctccctcctggtgaaagacagactacggggcgcctggaaaccggtccgagggcgcgcgaggcagaggagagggagcgagttgagggattgacacaaatggtcaggcggcggcggcggagaaggaggcggaggcgcaggggggagccgagcccgctgggctgcggagagttgcgctctctacggggccgcggccactagcgcggcgccgccagccgggagccagcgagccgagggccaggaaggcgggacacgaccccggcgcgccctagccacccgggttctccccgccgcccgcgcttcatgaatcgcaagtttccgcggcggcggcggctgcggtacgcagaacaggagccgggggagcgggccgaaagcggcttgggctcgacggagggcacccgcgcagaggtctccctggccgcagggggagccgccgccggccgtgcccctggcagccccagcggagcggcgccaagagaggagccgagaaagtatggctgaggaggaggcgcctaagaagtcccgggccgccggcggtggcgcgagctgggaactttgtgccggggcgctctcggcccggctggcggaggagggcagcggggacgccggtggccgccgccgcccgccagttgacccccggcgattggcgcgccagctgctgctgctgctttggctgctggaggctccgctgctgctgggggtccgggcccaggcggcgggccaggggccaggccaggggcccgggccggggcagcaaccgccgccgccgcctcagcagcaacagagcgggcagcagtacaacggcgagcggggcatctccgtcccggaccacggctattgccagcccatctccatcccgctgtgcacggacatcgcgtacaaccagaccatcatgcccaacctgctgggccacacgaaccaggaggacgcgggcctggaggtgcaccagttctaccctctagtgaaagtgcagtgttccgctgagctcaagttcttcctgtgctccatgtacgcgcccgtgtgcaccgtgctagagcaggcgctgccgccctgccgctccctgtgcgagcgcgcgcgccagggctgcgaggcgctcatgaacaagttcggcttccagtggccagacacgctcaagtgtgagaagttcccggtgcacggcgccggcgagctgtgcgtgggccagaacacgtccgacaagggcaccccgacgccctcgctgcttccagagttctggaccagcaaccctcagcacggcggcggagggcaccgtggcggcttcccggggggcgccggcgcgtcggagcgaggcaagttctcctgcccgcgcgccctcaaggtgccctcctacctcaactaccacttcctgggggagaaggactgcggcgcaccttgtgagccgaccaaggtgtatgggctcatgtacttcgggcccgaggagctgcgcttctcgcgcacctggattggcatttggtcagtgctgtgctgcgcctccacgctcttcacggtgcttacgtacctggtggacatgcggcgcttcagctacccggagcggcccatcatcttcttgtccggctgttacacggccgtggccgtggcctacatcgccggcttcctcctggaagaccgagtggtgtgtaatgacaagttcgccgaggacggggcacgcactgtggcgcagggcaccaagaaggagggctgcaccatcctcttcatgatgctctacttcttcagcatggccagctccatctggtgggtgatcctgtcgctcacctggttcctggcggctggcatgaagtggggccacgaggccatcgaagccaactcacagtattttcacctggccgcctgggctgtgccggccatcaagaccatcaccatcctggcgctgggccaggtggacggcgatgtgctgagcggagtgtgcttcgtggggcttaacaacgtggacgcgctgcgtggcttcgtgctggcgcccctcttcgtgtacctgtttatcggcacgtcctttctgctggccggctttgtgtcgctcttccgcatccgcaccatcatgaagcacgatggcaccaagaccgagaagctggagaagctcatggtgcgcattggcgtcttcagcgtgctgtacactgtgccagccaccatcgtcatcgcctgctacttctacgagcaggccttccgggaccagtgggaacgcagctgggtggcccagagctgcaagagctacgctatcccctgccctcacctccaggcgggcggaggcgccccgccgcacccgcccatgagcccggacttcacggtcttcatgattaagtaccttatgacgctgatcgtgggcatcacgtcgggcttctggatctggtccggcaagaccctcaactcctggaggaagttctacacgaggctcaccaacagcaaacaaggggagactacagtctgagacccggggctcagcccatgcccaggcctcggccggggcgcagcgatcccccaaagccagcgccgtggagttcgtgccaatcctgacatctcgaggtttcctcactagacaactctctttcgcaggctcctttgaacaactcagctcctgcaaaagcttccgtccctgaggcaaaaggacacgagggcccgactgccagagggaggatggacagacctcttgccctcacactctggtaccaggactgttcgcttttatgattgtaaatagcctgtgtaagatttttgtaagtatatttgtatttaaatgacgaccgatcacgcgtttttctttttcaaaagtttttaattatttagggcggtttaaccatttgaggcttttccttcttgcccttttcggagtattgcaaaggagctaaaactggtgtgcaaccgcacagcgctcctggtcgtcctcgcgcgcctctccctaccacgggtgctcgggacggctgggcgccagctccggggcgagttcagcactgcggggtgcgactagggctgcgctgccagggtcacttcccgcctcctccttttgccccctccccctccttctgtcccctccctttctttcctggcttgaggtaggggctcttaaggtacagaactccacaaaccttccaaatctggaggagggcccccatacattacaattcctcccttgctcggcggtggattgcgaaggcccgtcccttcgacttcctgaagctggatttttaactgtccagaactttcctccaacttcatgggggcccacgggtgtgggcgctggcagtctcagcctccctccacggtcaccttcaacgcccagacactcccttctcccaccttagttggttacagggtgagtgagataaccaatgccaaactttttgaagtctaatttttgaggggtgagctcatttcattctctagtgtctaaaacctggtatgggtttggccagcgtcatggaaagatgtggttactgagatttgggaagaagcatgaagctttgtgtgggttggaagagactgaagatatgggttataaaatgttaattctaattgcatacggatgcctggcaaccttgcctttgagaatgagacagcctgcgcttagattttaccggtctgtaaaatggaaatgttgaggtcacctggaaagctttgttaaggagttgatgtttgctttccttaacaagacagcaaaacgtaaacagaaattgaaaacttgaaggatatttcagtgtcatggacttcctcaaaatgaagtgctattttcttatttttaatcaaataactagacatatatcagaaactttaaaatgtaaaagttgtacactttcaacattttattacgattattattcagcagcacattctgaggggggaacaattcacaccaccaataataacctggtaagatttcaggaggtaaagaaggtggaataattgacggggagatagcgcctgaaataaacaaaatatgggcatgcatgctaaagggaaaatgtgtgcaggtctactgcattaaatcctgtgtgctcctcttttggatttacagaaatgtgtcaaatgtaaatctttcaaagccatttaaaaatattcactttagttctctgtgaagaagaggagaaaagcaatcctcctgattgtattgttttaaactttaagaatttatcaaaatgccggtacttaggacctaaatttatctatgtctgtcatacgctaaaatgatattggtctttgaatttggtatacatttattctgttcactatcacaaaatcatctatatttatagaggaatagaagtttatatatatataataccatatttttaatttcacaaataaaaaattcaaagttttgtacaaaattatatggattttgtgcctgaaaataatagagcttgagctgtctgaactattttacattttatggtgtctcatagccaatcccacagtgtaaaaattcaggaattcaatgaaaaaagtctacccttaaaccctcagatcagtctttccaaagaattactctgtttgcattgttgtgattgacatttgtgaagtcccaagaaaagatctgttttcatgacagtagaaaatagaagtttgcaaattatttctttactcaaagaggattaaaagagaactctaattttaatattaaagctttcttttctttcagggaataaatttacatgactttttatattatggaggtttatttttaaatcatcacctttctcatattttttagaggtattgtcttatctcttccataatcttggatattacaaaaccctaaataggcaatcaataaatggttaactggctatgtgttcataaacattttaaacagcaattgggtttgtaaggctgttttgttgtttgcttctgaagacccctttttttaatcgttcaaggaaccttctccagataaattatctagttggtctactcttagtcagaatttatgcatgggtgtatatatgtgtatatatagataagtatacacataagtatatatgcattaatttttataaaatagagatgtaaagtttacttacatttcataatatggaaatatggttatgagaaatggaaaatgctagatggaaaacctcaaatacctttacaggttaaaaatatctttactaaattttcccatgaaaacattttgtgataaaatgacaagggactaaaatgaagatcattgatacaatagagttactttccttgttacaatgcaattgtcttataagtcattattcattttaaggaaaatcaaaaaaattagatcttactaaaaatgtagcatttgattttaagtagcaagatgcaattttgtgttccctttttctttgttacattaacataatatagtagatagagggtttattgtatagacatacacaaaaaaatagtattcttaggccaaattcacacatatctcctcactaagtagttcaattagataatttctggaaaaacatgtttttgacattaattgctatccaaaactatattttaaagcagtcttattggaggtgtccttaacatgatgtaactataaatttgatgcagaaaggttttacatgctgtggttaaatagctttagaagacatttttaagtcaccaccagcctttattcttagaaaacaatttattctaaatgatgatgcatatagaaaaccagtgtattcttttatttcttttaatactggtggcaaaataggacgtgtctggaaaaccataaggctacttgggatactgtcccattagcattgctgtttccatgacaaaccctattttcagatggtttgatttgcctattttttttttaaaccagctataaattggggtcaatttcccccctcacagtgtacttaatttagcttttggagtaaatatataagtagtatgaaagacttctgaagctcttctttctaaaaaagcagttttccacttaagctttgtggggacagagagtcatatttttaatttcagagccagccagtgtcaaacacgtgcaaaagagccgggccggattttttcagcttgtcctatggtagtcacttgtcagcctgagtttactggcctggtccttttgtctccactgtaagtactgaagccttctggtgtagttgtatcaccttaatgtccagcatttaactaggaaaggagactacaatgaagagttggtggccaattaagaaaaataatagactacatcataaatcatttcaggacttgagtggccgcagatcactgtccctgatagcatgtttcaaccttggtatacattttttttaagatgcatatttactgtgtgtgcttttgctttctaatccatctattgactattggccacaatttatataatgcacatgcaattaattgaaacctgtgtcatggcattggatatctctgattcatttcttattataatagtctgtgtaactggggcctgagagattagaagcaaaatgtagtcgtacgtatgtctagaggtggacgctggtgatattgtcattgaatactttgcagaatacactaatgtcaaaggcttgcaggattaatgtgtaggaaccaacataagacatggaatatatataagaattatctagttacatgactaaaaaggaattgcaatactatcttaaattgaaggcttttatttcaatgtccttacatttaaaatgggatcttacaagggaagtaccaaaaaagtaaagtttattttgatgactctcaagatatatatgtttgttttgaatgttggcagatgccaatagcccttaacatttgaaaaatggtacttgaacatcaattatgtctcagagttcccttaaactttttgggcttaaatatttttattcattttggtcatacctttgacaatggatatgttaaactttaacaattatagtgacaaaacagcttgcttagaacctggaaattaaaacacaatttctagagtaa

SEQ ID NO: 135347 - DNA, 3281 bp, Homo sapiens
  Payload ID: 6454
  Gene Symbol: FZD10
  Gene Name: frizzled class receptor 10
  Uniprot ID: Q9ULW2
  ENST ID: ENST00000229030
  CDS Start-End: 485-2230
cgagtcttctcatcccgggacgcaaacctcgaaacagctgccggctggtcccggccgaggccggcgcagggagggaggagccgcccgggctgtgggggcgccgcgagctgggccggcctcggtgtgcccgcgccgccagcccgctccagacgcgccacctgggcgctccaagaagaggccgaagtttgccgcggccgtgagttggagctcgcgccgggccgctgcgccgggagctccgggggcttccctcgcttcccggtattgtttgcaaactttgctgctctccgccgcggcccccaactcggcggacgccgggcgcggagagccgagccgggggcgctgtgcgcagcgctcgggccaggccgggcgggcatgggcgggggcccgagcaggggtggagagccggggccagcagcagcccgtgcccgggagcggcggcgctgaggggcgcggagctccccgcgaggacacgtccaacgccagcatgcagcgcccgggcccccgcctgtggctggtcctgcaggtgatgggctcgtgcgccgccatcagctccatggacatggagcgcccgggcgacggcaaatgccagcccatcgagatcccgatgtgcaaggacatcggctacaacatgactcgtatgcccaacctgatgggccacgagaaccagcgcgaggcagccatccagttgcacgagttcgcgccgctggtggagtacggctgccacggccacctccgcttcttcctgtgctcgctgtacgcgccgatgtgcaccgagcaggtctctacccccatccccgcctgccgggtcatgtgcgagcaggcccggctcaagtgctccccgattatggagcagttcaacttcaagtggcccgactccctggactgccggaaactccccaacaagaacgaccccaactacctgtgcatggaggcgcccaacaacggctcggacgagcccacccggggctcgggcctgttcccgccgctgttccggccgcagcggccccacagcgcgcaggagcacccgctgaaggacgggggccccgggcgcggcggctgcgacaacccgggcaagttccaccacgtggagaagagcgcgtcgtgcgcgccgctctgcacgcccggcgtggacgtgtactggagccgcgaggacaagcgcttcgcagtggtctggctggccatctgggcggtgctgtgcttcttctccagcgccttcaccgtgctcaccttcctcatcgacccggcccgcttccgctaccccgagcgccccatcatcttcctctccatgtgctactgcgtctactccgtgggctacctcatccgcctcttcgccggcgccgagagcatcgcctgcgaccgggacagcggccagctctatgtcatccaggagggactggagagcaccggctgcacgctggtcttcctggtcctctactacttcggcatggccagctcgctgtggtgggtggtcctcacgctcacctggttcctggccgccggcaagaagtggggccacgaggccatcgaagccaacagcagctacttccacctggcagcctgggccatcccggcggtgaagaccatcctgatcctggtcatgcgcagggtggcgggggacgagctcaccggggtctgctacgtgggcagcatggacgtcaacgcgctcaccggcttcgtgctcattcccctggcctgctacctggtcatcggcacgtccttcatcctctcgggcttcgtggccctgttccacatccggagggtgatgaagacgggcggcgagaacacggacaagctggagaagctcatggtgcgtatcgggctcttctctgtgctgtacaccgtgccggccacctgtgtgatcgcctgctacttttacgaacgcctcaacatggattactggaagatcctggcggcgcagcacaagtgcaaaatgaacaaccagactaaaacgctggactgcctgatggccgcctccatccccgccgtggagatcttcatggtgaagatctttatgctgctggtggtggggatcaccagcgggatgtggatttggacctccaagactctgcagtcctggcagcaggtgtgcagccgtaggttaaagaagaagagccggagaaaaccggccagcgtgatcaccagcggtgggatttacaaaaaagcccagcatccccagaaaactcaccacgggaaatatgagatccctgcccagtcgcccacctgcgtgtgaacagggctggagggaagggcacaggggcgcccggagctaagatgtggtgcttttcttggttgtgtttttctttcttcttcttctttttttttttttataaaagcaaaagagaaatacataaaaaagtgtttaccctgaaattcaggatgctgtgatacactgaaaggaaaaatgtacttaaagggttttgttttgttttggttttccagcgaagggaagctcctccagtgaagtagcctcttgtgtaactaatttgtggtaaagtagttgattcagccctcagaagaaaacttttgtttagagccctccctaaatatacatctgtgtatttgagttggctttgctacccatttacaaataagaggacagataactgctttgcaaattcaagagcctcccctgggttaacaaatgagccatccccagggcccacccccaggaaggccacagtgctgggcggcatccctgcagaggaaagacaggacccggggcccgcctcacaccccagtggatttggagttgcttaaaatagactccggccttcaccaatagtctctctgcaagacagaaacctccatcaaacctcacatttgtgaactcaaacgatgtgcaatacatttttttctctttccttgaaaataaaaagagaaacaagtattttgctatatataaagacaacaaaagaaatctcctaacaaaagaactaagaggcccagccctcagaaacccttcagtgctacattttgtggctttttaatggaaaccaagccaatgttatagacgtttggactgatttgtggaaaggaggggggaagagggagaaggatcattcaaaagttacccaaagggcttattgactctttctattgttaaacaaatgatttccacaaacagatcaggaagcactaggttggcagagacactttgtctagtgtattctcttcacagtgccaggaaagagtggtttctgcgtgtgtatatttgtaatatatgatatttttcatgctccactattttattaaaaataaaatatgttctttagtttgctgct

SEQ ID NO: 135348 - DNA, 3282 bp, Homo sapiens
  Payload ID: 6454
  Gene Symbol: FZD10
  Gene Name: frizzled class receptor 10
  ENST ID: ENST00000539839
  CDS Start-End: 583-1947
cgagtcttctcatcccgggacgcaaacctcgaaacagctgccggctggtcccggccgaggccggcgcagggagggaggagccgcccgggctgtgggggcgccgcgagctgggccggcctcggtgtgcccgcgccgccagcccgctccagacgcgccacctgggcgctccaagaagaggccgaagtttgccgcggccgtgagttggagctcgcgccgggccgctgcgccgggagctccgggggcttccctcgcttcccggtattgtttgcaaactttgctgctctccgccgcggcccccaactcggcggacgccgggcgcggagagccgagccgggggcgctgtgcgcagcgctcgggccaggccgggcgggcatgggcgggggcccgagcaggggtggagagccggggccagcagcagcccgtgcccgggagcggcggcgctgaggggcgcggagctccccgcgaggacacgtccaacgccagcatgcagcgcccgggcccccgcctgtggctggtcctgcaggtgatgggctcgtgcgccgccatcagctccatggacatggagcgcccgggcgacggcaaatgccagcccatcgagatcccgatgtgcaaggacatcggctacaacatgactcgtatgcccaacctgatgggccacgagaaccagcgcgaggcagccatccagttgcacgagttcgcgccgctggtggagtacggctgccacggccacctccgcttcttcctgtgctcgctgtacgcgccgatgtgcaccgagcaggtctctacccccatccccgcctgccgggtcatgtgcgagcaggcccggctcaagtgctccccgattatggagcagttcaacttcaagtggcccgactccctggactgccggaaactccccaacaagaacgaccccaactacctgtgcatggaggcgcccaacaacggctcggacgagcccacccggggctcgggcctgttcccgccgctgttccggccgcagcggccccacagcgcgcaggagcacccgctgaaggacgggggccccgggcgcggcggctgcgacaacccgggcaagttccaccacgtggagaagagcgcgtcgtgcgcgccgctctgcacgcccggcgtggacgtgtactggagccgcgaggacaagcgcttcgcagtggtctggctggccatctgggcggtgctgtgcttcttctccagcgccttcaccgtgctcaccttcctcatcgacccggcccgcttccgctaccccgagcgccccatcatcttcctctccatgtgctactgcgtctactccgtgggctacctcatccgcctcttcgccggcgccgagagcatcgcctgcgaccgggacagcggccagctctatgtcatccaggagggactggagagcaccggctgcacgctggtcttcctggtcctctactacttcggcatggccagctcgctgtggtgggtggtcctcacgctcacctggttcctggccgccggcaagaagtggggccacgaggccatcgaagccaacagcagctacttccacctggcagcctgggccatcccggcggtgaagaccatcctgatcctggtcatgcgcagggtggcgggggacgagctcaccggggtctgctacgtgggcagcatggacgtcaacgcgctcaccggcttcgtgctcattcccctggcctgctacctggtcatcggcacgtccttcatcctctcgggcttcgtggccctgttccacatccggagggtgatgaagacgggcggcgagaacacggacaagctggagaagctcatggtgcgtatcgggctcttctctgtgctgtacaccgtgccggccacctgtgtgatcgcctgctacttttacgaacgcctcaacatggattactggaagatcctggcggcgcagcacaagtgcaaaatgaacaaccagactaaaacgctggactgcctgatggccgcctccatccccgccgtggagatcttcatggtgaagatctttatgctgctggtggtggggatcaccagcgggatgtggatttggacctccaagactctgcagtcctggcagcaggtgtgcagccgtaggttaaagaagaagagccggagaaaaccggccagcgtgatcaccagcggtgggatttacaaaaaagcccagcatccccagaaaactcaccacgggaaatatgagatccctgcccagtcgcccacctgcgtgtgaacagggctggagggaagggcacaggggcgcccggagctaagatgtggtgcttttcttggttgtgtttttctttcttcttcttctttttttttttttataaaagcaaaagagaaatacataaaaaagtgtttaccctgaaattcaggatgctgtgatacactgaaaggaaaaatgtacttaaagggttttgttttgttttggttttccagcgaagggaagctcctccagtgaagtagcctcttgtgtaactaatttgtggtaaagtagttgattcagccctcagaagaaaacttttgtttagagccctccctaaatatacatctgtgtatttgagttggctttgctacccatttacaaataagaggacagataactgctttgcaaattcaagagcctcccctgggttaacaaatgagccatccccagggcccacccccaggaaggccacagtgctgggcggcatccctgcagaggaaagacaggacccggggcccgcctcacaccccagtggatttggagttgcttaaaatagactccggccttcaccaatagtctctctgcaagacagaaacctccatcaaacctcacatttgtgaactcaaacgatgtgcaatacatttttttctctttccttgaaaataaaaagagaaacaagtattttgctatatataaagacaacaaaagaaatctcctaacaaaagaactaagaggcccagccctcagaaacccttcagtgctacattttgtggctttttaatggaaaccaagccaatgttatagacgtttggactgatttgtggaaaggaggggggaagagggagaaggatcattcaaaagttacccaaagggcttattgactctttctattgttaaacaaatgatttccacaaacagatcaggaagcactaggttggcagagacactttgtctagtgtattctcttcacagtgccaggaaagagtggtttctgcgtgtgtatatttgtaatatatgatatttttcatgctccactattttattaaaaataaaatatgttctttagtttgctgcta

SEQ ID NO: 135349 - DNA, 2112 bp, Homo sapiens
  Payload ID: 6455
  Gene Symbol: FZD2
  Gene Name: frizzled class receptor 2
  Uniprot ID: Q14332
  ENST ID: ENST00000315323
  CDS Start-End: 231-1928
cagcgcgcggtgtctccggctgctcagtccgaccgcggcaagcaagcgggcaggcgcaccgccccctcccccgcccggcctccccaactctgcggccgcgagtaaagtttgcaaagaggcgcgggaggcggcagccgcagcgaggaggcggcggggaagaagcgcagtctccgggttgggggcgggggcggggggggcgccaaggagccgggtggggggcggcggccagcatgcggccccgcagcgccctgccccgcctgctgctgccgctgctgctgctgcccgccgccgggccggcccagttccacggggagaagggcatctccatcccggaccacggcttctgccagcccatctccatcccgctgtgcacggacatcgcctacaaccagaccatcatgcccaaccttctgggccacacgaaccaggaggacgcaggcctagaggtgcaccagttctatccgctggtgaaggtgcagtgctcgcccgaactgcgcttcttcctgtgctccatgtacgcacccgtgtgcaccgtgctggaacaggccatcccgccgtgccgctctatctgtgagcgcgcgcgccagggctgcgaagccctcatgaacaagttcggttttcagtggcccgagcgcctgcgctgcgagcacttcccgcgccacggcgccgagcagatctgcgtcggccagaaccactccgaggacggagctcccgcgctactcaccaccgcgccgccgccgggactgcagccgggtgccgggggcaccccgggtggcccgggcggcggcggcgctcccccgcgctacgccacgctggagcaccccttccactgcccgcgcgtcctcaaggtgccatcctatctcagctacaagtttctgggcgagcgtgattgtgctgcgccctgcgaacctgcgcggcccgatggttccatgttcttctcacaggaggagacgcgtttcgcgcgcctctggatcctcacctggtcggtgctgtgctgcgcttccaccttcttcactgtcaccacgtacttggtagacatgcagcgcttccgctacccagagcggcctatcatttttctgtcgggctgctacaccatggtgtcggtggcctacatcgcgggcttcgtgctccaggagcgcgtggtgtgcaacgagcgcttctccgaggacggttaccgcacggtggtgcagggcaccaagaaggagggctgcaccatcctcttcatgatgctctacttcttcagcatggccagctccatctggtgggtcatcctgtcgctcacctggttcctggcagccggcatgaagtggggccacgaggccatcgaggccaactctcagtacttccacctggccgcctgggccgtgccggccgtcaagaccatcaccatcctggccatgggccagatcgacggcgacctgctgagcggcgtgtgcttcgtaggcctcaacagcctggacccgctgcggggcttcgtgctagcgccgctcttcgtgtacctgttcatcggcacgtccttcctcctggccggcttcgtgtcgctcttccgcatccgcaccatcatgaagcacgacggcaccaagaccgaaaagctggagcggctcatggtgcgcatcggcgtcttctccgtgctctacacagtgcccgccaccatcgtcatcgcttgctacttctacgagcaggccttccgcgagcactgggagcgctcgtgggtgagccagcactgcaagagcctggccatcccgtgcccggcgcactacacgccgcgcatgtcgcccgacttcacggtctacatgatcaaatacctcatgacgctcatcgtgggcatcacgtcgggcttctggatctggtcgggcaagacgctgcactcgtggaggaagttctacactcgcctcaccaacagccgacacggtgagaccaccgtgtgagggacgcccccaggccggaaccgcgcggcgctttcctccgcccggggtggggcccctacagactccgtattttatttttttaaataaaaaacgatcgaaaccatttcacttttaggttgctttttaaaagagaactctctgcccaacacccccacaaggtttgtaattaaaactgtaaatagtc

SEQ ID NO: 135350 - DNA, 13736 bp, Homo sapiens
  Payload ID: 6456
  Gene Symbol: FZD3
  Gene Name: frizzled class receptor 3
  Uniprot ID: Q9NPG1
  ENST ID: ENST00000240093
  CDS Start-End: 479-2479
gccgctccgggtacctgagggacgcgcggccgcccgcggcaggcggtgcagcccccccaccccttggagccaggcgccggggtctgaggatagcatttctcaagacctgacttatggagcacttgtaacctgagatatttcagttgaaggaagaaatagctcttctcctaagatggaatctgtggtttgggaatgtggttgatcaacttgatatgttggccaaatgtgccccatgtaataaaatgaaaagaagagacaagatgatgtcattttcccatattgtgaaaccaaaaacaaacgccttttgtgagaccaagctaacaaacctctgacggtgcgaagagtatttaactgtttgaagaatttaacagtaagatacagaagaagtaccttcgagctgagacctgcaggtgtataaatatctaaaatacatattgaataggcctgatcatctgaatctccttcagacccaggaaggatggctatgacttggattgtcttctctctttggcccttgactgtgttcatggggcatataggtgggcacagtttgttttcttgtgaacctattaccttgaggatgtgccaagatttgccttataatactaccttcatgcctaatcttctgaatcattatgaccaacagacagcagctttggcaatggagccattccaccctatggtgaatctggattgttctcgggatttccggccttttctttgtgcactctacgctcctatttgtatggaatatggacgtgtcacacttccctgtcgtaggctgtgtcagcgggcttacagtgagtgttcgaagctcatggagatgtttggtgttccttggcctgaagatatggaatgcagtaggttcccagattgtgatgagccatatcctcgacttgtggatctgaatttagctggagaaccaactgaaggagccccagtggcagtgcagagagactatggtttttggtgtccccgagagttaaaaattgatcctgatctgggttattcttttctgcatgtgcgtgattgttcacctccttgtccaaatatgtacttcagaagagaagaactgtcatttgctcgctatttcataggattgatttcaatcatttgcctctcggccacattgtttacttttttaacttttttgattgatgtcacaagattccgttatcctgaaaggcctattatattttatgcagtctgctacatgatggtatccttaattttcttcattggatttttgcttgaagatcgagtagcctgcaatgcatccatccctgcacaatataaggcttccacagtgacacaaggatctcataataaagcctgtaccatgctttttatgatactctatttttttactatggctggcagtgtatggtgggtaattcttaccatcacatggtttttagcagctgtgccaaagtggggtagtgaagctattgagaagaaagcattgctgtttcacgccagtgcatggggcatccccggaactctaaccatcatccttttagcgatgaataaaattgaaggtgacaatattagtggcgtgtgttttgttggcctctacgatgttgatgcattgagatattttgttcttgctcccctctgcctgtatgtggtagttggggtttctctcctcttagctggcattatatccctaaacagagttcgaattgagattccattagaaaaggagaaccaagataaattagtgaagtttatgatccggatcggtgttttcagcattctttatctcgtaccactcttggttgtaattggatgctacttttatgagcaagcttaccggggcatctgggaaacaacgtggatacaagaacgctgcagagaatatcacattccatgtccatatcaggttactcaaatgagtcgtccagacttgattctctttctgatgaaatacctgatggctctcatagttggcattccctctgtattttgggttggaagcaaaaagacatgctttgaatgggccagtttttttcatggtcgtaggaaaaaagagatagtgaatgagagccgacaggtactccaggaacctgattttgctcagtctctcctgagggatccaaatactcctatcataagaaagtcaaggggaacttccactcaaggaacatccacccatgcttcttcaactcagctggctatggtggatgatcaaagaagcaaagcaggaagcatccacagcaaagtgagcagctaccacggcagcctccacagatcacgtgatggcaggtacacgccctgcagttacagaggaatggaggagagactacctcatggcagcatgtcacgactaacagatcactccaggcatagtagttctcatcggctcaatgaacagtcacgacatagcagcatcagagatctcagtaataatcccatgactcatatcacacatggcaccagcatgaatcgggttattgaagaagatggaaccagtgcttaatttgtcttgtctaaggtggaaatcttgtgctgtttaaaaagcagattttattctttgccttttgcatgactgatagctgtaactcacagttaacatgctttcagtcaagtacagattgtgtccactggaaaggtaaatgattgcttttttatattgcatcaaacttggaacatcaaggcatccaaaacactaagaattctatcatcacaaaaataattcgtctttctaggttatgaagagataattatttgtctggtaagcatttttataaacccactcattttatatttagaaaaatcctaaatgtgtggtgactgctttgtagtgaactttcatatactataaactagttgtgagataacattctggtagctcagttaataaaacaatttcagaattaaagaaattttctatgcaaggtttacttctcagatgaacagtaggactttgtagttttatttccactaagtgaaaaaagaactgtgtttttaaactgtaggagaatttaataaatcagcaagggtattttagctaatagaataaaagtgcaacagaagaatttgattagtctatgaaaggttctcttaaaattctatcgaaataatcttcatgcagagatattcagggtttggattagcagtggaataaagagatgggcattgtttcccctataattgtgctgtttttataacttttgtaaatattactttttctggctgtgtttttataacttatccatatgcatgatggaaaaattttaatttgtagccatcttttcccatgtaatagtattgattcatagagaacttaatgttcaaaatttgctttgtggaggcatgtaataagataaacatcatacattataaggtaaccacaattacaaaatggcaaaacattttctctgtattcattgttgtatttttctacagtgagatgtgatcttgccaaagccaccagaccttggcttccaggccctcctgtagtgagttgattgtctgcacttgccttgcccaatagccagtaggctacagcttttgccccacacccttattttcagattctggatcattcttgtttacaactgaaatatatataacctcagtccaaagtggtgattgatttgagtatttgaaaattgttgtagctaaatgaagcatgattagtcttagtatgaatatcatttaatctttaaaaaatcaagtaaaaatgtttatctgataatgtttaaataatttacaatataaactgtaaaacttattaggcatgaaatcaatcagaagagaaagaaaaatgctggaacatgcttgatgtattatgtaaaaagcatatttaaacaagggtcctcaaccctgactgcagataagaatcacttgggttacttcagatgcctaacaccttcctctcatacaaataagaattggtagctttcttaaaaaaaaaaaaaaaaaaaaaaagcgctccaggtgattctaatctgcagcctggcttgaaactcactactttaacttgcccctgatgatctgtcggcatcatatatcacatgaacatccacatggattctgtctttcgcttttatatcattatctaatattcagttgttctgcacctgatgccaaattctgggctgtactcctagagagacttactcagtaaggccaaagtgataggactttaaaatctgtagttataaaaataccgcaggtgattcttacggaggtaatccaagaatcatactttgaagaattattctagactctgaagaggcctggctctgccttatgctattatagtttatgacctttaacaatttaactctccgagcctcagttcccttgtttgtaaatgaagatagaagataaatacgtactctacctacctcacaaagctgtcagattaagatcaagtgaaaaaaattatgtgaaagctctttgaaaactgtaaagcattatgaatgataagggattaggttattgtggatttaagaggtgtgaggactgctatagtacattccttgacgtgtgttgaattcatgtatactttctttcttaccctttaaaacaaactgccaagaaattaggtgttgaaaaagaatattctcatcaggcagcaaagtcagttttctgatagtaataatttgtctattatgttatatatttcaaagtacatgtatgataatatgacttattcttcatgagagatatttgaatatttggcccaaaatgtttttcatttttctctgtgttcattgcctttctccttggagctggagttaatgctcaaagcaggcaggtctgaattccctcataaccgacaattagtaaacattttctctgaaagccaaacatataacaacttatttatcaataattcatgaagcttttgtctgagaatctctcctgcaaacagcatgagagaactaaaacaaacattcacaaacaaaaataagttaaaatagaaggtaccagtttgggctcgaagatgttgtcatccattgccatctgcattatattatcaactgccaaaatgttaattggttttcttttacaagtgggccaagtatagacagttaagtgaacatcactatgaaaatcttaactttgtgcttctagatttttagataatcatttgtattttctctattaaattgtgggtatgtatgggaatactatattgacttttcagttactttcagtaagtatcttaattttgtcccacaaaatttatgtaatattaatccatggttttaaacaacagtattcagtttgggcagcagttttaagtctaactagcttaaaccaatctgaataagtctggacagttttcctaccatatgtttaactttgattggcatatgataatgtttagtgttttcttttttcagttgacaactgagaaaataatagttctctctaacatgttaatatattatcaaaaggttttcaaaaagtactttgatttcagcaactttttttattcaataactagacaaaagatctaagataatattaaactcaaaacagtttgtttcaaagaacaattggttaataactcagctggcacagggattcatacacagtttttcaataaatatttaaatgaacaattcatgtcacacaacttgcttttaccctagtactgagtctcacatcaaagaaatttgaaagatctataacctatgtgaaatgaagtctctgctttaccagaataatatgtggcaggtaataaatatgtaaagtacaccaaatgaaacatattttgcatagataacagtccatatcactattataattaaagaaatatatgtacagacatgtaccaatccttttaattaattttagaagatgaacagtgattcttagaagtgagtaattagactccttttagtcttatgctgttagatctttgtggaccagctgagtaaatgaatcttcaaatcaacctttctttttctgctgctcttagagcagatttataaaaatcctaagaatgtcttcaaattagaaaaatttactacattttaacctacctcatcagtttctttgtgataatagctgaaaataactcaaactgtacccatcttagttaggctatatctctgtgaaatgaaaggaaccacttaattttttttatataaattagtgaatcatttgctggagcttagaaaatattaacataccaaaatttcattatgatgatatttatattgctttttgacatgccaaaggtacatttacatattaccatatttggatgacttacatagtctggtgtaatgaaaattcccctgggattggaattttaagactcatgatgtcaactgggctggtcattttatttctctgagtctttgtttcttcaatgtaaaatgtggataaggtaatttttggttttagcctccctcactggatattgtaaggatcaaatgaaatagtatttattataatgctctgtaacccataaattattctacttaaaaaaattttttatagagacagggtcttgctctgtcacacaggctggagagcagtggcataatcatagttcattataaccttgaactcctaggctcaagcagtcctccagcttcagcctcccaagtagctaagactgtaggcatgcaccactacacctggctaattttaatttttttttctttttttgagacggagtctggctttgttgcccaggctggagtgcagtggcacaatctcagctcactgcaacctccacctcccaggttcaagtgattcttctgtctcagcctcccgagtaactgggactacaggtgcgtgccaccacatccagctagtttttgtatttttagtggagatggagttttgccatgttggtctcaaactcctgacctcaagtgatctgcccacctcagcctcccaaagtgctaggattacaggcatgagtcactgcacctggcttaattttaatttttttaattttttgtagagatgagtctcactatgttgaccaggctggtcttgaactcctggcctcctaaagcactgggattacaagcatgagccaccatgcctgatccataaattgttctactgataccatttggttttgttagaatttgggggggctatagaaaacaaggttacagtcttcattagtatttctttttagcaataacaacaaaataggcaattagaccagtgttcatttggtacagtctttaaatcggtcatccaattaacctttaaaaagtaggttatgctcttaaattgtattggttctttaatatgtgttataccagagtatgcctcaaattttatgtagttgaatttgtagaacaaatttggggatattcattttatttttccttttatatgaaattgtataagtacattagcttgacttaaattataaaaaaaaatatatatgaagaagaatgtagaccctataatgttttttgtctttgactttttggcttttatgtacctcattttttctgattgagaaaaagttttgaaaaagtgattcacttgttggttttcattgtggcaaaactttaaattttaagtcatcacactatgagaattgtttgtacacatttataatttttttaaagtatgtaaagtaaggattttttctccattcttcactcacaaaggatagcatttttatggaacctagatttacaaaggaacttgtgattcttttcaatgcttttgtgtcgttttacagctgattaagaaaaaatgtttacatttaattcagctgtatttcctagtagctgtataatcttacacattattcttatataattttgacctattttatatgaaaataattgtattggcatctcttcataatttaattctcttctctccttcttttgttccgattagatgaatttgggaaaggagtaggaagactaggtatcgcatgccttccgtctgattgtaatcagtctcctgggttttttactaatttaatcttaatcctgtgcttctttagtcatcaaattgatataggattacaattttctctcaggatccaagtcttctaagaatgaaaatgttgaagtctacccagaaccagccatccttgtagacatttctatttggttgatttataaagatttaatatataaagatttaatatgagttaaacatgtttcttattctgtgatctctaattagaaagtaaaattctgttgccataaatataaaagaaagttttcacttatattttagtcaaacaccaaaccactgcattacttacttcctataagacacagtagttcaatctgttgaaaggcattgaaggataatttccttcagattactttttaaatcatcatctgcctcaggaaattctttcttgaatttttttgttggtgtgaaagcgttgcttatactttatgctcattttattggtcactgtcaccagtttttcccgataaagattaaaaatgttttttaccttgaaataattcagattttgaagattcactgtttcattattttgctaattaccattaactagtaaagttagtttttaaagtttttttaaggttgatattttatcatattcctggagtaggatggattactttattattattgtagctttaaggttttttgttgtataagtcagcttgtttgtatatgctaaattgcagatatttctttgtgttgtgcttattggtttttttttttaacttagagcttaataatttctattttctatcctggagtctaaaattaaacaaaaaaatctattttctaaattggcaggatttttttaatgattagtaaaactgtattattttatttttaaaaatacaataggattttgagtcaggaaacttgacttctactcttgcctctcttttgcagttagctgtgtaactttggataaggcattttatctcgtggtgcctccatttttctcattctctagggaacaagagaattagtttaggtagcgtctaaaattccgcccagctctcatttggttctcatttgaccattttataatcattattttggtctcatttttattcttcttattcatcccatgaactagatcaacttgtattattttactagatcaacctgtattattaacgtcatttacatgtaaattgatgggattcagatattttatcaactgtttttccattagtgattttaagtaattttaaagaaggaaaattatattacagataataaaaatgaaagaaagttataaatattggacatggcttttttaaatgggaaagtcttcttaagcaccaatataagcaccttaaattgatacatagaaaagaatgacataacgttttgtggtctttgttctcttaaatatgaatatagctagttagcctaaaatttacacaaaatgtattcaagatcaaattagtgaacaaagcaatggttcgtatggctaatttaaaagcaattcaatttaccaatattaaaataattataaaatgtaaaagaaatttcagaggagttgattgaaaattttttgttcagtaattattcttaaactgcattcttaggtttattacataaatatagttgccagattgccatgggcaagtgaatgtcttcatttgaaatattattagagatcaatgtggcttgttatttttaatttttttctggctatacagaaaatgtttctggaaaaattccttaattgtcatctgatataatgtagagattgaggccagacgcagtggctcacgcctgtaatcccagcactttgggaggccaaggtgggcagatcacctgaggtcaggagttcgagaccagcctgatgaacatggcaaatccccttctgtactaaaaatacaaaaattagccaggcgcagtggctcacgcctgtaatcccaacactttgggaggccgaggcgggcggatcacgaggtcaggagatcaagaccgtcctggctaacatggtgagaccctgtctctactaaaaacaaaaaaattagttgggcatggtggcgggcacctgtagtcccagccactcgggaggctgaggcaggagaatggcgtgaacccgggaggcggagcttgcagtgagctgagatcgcaccgctgcactccagcctgggcaacggagcgagactctatctcaaaaaaaaaaaaagaaaaaaaaaaaagtagagattgcattagttccatatctccgcagagttctctggtagattaaatgttctctgtgcactaggccaaggaagttcctgttacctttgaaaatcattgtgtttgctctgattgtctacattagctcatatcagtcttttgaacactggttcaaatctgggtgttgggttaggatctgatgagtagagaatagtggaaagttgatataggaaggtatactggtttctggtgtgattctttagctacatttattccttgtcttatgtcatttcactggatcatgtaactgtcctggctttcagaaattatattagatgcccagcctttctcattcagagatgcctgtattattatgttatttcgattgcctaccaaaaaaaaaaaaaaaagaaaaggtttgtttttagttctctgcctctgcaagtctttgtgatcacatttgttaaattgaatctgagattcaaatatttcatttaatattttctgggttttgataatgggatattctgtaagataaagcaagtaatcctagagtgatttactttatgtttagccatccaccattttcctatttctctactcctcccattctccatttttaaaaggaaattaacaaatgtcttcctttatccctgcctcagataatttttccctgaactcatcttgtcagcagaaacatttaatgtgaaataattctgtatttctgagacaagatcaacacagtagttctttacattgagctgaggtgaatgtatacttaaaaatactctattttctttttatatgaacttaaaatttttaaaatcatatatgggactccccaatgtgaaaatattagtctggacattctcttgccatcaggtgctatttctaccttagctgtgagttagactaaatccaaatttcgtatcattcatctttttataatatttaacttccctagaatcaccccatttcatgtctttaaccccaacttccaacaacttttctgcttttattttcaaatgtcaaattgtatttttgtgttttattttctcattgaagtgtaaaagtatcacatatatgaaggaatggctggtttagacatttactttggcatagtaaagattgatattgataccacccaccatcctttcctctagccccagaaagaaaagtttgacaactcaaaaacgattaaattatcttatcttgttatttaatagaacaatggaagctgtttcgtcaaaattaaaatactttaccaaaaaaatacttttttgtattttaatctgatagtgaatttggggattatttatgtaaatgtatcataattaatagtaattatgagttatttcactctctgtaatttgtgatacccaagattcatatttatttaatgtgaggtgttttttgaggcttttttgttttatcttgttttcttaactttttacagtgttgttagattatcgcggtcatctcggcatgtggatcgctcctcctgtagatcagctgttctctcttagagtcaggacaaggaggtttttgctacatggtcgtagttggataatacagcattattctgaactatctgaaattgctggttttattggtcaaaaatgatcagatgctagcaatttcataatagatatattcaagaaggaaccaaactttaaaagatcttttagaataggtatgttaacttctcatcctaaccctatcaatatatcagaggctttatgaaggagactctacagataaccacaaatcttatcaagaaaattctccttaaaaaaagttatcctttattttgttgttaaatttcccagtttttaaaagtgttttatcaaaatgacttcataattgaagcaaataccttttggaagtatatatgttacataagactttcactaaatctgtgcgtaaagcttttataatctgagatattgttatgtattaggtttgtgcaaacctaatataaaagggttcatctgtaagtatcatttagaggcaaaataatttccccctcacatctaatgtggactcaaattttggcaactggaatgttatcctcttggtaggcattctaaattaatgaatactgctatgtggtgtagtaaacaaatttgccataaaatgccatttaaggattttctttttacctttatttcattataaaagtatatgagttgaagatcatataaaaaatatgaaactcctacacaggaaatccccaattttgtgatttaataggttgtaaaaagagttgttccaaattcagactacatctcatcatataaataatattatgaataataagggtaaaagattagccaacaaaagctaatctagtacaccccatagaggtactccaggtgtcttggttttggataaatttttatagtggagaaaggttactttgatctctcaataattgcttggtacacttcttcctaggcaatatgctcatgataccctcttcatgtgacctattcctcaaatgctgcattctccaaaacttccttacctgccttctatcccctagtcattcttatcaatacttccaaaatataacctatctcaagtgttagaaatttgctttaactaatttatattaaagtgttagtgactatagcccttttatctctcttaaagagaaatctgcattaaaagcaaacacattgctgttagctcaaattaatgtcagtgagtagaatcttaagctttaaaacaaaagtggaaataatttaaattagtgttgatgggactattttgaggcaagagataccattaagtgacctagcttggaaatctgccccctttgcccaaacccatgtgatgtctgaaactactgtatattttcaatgaccttgagaaagggagctagtcatttgtatttatgggccttatgaagtcagggcctgctgatcctgttttttaagttcaagcgcaatgcctgaagcatcctagatctccttcaccctcattctacctgacagacagctaggtctgtcttccagctctttctcattgatactacctttacatatgaatactatccatgcttgttaaaaaaaaaaaaagtctttccccattttactgttacaatttttcaagagctataaaggtagaaaaagtattccttttcattattctaaaaaatatgtcatttttaaatagctggcacttagcagtttagttttccaaactttattctgaatcaaattgctgaggtgattctaaatgtctaatgttgatttatcatataaacatctaattagaaagtgtttatgctaaagacttgtattttgtggcattagttcttcatgtttcttttttatatgtttattaaaattgttcacttccaaatgagtggaaaagttgctgttgttgggatgtacagggcaagtgcacttggttagagcatgaactgggaatttcacattctctgatgtgctttgcactctgctcttgtagatttattttgtttacagtagactgatgtcagtttttgtaaatgttttttcttagcactttaactgtgagtgtacaaactgattttaaatgtagtggttgtatattttggttataaattggagatttttaataaaattaaataattctcttttctgtca

SEQ ID NO: 135351 - DNA, 580 bp, Homo sapiens
  Payload ID: 6456
  Gene Symbol: FZD3
  Gene Name: frizzled class receptor 3
  ENST ID: ENST00000523546
  CDS Start-End: 475-580
gaaagctcgctgtcgctgggaggcgcgcgccggcgttcctcggccgctccgggtacctgagggacgcgcggccgcccgcggcaggcggtgcagcccccccaccccttggagccaggcgccggggtctgagatatttcagttgaaggaagaaatagctcttctcctaagatggaatctgtggtttgggaatgtggttgatcaacttgatatgttggccaaatgtgccccatgtaataaaatgaaaagaagagacaagatgatgtcattttcccatattgtgaaaccaaaaacaaacgccttttgtgagaccaagctaacaaacctctgacggtgcgaagagtatttaactgtttgaagaatttaacagtaagatacagaagaagtaccttcgagctgagacctgcaggtgtataaatatctaaaatacatattgaataggcctgatcatctgaatctccttcagacccaggaaggatggctatgacttggattgtcttctctctttggcccttgactgtgttcatggggcatataggtgggcacagtttgttttcttgtgaacctattaccttgaggatgt

SEQ ID NO: 135352 - DNA, 13740 bp, Homo sapiens
  Payload ID: 6456
  Gene Symbol: FZD3
  Gene Name: frizzled class receptor 3
  Uniprot ID: Q9NPG1
  ENST ID: ENST00000537916
  CDS Start-End: 484-2484
ggtgctcgcgaaagctcgctgtcgctgggaggcgcgcgccggcgttcctcggccgctccgggtacctgagggacgcgcggccgcccgcggcaggcggtgcagcccccccaccccttggagccaggcgccggggtctgagatatttcagttgaaggaagaaatagctcttctcctaagatggaatctgtggtttgggaatgtggttgatcaacttgatatgttggccaaatgtgccccatgtaataaaatgaaaagaagagacaagatgatgtcattttcccatattgtgaaaccaaaaacaaacgccttttgtgagaccaagctaacaaacctctgacggtgcgaagagtatttaactgtttgaagaatttaacagtaagatacagaagaagtaccttcgagctgagacctgcaggtgtataaatatctaaaatacatattgaataggcctgatcatctgaatctccttcagacccaggaaggatggctatgacttggattgtcttctctctttggcccttgactgtgttcatggggcatataggtgggcacagtttgttttcttgtgaacctattaccttgaggatgtgccaagatttgccttataatactaccttcatgcctaatcttctgaatcattatgaccaacagacagcagctttggcaatggagccattccaccctatggtgaatctggattgttctcgggatttccggccttttctttgtgcactctacgctcctatttgtatggaatatggacgtgtcacacttccctgtcgtaggctgtgtcagcgggcttacagtgagtgttcgaagctcatggagatgtttggtgttccttggcctgaagatatggaatgcagtaggttcccagattgtgatgagccatatcctcgacttgtggatctgaatttagctggagaaccaactgaaggagccccagtggcagtgcagagagactatggtttttggtgtccccgagagttaaaaattgatcctgatctgggttattcttttctgcatgtgcgtgattgttcacctccttgtccaaatatgtacttcagaagagaagaactgtcatttgctcgctatttcataggattgatttcaatcatttgcctctcggccacattgtttacttttttaacttttttgattgatgtcacaagattccgttatcctgaaaggcctattatattttatgcagtctgctacatgatggtatccttaattttcttcattggatttttgcttgaagatcgagtagcctgcaatgcatccatccctgcacaatataaggcttccacagtgacacaaggatctcataataaagcctgtaccatgctttttatgatactctatttttttactatggctggcagtgtatggtgggtaattcttaccatcacatggtttttagcagctgtgccaaagtggggtagtgaagctattgagaagaaagcattgctgtttcacgccagtgcatggggcatccccggaactctaaccatcatccttttagcgatgaataaaattgaaggtgacaatattagtggcgtgtgttttgttggcctctacgatgttgatgcattgagatattttgttcttgctcccctctgcctgtatgtggtagttggggtttctctcctcttagctggcattatatccctaaacagagttcgaattgagattccattagaaaaggagaaccaagataaattagtgaagtttatgatccggatcggtgttttcagcattctttatctcgtaccactcttggttgtaattggatgctacttttatgagcaagcttaccggggcatctgggaaacaacgtggatacaagaacgctgcagagaatatcacattccatgtccatatcaggttactcaaatgagtcgtccagacttgattctctttctgatgaaatacctgatggctctcatagttggcattccctctgtattttgggttggaagcaaaaagacatgctttgaatgggccagtttttttcatggtcgtaggaaaaaagagatagtgaatgagagccgacaggtactccaggaacctgattttgctcagtctctcctgagggatccaaatactcctatcataagaaagtcaaggggaacttccactcaaggaacatccacccatgcttcttcaactcagctggctatggtggatgatcaaagaagcaaagcaggaagcatccacagcaaagtgagcagctaccacggcagcctccacagatcacgtgatggcaggtacacgccctgcagttacagaggaatggaggagagactacctcatggcagcatgtcacgactaacagatcactccaggcatagtagttctcatcggctcaatgaacagtcacgacatagcagcatcagagatctcagtaataatcccatgactcatatcacacatggcaccagcatgaatcgggttattgaagaagatggaaccagtgcttaatttgtcttgtctaaggtggaaatcttgtgctgtttaaaaagcagattttattctttgccttttgcatgactgatagctgtaactcacagttaacatgctttcagtcaagtacagattgtgtccactggaaaggtaaatgattgcttttttatattgcatcaaacttggaacatcaaggcatccaaaacactaagaattctatcatcacaaaaataattcgtctttctaggttatgaagagataattatttgtctggtaagcatttttataaacccactcattttatatttagaaaaatcctaaatgtgtggtgactgctttgtagtgaactttcatatactataaactagttgtgagataacattctggtagctcagttaataaaacaatttcagaattaaagaaattttctatgcaaggtttacttctcagatgaacagtaggactttgtagttttatttccactaagtgaaaaaagaactgtgtttttaaactgtaggagaatttaataaatcagcaagggtattttagctaatagaataaaagtgcaacagaagaatttgattagtctatgaaaggttctcttaaaattctatcgaaataatcttcatgcagagatattcagggtttggattagcagtggaataaagagatgggcattgtttcccctataattgtgctgtttttataacttttgtaaatattactttttctggctgtgtttttataacttatccatatgcatgatggaaaaattttaatttgtagccatcttttcccatgtaatagtattgattcatagagaacttaatgttcaaaatttgctttgtggaggcatgtaataagataaacatcatacattataaggtaaccacaattacaaaatggcaaaacattttctctgtattcattgttgtatttttctacagtgagatgtgatcttgccaaagccaccagaccttggcttccaggccctcctgtagtgagttgattgtctgcacttgccttgcccaatagccagtaggctacagcttttgccccacacccttattttcagattctggatcattcttgtttacaactgaaatatatataacctcagtccaaagtggtgattgatttgagtatttgaaaattgttgtagctaaatgaagcatgattagtcttagtatgaatatcatttaatctttaaaaaatcaagtaaaaatgtttatctgataatgtttaaataatttacaatataaactgtaaaacttattaggcatgaaatcaatcagaagagaaagaaaaatgctggaacatgcttgatgtattatgtaaaaagcatatttaaacaagggtcctcaaccctgactgcagataagaatcacttgggttacttcagatgcctaacaccttcctctcatacaaataagaattggtagctttcttaaaaaaaaaaaaaaaaaaaaaaagcgctccaggtgattctaatctgcagcctggcttgaaactcactactttaacttgcccctgatgatctgtcggcatcatatatcacatgaacatccacatggattctgtctttcgcttttatatcattatctaatattcagttgttctgcacctgatgccaaattctgggctgtactcctagagagacttactcagtaaggccaaagtgataggactttaaaatctgtagttataaaaataccgcaggtgattcttacggaggtaatccaagaatcatactttgaagaattattctagactctgaagaggcctggctctgccttatgctattatagtttatgacctttaacaatttaactctccgagcctcagttcccttgtttgtaaatgaagatagaagataaatacgtactctacctacctcacaaagctgtcagattaagatcaagtgaaaaaaattatgtgaaagctctttgaaaactgtaaagcattatgaatgataagggattaggttattgtggatttaagaggtgtgaggactgctatagtacattccttgacgtgtgttgaattcatgtatactttctttcttaccctttaaaacaaactgccaagaaattaggtgttgaaaaagaatattctcatcaggcagcaaagtcagttttctgatagtaataatttgtctattatgttatatatttcaaagtacatgtatgataatatgacttattcttcatgagagatatttgaatatttggcccaaaatgtttttcatttttctctgtgttcattgcctttctccttggagctggagttaatgctcaaagcaggcaggtctgaattccctcataaccgacaattagtaaacattttctctgaaagccaaacatataacaacttatttatcaataattcatgaagcttttgtctgagaatctctcctgcaaacagcatgagagaactaaaacaaacattcacaaacaaaaataagttaaaatagaaggtaccagtttgggctcgaagatgttgtcatccattgccatctgcattatattatcaactgccaaaatgttaattggttttcttttacaagtgggccaagtatagacagttaagtgaacatcactatgaaaatcttaactttgtgcttctagatttttagataatcatttgtattttctctattaaattgtgggtatgtatgggaatactatattgacttttcagttactttcagtaagtatcttaattttgtcccacaaaatttatgtaatattaatccatggttttaaacaacagtattcagtttgggcagcagttttaagtctaactagcttaaaccaatctgaataagtctggacagttttcctaccatatgtttaactttgattggcatatgataatgtttagtgttttcttttttcagttgacaactgagaaaataatagttctctctaacatgttaatatattatcaaaaggttttcaaaaagtactttgatttcagcaactttttttattcaataactagacaaaagatctaagataatattaaactcaaaacagtttgtttcaaagaacaattggttaataactcagctggcacagggattcatacacagtttttcaataaatatttaaatgaacaattcatgtcacacaacttgcttttaccctagtactgagtctcacatcaaagaaatttgaaagatctataacctatgtgaaatgaagtctctgctttaccagaataatatgtggcaggtaataaatatgtaaagtacaccaaatgaaacatattttgcatagataacagtccatatcactattataattaaagaaatatatgtacagacatgtaccaatccttttaattaattttagaagatgaacagtgattcttagaagtgagtaattagactccttttagtcttatgctgttagatctttgtggaccagctgagtaaatgaatcttcaaatcaacctttctttttctgctgctcttagagcagatttataaaaatcctaagaatgtcttcaaattagaaaaatttactacattttaacctacctcatcagtttctttgtgataatagctgaaaataactcaaactgtacccatcttagttaggctatatctctgtgaaatgaaaggaaccacttaattttttttatataaattagtgaatcatttgctggagcttagaaaatattaacataccaaaatttcattatgatgatatttatattgctttttgacatgccaaaggtacatttacatattaccatatttggatgacttacatagtctggtgtaatgaaaattcccctgggattggaattttaagactcatgatgtcaactgggctggtcattttatttctctgagtctttgtttcttcaatgtaaaatgtggataaggtaatttttggttttagcctccctcactggatattgtaaggatcaaatgaaatagtatttattataatgctctgtaacccataaattattctacttaaaaaaattttttatagagacagggtcttgctctgtcacacaggctggagagcagtggcataatcatagttcattataaccttgaactcctaggctcaagcagtcctccagcttcagcctcccaagtagctaagactgtaggcatgcaccactacacctggctaattttaatttttttttctttttttgagacggagtctggctttgttgcccaggctggagtgcagtggcacaatctcagctcactgcaacctccacctcccaggttcaagtgattcttctgtctcagcctcccgagtaactgggactacaggtgcgtgccaccacatccagctagtttttgtatttttagtggagatggagttttgccatgttggtctcaaactcctgacctcaagtgatctgcccacctcagcctcccaaagtgctaggattacaggcatgagtcactgcacctggcttaattttaatttttttaattttttgtagagatgagtctcactatgttgaccaggctggtcttgaactcctggcctcctaaagcactgggattacaagcatgagccaccatgcctgatccataaattgttctactgataccatttggttttgttagaatttgggggggctatagaaaacaaggttacagtcttcattagtatttctttttagcaataacaacaaaataggcaattagaccagtgttcatttggtacagtctttaaatcggtcatccaattaacctttaaaaagtaggttatgctcttaaattgtattggttctttaatatgtgttataccagagtatgcctcaaattttatgtagttgaatttgtagaacaaatttggggatattcattttatttttccttttatatgaaattgtataagtacattagcttgacttaaattataaaaaaaaatatatatgaagaagaatgtagaccctataatgttttttgtctttgactttttggcttttatgtacctcattttttctgattgagaaaaagttttgaaaaagtgattcacttgttggttttcattgtggcaaaactttaaattttaagtcatcacactatgagaattgtttgtacacatttataatttttttaaagtatgtaaagtaaggattttttctccattcttcactcacaaaggatagcatttttatggaacctagatttacaaaggaacttgtgattcttttcaatgcttttgtgtcgttttacagctgattaagaaaaaatgtttacatttaattcagctgtatttcctagtagctgtataatcttacacattattcttatataattttgacctattttatatgaaaataattgtattggcatctcttcataatttaattctcttctctccttcttttgttccgattagatgaatttgggaaaggagtaggaagactaggtatcgcatgccttccgtctgattgtaatcagtctcctgggttttttactaatttaatcttaatcctgtgcttctttagtcatcaaattgatataggattacaattttctctcaggatccaagtcttctaagaatgaaaatgttgaagtctacccagaaccagccatccttgtagacatttctatttggttgatttataaagatttaatatataaagatttaatatgagttaaacatgtttcttattctgtgatctctaattagaaagtaaaattctgttgccataaatataaaagaaagttttcacttatattttagtcaaacaccaaaccactgcattacttacttcctataagacacagtagttcaatctgttgaaaggcattgaaggataatttccttcagattactttttaaatcatcatctgcctcaggaaattctttcttgaatttttttgttggtgtgaaagcgttgcttatactttatgctcattttattggtcactgtcaccagtttttcccgataaagattaaaaatgttttttaccttgaaataattcagattttgaagattcactgtttcattattttgctaattaccattaactagtaaagttagtttttaaagtttttttaaggttgatattttatcatattcctggagtaggatggattactttattattattgtagctttaaggttttttgttgtataagtcagcttgtttgtatatgctaaattgcagatatttctttgtgttgtgcttattggtttttttttttaacttagagcttaataatttctattttctatcctggagtctaaaattaaacaaaaaaatctattttctaaattggcaggatttttttaatgattagtaaaactgtattattttatttttaaaaatacaataggattttgagtcaggaaacttgacttctactcttgcctctcttttgcagttagctgtgtaactttggataaggcattttatctcgtggtgcctccatttttctcattctctagggaacaagagaattagtttaggtagcgtctaaaattccgcccagctctcatttggttctcatttgaccattttataatcattattttggtctcatttttattcttcttattcatcccatgaactagatcaacttgtattattttactagatcaacctgtattattaacgtcatttacatgtaaattgatgggattcagatattttatcaactgtttttccattagtgattttaagtaattttaaagaaggaaaattatattacagataataaaaatgaaagaaagttataaatattggacatggcttttttaaatgggaaagtcttcttaagcaccaatataagcaccttaaattgatacatagaaaagaatgacataacgttttgtggtctttgttctcttaaatatgaatatagctagttagcctaaaatttacacaaaatgtattcaagatcaaattagtgaacaaagcaatggttcgtatggctaatttaaaagcaattcaatttaccaatattaaaataattataaaatgtaaaagaaatttcagaggagttgattgaaaattttttgttcagtaattattcttaaactgcattcttaggtttattacataaatatagttgccagattgccatgggcaagtgaatgtcttcatttgaaatattattagagatcaatgtggcttgttatttttaatttttttctggctatacagaaaatgtttctggaaaaattccttaattgtcatctgatataatgtagagattgaggccagacgcagtggctcacgcctgtaatcccagcactttgggaggccaaggtgggcagatcacctgaggtcaggagttcgagaccagcctgatgaacatggcaaatccccttctgtactaaaaatacaaaaattagccaggcgcagtggctcacgcctgtaatcccaacactttgggaggccgaggcgggcggatcacgaggtcaggagatcaagaccgtcctggctaacatggtgagaccctgtctctactaaaaacaaaaaaattagttgggcatggtggcgggcacctgtagtcccagccactcgggaggctgaggcaggagaatggcgtgaacccgggaggcggagcttgcagtgagctgagatcgcaccgctgcactccagcctgggcaacggagcgagactctatctcaaaaaaaaaaaaagaaaaaaaaaaaagtagagattgcattagttccatatctccgcagagttctctggtagattaaatgttctctgtgcactaggccaaggaagttcctgttacctttgaaaatcattgtgtttgctctgattgtctacattagctcatatcagtcttttgaacactggttcaaatctgggtgttgggttaggatctgatgagtagagaatagtggaaagttgatataggaaggtatactggtttctggtgtgattctttagctacatttattccttgtcttatgtcatttcactggatcatgtaactgtcctggctttcagaaattatattagatgcccagcctttctcattcagagatgcctgtattattatgttatttcgattgcctaccaaaaaaaaaaaaaaaagaaaaggtttgtttttagttctctgcctctgcaagtctttgtgatcacatttgttaaattgaatctgagattcaaatatttcatttaatattttctgggttttgataatgggatattctgtaagataaagcaagtaatcctagagtgatttactttatgtttagccatccaccattttcctatttctctactcctcccattctccatttttaaaaggaaattaacaaatgtcttcctttatccctgcctcagataatttttccctgaactcatcttgtcagcagaaacatttaatgtgaaataattctgtatttctgagacaagatcaacacagtagttctttacattgagctgaggtgaatgtatacttaaaaatactctattttctttttatatgaacttaaaatttttaaaatcatatatgggactccccaatgtgaaaatattagtctggacattctcttgccatcaggtgctatttctaccttagctgtgagttagactaaatccaaatttcgtatcattcatctttttataatatttaacttccctagaatcaccccatttcatgtctttaaccccaacttccaacaacttttctgcttttattttcaaatgtcaaattgtatttttgtgttttattttctcattgaagtgtaaaagtatcacatatatgaaggaatggctggtttagacatttactttggcatagtaaagattgatattgataccacccaccatcctttcctctagccccagaaagaaaagtttgacaactcaaaaacgattaaattatcttatcttgttatttaatagaacaatggaagctgtttcgtcaaaattaaaatactttaccaaaaaaatacttttttgtattttaatctgatagtgaatttggggattatttatgtaaatgtatcataattaatagtaattatgagttatttcactctctgtaatttgtgatacccaagattcatatttatttaatgtgaggtgttttttgaggcttttttgttttatcttgttttcttaactttttacagtgttgttagattatcgcggtcatctcggcatgtggatcgctcctcctgtagatcagctgttctctcttagagtcaggacaaggaggtttttgctacatggtcgtagttggataatacagcattattctgaactatctgaaattgctggttttattggtcaaaaatgatcagatgctagcaatttcataatagatatattcaagaaggaaccaaactttaaaagatcttttagaataggtatgttaacttctcatcctaaccctatcaatatatcagaggctttatgaaggagactctacagataaccacaaatcttatcaagaaaattctccttaaaaaaagttatcctttattttgttgttaaatttcccagtttttaaaagtgttttatcaaaatgacttcataattgaagcaaataccttttggaagtatatatgttacataagactttcactaaatctgtgcgtaaagcttttataatctgagatattgttatgtattaggtttgtgcaaacctaatataaaagggttcatctgtaagtatcatttagaggcaaaataatttccccctcacatctaatgtggactcaaattttggcaactggaatgttatcctcttggtaggcattctaaattaatgaatactgctatgtggtgtagtaaacaaatttgccataaaatgccatttaaggattttctttttacctttatttcattataaaagtatatgagttgaagatcatataaaaaatatgaaactcctacacaggaaatccccaattttgtgatttaataggttgtaaaaagagttgttccaaattcagactacatctcatcatataaataatattatgaataataagggtaaaagattagccaacaaaagctaatctagtacaccccatagaggtactccaggtgtcttggttttggataaatttttatagtggagaaaggttactttgatctctcaataattgcttggtacacttcttcctaggcaatatgctcatgataccctcttcatgtgacctattcctcaaatgctgcattctccaaaacttccttacctgccttctatcccctagtcattcttatcaatacttccaaaatataacctatctcaagtgttagaaatttgctttaactaatttatattaaagtgttagtgactatagcccttttatctctcttaaagagaaatctgcattaaaagcaaacacattgctgttagctcaaattaatgtcagtgagtagaatcttaagctttaaaacaaaagtggaaataatttaaattagtgttgatgggactattttgaggcaagagataccattaagtgacctagcttggaaatctgccccctttgcccaaacccatgtgatgtctgaaactactgtatattttcaatgaccttgagaaagggagctagtcatttgtatttatgggccttatgaagtcagggcctgctgatcctgttttttaagttcaagcgcaatgcctgaagcatcctagatctccttcaccctcattctacctgacagacagctaggtctgtcttccagctctttctcattgatactacctttacatatgaatactatccatgcttgttaaaaaaaaaaaaagtctttccccattttactgttacaatttttcaagagctataaaggtagaaaaagtattccttttcattattctaaaaaatatgtcatttttaaatagctggcacttagcagtttagttttccaaactttattctgaatcaaattgctgaggtgattctaaatgtctaatgttgatttatcatataaacatctaattagaaagtgtttatgctaaagacttgtattttgtggcattagttcttcatgtttcttttttatatgtttattaaaattgttcacttccaaatgagtggaaaagttgctgttgttgggatgtacagggcaagtgcacttggttagagcatgaactgggaatttcacattctctgatgtgctttgcactctgctcttgtagatttattttgtttacagtagactgatgtcagtttttgtaaatgttttttcttagcactttaactgtgagtgtacaaactgattttaaatgtagtggttgtatattttggttataaattggagatttttaataaaattaaataattctcttttctgtc

SEQ ID NO: 135353 - DNA, 7383 bp, Homo sapiens
  Payload ID: 6457
  Gene Symbol: FZD4
  Gene Name: frizzled class receptor 4
  Uniprot ID: Q9ULV1
  ENST ID: ENST00000531380
  CDS Start-End: 307-1920
gctgcgcagcgctggctgctggctggcctcgcggagacgccgaacggacgcggccggcgccggcttgtgggctcgccgcctgcagccatgaccctcgcagcctgtccctcggcctcggcccgggacgtctaaaatcccacacagtcgcgcgcagctgctggagagccggccgctgccccctcgtcgccgcatcacactcccgtcccgggagctgggagcagcgcgggcagccggcgcccccgtgcaaactgggggtgtctgccagagcagccccagccgctgccgctgctacccccgatgctggccatggcctggcggggcgcagggccgagcgtcccgggggcgcccgggggcgtcggtctcagtctggggttgctcctgcagttgctgctgctcctggggccggcgcggggcttcggggacgaggaagagcggcgctgcgaccccatccgcatctccatgtgccagaacctcggctacaacgtgaccaagatgcccaacctggttgggcacgagctgcagacggacgccgagctgcagctgacaactttcacaccgctcatccagtacggctgctccagccagctgcagttcttcctttgttctgtttatgtgccaatgtgcacagagaagatcaacatccccattggcccatgcggcggcatgtgtctttcagtcaagagacgctgtgaacccgtcctgaaggaatttggatttgcctggccagagagtctgaactgcagcaaattcccaccacagaacgaccacaaccacatgtgcatggaagggccaggtgatgaagaggtgcccttacctcacaaaacccccatccagcctggggaagagtgtcactctgtgggaaccaattctgatcagtacatctgggtgaaaaggagcctgaactgtgtgctcaagtgtggctatgatgctggcttatacagccgctcagccaaggagttcactgatatctggatggctgtgtgggccagcctgtgtttcatctccactgccttcacagtactgaccttcctgatcgattcttctaggttttcctaccctgagcgccccatcatatttctcagtatgtgctataatatttatagcattgcttatattgtcaggctgactgtaggccgggaaaggatatcctgtgattttgaagaggcagcagaacctgttctcatccaagaaggacttaagaacacaggatgtgcaataattttcttgctgatgtacttttttggaatggccagctccatttggtgggttattctgacactcacttggtttttggcagcaggactcaaatggggtcatgaagccattgaaatgcacagctcttatttccacattgcagcctgggccatccccgcagtgaaaaccattgtcatcttgattatgagactggtggatgcagatgaactgactggcttgtgctatgttggaaaccaaaatctcgatgccctcaccgggttcgtggtggctcccctctttacttatttggtcattggaactttgttcattgctgcaggtttggtggccttgttcaaaattcggtcaaatcttcaaaaggatgggacaaagacagacaagttagaaagactgatggtcaagattggggtgttctcagtactgtacacagttcctgcaacgtgtgtgattgcctgttatttttatgaaatctccaactgggcactttttcggtattctgcagatgattccaacatggctgttgaaatgttgaaaatttttatgtctttgttggtgggcatcacttcaggcatgtggatttggtctgccaaaactcttcacacgtggcagaagtgttccaacagattggtgaattctggaaaggtaaagagagagaagagaggaaatggttgggtgaagcctggaaaaggcagtgagactgtggtataaggctagtcagcctccatgctttcttcattttgaaggggggaatgccagcattttggaggaaattctactaaaagttttatgcagtgaatctcagtttgaacaaactagcaacaattaagtgacccccgtcaacccactgcctcccaccccgaccccagcatcaaaaaaccaatgattttgctgcagactttggaatgatccaaaatggaaaagccagttagaggctttcaaagctgtgaaaaatcaaaacgttgatcactttagcaggttgcagcttggagcgtggaggtcctgcctagattccaggaagtccagggcgatactgttttcccctgcagggtgggatttgagctgtgagttggtaactagcagggagaaatattaacttttttaaccctttaccattttaaatactaactgggtctttcagatagcaaagcaatctataaacactggaaacgctgggttcagaaaagtgttacaagagttttatagtttggctgatgtaacataaacatcttctgtggtgcgctgtctgctgtttagaactttgtggactgcactcccaagaagtggtgttagaatctttcagtgcctttgtcataaaacagttatttgaacaaacaaaagtactgtactcacacacataaggtatccagtggatttttcttctctgtcttcctctcttaaatttcaacatctctcttcttggctgctgctgttttcttcattttatgttaatgactcaaaaaaggtatttttatagaatttttgtactgcagcatgcttaaagaggggaaaaggaagggtgattcactttctgacaatcacttaattcagaggaaaatgagatttactaagttgacttacctgacggaccccagagacctattgcattgagcagtggggacttaatatattttacttgtgtgattgcatctatgcagacgccagtctggaagagctgaaatgttaagtttcttggcaactttgcattcacacagattagctgtgtaatttttgtgtgtcaattacaattaaaagcacattgttggaccatgacatagtatactcaactgactttaaaactatggtcaacttcaacttgcattctcagaatgatagtgcctttaaaaatttttttattttttaaagcataagaatgttatcagaatctggtctacttaggacaatggagactttttcagttttataaagggaactgaggacagctaatccaactacttggtgcgtaattgtttcctagtaattggcaaaggctccttgtaagatttcactggaggcagtgtggcctggagtatttatatggtgcttaatgaatctccagaatgccagccagaagcctgattggttagtagggaataaagtgtagaccatatgaaatgaactgcaaactctaatagcccaggtcttaattgcctttagcagaggtatccaaagcttttaaaatttatgcatacgttcttcacaagggggtacccccagcagcctctcgaaaattgcacttctcttaaaactgtaactggcctttctcttaccttgccttaggcgttctaatcatgagatcttggggacaaattgactatgtcacaggttgctctccttgtaactcatacctgtctgcttcagcaactgctttgcaatgacatttatttattaattcatgccttaaaaaaataggaagggaagcttttttttttctttttttttttttcaatcacactttgtggaaaaacatttccagggactcaaaattccaaaaaggtggtcaaattctggaagtaagcatttcctcttttttaaaaatttggtttgagccttatgcccatagtttgacatttccctttcttctttcctttttgtttttgtgtggttcttgagctctctgacatcaagatgcatgtaaagtcgattgtatgttttggaaggcaaagtcttggcttttgagactgaagttaagtgggcacaggtggcccctgctgctgtgcccagtctgagtaccttggctagactctaggtcaggctccaggagcatgagaattgatccccagaagaaccattttaactccatctgatactccattgcctatgaaatgtaaaatgtgaactccctgtgctgcttgtagacagttcccataactgtccacggccctggagcacgcacccaggggcagagcctgcccttactcacgctctgctctggtgtcttgggagttgtgcagggactctggcccaggcaggggaaggaagaccaggcggtaggggactggtcttgctgttagagtatagaggtttgtaatgcagttttcttcataatgtgtcagtgattgtgtgaccaaggcagcatctagcagaaagccaggcatggagtaggtgatcgatacttgtcaatgactaaataataacaataaaagagcacttgggtgaatctgggcacctgatttctgagttttgagttctggagctagtgttttgacaatgctttgggttttgacatgccttttccacaaatctcttgccttttcagggcaaagtgtatttgatcagaagtggccatttggattagtagccttagcaatgctacagggttataggcctctcctttcacattccagacaatggagagtgtttatggtttcaggaaaagaactttgtggctgaggggtcagttaccagtgaccttcaatcaactccatcacttcttaaatcggtatttgttaaaaaaatcagttattttatttattgagtgccgactgtagtaaagccctgaaatagataatctctgttcttctaactgatctaggatggggacgcacccaggtctgctgaactttactgttcctctgggaaaggagcagggacctctggaattcccatctgtttcactgtctccattccataaatctcttcctgtgtgagccaccacacccagcctgggtctctctacttttaacacatctctcatccctttcccaggattccttccaagtcagttacaggtggttttaacagaaagcatcagctctgcttcgtgacagtctctggagaaatcccttaggaagactatgagagtaggccacaaggacatgggcccacacatctgctttggctttgccggcaattcagggcttggggtattccatgtgacttgtataggtatatttgaggacagcatcttgctagagaaaaggtgagggttgtttttctttctctgaaacctacagtaaatgggtatgattgtagcttcctcagaaatcccttggcctccagagattaaacatggtgcaatggcacctctgtccaacctcctttctggtagattcctttctcctgcttcatataggccaaacctcagggcaagggaacatgggggtagagtggtgctggccagaaccatctgcttgagctacttggttgattcatatcctctttcctttatggagacccatttcctgatctctgagactgttgctgaactggcaacttacttgggcctgaaactggagaaggggtgacatttttttaatttcagagatgctttctgattttcctctcccaggtcactgtctcacctgcactctccaaactcaggttccgggaagcttgtgtgtctagatactgaattgagattctgttcagcaccttttagctctatactctctggctcccctcatcctcatggtcactgaattaaatgcttattgtattgagaaccaagatgggacctgaggacacaaagatgagctcaacagtctcagccctagaggaatagactcagggatttcaccaggtcggtgcagtatttgatttctggtgaggtgaccacagctgcagttagggaagggagccattgagcacagactttggaaggaaccttttttttgttgtttgtttgtttgtttgtttgtttgtttgtttgagacagggtcttgctctgtcacccaggctggggcgcaatggcacgatcttggctcactgcaacctctgcctcctgggttcaagtgattctcctgccacagcctcctgaggagctgggactacaggtgcgtgctaccacgcccagctacttctgtatttttagtagagacggggtttcactgtgttggccaggctggtctcgaactcctgacctcatgatctgcccgcctcagcctcccaaagtgctgggattacaagtgtgagccaccacacctggcctggaaggaacctcttaaaatcagtttacgtcttgtattttgttctgtgatggaggacactggagagagttgctattccagtcaatcatgtcgagtcactggactctgaaaatcctattggttcctttattttatttgagtttagagttcccttctgggtttgtattatgtctggcaaatgacctgggttatcacttttcctccagggttagatcatagatcttggaaactccttagagagcattttgctcctaccaaggatcagatactggagccccacataatagatttcatttcactctagcctacatagagctttctgttgctgtctcttgccatgcacttgtgcggtgattacacacttgacagtaccaggagacaaatgacttacagatcccccgacatgcctcttccccttggcaagctcagttgccctgatagtagcatgtttctgtttctgatgtaccttttttctcttcttctttgcatcagccaattcccagaatttccccaggcaatttgtagaggacctttttggggtcctatatgagccatgtcctcaaagcttttaaacctccttgctctcctacaatattcagtacatgaccactgtcatcctagaaggcttctgaaaagaggggcaagagccactctgcgccacaaaggttgggtccatcttctctccgaggttgtgaaagttttcaaattgtactaataggctggggccctgacttggctgtgggctttgggaggggtaagctgctttctagatctctcccagtgaggcatggaggtgtttctgaattttgtctacctcacagggatgttgtgaggcttgaaaaggtcaaaaaatgatggccccttgagctctttgtaagaaaggtagatgaaatatcggatgtaatctgaaaaaaagataaaatgtgacttcccctgctctgtgcagcagtcgggctggatgctctgtggcctttcttgggtcctcatgccaccccacagctccaggaaccttgaagccaatctgggggactttcagatgtttgacaaagaggtaccaggcaaacttcctgctacacatgccctgaatgaattgctaaatttcaaaggaaatggaccctgcttttaaggatgtacaaaagtatgtctgcatcgatgtctgtactgtaaatttctaatttatcactgtacaaagaaaaccccttgctatttaattttgtattaaaggaaaataaagttttgtttgtta

SEQ ID NO: 135354 - DNA, 6708 bp, Homo sapiens
  Payload ID: 6458
  Gene Symbol: FZD5
  Gene Name: frizzled class receptor 5
  Uniprot ID: Q13467
  ENST ID: ENST00000295417
  CDS Start-End: 555-2312
ctcccggccccggggagaacgcacggcctgcccctgcccggctccgtctggatcatgcggggggctcccgaggaggagagggcgagtgaccggcctgcgccgcccctgttctgggggcgccccccactctgagtcgcccccacctgctgccatgtgccgctgccacgggtacccagcctgtcgctaaactttccgggcgccagcccggctctgagtcgcgcttctcagcggagtgacccagggacggaggacccaggctggctggggactgtctgctcttctcggcgggatccgtggagagtcctttccctggaatccgagccctaaccgtctctccccagccctatccggcgaggagcggagcgctgccagcggaggcagcgccttcccgaagcagtttatctttggacggttttctttaaaggaaaaagcaaccaacaggttgccagccccggcgccacacacgagacgccggagggagaagccccggcccggattcctctgcctgtgtgcgtccctcgcgggctgctggaggcgaggggagggagggggcgatggctcggcctgacccatccgcgccgccctcgctgttgctgctgctcctagcgcagctggtgggccgggcggccgccgcgtccaaggccccggtgtgccaggaaatcacggtgcccatgtgccgcggcatcggctacaacctgacgcacatgcccaaccagttcaaccacgacacgcaggacgaggcgggcctggaggtgcaccagttctggccgctggtggagatccaatgctcgccggacctgcgcttcttcctatgctctatgtacacgcccatctgtctgcccgactaccacaagccgctgccgccctgccgctcggtgtgcgagcgcgccaaggccggctgctcgccgctgatgcgccagtacggcttcgcctggcccgagcgcatgagctgcgaccgcctcccggtgctgggccgcgacgccgaggtcctctgcatggattacaaccgcagcgaggccaccacggcgccccccaggcctttcccagccaagcccacccttccaggcccgccaggggcgccggcctcggggggcgaatgccccgctgggggcccgttcgtgtgcaagtgtcgcgagcccttcgtgcccattctgaaggagtcacacccgctctacaacaaggtgcggacgggccaggtgcccaactgcgcggtaccctgctaccagccgtccttcagtgccgacgagcgcacgttcgccaccttctggataggcctgtggtcggtgctgtgcttcatctccacgtccaccacagtggccaccttcctcatcgacatggaacgcttccgctatcctgagcgccccatcatcttcctgtcagcctgctacctgtgcgtgtcgctgggcttcctggtgcgtctggtcgtgggccatgccagcgtggcctgcagccgcgagcacaaccacatccactacgagaccacgggccctgcactgtgcaccatcgtcttcctcctggtctacttcttcggcatggccagctccatctggtgggtcatcctgtcgctcacctggttcctggccgccggcatgaagtggggcaacgaggccatcgcgggctacgcgcagtacttccacctggctgcgtggctcatccccagcgtcaagtccatcacggcactggcgctgagctccgtggacggggacccagtggccggcatctgctacgtgggcaaccagaacctgaactcgctgcgcggcttcgtgctgggcccgctggtgctctacctgctggtgggcacgctcttcctgctggcgggcttcgtgtcgctcttccgcatccgcagcgtcatcaagcagggcggcaccaagacggacaagctggagaagctcatgatccgcatcggcatcttcacgctgctctacacggtccccgccagcattgtggtggcctgctacctgtacgagcagcactaccgcgagagctgggaggcggcgctcacctgcgcctgcccgggccacgacaccggccagccgcgcgccaagcccgagtactgggtgctcatgctcaagtacttcatgtgcctggtggtgggcatcacgtcgggcgtctggatctggtcgggcaagacggtggagtcgtggcggcgtttcaccagccgctgctgctgccgcccgcggcgcggccacaagagcgggggcgccatggccgcaggggactaccccgaggcgagcgccgcgctcacaggcaggaccgggccgccgggccccgccgccacctaccacaagcaggtgtccctgtcgcacgtgtaggaggctgccgccgagggactcggccggagagctgaggggaggggggcgttttgtttggtagttttgccaaggtcacttccgtttaccttcatggtgctgttgccccctcccgcggcgacttggagagagggaagaggggcgttttcgaggaagaacctgtcccaggtcttctccaaggggcccagctcacgtgtattctattttgcgtttcttactgccttctttatgggaaccctctttttaatttatatgtatttttcttaatttgtaactttgttgcattttggcaacaatttacctttgctttgggggctttacaatcctaaggttggcgttgtaatgaagttccacttggttcaggtttctttgaactgtgtggtctcaattgggaaaatatatttcctatacgtgtgtctttaaaaaaaaatgtgaacagtgaacgtttcggttgctgtgactgggaagttgttgggtgtgctttttcagccagcttctccttccactgcttaaagtgtccatgattctttaaggtgagctgcagtttatagccccaggtcatacctaggaggggagcataatgagctcagggcctccccaaagtgacaaggttagggagtgcttagcggttttgtgttcagccttagctttgtttatagagggaggttcagtttcttttctgtagtgcttgtaataattctcactcctaacagcaccatcgttgtgtcttgaataagttagaggtagcattatagaggatctggcataaatatttgcagtagtgagagcctaagcgatggtgattggtggagcttgaattttaggctggtgagatggcagctttgtgcctgagaggtagtgggtggttcttaagcttcagtgatcccctttttttttttttttttttttttttaaggaacttgtgttataattttggtaaaagtataaacccactccctctggacaatacttagcgacagttgctaaagggggctcctttttaaatgtaaggactgaaatggatatacttctaataagtaaatttccaacacttatttgctccaccccctcccccctcccccctccccctttatcatgttaaacagcctttttgcttttcttattcctcctctcctggagagctgtgattagaaaccacacccacccttgaatgaagtgcttgaactgggggagggaggctggctacctgtgaacaaacattggcccaaataagggaaaataagtgttcctggactttggactagtttatagccagatattccaagagcagcaagacgttgctctctgccgtctctgaaaacaaaagagatgcataacatgcttgcacaaccttttaaaatatagatcagtatagtgctacctctatagttttcttcctcttctgagaaagcctgtatattgatgatcacacacacacacactttgcaattagagaatttggtttgctttactaatctgtttaactattccttcattcattatgaacgcttatattgatgaacatacacacagaggtttctttgctattagaaaattctgtttgctttcctaatctgtttaagcattcattcatgaagagtgtggggccattactggggaaggggggtgacagtgcctcagccagcaaaataccaatgaccaggattggggactaaatttaggaagctaaaatggccagagcaattaacatttgagaaaatcctgtctaggaaaacaacttgagtgtaggcatttgtaattcacttataccaaagttggaaaagtaaaatttaagcctaggacaatttttacttcatggatgttaaatagacaaatgcatagttcccagggggaatttaaacactttactggtgggaagaaacctagtattaaagttgtaaggactctcaaaaacttcacatttattaaaatgcactgctcttacccaatttatcctctgaattaaaatttcagtggattctacaaaacctcgtacaaatagctacagaactttgtgcctattttattcctctatttattcttctaggaagaagcctcttcctagaatcttgaaatagatcccttgactgaatgccaattcctctcctgtttttcaaatgagagaaccttttctgatcaccttgaccttttccctcatttcatatgtcttcccagaaagtagacagactgctctgctgccttcagtcattgtgcctcatttgggttgtccctccttctttgtggagaaatctggaaatgatgcacagtgtatccaaaagttgtgggatgaagtggatgaaagtgatttaattcatttttagaatttttttttgttttgttttagcaacatgctgaacaactaatttactttaaaaataagccagttaaaacaaaggacgctaagcccaagtggggggcaatattagtcaggatctttggggtctaattccagaccaactttcagaagcacttctttgtctctgttctcacctctgctgtccctctcttccctcatcccctaagagagacaaagataaaagcccacctgcatccctaagtcttactgagatcagccaccccaggggagagaaactggatctacttacagccaccccctgtttccatccatatagttacttcccccaatttgcatgtgattatggaaacaagtcatgctcatgaaagcaactgtaaaataaaaggttatggagtagttcagcaacttcttcacagccagctttgtggagctggggaggacttagggcccattggagtctcttatgtgtacagcttcagggctgtccctttcagtttgattttaagcaatgcctcacttcatagcttagggggtaaggattccattcaggtaggttgtctaaaggaactaatgggacctctcagtgaattagctgaccagattttaggaaatctttttaatttctatgattttccttctcacattttgaaatggtaaaattgactggaaataatttttcttggtgccttattggttttccttgcaaacctttctcatattttctcatgaccattgccagtgaccaaggcccatgtgtgtgttgtgtgtaattgtgggcatgtacaagcttaaataacgtgccgacagcactgtttcaaagttggtattcattaggctgttgcctcctgggctggagctgcgctaatcctgacaccggctgccaggagaaaacctcatggatcacacaccaaaccttaataacagcatccgtgacctgcactctccagtacagaatgggaaccccagagctaggaaatgtagttgtatattttaatgaactgctaccccagccaaagaagcttctttcacttttgtgctctacagaaagcccaaggggggtaggagggacagagctttgaataactgctttctaacactaaatgtggccaacaggacagagcacatcacacgtataggcaggtgtgagggacagtggctaagaattgcctgctccctctgcatgctctttcttgtttccaaagtccaatcaagtgatcctgggaaacaaatctgtctggattgcggagggtggttctgaaagaactgccaagacgttaaagaagggtgaagagtaggcagaatataagtagctaacctgagtcaagactctcaaaagctagcagcctgatgacaataggatttatttcagccaggatagtgtctgtctgtgagtgcatcattttaagacagtatgacttcatgttgttacaaactatgtatagtatgtatgttttgtgggttgtatatatacataatatatattatatatatatatgagagatttggtgacttttgatacgggtttggtgcaggtgaatttattactgagccaaatgaggcacataccgagtcagtagttgaagtccagggcattcgatactgtttatgatttccatatatgtatagtgcctatcccatgctgtagtcactgttatgttaaatccagaagttacactagagccagcgatactttatttgtagacaatcaatttgaatccatatgttattactggcagatgatacatgattacagttctgaatctgtaacacttacaaaaggaaacccagagcagcttgatgagtttttgtttctgcttcgttcctgggagtcagtagaaacagcagttgtatgtggttatgttagtctcaagatacttaatttgttgaccttacttcagaaaaattttgtatgtattatatttgtgggaaggtaaaataatcatttgagatttttatcaaatatgaagattagttatttatgaaaaacaaagaaatgtctatttttctttgttcccaattaatgtagataaattttaaaatgcattaaagtaatggtaaagacaataaaaagatgctgtagaa

SEQ ID NO: 135355 - DNA, 3788 bp, Homo sapiens
  Payload ID: 6459
  Gene Symbol: FZD6
  Gene Name: frizzled class receptor 6
  Uniprot ID: O60353
  ENST ID: ENST00000358755
  CDS Start-End: 318-2438
gacctggcggcgcagtctcgcgggatcgctcagctctcgctccccgtgcggctctcgaggcagctccagtcccggacgcaaccccggagccgtctcaggtccctggggggaacggtgggttagacggggacgggaagggacagcggccttcgaccgccccccgagtaattgacccaggactcattttcaggaaagcctgaaaatgagtaaaatagtgaaatgaggaatttgaacattttatctttggatggggatcttctgaggatgcaaagagtgattcatccaagccatgtggtaaaatcaggaatttgaagaaaatggaaatgtttacatttttgttgacgtgtatttttctacccctcctaagagggcacagtctcttcacctgtgaaccaattactgttcccagatgtatgaaaatggcctacaacatgacgtttttccctaatctgatgggtcattatgaccagagtattgccgcggtggaaatggagcattttcttcctctcgcaaatctggaatgttcaccaaacattgaaactttcctctgcaaagcatttgtaccaacctgcatagaacaaattcatgtggttccaccttgtcgtaaactttgtgagaaagtatattctgattgcaaaaaattaattgacacttttgggatccgatggcctgaggagcttgaatgtgacagattacaatactgtgatgagactgttcctgtaacttttgatccacacacagaatttcttggtcctcagaagaaaacagaacaagtccaaagagacattggattttggtgtccaaggcatcttaagacttctgggggacaaggatataagtttctgggaattgaccagtgtgcgcctccatgccccaacatgtattttaaaagtgatgagctagagtttgcaaaaagttttattggaacagtttcaatattttgtctttgtgcaactctgttcacattccttacttttttaattgatgttagaagattcagatacccagagagaccaattatatattactctgtctgttacagcattgtatctcttatgtacttcattggatttttgctaggcgatagcacagcctgcaataaggcagatgagaagctagaacttggtgacactgttgtcctaggctctcaaaataaggcttgcaccgttttgttcatgcttttgtattttttcacaatggctggcactgtgtggtgggtgattcttaccattacttggttcttagctgcaggaagaaaatggagttgtgaagccatcgagcaaaaagcagtgtggtttcatgctgttgcatggggaacaccaggtttcctgactgttatgcttcttgctatgaacaaagttgaaggagacaacattagtggagtttgctttgttggcctttatgacctggatgcttctcgctactttgtactcttgccactgtgcctttgtgtgtttgttgggctctctcttcttttagctggcattatttccttaaatcatgttcgacaagtcatacaacatgatggccggaaccaagaaaaactaaagaaatttatgattcgaattggagtcttcagcggcttgtatcttgtgccattagtgacacttctcggatgttacgtctatgagcaagtgaacaggattacctgggagataacttgggtctctgatcattgtcgtcagtaccatatcccatgtccttatcaggcaaaagcaaaagctcgaccagaattggctttatttatgataaaatacctgatgacattaattgttggcatctctgctgtcttctgggttggaagcaaaaagacatgcacagaatgggctgggttttttaaacgaaatcgcaagagagatccaatcagtgaaagtcgaagagtactacaggaatcatgtgagtttttcttaaagcacaattctaaagttaaacacaaaaagaagcactataaaccaagttcacacaagctgaaggtcatttccaaatccatgggaaccagcacaggagctacagcaaatcatggcacttctgcagtagcaattactagccatgattacctaggacaagaaactttgacagaaatccaaacctcaccagaaacatcaatgagagaggtgaaagcggacggagctagcacccccaggttaagagaacaggactgtggtgaacctgcctcgccagcagcatccatctccagactctctggggaacaggtcgacgggaagggccaggcaggcagtgtatctgaaagtgcgcggagtgaaggaaggattagtccaaagagtgatattactgacactggcctggcacagagcaacaatttgcaggtccccagttcttcagaaccaagcagcctcaaaggttccacatctctgcttgttcacccggtttcaggagtgagaaaagagcagggaggtggttgtcattcagatacttgaagaacattttctctcgttactcagaagcaaatttgtgttacactggaagtgacctatgcactgttttgtaagaatcactgttacattcttcttttgcacttaaagttgcattgcctactgttatactggaaaaaatagagttcaagaataatatgactcatttcacacaaaggttaatgacaacaatatacctgaaaacagaaaatgtgcaggttaataatatttttttaatagtgtgggaggacagagttagaggaatcttccttttctatttatgaagattctactcttggtaagagtattttaagatgtactatgctattttacttttttgatataaaatcaagatatttctttgctgaagtatttaaatcttatccttgtatctttttatacatatttgaaaataagcttatatgtatttgaacttttttgaaatcctattcaagtatttttatcatgctattgtgatattttagcactttggtagcttttacactgaatttctaagaaaattgtaaaatagtcttcttttatactgtaaaaaaagatataccaaaaagtcttataataggaatttaactttaaaaacccacttattgataccttaccatctaaaatgtgtgatttttatagtctcgttttaggaatttcacagatctaaattatgtaactgaaataaggtgcttactcaaagagtgtccactattgattgtattatgctgctcactgatccttctgcatatttaaaataaaatgtcctaaagggttagtagacaaaatgttagtcttttgtatattaggccaagtgcaattgacttcccttttttaatgtttcatgaccacccattgattgtattataaccacttacagttgcttatattttttgttttaacttttgttttttaacatttagaatattacattttgtattatacagtacctttctcagacattttgtagaattcatttcggcagctcactaggattttgctgaacattaaaaagtgtgatagcgatattagtgccaatcaaatggaaaaaaggtagttttaataaacaagacacaacgtttttatacaacatactttaaaatattaaggagttttcttaattttgtttcctattaagtattattctttgggcaagattttctgatgcttttgattttctctcaatttagcatttgcttttggtttttttctctatttagcattctgttaaggcacaaaaactatgtactgtatgggaaatgttgtaaatattaccttttccacattttaaacagacaactttgaatacaaaaactttgttttgtgtgatcttttcattaataaaattatctttgt

SEQ ID NO: 135356 - DNA, 2006 bp, Homo sapiens
  Payload ID: 6459
  Gene Symbol: FZD6
  Gene Name: frizzled class receptor 6
  ENST ID: ENST00000519011
  CDS Start-End: 273-455
gtgcggctctcgaggcagctccagtcccggacgcaaccccggagccgtctcaggtccctggggggaacggtgggttagacggggacgggaagggacagcggccttcgaccgccccccgagtaattgacccaggactcattttcaggaaagcctgaaaatgagtaaaatagtgaaatgaggaatttgaacattttatctttggatggggatcttctgaggatgcaaagagtgattcatccaagccatgtggtaaaatcaggaatttgaagaaaatggaaatgtttacatttttgttgacgtgtatttttctacccctcctaagagggcacagtctcttcacctgtgaaccaattactgttcccagatgtatgaaaatggcctacaacatgacgtttttccctaatctgatgggtcattatgaccagagtattgccgcggtggaaatggagttgtgaagccatcgagcaaaaagcagtgtggtttcatgctgttgcatggggaacaccaggtttcctgactgttatgcttcttgctatgaacaaagttgaaggagacaacattagtggagtttgctttgttggcctttatgacctggatgcttctcgctactttgtactcttgccactgtgcctttgtgtgtttgttgggctctctcttcttttagctggcattatttccttaaatcatgttcgacaagtcatacaacatgatggccggaaccaagaaaaactaaagaaatttatgattcgaattggagtcttcagcggcttgtatcttgtgccattagtgacacttctcggatgttacgtctatgagcaagtgaacaggattacctgggagataacttgggtctctgatcattgtcgtcagtaccatatcccatgtccttatcaggcaaaagcaaaagctcgaccagaattggctttatttatgataaaatacctgatgacattaattgttggcatctctgctgtcttctgggttggaagcaaaaagacatgcacagaatgggctgggttttttaaacgaaatcgcaagagagatccaatcagtgaaagtcgaagagtactacaggaatcatgtgagtttttcttaaagcacaattctaaagttaaacacaaaaagaagcactataaaccaagttcacacaagctgaaggtcatttccaaatccatgggaaccagcacaggagctacagcaaatcatggcacttctgcagtagcaattactagccatgattacctaggacaagaaactttgacagaaatccaaacctcaccagaaacatcaatgagagaggtgaaagcggacggagctagcacccccaggttaagagaacaggactgtggtgaacctgcctcgccagcagcatccatctccagactctctggggaacaggtcgacgggaagggccaggcaggcagtgtatctgaaagtgcgcggagtgaaggaaggattagtccaaagagtgatattactgacactggcctggcacagagcaacaatttgcaggtccccagttcttcagaaccaagcagcctcaaaggttccacatctctgcttgttcacccggtttcaggagtgagaaaagagcagggaggtggttgtcattcagatacttgaagaacattttctctcgttactcagaagcaaatttgtgttacactggaagtgacctatgcactgttttgtaagaatcactgttacattcttcttttgcacttaaagttgcattgcctactgttatactggaaaaaatagagttcaagaataatatgactcatttcacacaaaggttaatgacaacaatatacctgaaaacagaaaatgtgcaggttaataatatttttttaatagtgtgggaggacagagttagaggaatcttccttttctatttatgaagattctactcttggtaagagtattttaagatgtactatgctattttacttttttgatataaaatcaagatatttctttgctgaagtatttaaatcttatccttg

SEQ ID NO: 135357 - DNA, 2682 bp, Homo sapiens
  Payload ID: 6459
  Gene Symbol: FZD6
  Gene Name: frizzled class receptor 6
  ENST ID: ENST00000521195
  CDS Start-End: 155-349
agtaattgacccaggactcattttcaggaaagcctgaaaatgagtaaaatagtgaaatgaggaatttgaacattttatctttggatggggatcttctgaggatgcaaagagtgattcatccaagccatgtggtaaaatcaggaatttgaagaaaatggaaatgtttacatttttgttgacgtgtatttttctacccctcctaagagggcacagtctcttcacctgtgaaccaattactgttcccagatgtatgaaaatggcctacaacatgacgtttttccctaatctgatgggtcattatgaccagagtattgccgcggtggaaatggagggtacccagactggttaagcagaaaaggaattgattataagagtagcaggtagctcatagaatcgccaggtgggctagaattcaagctcaggctgtaaggaaacatgctacagctaagatgctggcacagcattttcttcctctcgcaaatctggaatgttcaccaaacattgaaactttcctctgcaaagcatttgtaccaacctgcatagaacaaattcatgtggttccaccttgtcgtaaactttgtgagaaagtatattctgattgcaaaaaattaattgacacttttgggatccgatggcctgaggagcttgaatgtgacagattacaatactgtgatgagactgttcctgtaacttttgatccacacacagaatttcttggtcctcagaagaaaacagaacaagtccaaagagacattggattttggtgtccaaggcatcttaagacttctgggggacaaggatataagtttctgggaattgaccagtgtgcgcctccatgccccaacatgtattttaaaagtgatgagctagagtttgcaaaaagttttattggaacagtttcaatattttgtctttgtgcaactctgttcacattccttacttttttaattgatgttagaagattcagatacccagagagaccaattatatattactctgtctgttacagcattgtatctcttatgtacttcattggatttttgctaggcgatagcacagcctgcaataaggcagatgagaagctagaacttggtgacactgttgtcctaggctctcaaaataaggcttgcaccgttttgttcatgcttttgtattttttcacaatggctggcactgtgtggtgggtgattcttaccattacttggttcttagctgcaggaagaaaatggagttgtgaagccatcgagcaaaaagcagtgtggtttcatgctgttgcatggggaacaccaggtttcctgactgttatgcttcttgctatgaacaaagttgaaggagacaacattagtggagtttgctttgttggcctttatgacctggatgcttctcgctactttgtactcttgccactgtgcctttgtgtgtttgttgggctctctcttcttttagctggcattatttccttaaatcatgttcgacaagtcatacaacatgatggccggaaccaagaaaaactaaagaaatttatgattcgaattggagtcttcagcggcttgtatcttgtgccattagtgacacttctcggatgttacgtctatgagcaagtgaacaggattacctgggagataacttgggtctctgatcattgtcgtcagtaccatatcccatgtccttatcaggcaaaagcaaaagctcgaccagaattggctttatttatgataaaatacctgatgacattaattgttggcatctctgctgtcttctgggttggaagcaaaaagacatgcacagaatgggctgggttttttaaacgaaatcgcaagagagatccaatcagtgaaagtcgaagagtactacaggaatcatgtgagtttttcttaaagcacaattctaaagttaaacacaaaaagaagcactataaaccaagttcacacaagctgaaggtcatttccaaatccatgggaaccagcacaggagctacagcaaatcatggcacttctgcagtagcaattactagccatgattacctaggacaagaaactttgacagaaatccaaacctcaccagaaacatcaatgagagaggtgaaagcggacggagctagcacccccaggttaagagaacaggactgtggtgaacctgcctcgccagcagcatccatctccagactctctggggaacaggtcgacgggaagggccaggcaggcagtgtatctgaaagtgcgcggagtgaaggaaggattagtccaaagagtgatattactgacactggcctggcacagagcaacaatttgcaggtccccagttcttcagaaccaagcagcctcaaaggttccacatctctgcttgttcacccggtttcaggagtgagaaaagagcagggaggtggttgtcattcagatacttgaagaacattttctctcgttactcagaagcaaatttgtgttacactggaagtgacctatgcactgttttgtaagaatcactgttacattcttcttttgcacttaaagttgcattgcctactgttatactggaaaaaatagagttcaagaataatatgactcatttcacacaaaggttaatgacaacaatatacctgaaaacagaaaatgtgcaggttaataatatttttttaatagtgtgggaggacagagttagaggaatcttccttttctatttatg

SEQ ID NO: 135358 - DNA, 1472 bp, Homo sapiens
  Payload ID: 6459
  Gene Symbol: FZD6
  Gene Name: frizzled class receptor 6
  ENST ID: ENST00000523933
  CDS Start-End: 265-567
tctcgctccccgtgcggctctcgaggcagctccagtcccggacgcaaccccggagccgtctcaggtccctggggggaacggtgggttagacggggacgggaagggacagcggccttcgaccgccccccgagtaattgacccaggactcattttcaggaaagcctgaaaatgagtaaaatagtgaaatgaggaatttgaacattttatctttggatggggatcttctgaggatgcaaagagtgattcatccaagccatgtgatgtatgaaaatggcctacaacatgacgtttttccctaatctgatgggtcattatgaccagagtattgccgcggtggaaatggagcattttcttcctctcgcaaatctggaatgttcaccaaacattgaaactttcctctgcaaagcatttgtaccaacctgcatagaacaaattcatgtggttccaccttgtcgtaaactttgtgagaaagtatattctgattgcaaaaaattaattgacacttttgggatccgatggcctgaggagcttgaatgtgacagctgcaggaagaaaatggagttgtgaagccatcgagcaaaaagcagtgtggtttcatgctgttgcatggggaacaccaggtttcctgactgttatgcttcttgctatgaacaaagttgaaggagacaacattagtggagtttgctttgttggcctttatgacctggatgcttctcgctactttgtactcttgccactgtgcctttgtgtgtttgttgggctctctcttcttttagctggcattatttccttaaatcatgttcgacaagtcatacaacatgatggccggaaccaagaaaaactaaagaaatttatgattcgaattggagtcttcagcggcttgtatcttgtgccattagtgacacttctcggatgttacgtctatgagcaagtgaacaggattacctgggagataacttgggtctctgatcattgtcgtcagtaccatatcccatgtccttatcaggcaaaagcaaaagctcgaccagaattggctttatttatgataaaatacctgatgacattaattgttggcatctctgctgtcttctgggttggaagcaaaaagacatgcacagaatgggctgggttttttaaacgaaatcgcaagagagatccaatcagtgaaagtcgaagagtactacaggaatcatgtgagtttttcttaaagcacaattctaaagttaaacacaaaaagaagcactataaaccaagttcacacaagctgaaggtcatttccaaatccatgggaaccagcacaggagctacagcaaatcatggcacttctgcagtagcaattactagccatgattacctaggacaagaaactttgacagaaatccaaacctcaccagaaacatcaatgagagaggtgaaagcggacggagctagcacccccaggttaagagaacaggactgtggtgaacctgcct

SEQ ID NO: 135359 - DNA, 3646 bp, Homo sapiens
  Payload ID: 6459
  Gene Symbol: FZD6
  Gene Name: frizzled class receptor 6
  ENST ID: ENST00000522484
  CDS Start-End: 318-1721
gacctggcggcgcagtctcgcgggatcgctcagctctcgctccccgtgcggctctcgaggcagctccagtcccggacgcaaccccggagccgtctcaggtccctggggggaacggtgggttagacggggacgggaagggacagcggccttcgaccgccccccgagtaattgacccaggactcattttcaggaaagcctgaaaatgagtaaaatagtgaaatgaggaatttgaacattttatctttggatggggatcttctgaggatgcaaagagtgattcatccaagccatgtggtaaaatcaggaatttgaagaaaatggaaatgtttacatttttgttgacgtgtatttttctacccctcctaagagggcacagtctcttcacctgtgaaccaattactgttcccagatgtatgaaaatggcctacaacatgacgtttttccctaatctgatgggtcattatgaccagagtattgccgcggtggaaatggagcattttcttcctctcgcaaatctggaatgttcaccaaacattgaaactttcctctgcaaagcatttgtaccaacctgcatagaacaaattcatgtggttccaccttgtcgtaaactttgtgagaaagtatattctgattgcaaaaaattaattgacacttttgggatccgatggcctgaggagcttgaatgtgacagattacaatactgtgatgagactgttcctgtaacttttgatccacacacagaatttcttggtcctcagaagaaaacagaacaagtccaaagagacattggattttggtgtccaaggcatcttaagacttctgggggacaaggatataagtttctgggaattgaccagtgtgcgcctccatgccccaacatgtattttaaaagtgatgagctagagtttgcaaaaagttttattggaacagtttcaatattttgtctttgtgcaactctgttcacattccttacttttttaattgatgttagaagattcagatacccagagagaccaattatatattactctgtctgttacagcattgtatctcttatgtacttcattggatttttgctaggcgatagcacagcctgcaataaggcagatgagaagctagaacttggtgacactgttgtcctaggctctcaaaataaggcttgcaccgttttgttcatgcttttgtattttttcacaatggctggcactgtgtggtgggtgattcttaccattacttggttcttagctgcaggaagaaaatggagttgtgaagccatcgagcaaaaagcagtgtggtttcatgctgttgcatggggaacaccaggtttcctgactgttatgcttcttgctatgaacaaagttgaaggagacaacattagtggagtttgctttgttggcctttatgacctggatgcttctcgctactttgtactcttgccactgtgcctttgtgtgtttgttgggctctctcttcttttagctggcattatttccttaaatcatgttcgacaagtcatacaacatgatggccggaaccaagaaaaactaaagaaatttatgattcgaattggagtcttcagcggcttgtatcttgtgccattagtgacacttctcggatgttacgtctatgagcaagtgaacaggattacctgggagataacttgggtctctgatcattgtcgtcagtaccatatcccatgtccttatcagtccaatcagtgaaagtcgaagagtactacaggaatcatgtgagtttttcttaaagcacaattctaaagttaaacacaaaaagaagcactataaaccaagttcacacaagctgaaggtcatttccaaatccatgggaaccagcacaggagctacagcaaatcatggcacttctgcagtagcaattactagccatgattacctaggacaagaaactttgacagaaatccaaacctcaccagaaacatcaatgagagaggtgaaagcggacggagctagcacccccaggttaagagaacaggactgtggtgaacctgcctcgccagcagcatccatctccagactctctggggaacaggtcgacgggaagggccaggcaggcagtgtatctgaaagtgcgcggagtgaaggaaggattagtccaaagagtgatattactgacactggcctggcacagagcaacaatttgcaggtccccagttcttcagaaccaagcagcctcaaaggttccacatctctgcttgttcacccggtttcaggagtgagaaaagagcagggaggtggttgtcattcagatacttgaagaacattttctctcgttactcagaagcaaatttgtgttacactggaagtgacctatgcactgttttgtaagaatcactgttacattcttcttttgcacttaaagttgcattgcctactgttatactggaaaaaatagagttcaagaataatatgactcatttcacacaaaggttaatgacaacaatatacctgaaaacagaaaatgtgcaggttaataatatttttttaatagtgtgggaggacagagttagaggaatcttccttttctatttatgaagattctactcttggtaagagtattttaagatgtactatgctattttacttttttgatataaaatcaagatatttctttgctgaagtatttaaatcttatccttgtatctttttatacatatttgaaaataagcttatatgtatttgaacttttttgaaatcctattcaagtatttttatcatgctattgtgatattttagcactttggtagcttttacactgaatttctaagaaaattgtaaaatagtcttcttttatactgtaaaaaaagatataccaaaaagtcttataataggaatttaactttaaaaacccacttattgataccttaccatctaaaatgtgtgatttttatagtctcgttttaggaatttcacagatctaaattatgtaactgaaataaggtgcttactcaaagagtgtccactattgattgtattatgctgctcactgatccttctgcatatttaaaataaaatgtcctaaagggttagtagacaaaatgttagtcttttgtatattaggccaagtgcaattgacttcccttttttaatgtttcatgaccacccattgattgtattataaccacttacagttgcttatattttttgttttaacttttgttttttaacatttagaatattacattttgtattatacagtacctttctcagacattttgtagaattcatttcggcagctcactaggattttgctgaacattaaaaagtgtgatagcgatattagtgccaatcaaatggaaaaaaggtagttttaataaacaagacacaacgtttttatacaacatactttaaaatattaaggagttttcttaattttgtttcctattaagtattattctttgggcaagattttctgatgcttttgattttctctcaatttagcatttgcttttggtttttttctctatttagcattctgttaaggcacaaaaactatgtactgtatgggaaatgttgtaaatattaccttttccacattttaaacagacaactttgaatacaaaaactttgttttgtgtgatcttttcattaataaaattatctttgtataagaa

SEQ ID NO: 135360 - DNA, 3719 bp, Homo sapiens
  Payload ID: 6459
  Gene Symbol: FZD6
  Gene Name: frizzled class receptor 6
  Uniprot ID: O60353
  ENST ID: ENST00000522566
  CDS Start-End: 291-2411
cctttcgaactcaagtcacttgggcaattggctttacaaagcaaattggctccgtttaaggattcttgactcctgaaatccgcaaggaagtgggttcttttagagccagcgccaagagcttcaaaaaatccttctaagtaattgacccaggactcattttcaggaaagcctgaaaatgagtaaaatagtgaaatgaggaatttgaacattttatctttggatggggatcttctgaggatgcaaagagtgattcatccaagccatgtggtaaaatcaggaatttgaagaaaatggaaatgtttacatttttgttgacgtgtatttttctacccctcctaagagggcacagtctcttcacctgtgaaccaattactgttcccagatgtatgaaaatggcctacaacatgacgtttttccctaatctgatgggtcattatgaccagagtattgccgcggtggaaatggagcattttcttcctctcgcaaatctggaatgttcaccaaacattgaaactttcctctgcaaagcatttgtaccaacctgcatagaacaaattcatgtggttccaccttgtcgtaaactttgtgagaaagtatattctgattgcaaaaaattaattgacacttttgggatccgatggcctgaggagcttgaatgtgacagattacaatactgtgatgagactgttcctgtaacttttgatccacacacagaatttcttggtcctcagaagaaaacagaacaagtccaaagagacattggattttggtgtccaaggcatcttaagacttctgggggacaaggatataagtttctgggaattgaccagtgtgcgcctccatgccccaacatgtattttaaaagtgatgagctagagtttgcaaaaagttttattggaacagtttcaatattttgtctttgtgcaactctgttcacattccttacttttttaattgatgttagaagattcagatacccagagagaccaattatatattactctgtctgttacagcattgtatctcttatgtacttcattggatttttgctaggcgatagcacagcctgcaataaggcagatgagaagctagaacttggtgacactgttgtcctaggctctcaaaataaggcttgcaccgttttgttcatgcttttgtattttttcacaatggctggcactgtgtggtgggtgattcttaccattacttggttcttagctgcaggaagaaaatggagttgtgaagccatcgagcaaaaagcagtgtggtttcatgctgttgcatggggaacaccaggtttcctgactgttatgcttcttgctatgaacaaagttgaaggagacaacattagtggagtttgctttgttggcctttatgacctggatgcttctcgctactttgtactcttgccactgtgcctttgtgtgtttgttgggctctctcttcttttagctggcattatttccttaaatcatgttcgacaagtcatacaacatgatggccggaaccaagaaaaactaaagaaatttatgattcgaattggagtcttcagcggcttgtatcttgtgccattagtgacacttctcggatgttacgtctatgagcaagtgaacaggattacctgggagataacttgggtctctgatcattgtcgtcagtaccatatcccatgtccttatcaggcaaaagcaaaagctcgaccagaattggctttatttatgataaaatacctgatgacattaattgttggcatctctgctgtcttctgggttggaagcaaaaagacatgcacagaatgggctgggttttttaaacgaaatcgcaagagagatccaatcagtgaaagtcgaagagtactacaggaatcatgtgagtttttcttaaagcacaattctaaagttaaacacaaaaagaagcactataaaccaagttcacacaagctgaaggtcatttccaaatccatgggaaccagcacaggagctacagcaaatcatggcacttctgcagtagcaattactagccatgattacctaggacaagaaactttgacagaaatccaaacctcaccagaaacatcaatgagagaggtgaaagcggacggagctagcacccccaggttaagagaacaggactgtggtgaacctgcctcgccagcagcatccatctccagactctctggggaacaggtcgacgggaagggccaggcaggcagtgtatctgaaagtgcgcggagtgaaggaaggattagtccaaagagtgatattactgacactggcctggcacagagcaacaatttgcaggtccccagttcttcagaaccaagcagcctcaaaggttccacatctctgcttgttcacccggtttcaggagtgagaaaagagcagggaggtggttgtcattcagatacttgaagaacattttctctcgttactcagaagcaaatttgtgttacactggaagtgacctatgcactgttttgtaagaatcactgttacattcttcttttgcacttaaagttgcattgcctactgttatactggaaaaaatagagttcaagaataatatgactcatttcacacaaaggttaatgacaacaatatacctgaaaacagaaaatgtgcaggttaataatatttttttaatagtgtgggaggacagagttagaggaatcttccttttctatttatgaagattctactcttggtaagagtattttaagatgtactatgctattttacttttttgatataaaatcaagatatttctttgctgaagtatttaaatcttatccttgtatctttttatacatatttgaaaataagcttatatgtatttgaacttttttgaaatcctattcaagtatttttatcatgctattgtgatattttagcactttggtagcttttacactgaatttctaagaaaattgtaaaatagtcttcttttatactgtaaaaaaagatataccaaaaagtcttataataggaatttaactttaaaaacccacttattgataccttaccatctaaaatgtgtgatttttatagtctcgttttaggaatttcacagatctaaattatgtaactgaaataaggtgcttactcaaagagtgtccactattgattgtattatgctgctcactgatccttctgcatatttaaaataaaatgtcctaaagggttagtagacaaaatgttagtcttttgtatattaggccaagtgcaattgacttcccttttttaatgtttcatgaccacccattgattgtattataaccacttacagttgcttatattttttgttttaacttttgttttttaacatttagaatattacattttgtattatacagtacctttctcagacattttgtagaattcatttcggcagctcactaggattttgctgaacattaaaaagtgtgatagcgatattagtgccaatcaaatggaaaaaaggtagttttaataaacaagacacaacgtttttatacaacatactttaaaatattaaggagttttcttaattttgtttcctattaagtattattctttgggcaagattttctgatgcttttgattttctctcaatttagcatttgcttttggtttttttctctatttagcattctgttaaggcacaaaaactatgtactgtatgggaaatgttgtaaatattaccttttccacattttaaacagacaactttgaatacaaaaa

SEQ ID NO: 135361 - DNA, 2774 bp, Homo sapiens
  Payload ID: 6459
  Gene Symbol: FZD6
  Gene Name: frizzled class receptor 6
  Uniprot ID: O60353
  ENST ID: ENST00000523739
  CDS Start-End: 265-2289
tctcgctccccgtgcggctctcgaggcagctccagtcccggacgcaaccccggagccgtctcaggtccctggggggaacggtgggttagacggggacgggaagggacagcggccttcgaccgccccccgagtaattgacccaggactcattttcaggaaagcctgaaaatgagtaaaatagtgaaatgaggaatttgaacattttatctttggatggggatcttctgaggatgcaaagagtgattcatccaagccatgtgatgtatgaaaatggcctacaacatgacgtttttccctaatctgatgggtcattatgaccagagtattgccgcggtggaaatggagcattttcttcctctcgcaaatctggaatgttcaccaaacattgaaactttcctctgcaaagcatttgtaccaacctgcatagaacaaattcatgtggttccaccttgtcgtaaactttgtgagaaagtatattctgattgcaaaaaattaattgacacttttgggatccgatggcctgaggagcttgaatgtgacagattacaatactgtgatgagactgttcctgtaacttttgatccacacacagaatttcttggtcctcagaagaaaacagaacaagtccaaagagacattggattttggtgtccaaggcatcttaagacttctgggggacaaggatataagtttctgggaattgaccagtgtgcgcctccatgccccaacatgtattttaaaagtgatgagctagagtttgcaaaaagttttattggaacagtttcaatattttgtctttgtgcaactctgttcacattccttacttttttaattgatgttagaagattcagatacccagagagaccaattatatattactctgtctgttacagcattgtatctcttatgtacttcattggatttttgctaggcgatagcacagcctgcaataaggcagatgagaagctagaacttggtgacactgttgtcctaggctctcaaaataaggcttgcaccgttttgttcatgcttttgtattttttcacaatggctggcactgtgtggtgggtgattcttaccattacttggttcttagctgcaggaagaaaatggagttgtgaagccatcgagcaaaaagcagtgtggtttcatgctgttgcatggggaacaccaggtttcctgactgttatgcttcttgctatgaacaaagttgaaggagacaacattagtggagtttgctttgttggcctttatgacctggatgcttctcgctactttgtactcttgccactgtgcctttgtgtgtttgttgggctctctcttcttttagctggcattatttccttaaatcatgttcgacaagtcatacaacatgatggccggaaccaagaaaaactaaagaaatttatgattcgaattggagtcttcagcggcttgtatcttgtgccattagtgacacttctcggatgttacgtctatgagcaagtgaacaggattacctgggagataacttgggtctctgatcattgtcgtcagtaccatatcccatgtccttatcaggcaaaagcaaaagctcgaccagaattggctttatttatgataaaatacctgatgacattaattgttggcatctctgctgtcttctgggttggaagcaaaaagacatgcacagaatgggctgggttttttaaacgaaatcgcaagagagatccaatcagtgaaagtcgaagagtactacaggaatcatgtgagtttttcttaaagcacaattctaaagttaaacacaaaaagaagcactataaaccaagttcacacaagctgaaggtcatttccaaatccatgggaaccagcacaggagctacagcaaatcatggcacttctgcagtagcaattactagccatgattacctaggacaagaaactttgacagaaatccaaacctcaccagaaacatcaatgagagaggtgaaagcggacggagctagcacccccaggttaagagaacaggactgtggtgaacctgcctcgccagcagcatccatctccagactctctggggaacaggtcgacgggaagggccaggcaggcagtgtatctgaaagtgcgcggagtgaaggaaggattagtccaaagagtgatattactgacactggcctggcacagagcaacaatttgcaggtccccagttcttcagaaccaagcagcctcaaaggttccacatctctgcttgttcacccggtttcaggagtgagaaaagagcagggaggtggttgtcattcagatacttgaagaacattttctctcgttactcagaagcaaatttgtgttacactggaagtgacctatgcactgttttgtaagaatcactgttacattcttcttttgcacttaaagttgcattgcctactgttatactggaaaaaatagagttcaagaataatatgactcatttcacacaaaggttaatgacaacaatatacctgaaaacagaaaatgtgcaggttaataatatttttttaatagtgtgggaggacagagttagaggaatcttccttttctatttatgaagattctactcttggtaagagtattttaagatgtactatgctattttacttttttgatataaaatcaagatatttctttgctgaagtatttaaatcttatccttgtatctttttatacatatttgaaaataagcttatatgtatttgaacttttttgaaatcctattcaagtatttttatcatgctattgtgatattttagcacttt

SEQ ID NO: 135362 - DNA, 3859 bp, Homo sapiens
  Payload ID: 6460
  Gene Symbol: FZD7
  Gene Name: frizzled class receptor 7
  Uniprot ID: O75084
  ENST ID: ENST00000286201
  CDS Start-End: 62-1786
ctctcccaaccgcctcgtcgcactcctcaggctgagagcaccgctgcactcgcggccggcgatgcgggaccccggcgcggccgctccgctttcgtccctgggcctctgtgccctggtgctggcgctgctgggcgcactgtccgcgggcgccggggcgcagccgtaccacggagagaagggcatctccgtgccggaccacggcttctgccagcccatctccatcccgctgtgcacggacatcgcctacaaccagaccatcctgcccaacctgctgggccacacgaaccaagaggacgcgggcctcgaggtgcaccagttctacccgctggtgaaggtgcagtgttctcccgaactccgctttttcttatgctccatgtatgcgcccgtgtgcaccgtgctcgatcaggccatcccgccgtgtcgttctctgtgcgagcgcgcccgccagggctgcgaggcgctcatgaacaagttcggcttccagtggcccgagcggctgcgctgcgagaacttcccggtgcacggtgcgggcgagatctgcgtgggccagaacacgtcggacggctccgggggcccaggcggcggccccactgcctaccctaccgcgccctacctgccggacctgcccttcaccgcgctgcccccgggggcctcagatggcagggggcgtcccgccttccccttctcatgcccccgtcagctcaaggtgcccccgtacctgggctaccgcttcctgggtgagcgcgattgtggcgccccgtgcgaaccgggccgtgccaacggcctgatgtactttaaggaggaggagaggcgcttcgcccgcctctgggtgggcgtgtggtccgtgctgtgctgcgcctcgacgctctttaccgttctcacctacctggtggacatgcggcgcttcagctacccagagcggcccatcatcttcctgtcgggctgctacttcatggtggccgtggcgcacgtggccggcttccttctagaggaccgcgccgtgtgcgtggagcgcttctcggacgatggctaccgcacggtggcgcagggcaccaagaaggagggctgcaccatcctcttcatggtgctctacttcttcggcatggccagctccatctggtgggtcattctgtctctcacttggttcctggcggccggcatgaagtggggccacgaggccatcgaggccaactcgcagtacttccacctggccgcgtgggccgtgcccgccgtcaagaccatcactatcctggccatgggccaggtagacggggacctgctgagcggggtgtgctacgttggcctctccagtgtggacgcgctgcggggcttcgtgctggcgcctctgttcgtctacctcttcataggcacgtccttcttgctggccggcttcgtgtccctcttccgtatccgcaccatcatgaaacacgacggcaccaagaccgagaagctggagaagctcatggtgcgcatcggcgtcttcagcgtgctctacacagtgcccgccaccatcgtcctggcctgctacttctacgagcaggccttccgcgagcactgggagcgcacctggctcctgcagacgtgcaagagctatgccgtgccctgcccgcccggccacttcccgcccatgagccccgacttcaccgtcttcatgatcaagtacctgatgaccatgatcgtcggcatcaccactggcttctggatctggtcgggcaagaccctgcagtcgtggcgccgcttctaccacagacttagccacagcagcaagggggagactgcggtatgagccccggcccctccccacctttcccaccccagccctcttgcaagaggagaggcacggtagggaaaagaactgctgggtgggggcctgtttctgtaactttctccccctctactgagaagtgacctggaagtgagaagttctttgcagatttggggcgaggggtgatttggaaaagaagacctgggtggaaagcggtttggatgaaaagatttcaggcaaagacttgcaggaagatgatgataacggcgatgtgaatcgtcaaaggtacgggccagcttgtgcctaatagaaggttgagaccagcagagactgctgtgagtttctcccggctccgaggctgaacggggactgtgagcgatccccctgctgcagggcgagtggcctgtccagacccctgtgaggccccgggaaaggtacagccctgtctgcggtggctgctttgttggaaagagggagggcctcctgcggtgtgcttgtcaagcagtggtcaaaccataatctcttttcactggggccaaactggagcccagatgggttaatttccagggtcagacattacggtctctcctcccctgccccctcccgcctgtttttcctcccgtactgctttcaggtcttgtaaaataagcatttggaagtcttgggaggcctgcctgctagaatcctaatgtgaggatgcaaaagaaatgatgataacattttgagataaggccaaggagacgtggagtaggtatttttgctactttttcattttctggggaaggcaggaggcagaaagacgggtgttttatttggtctaataccctgaaaagaagtgatgacttgttgcttttcaaaacaggaatgcatttttccccttgtctttgttgtaagagacaaaagaggaaacaaaagtgtctccctgtggaaaggcataactgtgacgaaagcaacttttataggcaaagcagcgcaaatctgaggtttcccgttggttgttaatttggttgagataaacattcctttttaaggaaaagtgaagagcagtgtgctgtcacacaccgttaagccagaggttctgacttcgctaaaggaaatgtaagaggttttgttgtctgttttaaataaatttaattcggaacacatgatccaacagactatgttaaaatattcagggaaatctctcccttcatttactttttcttgctataagcctatatttaggtttcttttctatttttttctcccatttggatcctttgaggtaaaaaaacataatgtcttcagcctcataataaaggaaagttaattaaaaaaaaaaagcaaagagccattttgtcctgttttcttggttccatcaatctgtttattaaacatcatccatatgctgaccctgtctctgtgtggttgggttgggaggcgatcagcagataccatagtgaacgaagaggaaggtttgaaccatgggccccatctttaaagaaagtcattaaaagaaggtaaacttcaaagtgattctggagttctttgaaatgtgctggaagacttaaatttattaatcttaaatcatgtactttttttctgtaatagaactcggattcttttgcatgatggggtaaagcttagcagagaatcatgggagctaacctttatcccacctttgacactaccctccaatcttgcaacactatcctgtttctcagaacagtttttaaatgccaatcatagagggtactgtaaagtgtacaagttactttatatatgtaatgttcacttgagtggaactgctttttacattaaagttaaaatcgatcttgtgtttcttcaaccttcaaaactatctcatctgtcagatttttaaaactccaacacaggttttggcatcttttgtgctgtatcttttaagtgcatgtgaaatttgtaaaatagagataagtacagtatgtatattttgtaaatctcccatttttgtaagaaaatatatattgtatttatacatttttactttggatttttgttttgttggctttaaaggtctaccccactttatcacatgtacagatcacaaataaatttttttaaatacaaaatgaa

SEQ ID NO: 135363 - DNA, 4030 bp, Homo sapiens
  Payload ID: 6461
  Gene Symbol: FZD8
  Gene Name: frizzled class receptor 8
  Uniprot ID: Q9H461
  ENST ID: ENST00000374694
  CDS Start-End: 850-2934
gggaagttgggctaagggcgctgctcccgccgaggaggaggcggcggctgggcgcgggccgcgccactcaggtgtccgctccgccttccggtctggatttgctcctgggtgtccagcaggaaggagactgtgtgcacctcgcccgactgcggccggagcgcggcgctgacttttccaggcggcgggggtccgtctgtcccggcggcggacggacgaaggacggacgccggagaaagagggcggcggcctgggccgaggcgggtccccaactccggcggcggcggcggcggcttggccttgggggcgggcatgagcccccgggggccgagtggtggccgccagggctgacccggcgcggcaagcggcccggcccagccatcttgactgcgcaccgcggccccagaggaaacttgcggcgcctccgccctctctgtccggcggagtcaccgccgcccggcgcggcggggagaagtggtcgggcgcgcggagaggaggcgagcgagcgcgggacgatgagccgaggcccggccgctctgcgccgcgagggctgagcgcgacccggggccagcagagcggacctacggactgtggcgcgcgcctgcagccgccttcaaacccccggagcggcggaaaggagtgcggaagggccctgcccaggctgcgggccgcgccgctgcggacgcgcccctagaaggggttagattatcggcagacccccctcccgggcgaagcataagggagaccccagatcacccgctgtacccgtctgcggctctctcgtgggccccccccccggcacccctctgcgcgccgcctggagggcgagggcaccgggccgaggcgcacagcatggagtggggttacctgttggaagtgacctcgctgctggccgccttggcgctgctgcagcgctctagcggcgctgcggccgcctcggccaaggagctggcatgccaagagatcaccgtgccgctgtgtaagggcatcggctacaactacacctacatgcccaatcagttcaaccacgacacgcaagacgaggcgggcctggaggtgcaccagttctggccgctggtggagatccagtgctcgcccgatctcaagttcttcctgtgcagcatgtacacgcccatctgcctagaggactacaagaagccgctgccgccctgccgctcggtgtgcgagcgcgccaaggccggctgcgcgccgctcatgcgccagtacggcttcgcctggcccgaccgcatgcgctgcgaccggctgcccgagcaaggcaaccctgacacgctgtgcatggactacaaccgcaccgacctaaccaccgccgcgcccagcccgccgcgccgcctgccgccgccgccgcccggcgagcagccgccttcgggcagcggccacggccgcccgccgggggccaggcccccgcaccgcggcggcggcaggggcggtggcggcggggacgcggcggcgcccccagctcgcggcggcggcggtggcgggaaggcgcggccccctggcggcggcgcggctccctgcgagcccgggtgccagtgccgcgcgcctatggtgagcgtgtccagcgagcgccacccgctctacaaccgcgtcaagacaggccagatcgctaactgcgcgctgccctgccacaacccctttttcagccaggacgagcgcgccttcaccgtcttctggatcggcctgtggtcggtgctctgcttcgtgtccaccttcgccaccgtctccaccttccttatcgacatggagcgcttcaagtacccggagcggcccattatcttcctctcggcctgctacctcttcgtgtcggtgggctacctagtgcgcctggtggcgggccacgagaaggtggcgtgcagcggtggcgcgccgggcgcggggggcgctgggggcgcgggcggcgcggcggcgggcgcgggcgcggcgggcgcgggcgcgggcggcccgggcgggcgcggcgagtacgaggagctgggcgcggtggagcagcacgtgcgctacgagaccaccggccccgcgctgtgcaccgtggtcttcttgctggtctacttcttcggcatggccagctccatctggtgggtgatcttgtcgctcacatggttcctggcggccggtatgaagtggggcaacgaagccatcgccggctactcgcagtacttccacctggccgcgtggcttgtgcccagcgtcaagtccatcgcggtgctggcgctcagctcggtggacggcgacccggtggcgggcatctgctacgtgggcaaccagagcctggacaacctgcgcggcttcgtgctggcgccgctggtcatctacctcttcatcggcaccatgttcctgctggccggcttcgtgtccctcttccgcatccgctcggtcatcaagcaacaggacggccccaccaagacgcacaagctggagaagctgatgatccgcctgggcctgttcaccgtgctctacaccgtgcccgccgcggtggtggtcgcctgcctcttctacgagcagcacaaccgcccgcgctgggaggccacgcacaactgcccgtgcctgcgggacctgcagcccgaccaggcacgcaggcccgactacgccgtcttcatgctcaagtacttcatgtgcctagtggtgggcatcacctcgggcgtgtgggtctggtccggcaagacgctggagtcctggcgctccctgtgcacccgctgctgctgggccagcaagggcgccgcggtgggcgggggcgcgggcgccacggccgcggggggtggcggcgggccggggggcggcggcggcgggggacccggcggcggcggggggccgggcggcggcgggggctccctctacagcgacgtcagcactggcctgacgtggcggtcgggcacggcgagctccgtgtcttatccaaagcagatgccattgtcccaggtctgagcggaggggagggggcgcccaggaggggtggggaggggggcgaggagagccaagtgcagcgaagggacacttgatgggctgaggttcccaccccttcacagtgttgattgctattagcatgataatgaactcttaatggtatccattagctgggacttaaatgactcacttagaacaaagtacctggcattgaagcctcccagacccagccccttttcctccattgatgtgcggggagctcctcccgccacgcgttaatttctgttggctgaggagggtggactctgcggcgtttccagaacccgagatttggagccctccctggctgcacttggctgggtttgcagtcagatacacagatttcacctgggagaacctctttttctccctcgactcttcctacgtaaactcccacccctgacttaccctggaggaggggtgaccgccacctgatgggattgcacggtttgggtattcttaatgaccaggcaaatgccttaagtaaacaaacaagaaatgtcttaattatacaccccacgtaaatacgggtttcttacattagaggatgtatttatataattatttgttaaattgtaaaaaaaaaagtgtaaaatatgtatatatccaaagatatagtgtgtacatttttttgtaaaaagtttagaggcttacccctgtaagaacagatataagtattctattttgtcaataaaatgacttttgataaatgatttaaccattgccctctcccccgcctcttctgagctgtcacctttaaagtgcttgctaaggacgcatggggaaaatggacattttctggcttgtcattctgtacactgaccttaggcatggagaaaattacttgttaaactctagttcttaagttgttagccaagtaaatatcattgttgaactgaaatcaaaattgagtttttgcaccttccccaaagacggtgtttttcatgggagctcttttctgatccatggataacaactctcactttagtggatgtaaatggaacttctgcaaggcagtaattccccttaggccttgttatttatcctgcatggtatcactaaaggtttcaaaaccctg

SEQ ID NO: 135364 - DNA, 2338 bp, Homo sapiens
  Payload ID: 6462
  Gene Symbol: FZD9
  Gene Name: frizzled class receptor 9
  Uniprot ID: O00144
  ENST ID: ENST00000344575
  CDS Start-End: 226-2001
tggctcagcggcggctccggtggcagcggcggtggcggctaggcgggctcggcggctcctgtccctcgggcggctgcccgctcgctgcccagggcgcccggacacacgtgggcggctcagcgatggcccgcgccccgcgacgtggcgggcaggcaccggggcgcgggaccgctgagcccgagtgagccggggccgcgctcccgccttcggcccgggcctcccgggatggccgtggcgcctctgcggggggcgctgctgctgtggcagctgctggcggcgggcggcgcggcactggagatcggccgcttcgacccggagcgcgggcgcggggctgcgccgtgccaggcggtggagatccccatgtgccgcggcatcggctacaacctgacccgcatgcccaacctgctgggccacacgtcgcagggcgaggcggctgccgagctagcggagttcgcgccgctggtgcagtacggctgccacagccacctgcgcttcttcctgtgctcgctctacgcgcccatgtgcaccgaccaggtctcgacgcccattcccgcctgccggcccatgtgcgagcaggcgcgcctgcgctgcgcgcccatcatggagcagttcaacttcggctggccggactcgctcgactgcgcccggctgcccacgcgcaacgacccgcacgcgctgtgcatggaggcgcccgagaacgccacggccggccccgcggagccccacaagggcctgggcatgctgcccgtggcgccgcggcccgcgcgccctcccggagacctgggcccgggcgcgggcggcagtggcacctgcgagaaccccgagaagttccagtacgtggagaagagccgctcgtgcgcaccgcgctgcgggcccggcgtcgaggtgttctggtcccggcgcgacaaggacttcgcgctggtctggatggccgtgtggtcggcgctgtgcttcttctccaccgccttcactgtgctcaccttcttgctggagccccaccgcttccagtaccccgagcgccccatcatcttcctctccatgtgctacaacgtctactcgctggccttcctgatccgtgcggtggccggagcgcagagcgtggcctgtgaccaggaggcgggcgcgctctacgtgatccaggagggcctggagaacacgggctgcacgctggtcttcctactgctctactacttcggcatggccagctcgctctggtgggtggtcctgacgctcacctggttcctggctgccgggaagaaatggggccacgaggccatcgaggcccacggcagctatttccacatggctgcctggggcctgcccgcgctcaagaccatcgtcatcctgaccctgcgcaaggtggcgggtgatgagctgactgggctttgctacgtggccagcacggatgcagcagcgctcacgggcttcgtgctggtgcccctctctggctacctggtgctgggcagtagtttcctcctgaccggcttcgtggccctcttccacatccgcaagatcatgaagacgggcggcaccaacacagagaagctggagaagctcatggtcaagatcggggtcttctccatcctctacacggtgcccgccacctgcgtcatcgtttgctatgtctacgaacgcctcaacatggacttctggcgccttcgggccacagagcagccatgcgcagcggccgcggggcccggaggccggagggactgctcgctgccagggggctcggtgcccaccgtggcggtcttcatgctcaaaattttcatgtcactggtggtggggatcaccagcggcgtctgggtgtggagctccaagactttccagacctggcagagcctgtgctaccgcaagatagcagctggccgggcccgggccaaggcctgccgcgcccccgggagctacggacgtggcacgcactgccactataaggctcccaccgtggtcttgcacatgactaagacggacccctctttggagaaccccacacacctctagccacacaggcctggcgcggggtggctgctgccccctccttgccctccacgccctgccccctgcatcccctagagacagctgactagcagctgcccagctgtcaaggtcaggcaagtgagcaccggggactgaggatcagggcgggaccccgtgaggctcattaggggagatgggggtctcccctaatgcgggggctggaccaggctgagtccccacagggtcctagtggaggatgtggaggggcggggcagaggggtccagccggagtttatttaatgatgtaatttattgttgcgttcctctggaagctgtgactggaataaacccccgcgtggca

SEQ ID NO: 135365 - DNA, 3162 bp, Homo sapiens
  Payload ID: 6463
  Gene Symbol: FRZB
  Gene Name: frizzled-related protein
  Uniprot ID: Q92765
  ENST ID: ENST00000295113
  CDS Start-End: 611-1588
acagacgtccctgcggggctcctcctgagcgtccctcctgccagccagggtcgcagccgcagcggcggccgcagctcttagcccacacaggacttgtaaactcttactgcacccttctctcccattaggagcttttcctccctccttccccccaacccctctgtcctcctcactttggggaatttaatgctttctttagcatctttttgtgtgcgtgatctaggggaggagacaccccagagctccaactagctctcagctgaattctacttttgtttttatgtcttcctcgcctcctctcgtgtccctcttatctgactgatctgcgaagtctgatgcttctgccagagggagaggaataaatagatgttgctgcttccgaaggcttagacgttgggaaagagcagcctgggcggcaggggcggtggctggagctcggtaaagctcgtgggaccccattgggggaatttgatccaaggaagcggtgattgccgggggaggagaagctcccagatccttgtgtccacttgcagcgggggaggcggagacggcggagcgggccttttggcgtccactgcgcggctgcaccctgccccatcctgccgggatcatggtctgcggcagcccgggagggatgctgctgctgcgggccgggctgcttgccctggctgctctctgcctgctccgggtgcccggggctcgggctgcagcctgtgagcccgtccgcatccccctgtgcaagtccctgccctggaacatgactaagatgcccaaccacctgcaccacagcactcaggccaacgccatcctggccatcgagcagttcgaaggtctgctgggcacccactgcagccccgatctgctcttcttcctctgtgccatgtacgcgcccatctgcaccattgacttccagcacgagcccatcaagccctgtaagtctgtgtgcgagcgggcccggcagggctgtgagcccatactcatcaagtaccgccactcgtggccggagaacctggcctgcgaggagctgccagtgtacgacaggggcgtgtgcatctctcccgaggccatcgttactgcggacggagctgattttcctatggattctagtaacggaaactgtagaggggcaagcagtgaacgctgtaaatgtaagcctattagagctacacagaagacctatttccggaacaattacaactatgtcattcgggctaaagttaaagagataaagactaagtgccatgatgtgactgcagtagtggaggtgaaggagattctaaagtcctctctggtaaacattccacgggacactgtcaacctctataccagctctggctgcctctgccctccacttaatgttaatgaggaatatatcatcatgggctatgaagatgaggaacgttccagattactcttggtggaaggctctatagctgagaagtggaaggatcgactcggtaaaaaagttaagcgctgggatatgaagcttcgtcatcttggactcagtaaaagtgattctagcaatagtgattccactcagagtcagaagtctggcaggaactcgaacccccggcaagcacgcaactaaatcccgaaatacaaaaagtaacacagtggacttcctattaagacttacttgcattgctggactagcaaaggaaaattgcactattgcacatcatattctattgtttactataaaaatcatgtgataactgattattacttctgtttctcttttggtttctgcttctctcttctctcaacccctttgtaatggtttgggggcagactcttaagtatattgtgagttttctatttcactaatcatgagaaaaactgttcttttgcaataataataaattaaacatgctgttaccagagcctctttgctggagtctccagatgttaatttactttctgcaccccaattgggaatgcaatattggatgaaaagagaggtttctggtattcacagaaagctagatatgccttaaaacatactctgccgatctaattacagccttatttttgtatgccttttgggcattctcctcatgcttagaaagttccaaatgtttataaaggtaaaatggcagtttgaagtcaaatgtcacataggcaaagcaatcaagcaccaggaagtgtttatgaggaaacaacacccaagatgaattatttttgagactgtcaggaagtaaaataaataggagcttaagaaagaacattttgcctgattgagaagcacaactgaaaccagtagccgctggggtgttaatggtagcattcttcttttggcaatacatttgatttgttcatgaatatattaatcagcattagagaaatgaattataactagacatctgctgttatcaccatagttttgtttaatttgcttccttttaaataaacccattggtgaaagtctttttttttctcttcttttaaaataaatcagaattgccgtattgaccaggaaaagattatgtatgcacgtgcaccagggttagtttttaaaagtacatggctccataaaaatgctgtagattacagagtgataaaatatgcaggtttttttgtttttgttttttctgttgtgtgtgtgtctgtatttgtgtacatgtgtgtccttgcactcacacccaaggtggattaaaatacaggcctgcaaactggcctgcactttatcatttggatttgtgctgcttaatgctcagcgaaaaatgtctagtaaaatgaattatggttgtcaggagagaggttatttcgacttttgaaccaattgcacatttctcattacccaagctgtggtgagatcccaggggctgtggtgaacaaatgatgcttttatagatggtccctagcttacaatgattcaatttacaatgcttcaatttaacaatttgttgacttacaatgggtttatcaggatgtaacccaatgcatttcaacttacgatattttcagtttcgaatgggtttatccagatgtaaccccatcgtaaatggcggagcatctgtacttccttcctctggcagagttccttagagcctgtgccaattacttgaaagtttcattctctgccatttacatgtgtgctattagtagaaccaaatttctaagctgtggcgtgctgaaaataaaatgcttatgaagcaaaaa

SEQ ID NO: 135366 - DNA, 1434 bp, Homo sapiens
  Payload ID: 6464
  Gene Symbol: FN3K
  Gene Name: fructosamine 3 kinase
  Uniprot ID: Q9H479
  ENST ID: ENST00000300784
  CDS Start-End: 63-992
gccccgcagcgcctcagccgacaggggcttccgagcgagcagagtcccgcgccccgcactccatggagcagctgctgcgcgccgagctgcgcaccgcgaccctgcgggccttcggcggccccggcgccggctgcatcagcgagggccgagcctacgacacggacgcaggcccagtgttcgtcaaagtcaaccgcaggacgcaggcccggcagatgtttgagggggaggtggccagcctggaggccctcaggagcacgggcctggtgcgggtgccgaggcccatgaaggtcatcgacctgccgggaggtggggccgcctttgtgatggagcatttgaagatgaagagcttgagcagtcaagcatcaaaacttggagagcagatggcagatttgcatctttacaaccagaagctcagggagaagttgaaggaggaggagaacacagtgggccgaagaggtgagggtgctgagcctcagtatgtggacaagttcggcttccacacggtgacgtgctgcggcttcatcccgcaggtgaatgagtggcaggatgactggccgacctttttcgcccggcaccggctccaggcgcagctggacctcattgagaaggactatgctgaccgagaggcacgagaactctggtcccggctacaggtgaagatcccggatctgttttgtggcctagagattgtccccgcgttgctccacggggatctctggtcgggaaacgtggctgaggacgacgtggggcccattatttacgacccggcttccttctatggccattccgagtttgaactggcaatcgccttgatgtttggggggttccccagatccttcttcaccgcctaccaccggaagatccccaaggctccgggcttcgaccagcggctgctgctctaccagctgtttaactacctgaaccactggaaccacttcgggcgggagtacaggagcccttccttgggcaccatgcgaaggctgctcaagtagcggcccctgccctcccttcccctgtccccgtccccgtctccgtctccccgtccctgtccccccgtcccccgtccctgtgcccccgtccctgtccccctgttcccgtctccccgtccctccgtctccatccccccgtccccccatcctcctgtccccgtccccccgtccccgtccctccatccctgtcccccgtccccctgtccccctgtccacataccaatccccctgtccccgaccccccatccccgtcccccatctccgtccccgtcccccctgccccgtccccgtctccgttcccccgtccccatcctccatccccgtctcccatcgccgtccccccgtccccgtcccccgtccccgtcccccctgtccctgtcccccttcccccgacccctcccagatcctggggaccaataaagcccgcagcgggtctcggctggcg

SEQ ID NO: 135367 - DNA, 1849 bp, Homo sapiens
  Payload ID: 6465
  Gene Symbol: FN3KRP
  Gene Name: fructosamine 3 kinase related protein
  Uniprot ID: Q9HA64
  ENST ID: ENST00000269373
  CDS Start-End: 74-1003
atgtttgcccgctcggccgccgtctctcgagtctccgccagatccggggcgggtccgcggccgcggcgggaacatggaggagctcctgaggcgcgagctgggctgcagctctgtcagggccacgggccactcggggggcgggtgcatcagccagggccggagctacgacacggatcaaggacgagtgttcgtgaaagtgaaccccaaggcggaggccagaagaatgtttgaaggtgagatggcaagtttaactgccatcctgaaaacaaacacggtgaaagtgcccaagcccatcaaggttctggatgccccaggcggcgggagcgtgctggtgatggagcacatggacatgaggcatctgagcagtcatgctgcaaagcttggagcccagctggccgatttacaccttgataacaagaagcttggagagatgcgcctgaaggaggcgggcacagtggggagaggaggtgggcaggaggaacggccctttgtggcccggtttggatttgacgtggtgacgtgctgtggatacctcccccaggtgaatgactggcaggaggactgggtcgtgttctatgcccggcagcgcattcagccccagatggacatggtggagaaggagtctggggacagggaggccctccagctttggtctgctctgcagttaaagatccctgacctgttccgtgacctggagatcatcccagccttactccacggggacctctggggtggaaacgtagcagaggattcctctgggccggtgatttttgacccagcttctttctacggccactcggaatatgagctggcaatagctggcatgtttgggggctttagcagctccttttactccgcctaccacggcaaaatccccaaggccccaggattcgagaagcgccttcagttgtatcagctctttcactacttgaaccactggaatcattttggatcggggtacagaggatcctccctgaacatcatgaggaatctggtcaagtgagcgggccttactctggaaggaggcctcagaggtttctccacagtcctcttctgggcaaattcttgtttcttcacatgctggactagcttaagaccaatgcagtagcttatttccaagccttgcaaagtatataatatctaagaggaaaggttttgtcatcccagcgttgtccactttgtggggctttgtaggtagacggagccacactacaggcagggtatgagcagagggatgtatggagtgtgggtgactctgagcctcactgctgctgcaaggtggggaaactgtaagtgaacccctgtgggtgcgggggagggtatccggtgcgcagggaggtggccagcgcccccgggcactgctgctcataggtacctttccactgcctcctccctgctctcctgtgcaggaatgtctctgagctgttcacgttgatgcttcttggttggcaagacttgggtgtagacatgaaaccatcttactaaaagcgtcttaaaatgaccaattccagaatcaagcgtattccgttttcttcctgcatgatccctgggccctcccgcaggctgagcaagtctgtaaactgattctgggagaaaccaagctgctggccatagggtgtccttgggtacatccaggagtcttcattgcttctgttattaccccgtctcctctgccattttctacagcttgctgagttgtcattcctttgcaacattaaaatacatgctgaactcatatttttccttccttcactgttgtagtaaagagacatatttcatgaatggcattgatgctaataaatcctttgcacaaaaatttgaataaacttccagtggtttcgataacgta

SEQ ID NO: 135368 - DNA, 887 bp, Homo sapiens
  Payload ID: 6465
  Gene Symbol: FN3KRP
  Gene Name: fructosamine 3 kinase related protein
  ENST ID: ENST00000574356
  CDS Start-End: 8-445
cgggaacatggaggagctcctgaggcgcgagctgggctgcagctctgtcagggccacgggccactcggggggcgggtgcatcagccagggccggagctacgacacggatcaaggacgagtgttcgtgaaagtgaaccccaaggcggaggccagaagaatgtttgaaggtgagatggcaagtttaactgccatcctgaaaacaaacacggtgaaagtgcccaagcccatcaaggttctggatgccccaggcggcgggagcgtgctggtgatggagcacatggacatgaggcatctgagcagtcatgctgcaaagcttggagcccagctggccgatttacaccttgataacaagaagcttggagagatgcgcctgaaggaggcgggcacagtggagcataacgcgctgtcaggatcgagggaattttccggtattttaatctgctgacatttggaatccgtgtgcagcccacatggtaaatgtggggagatttgctgatgatcggaacagatcaccaggggcctgctgtaggagacggagacatgctgttagtctgttctgtgagggtccatgacggatccacccaggcggcctgtgtgggagaggaggtgggcaggaggaacggccctttgtggcccggtttggatttgacgtggtgacgtgctgtggatacctcccccaggtgaatgactggcaggaggactgggtcgtgttctatgcccggcagcgcattcagccccagatggacatggtggagaaggagtctggggacagggaggccctccagctttggtctgctctgcagttaaagatccctgacctgttccgtgacctggagatcatcccagccttactccacggggacctctggggtggaaacgtagcagag

SEQ ID NO: 135369 - DNA, 515 bp, Homo sapiens
  Payload ID: 6465
  Gene Symbol: FN3KRP
  Gene Name: fructosamine 3 kinase related protein
  ENST ID: ENST00000577128
  CDS Start-End: 133-515
cgcgagctgggctgcagctctgtcagggccacgggccactcggggggcgggtgcatcagccagggccggagctacgacacggatcaaggacgagtgttcgtgaaagtgaaccccaaggcggaggccagaagaatgtttgaaggtgagatggcaagtttaactgccatcctgaaaacaaacacggtgaaagtgcccaagcccatcaaggttctggatgccccaggcggcgggagcgtgctggtgatggagcacatggacatgaggcatctgagcagtcatgctgcaaagcttggagcccagctggccgatttacaccttgataacaagaagcttggagagatgcgcctgaaggaggcgggcacagtggggagaggaggtgggcaggaggaacggccctttgtggcccggtttggatttgacgtggtgacgtgctgtggatacctcccccaggccccaggattcgagaagcgccttcagttgtatcagctctttcactacttgaaccactggaatca

SEQ ID NO: 135370 - DNA, 625 bp, Homo sapiens
  Payload ID: 6465
  Gene Symbol: FN3KRP
  Gene Name: fructosamine 3 kinase related protein
  ENST ID: ENST00000571594
  CDS Start-End: 1-153
tttggatcggggtacagaggatcctccctgaacatcatgaggaatctggtcaaggcccctcagcagaaggcagaacagaaccgagttcctttagaatgctggtttttgtgtggagtgaggaaggaccgtgagtgtggtcagtttccaacctgacaggacctgctcccgttggccaggactgcagcttgttactttgaccctgggaagaaggtccatcccgacggcgcgtgtgccgcttggctcaaggccctgacatcgttccactcagcacagcatcaggtgcccgggacccgggacatcatcgttctgtgtcagcacatcaggtgcccggggcccggacatcatcgttccactcagcacagcatcaggtgcctgggaccctggacatcattgttctgctcagcacagcatcaggtgcccgggaccctggacgtcattctgcatcagcacaacatcaccagtgacgagagcctccccaagtggttgacgggaaggatggttcggtcctccagaggcggtggccttctcttcctcgatgacattgccgggctgcaccttgtgagaggccgtcgctgagagtgcagccaaatggaaccatcaggaggggtgtctcgggggtgtcgaa

SEQ ID NO: 135371 - DNA, 627 bp, Homo sapiens
  Payload ID: 6465
  Gene Symbol: FN3KRP
  Gene Name: fructosamine 3 kinase related protein
  ENST ID: ENST00000573158
  CDS Start-End: 254-627
gcagctctgtcagggccacgggccactcggggggcgggtgcatcagccagggccggagctacgacacggatcaaggacgagtgttcgtgaaagtgaaccccaaggcggagggagaggaggtgggcaggaggaacggccctttgtggcccggtttggatttgacgtggtgacgtgctgtggatacctcccccaggtgaatgactggcaggaggactgggtcgtgttctatgcccggcagcgcattcagccccagatggacatggtggagaaggagtctggggacagggaggccctccagctttggtctgctctgcagttaaagatccctgacctgttccgtgacctggagatcatcccagccttactccacggggacctctggggtggaaacgtagcagaggattcctctgggccggtgatttttgacccagcttctttctacggccactcggaatatgagctggcaatagctggcatgtttgggggctttagcagctccttttactccgcctaccacggcaaaatccccaaggccccaggattcgagaagcgccttcagttgtatcagctctttcactacttgaaccactggaatcattttggatcggggtacagaggatcctccct

SEQ ID NO: 135372 - DNA, 683 bp, Homo sapiens
  Payload ID: 6465
  Gene Symbol: FN3KRP
  Gene Name: fructosamine 3 kinase related protein
  ENST ID: ENST00000574206
  CDS Start-End: 1-308
aggagctcctgaggcgcgagctgggctgcagctctgtcagggccacgggccactcggggggcgggtgcatcagccagggccggagctacgacacggatcaaggacgagtgttcgtgaaagtgaaccccaaggcggaggccagaagaatgtttgaaggtgagatggcaagtttaactgccatcctgaaaacaaacacggtgaaagtgcccaagcccatcaaggttctggatgccccaggcggcgggagcgtgctggtgatggagcacatggacatgaggcatctgagcagttgctgtcgtttgatttgacagtcatgctgcaaagcttggagcccagctggccgatttacaccttgataacaagaagcttggagagatgcgcctgaaggaggcgggcacagtggggagaggaggtgggcaggaggaacggccctttgtggcccggtttggatttgacgtggtgacgtgctgtggatacctcccccaggtgaatgactggcaggaggactgggtcgtgttctatgcccggcagcgcattcagccccagatggacatggtggagaaggagtctggggacagggaggccctccagctttggtctgctctgcagttaaagatccctgacctgttccgtgacctggagatcatcccagccttactccacggggacctctggggtggaaa

SEQ ID NO: 135373 - DNA, 1422 bp, Homo sapiens
  Payload ID: 6465
  Gene Symbol: FN3KRP
  Gene Name: fructosamine 3 kinase related protein
  ENST ID: ENST00000574832
  CDS Start-End: 35-205
agatccggggcgggtccgcggccgcggcgggaacatggaggagctcctgaggcgcgagctgggctgcagctctgtcagggccacgggccactcggggggcgggtgcatcagccagggccggagctacgacacggatcaaggacgagtgttcgtgaaagtgaaccccaaggcggaggtgaaaagtgaccccaggtcactggcataggcagccagggtgccgcctgcacctgagaggtcgggtgagtctgtgtcctgtaggtggaacaggactgcagttgaggtgtcgtctgaggacactgacaggccagaagaatgtttgaaggtgagatggcaagtttaactgccatcctgaaaacaaacacggtgaaagtgcccaagcccatcaaggttctggatgccccaggcggcgggagcgtgctggtgatggagcacatggacatgaggcatctgagcagtcatgctgcaaagcttggagcccagctggccgatttacaccttgataacaagaagcttggagagatgcgcctgaaggaggcgggcacagtggggagaggaggtgggcaggaggaacggccctttgtggcccggtttggatttgacgtggtgacgtgctgtggatacctcccccaggtgaatgactggcaggaggactgggtcgtgttctatgcccggcagcgcattcagccccagatggacatggtggagaaggagtctggggacagggaggccctccagctttggtctgctctgcagttaaagatccctgacctgttccgtgacctggagatcatcccagccttactccacggggacctctggggtggaaacgtagcagaggattcctctgggccggtgatttttgacccagcttctttctacggccactcggaatatgagctggcaatagctggcatgtttgggggctttagcagctccttttactccgcctaccacggcaaaatccccaaggccccaggattcgagaagcgccttcagttgtatcagctctttcactacttgaaccactggaatcattttggatcggggtacagaggatcctccctgaacatcatgaggaatctggtcaagtgagcgggccttactctggaaggaggcctcagaggtttctccacagtcctcttctgggcaaattcttgtttcttcacatgctggactagcttaagaccaatgcagtagcttatttccaagccttgcaaagtatataatatctaagaggaaaggttttgtcatcccagcgttgtccactttgtggggctttgtaggtagacggagccacactacaggcagggtatgagcagagggatgtatggagtgtgggtgactctgagcctcactgctgctgcaaggtggggaaactgtaagtgaacccctgtgggtgcgggggagggtatccggtgcgca

SEQ ID NO: 135374 - DNA, 1462 bp, Homo sapiens
  Payload ID: 6466
  Gene Symbol: FBP1
  Gene Name: fructose-1,6-bisphosphatase 1
  Uniprot ID: P09467
  ENST ID: ENST00000375326
  CDS Start-End: 198-1214
gcaccacgagcgctgcggacactcggggcggcagtcggtctgtcagtcctcccgccaggtcccgcggcccgcacctgccgcccgcacctgcagctccgcacctgcggccagtgcctactgccctctcttgccgcccgcacctgcagccccgcacctgccgcttgcacctgcagccccgcgctctacccggttcaagcatggctgaccaggcgcccttcgacacggacgtcaacaccctgacccgcttcgtcatggaggagggcaggaaggcccgcggcacgggcgagttgacccagctgctcaactcgctctgcacagcagtcaaagccatctcttcggcggtgcgcaaggcgggcatcgcgcacctctatggcattgctggttctaccaacgtgacaggtgatcaagttaagaagctggacgtcctctccaacgacctggttatgaacatgttaaagtcatcctttgccacgtgtgttctcgtgtcagaagaagataaacacgccatcatagtggaaccggagaaaaggggtaaatatgtggtctgttttgatccccttgatggatcttccaacatcgattgccttgtgtccgttggaaccatttttggcatctatagaaagaaatcaactgatgagccttctgagaaggatgctctgcaaccaggccggaacctggtggcagccggctacgcactgtatggcagtgccaccatgctggtccttgccatggactgtggggtcaactgcttcatgctggacccggccatcggggagttcattttggtggacaaggatgtgaagataaaaaagaaaggtaaaatctacagccttaacgagggctacgccagggactttgaccctgccgtcactgagtacatccagaggaagaagttccccccagataattcagctccttatggggcccggtatgtgggctccatggtggctgatgttcatcgcactctggtctacggagggatatttctgtaccccgctaacaagaagagccccaatggaaagctgagactgctgtacgaatgcaaccccatggcctacgtcatggagaaggctgggggaatggccaccactgggaaggaggccgtgttagacgtcattcccacagacattcaccagagggcgccggtgatcttgggatcccccgacgacgtgctcgagttcctgaaggtgtatgagaagcactctgcccagtgagcacctgccctgcctgcatccggagaattgcctctacctggaccttttgtctcacacagcagtaccctgacctgctgtgcaccttacattcctagagagcagaaataaaaagcatgactatttccaccatcaaatgctgtagaatgcttggcactccctaaccaaatgctgtctccataatgccactggtgttaagatatattttgagtggatggaggagaaataaacttattcctccttaaaaaaaa

SEQ ID NO: 135375 - DNA, 1487 bp, Homo sapiens
  Payload ID: 6466
  Gene Symbol: FBP1
  Gene Name: fructose-1,6-bisphosphatase 1
  Uniprot ID: P09467
  ENST ID: ENST00000415431
  CDS Start-End: 231-1247
attgtggctaccagggggtcaggatgcgggcggtggagccctctggcctttgtgtggtagccgaggactctgtgtcagcgaccgttttccgggaaacttccgggcgagactcacatcttggaaattcaaatactcaatagctctcgaattctaggaatcttgagaagaggcctggattaaggattcagacgtgggccctcagatggccccgcgctctacccggttcaagcatggctgaccaggcgcccttcgacacggacgtcaacaccctgacccgcttcgtcatggaggagggcaggaaggcccgcggcacgggcgagttgacccagctgctcaactcgctctgcacagcagtcaaagccatctcttcggcggtgcgcaaggcgggcatcgcgcacctctatggcattgctggttctaccaacgtgacaggtgatcaagttaagaagctggacgtcctctccaacgacctggttatgaacatgttaaagtcatcctttgccacgtgtgttctcgtgtcagaagaagataaacacgccatcatagtggaaccggagaaaaggggtaaatatgtggtctgttttgatccccttgatggatcttccaacatcgattgccttgtgtccgttggaaccatttttggcatctatagaaagaaatcaactgatgagccttctgagaaggatgctctgcaaccaggccggaacctggtggcagccggctacgcactgtatggcagtgccaccatgctggtccttgccatggactgtggggtcaactgcttcatgctggacccggccatcggggagttcattttggtggacaaggatgtgaagataaaaaagaaaggtaaaatctacagccttaacgagggctacgccagggactttgaccctgccgtcactgagtacatccagaggaagaagttccccccagataattcagctccttatggggcccggtatgtgggctccatggtggctgatgttcatcgcactctggtctacggagggatatttctgtaccccgctaacaagaagagccccaatggaaagctgagactgctgtacgaatgcaaccccatggcctacgtcatggagaaggctgggggaatggccaccactgggaaggaggccgtgttagacgtcattcccacagacattcaccagagggcgccggtgatcttgggatcccccgacgacgtgctcgagttcctgaaggtgtatgagaagcactctgcccagtgagcacctgccctgcctgcatccggagaattgcctctacctggaccttttgtctcacacagcagtaccctgacctgctgtgcaccttacattcctagagagcagaaataaaaagcatgactatttccaccatcaaatgctgtagaatgcttggcactccctaaccaaatgctgtctccataatgccactggtgttaagatatattttgagtggatggaggagaaataaacttattcctcctt

SEQ ID NO: 135376 - DNA, 629 bp, Homo sapiens
  Payload ID: 6466
  Gene Symbol: FBP1
  Gene Name: fructose-1,6-bisphosphatase 1
  ENST ID: ENST00000414122
  CDS Start-End: 177-629
acatcttggaaattcaaatactcaatagctctcgaattctaggaatcttgagaagaggcctggattaaggattcagacgtgggccctcagatggctatggcattgctggttctaccaacgtgacaggtgatcaagttaagaagctggacgtcctctccaacgacctggttatgaacatgttaaagtcatcctttgccacgtgtgttctcgtgtcagaagaagataaacacgccatcatagtggaaccggagaaaaggggtaaatatgtggtctgttttgatccccttgatggatcttccaacatcgattgccttgtgtccgttggaaccatttttggcatctatagaaagaaatcaactgatgagccttctgagaaggatgctctgcaaccaggccggaacctggtggcagccggctacgcactgtatggcagtgccaccatgctggtccttgccatggactgtggggtcaactgcttcatgctggacccggccatcggggagttcattttggtggacaaggatgtgaagataaaaaagaaaggtaaaatctacagccttaacgagggctacgccagggactttgaccctgccgtcactgagtacatccagaggaagaagttcccccca

SEQ ID NO: 135377 - DNA, 1305 bp, Homo sapiens
  Payload ID: 6467
  Gene Symbol: FBP2
  Gene Name: fructose-1,6-bisphosphatase 2
  Uniprot ID: O00757
  ENST ID: ENST00000375337
  CDS Start-End: 68-1087
gctgcagccctcagaagtaagcaaggtttcctgccgggagaaaaggatttgaagcattccagccaaaatgacggacagaagccccttcgaaaccgacatgctcaccctgacccgctacgttatggaaaaggggcgtcaggccaaagggactggggagctcacccagctgctgaactcaatgctgacggccatcaaagccatctcctcggctgtgcgcaaggccggtctggcccacctgtatggaatcgcaggaagcgttaacgtgacgggagatgaggtgaagaaactggatgtgctatccaattccctggtgatcaacatggtccaatcctcctatagtacctgcgtcctggtctcagaagagaataaggacgccatcatcaccgccaaggagaagcgggggaaatacgtggtctgctttgacccactggatggatcttccaatattgactgcctggcctccatcggaaccatctttgccatctatagaaagacctcagaggatgagccttctgaaaaggatgccctgcagtgtggccgcaatattgtggccgcaggttatgcgctgtacggtagtgcaaccctggtggctctctccacagggcaaggcgtggacctcttcatgcttgacccggctcttggtgaatttgtcctggtggaaaaagatgtcaagattaagaagaaaggaaagatttacagcctgaatgagggctatgccaagtattttgatgcggccaccactgaatatgtgcagaaaaagaaattccctgaggatggcagtgctccctatggggccaggtatgtgggctccatggtggctgacgtgcaccgcaccctggtctatggaggaatcttcctgtacccagccaaccagaagagccctaagggcaagctccggctcctgtatgaatgcaatcccgtggcctacatcattgagcaggcaggaggcttggcgaccacggggacccagcctgtactggacgtgaagcccgaggcaattcaccagcgagtccccctcattctggggtcaccagaggatgtgcaggaatatctcacctgtgtgcagaaaaatcaggcaggcagctagcgagtttgaccccacatgccctcttctgtttgtcttgcaccttgtctaaggaccctaaatgaacgataaacagagatggtagctatgagtatacaaaaggtaaatccacttaatcacatacagaagagcaacaacaaactgcttacgacaggtttggaagccacaggcgattctatggtcaatgtgaaggactagaaataaaaacccacatgtggaaa

SEQ ID NO: 135378 - DNA, 11706 bp, Homo sapiens
  Payload ID: 6468
  Gene Symbol: FRYL
  Gene Name: FRY-like
  Uniprot ID: O94915
  ENST ID: ENST00000358350
  CDS Start-End: 606-9647
gaagacctcgcagcacagccgggcgcccgtcgggctctgggagagagcgagagagaaatccggttaaaatcagagtcggagggaggtttaaccacagatcggttccgatcggattattccttaaaggggacgcgccattgtcaagagaacggagccaggggcccgagggcggggaccggcggcgctggaggagcgaggcagctgtactaggactgggaacggcctagaacattccatattctgcttcacacacggtgactcactcactactgctttgtaccagtgtgcccactcgagtgcctgtaaagtacaagctccagatcaaaaaagcttctagatggatcctttccaaacttggtgtcttttctacaaactctgtgcctcaacaaccatttctaagtgagctgaagccatttattggtatcttggatggttaacatctaaatgcttaattcctgaaaccactcaagagtcataggattagatgatccaagtcaccaagaaattactgtctcaagtgatacgcttcagcgccagtcagcaaagtaaataaatactgtgcttcttccaactttcattccacttggggaaaaaaaaatatcatcatgtcaaacattacgattgacccagatgtcaaacctggtgaatatgtcatcaagagcctctttgcagaatttgctgttcaagctgaaaagaaaattgaagttgtaatggccgaacccttggagaagctattgtccagatctcttcagaggggtgaagatcttcagtttgatcagttgataagctctatgagctcagtagcagagcactgtctcccttccttacttcgcaccttgtttgactggtacagacgccaaaatggaacggaagatgaatcttatgaatataggcctcggtctagcacaaagtctaagggggatgaacagcaacgtgaaagagattatcttcttgaaaggagggacttagcagtagacttcattttttgtttagttttagttgaagttctaaagcagattcctgttcatcctgtacccgatcccttagttcatgaagttctaaacttagcttttaagcactttaaacataaggaaggatattcaggaaccaacactgggaatgtgcatattattgctgatttatatgcagaggtgataggggttcttgcccaatcaaagtttcaggctgtaaggaagaagtttgtgacagaattaaaagaactgcgacaaaaggaacaaagcccacatgtggtacaaagtgtcatcagcttaataatgggaatgaaattttttcgagtaaaaatgtatcctgtagaagattttgaagcatcatttcaatttatgcaggaatgtgctcagtatttcttagaagtgaaagataaagatataaaacatgcacttgctggtttatttgtggagattcttatccctgtagctgctgctgttaaaaatgaagtgaatgttccctgtttgaaaaattttgtggagatgctttatcagactacttttgaactgagctcgagaaagaagcattcattggctttatatccactaattacctgccttttatgtgtcagtcagaaacaattttttttaaataactggcatattttcctacagaactgtttgtcacatttaaagaataaagatccgaaaatgtctcgagttgcactggaatctttgtatagattattgtgggtttatgtaattagaataaaatgtgaaagcaacactgtaactcaaagtcgtcttatgagcatagtgtcagcactttttccaaaaggctcacgaagtgtggttcctcgtgacacacctctcaatatatttgtgaagattattcagttcattgctcaggaacgcttggattttgcaatgaaagaaataatatttgatcttctcagtgttggaaaatctactaaaactttcaccattaatccagagagaatgaacataggtctcagagtcttccttgtaatagcagacagtttgcagcagaaagatggtgaaccacccatgccaacaacaggagttattcttccctcaggaaatactcttcgtgtaaagaaaatatttctcaataaaaccttgacagatgaagaagcaaaagtcataggaatgtcagtttactatcctcaagtaagaaaagcattagatagcatcctcagacatttggacaaagaagttgggagaccaatgtgtatgaccagtgtgcagatgtctaataaggagcctgaagacatgattacgggggaaagaaaacccaagattgatttgtttagaacttgtattgctgcgattccaaggttgattcctgacggtatgagcagaactgacctgattgaattgttagcaaggctcacaattcatatggatgaagaactgcgtgctctggctttcaatactctgcaggcactaatgcttgattttccagattggcgggaggatgttctttcaggatttgtttattttattgttcgtgaagtgactgatgtccatcccacacttcttgataatgccgtaaagatgttggtacaattaataaatcagtggaaacaagcagcccaaatgcataataaaaaccaggacactcagcatggtgtagctaatggagcttctcatccccctcctctggaaaggagcccatattccaatgtattccatgtggttgaaggctttgcgcttgtcattctctgtagcagtcgacctgccactaggagactagccgtcagtgtccttagagaaatacgggctttatttgcacttctggaaatacctaagggtgatgatgaattagccatagatgtgatggacaggctaagcccatccattcttgagagcttcatacatctcactggggctgatcagactactttgctctattgccctagctcgatagatttacaaactttagcagaatggaactcttctcctattagccaccagtttgatgtgattagtccatcacatatatggatatttgcacatgtgacccaaggccaagacccatggattataagtctctccagttttttaaagcaagaaaatcttcctaaacactgctctacagctgtgagctatgcttggatgtttgcatacacaagacttcagttgttgtcccctcaggtcgatataaatagccccatcaatgctaagaaagtaaataccaccacaagcagtgactcatacattggcctgtggagaaactatctgatcctttgctgcagtgcagcaacatcgtcatcttccacatctgcaggttctgtgagatgttctcctcctgagacgctggcgtctaccccagatagcggctatagcattgattctaaaattattggcatcccatccccttcatccttgtttaagcacatagttccaatgatgcgttctgagagcatggaaatcacagaatcccttgttctaggtcttggcaggaccaacccaggagcttttagggaactaatagaggaattacatcccataattaaagaagcactcgaaagaaggccagagaatatgaaacggcgcaggcgtcgagacattttacgagtacaactggtacgaatatttgaactgctggcagatgctggtgtcattagtcacagtgcaagtggtggccttgataatgaaacacattttctcaacaacactttattggaatatgtagatttaactagacaactcctggaagcagaaaatgaaaaagactctgacacactgaaggatatacgatgccattttagtgccttagtggcgaatattattcagaatgttccagtgcaccagagaagaagtatttttcctcaacagagccttcgtcacagtctatttatgctgttcagtcactgggcaggtccttttagcatcatgtttacgcccttggacagatacagtgatagaaatatgcaaattaatagacatcaatactgtgcgttaaaggctatgtctgctgtactgtgttgtggccctgttgcagataatgtaggactttcatcagatggctatttgtacaaatggttggataacattttggattctctggacaaaaaggttcaccagctgggctgtgaagcagttacgttgttactggagctgaaccctgatcagagcaacctgatgtactgggctgtggaccgctgctacacgggctccgggagggtggcggccggctgctttaaagccattgctaatgttttccagaacagggattatcaatgtgacacagtgatgcttctaaatctgatactgtttaaagcagctgattcttctagaagtatctatgaagttgctatgcaacttttacagattctggaaccgaagatgtttcgctatgctcacaaattggaggttcagagaacagatggagtactcagccagctgtctcctctaccacatctctattctgtttcatattatcagttgtccgaggaactagcaagggcgtatcctgagctaactctcgccatattctcagagataagccagagaatccagacagctcaccctgctgggcggcaggtgatgctgcactacctgctaccatggatgaacaacatcgagctggtggacttaaaacctctccccacagcaaggcgacatgatgaagatgaagatgattccttaaaagaccgagaacttatggtgactagtaggcgctggttacggggagaaggatggggatctccacaagccactgcaatggttttgaacaatctgatgtatatgacagcaaagtatggcgatgaactggcctggtcggaggtggagaatgtgtggaccacacttgcagatggctggcccaaaaacctgaaaataattttgcactttttgatcagcatttgtggggtgaatagcgaaccaagcctcttgccttacgtgaagaaggtcattgtatatttaggtagagataaaacaatgcagttgctagaagagctggtgagtgagcttcagctgaccgatcctgtcagttcaggggtcactcacatggataatcccccgtattatcgcatcacttccagctataaaatcccttctgtcacctcaggaactacttccagtagcaatacaatggtagctcccacagatggcaatcctgataataagcccattaaagagaatattgaagagagctatgtgcacctggacatttacagtggactaaacagtcatttgaatcggcaacatcacagactagaatcccgatacagtagcagctctggaggatcttatgaagaagaaaaaagtgattcaatgccactttattctaattggcgactgaaagtgatggagcataaccaaggagagccactgcccttcccaccagctggaggctgctggtcaccactggtggattacgtgcctgaaacgtcatcacctggattacctcttcacaggtgtaacatagcagtgatccttttgactgatctcatcattgatcatagtgtgaaggtggaatggggaagctacctccatcttcttcttcatgcaatttttatagggtttgaccactgccaccctgaggtgtatgaacattgtaaacgcctgcttctgcacttattaatagtaatgggacccaatagtaacatccgaactgttgcttctgtccttctcaggaacaaggagtttaatgagcccagggtgcttacagtcaaacaagttgcacacttagattataatttcacagcaggcattaacgattttatacctgattaccagccctcccctatgactgactcagggcttagctcaagttctacctcttctagtatcagcttaggaaataacagtgctgccatttcacatctgcacaccactatcctcaatgaggttgacatctcagtggagcaggatggaaaagtcaaaaccctcatggaattcattacctcaagaaaaagagggcccctttggaaccatgaggatgtttctgccaagaatcctagcataaagagtgctgaacagttaactacatttttgaaacatgtggtttctgtttttaagcagtcaagctcagaaggaattcatctggaacatcatcttagtgaagttgctctgcaaacagcactttcctgttcttctcgacactatgctgggagatcctttcagattttcagggccctaaagcagcctctcactgcaactacactttctgatgttctctccagacttgtagaaactgtaggggatccaggagaagatgcacagggatttgtgattgagcttcttctcacattggaatctgcaattgatactttggctgaaaccatgaagcattatgatcttctttctgccctttctcaaacctcatatcatgatcctataatgggaaacaagtatgcagctaacaggaaaagcactggacaactcaatctaagcacaagtcccattaatagtagcagttatttgggatataacagtaatgcaagaagtaactctttgagattaagtttgattggtgaccgacgaggtgaccggcggcggagtaacacactggatataatggatggacggataaaccatagcagtagtttagcaaggactagaagcctttcctctctaagagagaaaggaatgtatgacgtgcagtccactactgagcctaccaacttgatggccaccattttttggatagcagcatctttattagaatcagattatgaatatgaatacctcctggctctcaggcttctcaacaaactgcttatccatttgcctttggataaatcagagagtcgagagaagattgaaaatgtacaaagcaaattgaaatggactaattttccaggacttcagcagctcttccttaagggttttacctcagcatctacacaagaaatgaccgtgcacctcctcagtaaactcatttctgtctccaaacatacattggtggatccttcccaattgtcaggctttcctcttaacatcctttgcttattgcctcacttaatccagcattttgacagcccaactcagttttgcaaagaaacagctagtcgaatagcaaaggtttgtgcagaagaaaaatgcccaacacttgtcaatctggcacacatgatgagtttgtacagtacacacacgtattccagagactgttctaactggatcaatgtcgtgtgcagatacctgcatgactccttctcagatacaacatttaatcttgtgacttatcttgcagagctgttagagaaaggattgtccagtatgcagcaatcattactacagattatttatagtctattgagtcatattgacctgtctgcagccccagccaagcagtttaatctggagatcataaagattattggcaaatatgtacagagtccttactggaaggaagcccttaacatattaaagctggtggtgtcacgctctgcgagtcttgtcgtacccagtgatatccccaagacctatggaggagatacaggttctcctgaaatatccttcactaaaatttttaataatgtttctaaggagttgcctgggaagaccttagattttcattttgatatatctgagacaccaattattggaaacaaatatggtgatcagcacagtgcggctggaagaaatgggaaaccaaaagttattgctgtcactagaagtacttcctcaacttcttctggttctaattctaatgccttggttcctgttagttggaaaaggccacagttatcacagcgaagaacaagagaaaagctaatgaatgtgctttctctctgtggtccagaatctggcctcccaaagaacccatcagttgtattttcttctaatgaggatttggaagtcggtgaccaacagactagcctaatttctacaacagaagacataaatcaagaggaagaagtagctgtggaagataatagcagtgaacaacagtttggtgtttttaaggattttgactttttagatgttgaattggaagatgcagagggtgaaagtatggacaatttcaactggggagttcgcaggcgctcactggacagtattgacaaaggggacactccatccctccaggagtaccagtgctctagtagcacccccagcctgaacctcaccaatcaggaggatacagatgagtcctcggaagaagaagcggcacttacagcaagccagatactctcacgcacacagatgttaaacagtgattctgccactgatgaaacaataccagaccatcctgacttacttctccagtctgaagattccactggcagcatcacaacagaggaagtgcttcaaatcagggatgagaccccaactttggaggcttctctagataatgctaacagccggctgcctgaggatacaacttcagtattaaaggaggaacatgttacaacctttgaagatgaaggatcctatataattcaagaacagcaggaatctcttgtgtgtcaaggaattcttgatttagaagaaactgaaatgccagagcctctagctcctgaaagttaccccgagtcagtctgtgaagaggatgttaccttagctctgaaagagctagatgaaagatgtgaagaagaagaagcggatttctccggactgtctagtcaagatgaagaagagcaagatggttttccagaagtacagacgtcgcctctgccgtcaccatttctttctgccatcatagccgcctttcagcccgtggcatatgatgatgaagaggaagcctggcgctgccacgtcaatcagatgctgtctgacaccgacgggtcctctgcagtgtttacttttcatgtgttttctaggctgtttcagacaattcaaagaaagtttggagaaataactaatgaggcagtcagctttcttggtgatagtctgcaacgcattggtaccaaatttaaaagttccttggaagtgatgatgctgtgttcagaatgcccaacagtctttgtggatgctgaaacactgatgtcatgtggtttgctggaaacactcaagtttggtgttttggagttgcaagaacacctggatacatacaatgtgaaaagagaagccgctgagcagtggctagatgattgtaagaggacatttggtgccaaagaagacatgtataggataaacacagatgcacaacaaatggaaatactagcagaattggagctctgccgaagattatacaaattgcattttcaattgctgcttctgttccaggcctactgtaaacttatcaaccaagtaaatacgataaaaaatgaagcagaggtcatcaacatgtcagaggaacttgcccaactggaaagtatcctcaaagaagctgagtccgcttccgaaaacgaagaaattgacatttccaaagctgcacaaactactatagaaactgccattcattctttaattgaaactttgaaaaataaagaatttatatcagctgtagcacaagtcaaagctttcagatctctctggcccagtgatatctttggcagttgtgaagatgaccctgtacagacactgttacatatatatttccatcatcagacgctgggccagacaggaagctttgcagttataggctctaacctggacatgtcagaagccaactacaaactgatggaacttaatctggaaataagagagtctctacgcatggtgcaatcataccaacttctagcacaggccaaaccaatgggaaatatggtgagcactggattctgagacacttcaggcctttaggaaagaaactaaactgaagatgatgaagaatattaaccaagcaccttttatggacccttgcattcactgataactttctggcagcatctactttttagtgtaactaatgtcaaactgtatcatcaaaaacaaagatctgaaagaaaaaaacatctgatattttaacagctgccaatatctcccacaataactgcgtgaagaaggaattttttaattacttaacctacgtgaaaagaaaagggctaaaagtgatgcctacaaatacattactttctggggaaagaaaagaattccaagaatgtttgcaataatggcctccaatactgaaacaaccaaaagcaggtgaaatgaggctgaaatcaaggctgtttcattttagctgaagacctgcaaagctgcttggatttctagcagttgaaaacctaacctgcaattgatgcttaatcatccatccacatgaacatgcagtcagctatacgcatcaagactcgtttgcaaaaaccattgatttttcagtatgtgggataagggtttgggtttttttgttttttggtctgtataaggaattatgtgtgtgtgagttgggatgtatggatatgtgatagtcatattttcaaggtatggatgtttggtgataacgtctcagagcatgcctaaaagagcactgcaagattatttttgaagaaatgttattttattagatctaactcttcatagtatgtaaatgttagaacattttaataatattttaaaactgggctttcccagtatttcaaaaagaaataatatatctgttaacgttattggaatgctgctcagttctctgatcagtgcttatgttatgattgttgataactaaccaaagtagatgcctgcagagactttaaaatgtaaaataaagatgtatgctgcctgtcagctattctcattagaaaagttttaacttattttactccatatagaaactgtagagactaaaaccagttattttcttgtacatttgtgccatgcactgttgttatacaagaataggtgtacaaagctaaagaaaaattgtggtcattgatgatggaatatatgacttgcaggctttgaagtctgcagaattcaagaaaagagctgcaaatgcatttttgtatctttattcaggactcacatgctttaccctaaagaaacctggggctaggggaaatgaaaggaagcctgaagactgactaccaaaacatgcaatatacttattcactgtctaagtctgtagtataacatgaactggagtctctatccttttctaaaatcgcattttgtaagaaaagaaagaaaaaaaaaaaaaaagaatgtagtcccacaactcctgatttgaaagaaacaccttgtattttttatatacatctcttatccactgtgacttttcttttaaactgggctctgtgattccagagtttagaatgtagaaatgaaatgcttagctttaccttttcttggggggtgtggaccctgccagaaatgtaattacgtatgctcaagtgcattaattgaaggcactgtgcacaccattggactgctgaccacagttaaacatttccagtaaaatttcgtaactggtcacagctcattcataatcactgtattttttgaccctgataaagacaattattttgatggtgttctggtactgtaattggtatcctttaaattatttaaaacttttgggtgtggggcaggcagagagggatggtgtccagagatacatcacactttacatcctatcttactgtcctctgtttttcttaccctccttacatcctttttgttaaaaataaaaagcattgtagctgttggtttgtgttgtattttaacaaagaatgaatgattacagtgtgcatcatttagaaacctttcaaatgttaccttcttgaattgccctagaaaagaacaaaattagttgactacccaaccaaacctttcagttgatatttgctttttgtgtttatttatatgtaactaagtctattaatataataaaaatgaatatacctgcagc

SEQ ID NO: 135379 - DNA, 5277 bp, Homo sapiens
  Payload ID: 6468
  Gene Symbol: FRYL
  Gene Name: FRY-like
  ENST ID: ENST00000507711
  CDS Start-End: 555-5216
agagaaatccggttaaaatcagagtcggagggaggtttaaccacagatcggttccgatcggattattccttaaaggggacgcgccattgtcaagagaacggagccaggggcccgagggcggggaccggcggcgctggaggagcgaggcagctgtactaggactgggaacggcctagaacattccatattctgcttcacacacggtgactcactcactactgctttgtaccagtgtgcccactcgagtgcctgtaaagtacaagctccagatcaaaaaagcttctagatggatcctttccaaacttggtgtcttttctacaaactctgtgcctcaacaaccatttctaagtgagctgaagccatttattggtatcttggatggttaacatctaaatgcttaattcctgaaaccactcaagagtcataggattagatgatccaagtcaccaagaaattactgtctcaagtgatacgcttcagcgccagtcagcaaagtaaataaatactgtgcttcttccaactttcattccacttggggaaaaaaaaatatcatcatgtcaaacattacgattgacccagatgtcaaacctggtgaatatgtcatcaagagcctctttgcagaatttgctgttcaagctgaaaagaaaattgaagttgtaatggccgaacccttggagaagctattgtccagatctcttcagaggggtgaagatcttcagtttgatcagttgataagctctatgagctcagtagcagagcactgtctcccttccttacttcgcaccttgtttgactggtacagacgccaaaatggaacggaagatgaatcttatgaatataggcctcggtctagcacaaagtctaagggggatgaacagcaacgtgaaagagattatcttcttgaaaggagggacttagcagtagacttcattttttgtttagttttagttgaagttctaaagcagattcctgttcatcctgtacccgatcccttagttcatgaagttctaaacttagcttttaagcactttaaacataaggaaggatattcaggaaccaacactgggaatgtgcatattattgctgatttatatgcagaggtgataggggttcttgcccaatcaaagtttcaggctgtaaggaagaagtttgtgacagaattaaaagaactgcgacaaaaggaacaaagcccacatgtggtacaaagtgtcatcagcttaataatgggaatgaaattttttcgagtaaaaatgtatcctgtagaagattttgaagcatcatttcaatttatgcaggaatgtgctcagtatttcttagaagtgaaagataaagatataaaacatgcacttgctggtttatttgtggagattcttatccctgtagctgctgctgttaaaaatgaagtgaatgttccctgtttgaaaaattttgtggagatgctttatcagactacttttgaactgagctcgagaaagaagcattcattggctttatatccactaattacctgccttttatgtgtcagtcagaaacaattttttttaaataactggcatattttcctacagaactgtttgtcacatttaaagaataaagatccgaaaatgtctcgagttgcactggaatctttgtatagattattgtgggtttatgtaattagaataaaatgtgaaagcaacactgtaactcaaagtcgtcttatgagcatagtgtcagcactttttccaaaaggctcacgaagtgtggttcctcgtgacacacctctcaatatatttgtgaagattattcagttcattgctcaggaacgcttggattttgcaatgaaagaaataatatttgatcttctcagtgttggaaaatctactaaaactttcaccattaatccagagagaatgaacataggtctcagagtcttccttgtaatagcagacagtttgcagcagaaagatggtgaaccacccatgccaacaacaggagttattcttccctcaggaaatactcttcgtgtaaagaaaatatttctcaataaaaccttgacagatgaagaagcaaaagtcataggaatgtcagtttactatcctcaagtaagaaaagcattagatagcatcctcagacatttggacaaagaagttgggagaccaatgtgtatgaccagtgtgcagatgtctaataaggagcctgaagacatgattacgggggaaagaaaacccaagattgatttgtttagaacttgtattgctgcgattccaaggttgattcctgacggtatgagcagaactgacctgattgaattgttagcaaggctcacaattcatatggatgaagaactgcgtgctctggctttcaatactctgcaggcactaatgcttgattttccagattggcgggaggatgttctttcaggatttgtttattttattgttcgtgaagtgactgatgtccatcccacacttcttgataatgccgtaaagatgttggtacaattaataaatcagtggaaacaagcagcccaaatgcataataaaaaccaggacactcagcatggtgtagctaatggagcttctcatccccctcctctggaaaggagcccatattccaatgtattccatgtggttgaaggctttgcgcttgtcattctctgtagcagtcgacctgccactaggagactagccgtcagtgtccttagagaaatacgggctttatttgcacttctggaaatacctaagggtgatgatgaattagccatagatgtgatggacaggctaagcccatccattcttgagagcttcatacatctcactggggctgatcagactactttgctctattgccctagctcgatagatttacaaactttagcagaatggaactcttctcctattagccaccagtttgatgtgattagtccatcacatatatggatatttgcacatgtgacccaaggccaagacccatggattataagtctctccagttttttaaagcaagaaaatcttcctaaacactgctctacagctgtgagctatgcttggatgtttgcatacacaagacttcagttgttgtcccctcaggtcgatataaatagccccatcaatgctaagaaagtaaataccaccacaagcagtgactcatacattggcctgtggagaaactatctgatcctttgctgcagtgcagcaacatcgtcatcttccacatctgcaggttctgtgagatgttctcctcctgagacgctggcgtctaccccagatagcggctatagcattgattctaaaattattggcatcccatccccttcatccttgtttaagcacatagttccaatgatgcgttctgagagcatggaaatcacagaatcccttgttctaggtcttggcaggaccaacccaggagcttttagggaactaatagaggaattacatcccataattaaagaagcactcgaaagaaggccagagaatatgaaacggcgcaggcgtcgagacattttacgagtacaactggtacgaatatttgaactgctggcagatgctggtgtcattagtcacagtgcaagtggtggccttgataatgaaacacattttctcaacaacactttattggaatatgtagatttaactagacaactcctggaagcagaaaatgaaaaagactctgacacactgaaggatatacgatgccattttagtgccttagtggcgaatattattcagaatgttccagtgcaccagagaagaagtatttttcctcaacagagccttcgtcacagtctatttatgctgttcagtcactgggcaggtccttttagcatcatgtttacgcccttggacagatacagtgatagaaatatgcaaattaatagacatcaatactgtgcgttaaaggctatgtctgctgtactgtgttgtggccctgttgcagataatgtaggactttcatcagatggctatttgtacaaatggttggataacattttggattctctggacaaaaaggttcaccagctgggctgtgaagcagttacgttgttactggagctgaaccctgatcagagcaacctgatgtactgggctgtggaccgctgctacacgggctccgggagggtggcggccggctgctttaaagccattgctaatgttttccagaacagggattatcaatgtgacacagtgatgcttctaaatctgatactgtttaaagcagctgattcttctagaagtatctatgaagttgctatgcaacttttacagattctggaaccgaagatgtttcgctatgctcacaaattggaggttcagagaacagatggagtactcagccagctgtctcctctaccacatctctattctgtttcatattatcagttgtccgaggaactagcaagggcgtatcctgagctaactctcgccatattctcagagataagccagagaatccagacagctcaccctgctgggcggcaggtgatgctgcactacctgctaccatggatgaacaacatcgagctggtggacttaaaacctctccccacagcaaggcgacatgatgaagatgaagatgattccttaaaagaccgagaacttatggtgactagtaggcgctggttacggggagaaggatggggatctccacaagccactgcaatggttttgaacaatctgatgtatatgacagcaaagtatggcgatgaactggcctggtcggaggtggagaatgtgtggaccacacttgcagatggctggcccaaaaacctgaaaataattttgcactttttgatcagcatttgtggggtgaatagcgaaccaagcctcttgccttacgtgaagaaggtcattgtatatttaggtagagataaaacaatgcagttgctagaagagctggtgagtgagcttcagctgaccgatcctgtcagttcaggggtcactcacatggataatcccccgtattatcgcatcacttccagctataaaatcccttctgtcacctcaggaactacttccagtagcaatacaatggtagctcccacagatggcaatcctgataataagcccattaaagagaatattgaagagagctatgtgcacctggacatttacagtggactaaacagtcatttgaatcggcaacatcacagactagaatcccgatacagtagcagctctggaggatcttatgaagaagaaaaaagtaataaattccaaatgtttttaatataactataagggtgaggtgtattgttaattacattaatgttaataaatatatattttcagtaaa

SEQ ID NO: 135380 - DNA, 7033 bp, Homo sapiens
  Payload ID: 6468
  Gene Symbol: FRYL
  Gene Name: FRY-like
  Uniprot ID: O94915
  ENST ID: ENST00000507873
  CDS Start-End: 3941-5152
ccagagaatccagacagctcaccctgctgggcggcaggtgatgctgcactacctgctaccatggatgaacaacatcgagctggtggacttaaaacctctccccacagcaaggcgacatgatgaagatgaagatgattccttaaaagaccgagaacttatggtgactagtaggcgctggttacggggagaaggatggggatctccacaagccactgcaatggttttgaacaatctgatgtatatgacagcaaagtatggcgatgaactggcctggtcggaggtggagaatgtgtggaccacacttgcagatggctggcccaaaaacctgaaaataattttgcactttttgatcagcatttgtggggtgaatagcgaaccaagcctcttgccttacgtgaagaaggtcattgtatatttaggtagagataaaacaatgcagttgctagaagagctggtgagtgagcttcagctgaccgatcctgtcagttcaggggtcactcacatggataatcccccgtattatcgcatcacttccagctataaaatcccttctgtcacctcaggaactacttccagtagcaatacaatggtagctcccacagatggcaatcctgataataagcccattaaagagaatattgaagagagctatgtgcacctggacatttacagtggactaaacagtcatttgaatcggcaacatcacagactagaatcccgatacagtagcagctctggaggatcttatgaagaagaaaaaagtgattcaatgccactttattctaattggcgactgaaagtgatggagcataaccaaggagagccactgcccttcccaccagctggaggctgctggtcaccactggtggattacgtgcctgaaacgtcatcacctggattacctcttcacaggtgtaacatagcagtgatccttttgactgatctcatcattgatcatagtgtgaaggtggaatggggaagctacctccatcttcttcttcatgcaatttttatagggtttgaccactgccaccctgaggtgtatgaacattgtaaacgcctgcttctgcacttattaatagtaatgggacccaatagtaacatccgaactgttgcttctgtccttctcaggaacaaggagtttaatgagcccagggtgcttacagtcaaacaagttgcacacttagattataatttcacagcaggcattaacgattttatacctgattaccagccctcccctatgactgactcagggcttagctcaagttctacctcttctagtatcagcttaggaaataacagtgctgccatttcacatctgcacaccactatcctcaatgaggttgacatctcagtggagcaggatggaaaagtcaaaaccctcatggaattcattacctcaagaaaaagagggcccctttggaaccatgaggatgtttctgccaagaatcctagcataaagagtgctgaacagttaactacatttttgaaacatgtggtttctgtttttaagcagtcaagctcagaaggaattcatctggaacatcatcttagtgaagttgctctgcaaacagcactttcctgttcttctcgacactatgctgggagatcctttcagattttcagggccctaaagcagcctctcactgcaactacactttctgatgttctctccagacttgtagaaactgtaggggatccaggagaagatgcacagggatttgtgattgagcttcttctcacattggaatctgcaattgatactttggctgaaaccatgaagcattatgatcttctttctgccctttctcaaacctcatatcatgatcctataatgggaaacaagtatgcagctaacaggaaaagcactggacaactcaatctaagcacaagtcccattaatagtagcagttatttgggatataacagtaatgcaagaagtaactctttgagattaagtttgattggtgaccgacgaggtgaccggcggcggagtaacacactggatataatggatggacggataaaccatagcagtagtttagcaaggactagaagcctttcctctctaagagagaaaggaatgtatgacgtgcagtccactactgagcctaccaacttgatggccaccattttttggatagcagcatctttattagaatcagattatgaatatgaatacctcctggctctcaggcttctcaacaaactgcttatccatttgcctttggataaatcagagagtcgagagaagattgaaaatgtacaaagcaaattgaaatggactaattttccaggacttcagcagctcttccttaagggttttacctcagcatctacacaagaaatgaccgtgcacctcctcagtaaactcatttctgtctccaaacatacattggtggatccttcccaattgtcaggctttcctcttaacatcctttgcttattgcctcacttaatccagcattttgacagcccaactcagttttgcaaagaaacagctagtcgaatagcaaaggtttgtgcagaagaaaaatgcccaacacttgtcaatctggcacacatgatgagtttgtacagtacacacacgtattccagagactgttctaactggatcaatgtcgtgtgcagatacctgcatgactccttctcagatacaacatttaatcttgtgacttatcttgcagagctgttagagaaaggattgtccagtatgcagcaatcattactacagattatttatagtctattgagtcatattgacctgtctgcagccccagccaagcagtttaatctggagatcataaagattattggcaaatatgtacagagtccttactggaaggaagcccttaacatattaaagctggtggtgtcacgctctgcgagtcttgtcgtacccagtgatatccccaagacctatggaggagatacaggttctcctgaaatatccttcactaaaatttttaataatgtttctaaggagttgcctgggaagaccttagattttcattttgatatatctgagacaccaattattggaaacaaatatggtgatcagcacagtgcggctggaagaaatgggaaaccaaaagttattgctgtcactagaagtacttcctcaacttcttctggttctaattctaatgccttggttcctgttagttggaaaaggccacagttatcacagcgaagaacaagagaaaagctaatgaatgtgctttctctctgtggtccagaatctggcctcccaaagaacccatcagttgtattttcttctaatgaggatttggaagtcggtgaccaacagactagcctaatttctacaacagaagacataaatcaagaggaagaagtagctgtggaagataatagcagtgaacaacagtttggtgtttttaaggattttgactttttagatgttgaattggaagatgcagagggtgaaagtatggacaatttcaactggggagttcgcaggcgctcactggacagtattgacaaaggggacactccatccctccaggagtaccagtgctctagtagcacccccagcctgaacctcaccaatcaggaggatacagatgagtcctcggaagaagaagcggcacttacagcaagccagatactctcacgcacacagatgttaaacagtgattctgccactgatgaaacaataccagaccatcctgacttacttctccagtctgaagattccactggcagcatcacaacagaggaagtgcttcaaatcagggatgagaccccaactttggaggcttctctagataatgctaacagccggctgcctgaggatacaacttcagtattaaaggaggaacatgttacaacctttgaagatgaaggatcctatataattcaagaacagcaggaatctcttgtgtgtcaaggaattcttgatttagaagaaactgaaatgccagagcctctagctcctgaaagttaccccgagtcagtctgtgaagaggatgttaccttagctctgaaagagctagatgaaagatgtgaagaagaagaagcggatttctccggactgtctagtcaagatgaagaagagcaagatggttttccagaagtacagacgtcgcctctgccgtcaccatttctttctgccatcatagccgcctttcagcccgtggcatatgatgatgaagaggaagcctggcgctgccacgtcaatcagatgctgtctgacaccgacgggtcctctgcagtgtttacttttcatgtgttttctaggctgtttcagacaattcaaagaaagtttggagaaataactaatgaggcagtcagctttcttggtgatagtctgcaacgcattggtaccaaatttaaaagttccttggaagtgatgatgctgtgttcagaatgcccaacagtctttgtggatgctgaaacactgatgtcatgtggtttgctggaaacactcaagtttggtgttttggagttgcaagaacacctggatacatacaatgtgaaaagagaagccgctgagcagtggctagatgattgtaagaggacatttggtgccaaagaagacatgtataggataaacacagatgcacaagaattggagctctgccgaagattatacaaattgcattttcaattgctgcttctgttccaggcctactgtaaacttatcaaccaagtaaatacgataaaaaatgaagcagaggtcatcaacatgtcagaggaacttgcccaactggaaagtatcctcaaagaagctgagtccgcttccgaaaacgaagaaattgacatttccaaagctgcacaaactactatagaaactgccattcattctttaattgaaactttgaaaaataaagaatttatatcagctgtagcacaagtcaaagctttcagatctctctggcccagtgatatctttggcagttgtgaagatgaccctgtacagacactgttacatatatatttccatcatcagacgctgggccagacaggaagctttgcagttataggctctaacctggacatgtcagaagccaactacaaactgatggaacttaatctggaaataagagagtctctacgcatggtgcaatcataccaacttctagcacaggccaaaccaatgggaaatatggtgagcactggattctgagacacttcaggcctttaggaaagaaactaaactgaagatgatgaagaatattaaccaagcaccttttatggacccttgcattcactgataactttctggcagcatctactttttagtgtaactaatgtcaaactgtatcatcaaaaacaaagatctgaaagaaaaaaacatctgatattttaacagctgccaatatctcccacaataactgcgtgaagaaggaattttttaattacttaacctacgtgaaaagaaaagggctaaaagtgatgcctacaaatacattactttctggggaaagaaaagaattccaagaatgtttgcaataatggcctccaatactgaaacaaccaaaagcaggtgaaatgaggctgaaatcaaggctgtttcattttagctgaagacctgcaaagctgcttggatttctagcagttgaaaacctaacctgcaattgatgcttaatcatccatccacatgaacatgcagtcagctatacgcatcaagactcgtttgcaaaaaccattgatttttcagtatgtgggataagggtttgggtttttttgttttttggtctgtataaggaattatgtgtgtgtgagttgggatgtatggatatgtgatagtcatattttcaaggtatggatgtttggtgataacgtctcagagcatgcctaaaagagcactgcaagattatttttgaagaaatgttattttattagatctaactcttcatagtatgtaaatgttagaacattttaataatattttaaaactgggctttcccagtatttcaaaaagaaataatatatctgttaacgttattggaatgctgctcagttctctgatcagtgcttatgttatgattgttgataactaaccaaagtagatgcctgcagagactttaaaatgtaaaataaagatgtatgctgcctgtcagctattctcattagaaaagttttaacttattttactccatatagaaactgtagagactaaaaccagttattttcttgtacatttgtgccatgcactgttgttatacaagaataggtgtacaaagctaaagaaaaattgtggtcattgatgatggaatatatgacttgcaggctttgaagtctgcagaattcaagaaaagagctgcaaatgcatttttgtatctttattcaggactcacatgctttaccctaaagaaacctggggctaggggaaatgaaaggaagcctgaagactgactaccaaaacatgcaatatacttattcactgtctaagtctgtagtataacatgaactggagtctctatccttttctaaaatcgcattttgtaagaaaagaaagaaaaaaaaaaaaaaagaatgtagtcccacaactcctgatttgaaagaaacaccttgtattttttatatacatctcttatccactgtgacttttcttttaaactgggctctgtgattccagagtttagaatgtagaaatgaaatgcttagctttaccttttcttggggggtgtggaccctgccagaaatgtaattacgtatgctcaagtgcattaattgaaggcactgtgcacaccattggactgctgaccacagttaaacatttccagtaaaatttcgtaactggtcacagctcattcataatcactgtattttttgaccctgataaagacaattattttgatggtgttctggtactgtaattggtatcctttaaattatttaaaacttttgggtgtggggcaggcagagagggatggtgtccagagatacatcacactttacatcctatcttactgtcctctgtttttcttaccctccttacatcctttttgttaaaaataaaaagcattgtagctgttggtttgtgttgtattttaacaaagaa

SEQ ID NO: 135381 - DNA, 618 bp, Homo sapiens
  Payload ID: 6468
  Gene Symbol: FRYL
  Gene Name: FRY-like
  ENST ID: ENST00000505759
  CDS Start-End: 47-618
acctttctgtgtgcttgtgggcctagtaatgtagaagaaccttaaaatggattttttaaagagagttgttcctcccattctttcgggagatgtggttttggatactagtactgaggaaagttccccaagattagttaagatgaaacgtcttagctcactttcatctgagaagacggtggatgagcaaggtggaaccaatttctgtcatagtaattatgacaaatacgaacaccaacaactagcttcagcgccagtcagcaaagtaaataaatactgtgcttcttccaactttcattccacttggggaaaaaaaaatatcatcatgtcaaacattacgattgacccagatgtcaaacctggtgaatatgtcatcaagagcctctttgcagaatttgctgttcaagctgaaaagaaaattgaagttgtaatggccgaacccttggagaagctattgtccagatctcttcagaggggtgaagatcttcagtttgatcagttgataagctctatgagctcagtagcagagcactgtctcccttccttacttcgcaccttgtttgactggtacagacgccaaaatggaacggaagatgaatcttatgaatataggcctcggtc

SEQ ID NO: 135382 - DNA, 4364 bp, Homo sapiens
  Payload ID: 6468
  Gene Symbol: FRYL
  Gene Name: FRY-like
  ENST ID: ENST00000514617
  CDS Start-End: 1-4364
tggctatttgtacaaatggttggataacattttggattctctggacaaaaaggttcaccagctgggctgtgaagcagttacgttgttactggagctgaaccctgatcagagcaacctgatgtactgggctgtggaccgctgctacacgggctccgggagggtggcggccggctgctttaaagccattgctaatgttttccagaacagggattatcaatgtgacacagtgatgcttctaaatctgatactgtttaaagcagctgattcttctagaagtatctatgaagttgctatgcaacttttacagattctggaaccgaagatgtttcgctatgctcacaaattggaggttcagagaacagatggagtactcagccagctgtctcctctaccacatctctattctgtttcatattatcagttgtccgaggaactagcaagggcgtatcctgagctaactctcgccatattctcagagataagccagagaatccagacagctcaccctgctgggcggcaggtgatgctgcactacctgctaccatggatgaacaacatcgagctggtggacttaaaacctctccccacagcaaggcgacatgatgaagatgaagatgattccttaaaagaccgagaacttatggtgactagtaggcgctggttacggggagaaggatggggatctccacaagccactgcaatggttttgaacaatctgatgtatatgacagcaaagtatggcgatgaactggcctggtcggaggtggagaatgtgtggaccacacttgcagatggctggcccaaaaacctgaaaataattttgcactttttgatcagcatttgtggggtgaatagcgaaccaagcctcttgccttacgtgaagaaggtcattgtatatttaggtagagataaaacaatgcagttgctagaagagctggtgagtgagcttcagctgaccgatcctgtcagttcaggggtcactcacatggataatcccccgtattatcgcatcacttccagctataaaatcccttctgtcacctcaggaactacttccagtagcaatacaatggtagctcccacagatggcaatcctgataataagcccattaaagagaatattgaagagagctatgtgcacctggacatttacagtggactaaacagtcatttgaatcggcaacatcacagactagaatcccgatacagtagcagctctggaggatcttatgaagaagaaaaaagtgattcaatgccactttattctaattggcgactgaaagtgatggagcataaccaaggagagccactgcccttcccaccagctggaggctgctggtcaccactggtggattacgtgcctgaaacgtcatcacctggattacctcttcacaggtgtaacatagcagtgatccttttgactgatctcatcattgatcatagtgtgaaggtggaatggggaagctacctccatcttcttcttcatgcaatttttatagggtttgaccactgccaccctgaggtgtatgaacattgtaaacgcctgcttctgcacttattaatagtaatgggacccaatagtaacatccgaactgttgcttctgtccttctcaggaacaaggagtttaatgagcccagggtgcttacagtcaaacaagttgcacacttagattataatttcacaggcattaacgattttatacctgattaccagccctcccctatgactgactcagggcttagctcaagttctacctcttctagtatcagcttaggaaataacagtgctgccatttcacatctgcacaccactatcctcaatgaggttgacatctcagtggagcaggatggaaaagtcaaaaccctcatggaattcattacctcaagaaaaagagggcccctttggaaccatgaggatgtttctgccaagaatcctagcataaagagtgctgaacagttaactacatttttgaaacatgtggtttctgtttttaagcagtcaagctcagaaggaattcatctggaacatcatcttagtgaagttgctctgcaaacagcactttcctgttcttctcgacactatgctgggagatcctttcagattttcagggccctaaagcagcctctcactgcaactacactttctgatgttctctccagacttgtagaaactgtaggggatccaggagaagatgcacagggatttgtgattgagcttcttctcacattggaatctgcaattgatactttggctgaaaccatgaagcattatgatcttctttctgccctttctcaaacctcatatcatgatcctataatgggaaacaagtatgcagctaacaggaaaagcactggacaactcaatctaagcacaagtcccattaatagtagcagttatttgggatataacagtaatgcaagaagtaactctttgagattaagtttgattggtgaccgacgaggtgaccggcggcggagtaacacactggatataatggatggacggataaaccatagcagtagtttagcaaggactagaagcctttcctctctaagagagaaaggaatgtatgacgtgcagtccactactgagcctaccaacttgatggccaccattttttggatagcagcatctttattagaatcagattatgaatatgaatacctcctggctctcaggcttctcaacaaactgcttatccatttgcctttggataaatcagagagtcgagagaagattgaaaatgtacaaagcaaattgaaatggactaattttccaggacttcagcagctcttccttaagggttttacctcagcatctacacaagaaatgaccgtgcacctcctcagtaaactcatttctgtctccaaacatacattggtggatccttcccaattgtcaggctttcctcttaacatcctttgcttattgcctcacttaatccagcattttgacagcccaactcagttttgcaaagaaacagctagtcgaatagcaaaggtttgtgcagaagaaaaatgcccaacacttgtcaatctggcacacatgatgagtttgtacagtacacacacgtattccagagactgttctaactggatcaatgtcgtgtgcagatacctgcatgactccttctcagatacaacatttaatcttgtgacttatcttgcagagctgttagagaaaggattgtccagtatgcagcaatcattactacagattatttatagtctattgagtcatattgacctgtctgcagccccagccaagcagtttaatctggagatcataaagattattggcaaatatgtacagagtccttactggaaggaagcccttaacatattaaagctggtggtgtcacgctctgcgagtcttgtcgtacccagtgatatccccaagacctatggaggagatacaggttctcctgaaatatccttcactaaaatttttaataatgtttctaaggagttgcctgggaagaccttagattttcattttgatatatctgagacaccaattattggaaacaaatatggtgatcagcacagtgcggctggaagaaatgggaaaccaaaagttattgctgtcactagaagtacttcctcaacttcttctggttctaattctaatgccttggttcctgttagttggaaaaggccacagttatcacagcgaagaacaagagaaaagctaatgaatgtgctttctctctgtggtccagaatctggcctcccaaagaacccatcagttgtattttcttctaatgaggatttggaagtcggtgaccaacagactagcctaatttctacaacagaagacataaatcaagaggaagaagtagctgtggaagataatagcagtgaacaacagtttggtgtttttaaggattttgactttttagatgttgaattggaagatgcagagggtgaaagtatggacaatttcaactggggagttcgcaggcgctcactggacagtattgacaaaggggacactccatccctccaggagtaccagtgctctagtagcacccccagcctgaacctcaccaatcaggaggatacagatgagtcctcggaagaagaagcggcacttacagcaagccagatactctcacgcacacagatgttaaacagtgattctgccactgatgaaacaataccagaccatcctgacttacttctccagtctgaagattccactggcagcatcacaacagaggaagtgcttcaaatcagggatgagaccccaactttggaggcttctctagataatgctaacagccggctgcctgaggatacaacttcagtattaaaggaggaacatgttacaacctttgaagatgaaggatcctatataattc

SEQ ID NO: 135383 - DNA, 1940 bp, Homo sapiens
  Payload ID: 6468
  Gene Symbol: FRYL
  Gene Name: FRY-like
  ENST ID: ENST00000506685
  CDS Start-End: 155-1570
ctttccctttaaggaatgtgctcagtatttcttagaagtgaaagataaagatataaaacatgcacttgctggtttatttgtggagattcttatccctgtagctgctgctgttaaaaatgaagtgaatgttccctgtttgaaaaattttgtggagatgctttatcagactacttttgaactgagctcgagaaagaagcattcattggctttatatccactaattacctgccttttatgtgtcagtcagaaacaattttttttaaataactggcatattttcctacagaactgtttgtcacatttaaagaataaagatccgaaaatgtctcgagttgcactggaatctttgtatagattattgtgggtttatgtaattagaataaaatgtgaaagcaacactgtaactcaaagtcgtcttatgagcatagtgtcagcactttttccaaaaggctcacgaagtgtggttcctcgtgacacacctctcaatatatttgtgaagattattcagttcattgctcaggaacgcttggattttgcaatgaaagaaataatatttgatcttctcagtgttggaaaatctactaaaactttcaccattaatccagagagaatgaacataggtctcagagtcttccttgtaatagcagacagtttgcagcagaaagatggtgaaccacccatgccaacaacaggagttattcttccctcaggaaatactcttcgtgtaaagaaaatatttctcaataaaaccttgacagatgaagaagcaaaagtcataggaatgtcagtttactatcctcaagtaagaaaagcattagatagcatcctcagacatttggacaaagaagttgggagaccaatgtgtatgaccagtgtgcagatgtctaataaggagcctgaagacatgattacgggggaaagaaaacccaagattgatttgtttagaacttgtattgctgcgattccaaggttgattcctgacggtatgagcagaactgacctgattgaattgttagcaaggctcacaattcatatggatgaagaactgcgtgctctggctttcaatactctgcaggcactaatgcttgattttccagattggcgggaggatgttctttcaggatttgtttattttattgttcgtgaagtgactgatgtccatcccacacttcttgataatgccgtaaagatgttggtacaattaataaatcagtggaaacaagcagcccaaatgcataataaaaaccaggacactcagcatggtgtagctaatggagcttctcatccccctcctctggaaaggagcccatattccaatgtattccatgtggttgaaggctttgcgcttgtcattctctgtagcagtcgacctgccactaggagactagccgtcagtgtccttagagaaatacgggctttatttgcacttctggaaatacctaagggtgatgatgaattagccatagatgtgatggacaggctaagcccatccattcttgagagcttcatacatctcactggggctgatcaggtaactatagtgacttcattctacccaatcttgttttgagacttatgacagacacatatgtatacatgtacatgtgcatacataaaataacttccttaacaaatgtaatgagttagaaagtatttttgaaaagtagaaaatgcttaagagtagtacttaaaaagtgacattcatttatacttggttaagtactcttctacatagaaataaaaattattttatgtttgtaaaattctcatccttccaatctaagaagtttctgttaaatggaatctttatgctaccgtttgctctttattatggcatataatattcgtgagatagaaatacttgtgaaaatgctacgggaaaaaaatggtgatactcaaagcaaaaacttacaccctgcttttttggcaactgttttttg

SEQ ID NO: 135384 - DNA, 11103 bp, Homo sapiens
  Payload ID: 6468
  Gene Symbol: FRYL
  Gene Name: FRY-like
  Uniprot ID: O94915
  ENST ID: ENST00000503238
  CDS Start-End: 1-9042
atgtcaaacattacgattgacccagatgtcaaacctggtgaatatgtcatcaagagcctctttgcagaatttgctgttcaagctgaaaagaaaattgaagttgtaatggccgaacccttggagaagctattgtccagatctcttcagaggggtgaagatcttcagtttgatcagttgataagctctatgagctcagtagcagagcactgtctcccttccttacttcgcaccttgtttgactggtacagacgccaaaatggaacggaagatgaatcttatgaatataggcctcggtctagcacaaagtctaagggggatgaacagcaacgtgaaagagattatcttcttgaaaggagggacttagcagtagacttcattttttgtttagttttagttgaagttctaaagcagattcctgttcatcctgtacccgatcccttagttcatgaagttctaaacttagcttttaagcactttaaacataaggaaggatattcaggaaccaacactgggaatgtgcatattattgctgatttatatgcagaggtgataggggttcttgcccaatcaaagtttcaggctgtaaggaagaagtttgtgacagaattaaaagaactgcgacaaaaggaacaaagcccacatgtggtacaaagtgtcatcagcttaataatgggaatgaaattttttcgagtaaaaatgtatcctgtagaagattttgaagcatcatttcaatttatgcaggaatgtgctcagtatttcttagaagtgaaagataaagatataaaacatgcacttgctggtttatttgtggagattcttatccctgtagctgctgctgttaaaaatgaagtgaatgttccctgtttgaaaaattttgtggagatgctttatcagactacttttgaactgagctcgagaaagaagcattcattggctttatatccactaattacctgccttttatgtgtcagtcagaaacaattttttttaaataactggcatattttcctacagaactgtttgtcacatttaaagaataaagatccgaaaatgtctcgagttgcactggaatctttgtatagattattgtgggtttatgtaattagaataaaatgtgaaagcaacactgtaactcaaagtcgtcttatgagcatagtgtcagcactttttccaaaaggctcacgaagtgtggttcctcgtgacacacctctcaatatatttgtgaagattattcagttcattgctcaggaacgcttggattttgcaatgaaagaaataatatttgatcttctcagtgttggaaaatctactaaaactttcaccattaatccagagagaatgaacataggtctcagagtcttccttgtaatagcagacagtttgcagcagaaagatggtgaaccacccatgccaacaacaggagttattcttccctcaggaaatactcttcgtgtaaagaaaatatttctcaataaaaccttgacagatgaagaagcaaaagtcataggaatgtcagtttactatcctcaagtaagaaaagcattagatagcatcctcagacatttggacaaagaagttgggagaccaatgtgtatgaccagtgtgcagatgtctaataaggagcctgaagacatgattacgggggaaagaaaacccaagattgatttgtttagaacttgtattgctgcgattccaaggttgattcctgacggtatgagcagaactgacctgattgaattgttagcaaggctcacaattcatatggatgaagaactgcgtgctctggctttcaatactctgcaggcactaatgcttgattttccagattggcgggaggatgttctttcaggatttgtttattttattgttcgtgaagtgactgatgtccatcccacacttcttgataatgccgtaaagatgttggtacaattaataaatcagtggaaacaagcagcccaaatgcataataaaaaccaggacactcagcatggtgtagctaatggagcttctcatccccctcctctggaaaggagcccatattccaatgtattccatgtggttgaaggctttgcgcttgtcattctctgtagcagtcgacctgccactaggagactagccgtcagtgtccttagagaaatacgggctttatttgcacttctggaaatacctaagggtgatgatgaattagccatagatgtgatggacaggctaagcccatccattcttgagagcttcatacatctcactggggctgatcagactactttgctctattgccctagctcgatagatttacaaactttagcagaatggaactcttctcctattagccaccagtttgatgtgattagtccatcacatatatggatatttgcacatgtgacccaaggccaagacccatggattataagtctctccagttttttaaagcaagaaaatcttcctaaacactgctctacagctgtgagctatgcttggatgtttgcatacacaagacttcagttgttgtcccctcaggtcgatataaatagccccatcaatgctaagaaagtaaataccaccacaagcagtgactcatacattggcctgtggagaaactatctgatcctttgctgcagtgcagcaacatcgtcatcttccacatctgcaggttctgtgagatgttctcctcctgagacgctggcgtctaccccagatagcggctatagcattgattctaaaattattggcatcccatccccttcatccttgtttaagcacatagttccaatgatgcgttctgagagcatggaaatcacagaatcccttgttctaggtcttggcaggaccaacccaggagcttttagggaactaatagaggaattacatcccataattaaagaagcactcgaaagaaggccagagaatatgaaacggcgcaggcgtcgagacattttacgagtacaactggtacgaatatttgaactgctggcagatgctggtgtcattagtcacagtgcaagtggtggccttgataatgaaacacattttctcaacaacactttattggaatatgtagatttaactagacaactcctggaagcagaaaatgaaaaagactctgacacactgaaggatatacgatgccattttagtgccttagtggcgaatattattcagaatgttccagtgcaccagagaagaagtatttttcctcaacagagccttcgtcacagtctatttatgctgttcagtcactgggcaggtccttttagcatcatgtttacgcccttggacagatacagtgatagaaatatgcaaattaatagacatcaatactgtgcgttaaaggctatgtctgctgtactgtgttgtggccctgttgcagataatgtaggactttcatcagatggctatttgtacaaatggttggataacattttggattctctggacaaaaaggttcaccagctgggctgtgaagcagttacgttgttactggagctgaaccctgatcagagcaacctgatgtactgggctgtggaccgctgctacacgggctccgggagggtggcggccggctgctttaaagccattgctaatgttttccagaacagggattatcaatgtgacacagtgatgcttctaaatctgatactgtttaaagcagctgattcttctagaagtatctatgaagttgctatgcaacttttacagattctggaaccgaagatgtttcgctatgctcacaaattggaggttcagagaacagatggagtactcagccagctgtctcctctaccacatctctattctgtttcatattatcagttgtccgaggaactagcaagggcgtatcctgagctaactctcgccatattctcagagataagccagagaatccagacagctcaccctgctgggcggcaggtgatgctgcactacctgctaccatggatgaacaacatcgagctggtggacttaaaacctctccccacagcaaggcgacatgatgaagatgaagatgattccttaaaagaccgagaacttatggtgactagtaggcgctggttacggggagaaggatggggatctccacaagccactgcaatggttttgaacaatctgatgtatatgacagcaaagtatggcgatgaactggcctggtcggaggtggagaatgtgtggaccacacttgcagatggctggcccaaaaacctgaaaataattttgcactttttgatcagcatttgtggggtgaatagcgaaccaagcctcttgccttacgtgaagaaggtcattgtatatttaggtagagataaaacaatgcagttgctagaagagctggtgagtgagcttcagctgaccgatcctgtcagttcaggggtcactcacatggataatcccccgtattatcgcatcacttccagctataaaatcccttctgtcacctcaggaactacttccagtagcaatacaatggtagctcccacagatggcaatcctgataataagcccattaaagagaatattgaagagagctatgtgcacctggacatttacagtggactaaacagtcatttgaatcggcaacatcacagactagaatcccgatacagtagcagctctggaggatcttatgaagaagaaaaaagtgattcaatgccactttattctaattggcgactgaaagtgatggagcataaccaaggagagccactgcccttcccaccagctggaggctgctggtcaccactggtggattacgtgcctgaaacgtcatcacctggattacctcttcacaggtgtaacatagcagtgatccttttgactgatctcatcattgatcatagtgtgaaggtggaatggggaagctacctccatcttcttcttcatgcaatttttatagggtttgaccactgccaccctgaggtgtatgaacattgtaaacgcctgcttctgcacttattaatagtaatgggacccaatagtaacatccgaactgttgcttctgtccttctcaggaacaaggagtttaatgagcccagggtgcttacagtcaaacaagttgcacacttagattataatttcacagcaggcattaacgattttatacctgattaccagccctcccctatgactgactcagggcttagctcaagttctacctcttctagtatcagcttaggaaataacagtgctgccatttcacatctgcacaccactatcctcaatgaggttgacatctcagtggagcaggatggaaaagtcaaaaccctcatggaattcattacctcaagaaaaagagggcccctttggaaccatgaggatgtttctgccaagaatcctagcataaagagtgctgaacagttaactacatttttgaaacatgtggtttctgtttttaagcagtcaagctcagaaggaattcatctggaacatcatcttagtgaagttgctctgcaaacagcactttcctgttcttctcgacactatgctgggagatcctttcagattttcagggccctaaagcagcctctcactgcaactacactttctgatgttctctccagacttgtagaaactgtaggggatccaggagaagatgcacagggatttgtgattgagcttcttctcacattggaatctgcaattgatactttggctgaaaccatgaagcattatgatcttctttctgccctttctcaaacctcatatcatgatcctataatgggaaacaagtatgcagctaacaggaaaagcactggacaactcaatctaagcacaagtcccattaatagtagcagttatttgggatataacagtaatgcaagaagtaactctttgagattaagtttgattggtgaccgacgaggtgaccggcggcggagtaacacactggatataatggatggacggataaaccatagcagtagtttagcaaggactagaagcctttcctctctaagagagaaaggaatgtatgacgtgcagtccactactgagcctaccaacttgatggccaccattttttggatagcagcatctttattagaatcagattatgaatatgaatacctcctggctctcaggcttctcaacaaactgcttatccatttgcctttggataaatcagagagtcgagagaagattgaaaatgtacaaagcaaattgaaatggactaattttccaggacttcagcagctcttccttaagggttttacctcagcatctacacaagaaatgaccgtgcacctcctcagtaaactcatttctgtctccaaacatacattggtggatccttcccaattgtcaggctttcctcttaacatcctttgcttattgcctcacttaatccagcattttgacagcccaactcagttttgcaaagaaacagctagtcgaatagcaaaggtttgtgcagaagaaaaatgcccaacacttgtcaatctggcacacatgatgagtttgtacagtacacacacgtattccagagactgttctaactggatcaatgtcgtgtgcagatacctgcatgactccttctcagatacaacatttaatcttgtgacttatcttgcagagctgttagagaaaggattgtccagtatgcagcaatcattactacagattatttatagtctattgagtcatattgacctgtctgcagccccagccaagcagtttaatctggagatcataaagattattggcaaatatgtacagagtccttactggaaggaagcccttaacatattaaagctggtggtgtcacgctctgcgagtcttgtcgtacccagtgatatccccaagacctatggaggagatacaggttctcctgaaatatccttcactaaaatttttaataatgtttctaaggagttgcctgggaagaccttagattttcattttgatatatctgagacaccaattattggaaacaaatatggtgatcagcacagtgcggctggaagaaatgggaaaccaaaagttattgctgtcactagaagtacttcctcaacttcttctggttctaattctaatgccttggttcctgttagttggaaaaggccacagttatcacagcgaagaacaagagaaaagctaatgaatgtgctttctctctgtggtccagaatctggcctcccaaagaacccatcagttgtattttcttctaatgaggatttggaagtcggtgaccaacagactagcctaatttctacaacagaagacataaatcaagaggaagaagtagctgtggaagataatagcagtgaacaacagtttggtgtttttaaggattttgactttttagatgttgaattggaagatgcagagggtgaaagtatggacaatttcaactggggagttcgcaggcgctcactggacagtattgacaaaggggacactccatccctccaggagtaccagtgctctagtagcacccccagcctgaacctcaccaatcaggaggatacagatgagtcctcggaagaagaagcggcacttacagcaagccagatactctcacgcacacagatgttaaacagtgattctgccactgatgaaacaataccagaccatcctgacttacttctccagtctgaagattccactggcagcatcacaacagaggaagtgcttcaaatcagggatgagaccccaactttggaggcttctctagataatgctaacagccggctgcctgaggatacaacttcagtattaaaggaggaacatgttacaacctttgaagatgaaggatcctatataattcaagaacagcaggaatctcttgtgtgtcaaggaattcttgatttagaagaaactgaaatgccagagcctctagctcctgaaagttaccccgagtcagtctgtgaagaggatgttaccttagctctgaaagagctagatgaaagatgtgaagaagaagaagcggatttctccggactgtctagtcaagatgaagaagagcaagatggttttccagaagtacagacgtcgcctctgccgtcaccatttctttctgccatcatagccgcctttcagcccgtggcatatgatgatgaagaggaagcctggcgctgccacgtcaatcagatgctgtctgacaccgacgggtcctctgcagtgtttacttttcatgtgttttctaggctgtttcagacaattcaaagaaagtttggagaaataactaatgaggcagtcagctttcttggtgatagtctgcaacgcattggtaccaaatttaaaagttccttggaagtgatgatgctgtgttcagaatgcccaacagtctttgtggatgctgaaacactgatgtcatgtggtttgctggaaacactcaagtttggtgttttggagttgcaagaacacctggatacatacaatgtgaaaagagaagccgctgagcagtggctagatgattgtaagaggacatttggtgccaaagaagacatgtataggataaacacagatgcacaacaaatggaaatactagcagaattggagctctgccgaagattatacaaattgcattttcaattgctgcttctgttccaggcctactgtaaacttatcaaccaagtaaatacgataaaaaatgaagcagaggtcatcaacatgtcagaggaacttgcccaactggaaagtatcctcaaagaagctgagtccgcttccgaaaacgaagaaattgacatttccaaagctgcacaaactactatagaaactgccattcattctttaattgaaactttgaaaaataaagaatttatatcagctgtagcacaagtcaaagctttcagatctctctggcccagtgatatctttggcagttgtgaagatgaccctgtacagacactgttacatatatatttccatcatcagacgctgggccagacaggaagctttgcagttataggctctaacctggacatgtcagaagccaactacaaactgatggaacttaatctggaaataagagagtctctacgcatggtgcaatcataccaacttctagcacaggccaaaccaatgggaaatatggtgagcactggattctgagacacttcaggcctttaggaaagaaactaaactgaagatgatgaagaatattaaccaagcaccttttatggacccttgcattcactgataactttctggcagcatctactttttagtgtaactaatgtcaaactgtatcatcaaaaacaaagatctgaaagaaaaaaacatctgatattttaacagctgccaatatctcccacaataactgcgtgaagaaggaattttttaattacttaacctacgtgaaaagaaaagggctaaaagtgatgcctacaaatacattactttctggggaaagaaaagaattccaagaatgtttgcaataatggcctccaatactgaaacaaccaaaagcaggtgaaatgaggctgaaatcaaggctgtttcattttagctgaagacctgcaaagctgcttggatttctagcagttgaaaacctaacctgcaattgatgcttaatcatccatccacatgaacatgcagtcagctatacgcatcaagactcgtttgcaaaaaccattgatttttcagtatgtgggataagggtttgggtttttttgttttttggtctgtataaggaattatgtgtgtgtgagttgggatgtatggatatgtgatagtcatattttcaaggtatggatgtttggtgataacgtctcagagcatgcctaaaagagcactgcaagattatttttgaagaaatgttattttattagatctaactcttcatagtatgtaaatgttagaacattttaataatattttaaaactgggctttcccagtatttcaaaaagaaataatatatctgttaacgttattggaatgctgctcagttctctgatcagtgcttatgttatgattgttgataactaaccaaagtagatgcctgcagagactttaaaatgtaaaataaagatgtatgctgcctgtcagctattctcattagaaaagttttaacttattttactccatatagaaactgtagagactaaaaccagttattttcttgtacatttgtgccatgcactgttgttatacaagaataggtgtacaaagctaaagaaaaattgtggtcattgatgatggaatatatgacttgcaggctttgaagtctgcagaattcaagaaaagagctgcaaatgcatttttgtatctttattcaggactcacatgctttaccctaaagaaacctggggctaggggaaatgaaaggaagcctgaagactgactaccaaaacatgcaatatacttattcactgtctaagtctgtagtataacatgaactggagtctctatccttttctaaaatcgcattttgtaagaaaagaaagaaaaaaaaaaaaaaagaatgtagtcccacaactcctgatttgaaagaaacaccttgtattttttatatacatctcttatccactgtgacttttcttttaaactgggctctgtgattccagagtttagaatgtagaaatgaaatgcttagctttaccttttcttggggggtgtggaccctgccagaaatgtaattacgtatgctcaagtgcattaattgaaggcactgtgcacaccattggactgctgaccacagttaaacatttccagtaaaatttcgtaactggtcacagctcattcataatcactgtattttttgaccctgataaagacaattattttgatggtgttctggtactgtaattggtatcctttaaattatttaaaacttttgggtgtggggcaggcagagagggatggtgtccagagatacatcacactttacatcctatcttactgtcctctgtttttcttaccctccttacatcctttttgttaaaaataaaaagcattgtagctgttggtttgtgttgtattttaacaaagaatgaatgattacagtgtgcatcatttagaaacctttcaaatgttaccttcttgaattgccctagaaaagaacaaaattagttgactacccaaccaaacctttcagttgatatttgctttttgtgtttatttatatgtaactaagtctattaatataataaaaatgaatatacctgcagcaa

SEQ ID NO: 135385 - DNA, 1074 bp, Homo sapiens
  Payload ID: 6469
  Gene Symbol: FRG1
  Gene Name: FSHD region gene 1
  Uniprot ID: Q14331
  ENST ID: ENST00000226798
  CDS Start-End: 223-999
ggccctctgcggccgccgtagctccccggcagaaacccggaagtggaactctgagccattcagcgtttgggtgaagacggaggcgggttctacagagacgtaggctgtcagggagtgtttatttcgcgtccgcttctgtttctccgcgcccctgtgctgccccgactcacatactcgtccagaaccggcctcagcctctccgcgcagaagtttcccggagccatggccgagtactcctacgtgaagtctaccaagctcgtgctcaagggaaccaagacgaagagtaagaagaaaaagagcaaagataagaaaagaaaaagagaagaagatgaagaaacccagcttgatattgttggaatctggtggacagtaacaaactttggtgaaatttcaggaaccatagccattgaaatggataagggaacctatatacatgcactcgacaatggtctttttaccctgggagctccacacaaagaagttgatgagggccctagtcctccagagcagtttacggctgtcaaattatctgattccagaatcgccctgaagtctggctatggaaaatatcttggtataaattcagatggacttgttgttgggcgttcagatgcaattggaccaagagaacaatgggaaccagtctttcaaaatgggaaaatggctttgttggcctcaaatagctgctttattagatgcaatgaagcaggggacatagaagcaaaaagtaaaacagcaggagaagaagaaatgatcaagattagatcctgtgctgaaagagaaaccaagaaaaaagatgacattccagaagaagacaaaggaaatgtaaaacaatgtgaaatcaattatgtaaagaaatttcagagcttccaagaccacaaacttaaaataagtaaagaagacagtaaaattcttaaaaaggctcggaaagatggatttttgcatgagacgcttctggacaggagagccaaattgaaagccgacagatactgcaagtgactgggatttttgtttctgccttatctttctgtgtttttttctgaataaaatattcagaggaaatgcttttacaga

SEQ ID NO: 135386 - DNA, 755 bp, Homo sapiens
  Payload ID: 6469
  Gene Symbol: FRG1
  Gene Name: FSHD region gene 1
  ENST ID: ENST00000524583
  CDS Start-End: 448-755
gcgggttctacagagacgtaggctgtcagggagtgtttatttcgcgtccgcttctgtttctccgcgcccctgtgctgccccgactcacatactcgtccagaaccggcctcagcctctccgcgcagaagtttcccggagccatggccgagtactcctacgtgaagtctaccaagctcgtgctcaagggaaccaagacgaagaggcgagatagaaagtatcaaggagtgagttgaagccactggccttgagaaccctctcgaggagtctggcctcatgaagatgccagaataaatggcagtaagaagaaaaagagcaaagataagaaaagaaaaagagaagaagatgaagaaacccagcttgatattgttggaatctggtggacagtaacaaactttggtgaaatttcaggaaccatagccattgaaatggataagggaacctatatacatgcactcgacaatggtctttttaccctgggagctccacacaaagaaggggaaaatggctttgttggcctcaaatagctgctttattagatgcaatgaagcaggggacatagaagcaaaaagtaaaacagcaggagaagaagaaatgatcaagattagatcctgtgctgaaagagaaaccaagaaaaaagatgacattccagaagaagacaaaggaaatgtaaaacaatgtgaaatcaattatgtaaagaaatttcagagcttccaagaccacaaacttaaaataagtaaagaagacagtaaaattct

SEQ ID NO: 135387 - DNA, 738 bp, Homo sapiens
  Payload ID: 6469
  Gene Symbol: FRG1
  Gene Name: FSHD region gene 1
  ENST ID: ENST00000531991
  CDS Start-End: 391-738
agtgtttatttcgcgtccgcttctgtttctccgcgcccctgtgctgccccgactcacatactcgtccagaaccggcctcagcctctccgcgcagaagtttcccggagccatggccgagtactcctacgtgaagtctaccaagctcgtgctcaagggaaccaagacgaagaggcgagatagaaagtatcaaggagtgagttgaagccactggccttgagaaccctctcgaggagtctggcctcatgaagatgccagaataaatgtaagaagaaaaagagcaaagataagaaaagaaaaagagaagaagatgaagaaacccagcttgatattgttggaatctggtggacagtaacaaactttggtgaaatttcaggaaccatagccattgaaatggataagggaacctatatacatgcactcgacaatggtctttttaccctgggagctccacacaaagaagttgatgagggccctagtcctccagagcagtttacggctgtcaaattatctgattccagaatcgccctgaagtctggctatggaaaatatcttggtataaattcagatggacttgttgttgggcgttcagatgcaattggaccaagagaacaatgggaaccagtctttcaaaatgggaaaatggctttgttggcctcaaatagctgctttattagatgcaatgaagcaggggacatagaagcaaaaagtaaaacagcaggagaagaagaaatgatcaag

SEQ ID NO: 135388 - DNA, 714 bp, Homo sapiens
  Payload ID: 6469
  Gene Symbol: FRG1
  Gene Name: FSHD region gene 1
  ENST ID: ENST00000533157
  CDS Start-End: 112-240
ggagtgtttatttcgcgtccgcttctgtttctccgcgcccctgtgctgccccgactcacatactcgtccagaaccggcctcagcctctccgcgcagaagtttcccggagccatggccgagtactcctacgtgaagtctaccaagctcgtgctcaagggaaccaagacgaagagatttgcccgaggtacatacaaatgtcgagtatttcctcctggtctccgtgataaacagaggttttgatatttttaggcgagatagaaagtatcaaggagtgagttgaagccactggccttgagaaccctctcgaggagtctggcctcatgaagatgccagaataaatggcagtaagaagaaaaagagcaaagataagaaaagaaaaagagaagaagatgaagaaacccagcttgatattgttggaatctggtggacagtaacaaactttggtgaaatttcaggaaccatagccattgaaatggataagggaacctatatacatgcactcgacaatggtctttttaccctgggagctccacacaaagaagttgatgagggccctagtcctccagagcagtttacggctgtcaaattatctgattccagaatcgccctgaagtctggctatggaaaatatcttggtataaattcagatggacttgttgttgggcgttcagatgcaattggaccaagagaacaatgggaaccagtctttcaaaa

SEQ ID NO: 135389 - DNA, 421 bp, Homo sapiens
  Payload ID: 6469
  Gene Symbol: FRG1
  Gene Name: FSHD region gene 1
  ENST ID: ENST00000507103
  CDS Start-End: 1-255
attagatcctgtgctgaaagagaaaccaagaaaaaagatgacattccagaagaagacaaaggaaatgtaaaacaatgtgaaatcaattatgtatggagtctcgctctctcccccagactagagtgccatggcgcgatctcggctcatcgcaacctccgcttcccaggttcatgtgattctcctgcctcagcctcccgagtagctgggactacagaaagaaatttcagagcttccaagaccacaaacttaaaataagtaaagaagacagtaaaattcttaaaaaggctcggaaagatggatttttgcatgagacgcttctggacaggagagccaaattgaaagccgacagatactgcaagtgactgggatttttgtttctgccttatctttctgtgtttttttctgaataaaatattcagag

SEQ ID NO: 135390 - DNA, 1074 bp, Homo sapiens; identical to SEQ ID NO: 135385
  Payload ID: 6469
  Gene Symbol: FRG1
  Gene Name: FSHD region gene 1
  Uniprot ID: Q14331
  ENST ID: ENST00000620886
  CDS Start-End: 223-999

SEQ ID NO: 135391 - DNA, 755 bp, Homo sapiens; identical to SEQ ID NO: 135386
  Payload ID: 6469
  Gene Symbol: FRG1
  Gene Name: FSHD region gene 1
  ENST ID: ENST00000624356
  CDS Start-End: 448-755

SEQ ID NO: 135392 - DNA, 714 bp, Homo sapiens; identical to SEQ ID NO: 135388
  Payload ID: 6469
  Gene Symbol: FRG1
  Gene Name: FSHD region gene 1
  ENST ID: ENST00000625559
  CDS Start-End: 112-240

SEQ ID NO: 135393 - DNA, 738 bp, Homo sapiens; identical to SEQ ID NO: 135387
  Payload ID: 6469
  Gene Symbol: FRG1
  Gene Name: FSHD region gene 1
  ENST ID: ENST00000627466
  CDS Start-End: 391-738

SEQ ID NO: 135394 - DNA, 421 bp, Homo sapiens; identical to SEQ ID NO: 135389
  Payload ID: 6469
  Gene Symbol: FRG1
  Gene Name: FSHD region gene 1
  ENST ID: ENST00000627980
  CDS Start-End: 1-255

SEQ ID NO: 135395 - DNA, 2084 bp, Homo sapiens
  Payload ID: 6470
  Gene Symbol: FRG2
  Gene Name: FSHD region gene 2
  Uniprot ID: Q64ET8
  ENST ID: ENST00000378763
  CDS Start-End: 54-890
cacactctgcctttggacgtgagagagagcgcacctttcacttgagcttcaacatgggaaagggaaatgaagactccgatctccactgctcctccatccagtgctccactgaccagccccctttccaacagatctcctttacagaaaagggctcagatgagaagaaaccattcaaagaaaaaggcaagaccgccttctcccattccagtgagaagcacatacaaaggcaaggatcggagcccaatccaaacaaggagaattctgaggaaaccaagctcaaggccgggaacagcactgctggatcagaaccagagtccagctcatatcgggaaaactgcaggaaaagaaaaatgagttccaaggacagctgccaagacacagcagggaactgtccagaaaaggagtgcagcttgtcattgaataaaaaatcaagatcctccactgctgtgcacaacagtgaaatccaggagacctgtgatgcccaccataggggacattccagggcttgcactgggcacagcaagcggcataggtctcgggccctaggagtccaaacaccgtcaattcgaaaaagcttggtgacttctgtgcgagctatgtcagaggctgtttatcaagacctagcccaggtgtgggcacagcagatccattctccacttacctgtgagcagctgacactgctcactcggctccgggggcctctgtgtgcccaggtgcagaccttgtattccatggccacccaggcagcttatgtcttccctgctgagagctggcttgtcccagccacactgccaggtcctggggaatcagccctggatagagaagcccatcccttccctgggcaggagataactgagactgtcagtggatcagatgaggctaagctgtgagcaccctgaccctattcagcagagatgcagctctgggaatgagaacaaggatctgcttcttctcagattcttccagatgaccagcagtgacaattttagacacactgtgttaataaatgacagaacctgaagaagtcataggaaagaaacttgagcggtatactcagaatggtgagagccctgaattttgcagaccgctaagactatagacaaattttatatttcatgttagacatttgatgccttttggatgtctgatgacagtcatgcatttctatataatcagaaaaacattagaatgtaatcgtgaatttgcatattttagattgtagaaaagtaaatataaaattatgtgctccttttttgtttttttttttttttgagacagtcttgctatgttacccaggctggagtgcagtggcacaatcttagctcactgcaacctctgcttcctgggttcaaacaattctcatgcctcagcctcccaagcagctgggactacaggcatgtactgctatgcctggctaattttttttttcctgtattgttagtagagacagagttttgtcactttggccaggttggcctcgaactcaggtgatctgccagcctccgcctcccaacgtgctgggattacaggcatgagccgccttaccaagaaattgcttctcttttaatccagaaaaggttgtaggctctcactcttccagcctgaacccatggagtactaatatccacaaaccattaatagcactccctgtgggaaaatgtctatatatttttagtttgatataattatagtaaaattactatgcaagctgtttacttttaatatttctacataaaatttaagtcaagatatagtaaatggtaaatgattgtacttatttattgacctgcctcatgtttcatttcattttaaacatcctaaatttatattttattatattttatacatttcaattgattgtactatattgcaggatatggagatttcatcacgtactacaatacagtgtattttgttatatttgacgtatattctacttgtattttgtactgagatcatacactatttcattatctaagtgtattaattgtttggttgctttataattttcattttatgtaatgaaataaacaatgttgtttggaattttaaatttctttcatatggaatttgtatttaataaa

SEQ ID NO: 135396 - DNA, 2100 bp, Homo sapiens
  Payload ID: 6470
  Gene Symbol: FRG2
  Gene Name: FSHD region gene 2
  Uniprot ID: Q64ET8
  ENST ID: ENST00000504750
  CDS Start-End: 51-890
actctgcctttggacgtgagagagagcgcacctttcacttgagcttcaacatgggaaagggaaatgaagactccgatctccactgctcctccatccagtgctccactgaccagccccctttccaacagatctcctttacagaaaagggctcagatgagaagaaaccattcaaagaaaaaggcaagaccgccttctcccattccagtgagaagcacatacaaaggcaagcaggatcggagcccaatccaaacaaggagaattctgaggaaaccaagctcaaggccgggaacagcactgctggatcagaaccagagtccagctcatatcgggaaaactgcaggaaaagaaaaatgagttccaaggacagctgccaagacacagcagggaactgtccagaaaaggagtgcagcttgtcattgaataaaaaatcaagatcctccactgctgtgcacaacagtgaaatccaggagacctgtgatgcccaccataggggacattccagggcttgcactgggcacagcaagcggcataggtctcgggccctaggagtccaaacaccgtcaattcgaaaaagcttggtgacttctgtgcgagctatgtcagaggctgtttatcaagacctagcccaggtgtgggcacagcagatccattctccacttacctgtgagcagctgacactgctcactcggctccgggggcctctgtgtgcccaggtgcagaccttgtattccatggccacccaggcagcttatgtcttccctgctgagagctggcttgtcccagccacactgccaggtcctggggaatcagccctggatagagaagcccatcccttccctgggcaggagataactgagactgtcagtggatcagatgaggctaagctgtgagcaccctgaccctattcagcagagatgcagctctgggaatgagaacaaggatctgcttcttctcagattcttccagatgaccagcagtgacaattttagacacactgtgttaataaatgacagaacctgaagaagtcataggaaagaaacttgagcggtatactcagaatggtgagagccctgaattttgcagaccgctaagactatagacaaattttatatttcatgttagacatttgatgccttttggatgtctgatgacagtcatgcatttctatataatcagaaaaacattagaatgtaatcgtgaatttgcatattttagattgtagaaaagtaaatataaaattatgtgctccttttttgtttttttttttttttgagacagtcttgctatgttacccaggctggagtgcagtggcacaatcttagctcactgcaacctctgcttcctgggttcaaacaattctcatgcctcagcctcccaagcagctgggactacaggcatgtactgctatgcctggctaattttttttttcctgtattgttagtagagacagagttttgtcactttggccaggttggcctcgaactcaggtgatctgccagcctccgcctcccaacgtgctgggattacaggcatgagccgccttaccaagaaattgcttctcttttaatccagaaaaggttgtaggctctcactcttccagcctgaacccatggagtactaatatccacaaaccattaatagcactccctgtgggaaaatgtctatatatttttagtttgatataattatagtaaaattactatgcaagctgtttacttttaatatttctacataaaatttaagtcaagatatagtaaatggtaaatgattgtacttatttattgacctgcctcatgtttcatttcattttaaacatcctaaatttatattttattatattttatacatttcaattgattgtactatattgcaggatatggagatttcatcacgtactacaatacagtgtattttgttatatttgacgtatattctacttgtattttgtactgagatcatacactatttcattatctaagtgtattaattgtttggttgctttataattttcattttatgtaatgaaataaacaatgttgtttggaattttaaatttctttcatatggaatttgtatttaataaaaatgtgaaaaagagaa

SEQ ID NO: 135397 - DNA, 2084 bp, Homo sapiens; identical to SEQ ID NO: 135395
  Payload ID: 6470
  Gene Symbol: FRG2
  Gene Name: FSHD region gene 2
  Uniprot ID: Q64ET8
  ENST ID: ENST00000611713
  CDS Start-End: 54-890

SEQ ID NO: 135398 - DNA, 2100 bp, Homo sapiens; identical to SEQ ID NO: 135396
  Payload ID: 6470
  Gene Symbol: FRG2
  Gene Name: FSHD region gene 2
  Uniprot ID: Q64ET8
  ENST ID: ENST00000629452
  CDS Start-End: 51-890

SEQ ID NO: 135399 - DNA, 890 bp, Homo sapiens
  Payload ID: 6471
  Gene Symbol: FRG2B
  Gene Name: FSHD region gene 2 family, member B
  Uniprot ID: Q96QU4
  ENST ID: ENST00000425520
  CDS Start-End: 54-890
cacactctgcctttggacgtgagagagagcgcacctttcacttgagcttcaacatgggaaagggaaatgaagaccccgatctccactgctcctccatccagtgctccactgaccagccccctttccaacagatctcctttacagaaaagggctcagatgagaagaaaccattcaaagaaaaaggcaagaccgccttctcccattccagtgagaagcacatacaaaggcaaggatcggagcccaatccaaacaaggagaattctgaggaaaccaagctcaaggccgggaacagcactgctggatcagaaccagagtccagctcatatcgggaaaactgcaggaaaagaaaaatgagttccaaggacagctgccaagacacagcagggaactgtccagaaaaggagtgcagcttgtcattgaataaaaaatcaagatcctccactcctgtgcacaacagtgaaatccaggagacctgtgatgcccaccataggggacgttccagggcttgcactgggcgcagcaagcggcataggtctcgggccctaggagtccaaacaccgtcaattcgaaaaagcttggtgacctctgtgcgagctatgtcagaggctgtttatcaagacctagcccaggtgtgggcacagcagatccattctccacttacctgtgagcagctgacactgctcactcggctccgggggcctctgtgtgcccaggtgcagaccttgtattccatggccacccaggcagcttatgtcttccctgctgagagctggcttgtcccagccacactgccaggtcctggggaatcagccctggatagagaagcccatcccttccctgggcaggagataactgagactgtcagtggatcagatgaggctaagctgtga

SEQ ID NO: 135400 - DNA, 2094 bp, Homo sapiens
  Payload ID: 6471
  Gene Symbol: FRG2B
  Gene Name: FSHD region gene 2 family, member B
  ENST ID: ENST00000443774
  CDS Start-End: 51-890
actctgcctttggacgtgagagagagcgcacctttcacttgagcttcaacatgggaaagggaaatgaagaccccgatctccactgctcctccatccagtgctccactgaccagccccctttccaacagatctcctttacagaaaagggctcagatgagaagaaaccattcaaagaaaaaggcaagaccgccttctcccattccagtgagaagcacatacaaaggcaagcaggatcggagcccaatccaaacaaggagaattctgaggaaaccaagctcaaggccgggaacagcactgctggatcagaaccagagtccagctcatatcgggaaaactgcaggaaaagaaaaatgagttccaaggacagctgccaagacacagcagggaactgtccagaaaaggagtgcagcttgtcattgaataaaaaatcaagatcctccactcctgtgcacaacagtgaaatccaggagacctgtgatgcccaccataggggacgttccagggcttgcactgggcgcagcaagcggcataggtctcgggccctaggagtccaaacaccgtcaattcgaaaaagcttggtgacctctgtgcgagctatgtcagaggctgtttatcaagacctagcccaggtgtgggcacagcagatccattctccacttacctgtgagcagctgacactgctcactcggctccgggggcctctgtgtgcccaggtgcagaccttgtattccatggccacccaggcagcttatgtcttccctgctgagagctggcttgtcccagccacactgccaggtcctggggaatcagccctggatagagaagcccatcccttccctgggcaggagataactgagactgtcagtggatcagatgaggctaagctgtgagcaccctgaccctattcagcagagatgcagctctgggaatgagaacaaggatctgcttcttctcagattcttccagatgaccagcagtgacaattttagacacactgtgttaataaatgacagaacctgaagaagtcataggaaagaaacttgagcggtatactcagaatggtgagagccctgaattttgcagaccgctaagactatagacaaattttatatttcatgttagacatttgatgccttttggatgtctgatgacagtcatgcatttctatataatcagaaaaacattagaatgtaatcgtgaatttgcatattttagattgtagaaaagtaaatataaaattatgtgctccttttttgtttttttttttgagacagtcttgctatgttacccaggctggagtgcagtggcacaatcttagctcactgcaacctctgcttcctgggttcaaacaattctcatgcctcagcctcccaagcagctgggactacaggcatgtactgctatgcctggctaattttttttttcctgtattgttagtagagacagagttttgtcactttggccaggttggcctcgaactcaggtgatctgccagcctccgcctcccaacgtgctgggattacaggcatgagccgccttaccaagaaattgcttctcttttaatccagaaaaggttgtaggctctcactcttccagcctgaacccatggagtactaatatccacaaaccattaatagcactccctgtgggaaaatgtctatatattttgtttgatataattatagtaaaattactatgcaagctgtttacttttaatatttctacataaaatttaagtcaagatatagtaaatggtaaatgattgtacttatttattgacctgcctcatgtttcatttcattttaaacatcctaaatttatattttattatattttatacatttcaattgattgtactatattgcaggatatggagatttcatcacgtactacaatacagtgtattttgttatatttgacgtatattctacttgtattttgtactgagatcatacactatttcattatctaagtgtattaattgtttggttgctttataattttcattttatgtaatgaaataaacaatgttgtttggaattttaaatttctttcatatggaatttgtatttaataaaaatgtgaaaaagagaa

SEQ ID NO: 135401 - DNA, 2078 bp, Homo sapiens
  Payload ID: 6472
  Gene Symbol: FRG2C
  Gene Name: FSHD region gene 2 family, member C
  Uniprot ID: A6NGY1
  ENST ID: ENST00000308062
  CDS Start-End: 51-899
actctgcctttggacatgtgagagagcgcacctttcacttgagcttcaacatgggaaagggaaatgaagaccccgatctccactgttcctccatccagtgctccactgaccagccccctttccaacagatctcctttacagaaaagggctcagatgagaagaaaccattcaaaggaaaaggcaagaccgccttctcccattccagtgagaagcacacacaaaggcaagcaggatcagatcccaatccaaacaaggagaattctgaggaaaccaagctcaaggccgggaacagcactgctggatcagaaccagagtccagctcatatcaggaaaactgcaggaaaagaaaaatcagttccaaggatatctgccaagacagagcagggaactgtccagaagaggagtgcaacttgacgttgaataaaaaatcaagatcctccactgctgtgcacaacagtgaaatccaggagacctgtgatgcccaccataggggaagttccagggcttgcactgggcgcagcaagcggcataggtctcgggccctagaagtccaaacaccgtcacttcgaaaaagcttggtgacctctgtgcgagctatgtcggaggctgtttatcaagacctagcccaggtgtgggcacagcagatccattctccactgacctgtgagcagctgacactgctcactcggctccgggggcctctgtgtgcccaggtgcagaccttgtattccatggccactcaggcagcttatgtcttccctgctgagagctggcttgtcccagccacactgcctggtcctggggattcagccctggatagagaagcccatcccttccctgggcaggagataactgagcctgtcagtggatcagatgaggctaagctgggagcaccctgaccctattcagcagagatgcagctctgggaatgagaacaaggacctgcttcttctcagattcttccagacgaccagcagtgacaattttagatgcactgtgttaataaatgacagaacctgaagaagtcataggaaagaaacttgagcggtatactcagaatggtgagccctgaattttgcagaccgctaaggctatagacaaattttatatttcatgttagacatttgataccttttggatgtctgatgacagtcgtgcatttctatataatcagaaaaatattaggttgcaatcgtgaattttcatattttagattgtagaaaagtaaatataaaattatatgctctttttttttttgagacagtcttgctatgtcactcaggctggagtgcagtggcacaatcttagctcactgcaacctctgcttcctgggttcaaacaattctcatgcctcagcctcccaagtagctgggactacaggcatgtaccgccatgcctggctaatgtttttttcttgtattgttagtagagttttgtcacgttggccaggttggcctcggactcaagtgatccaccagcctccacctcccgacgtggtggggttacaggcatgagccgctttaccaagaaattgcttctcttttaattcggaaaaggttgtaggctcttccagcctgaacccatggagtactaacatccacaaaccattaatagcactccctgtgggaaaatgtttatacatttttacagtttgcatagtaaaattactatgcaagctgtttacttttaatatttctacataaaatttaagtcaagatatattaaatggtaaatgattgtacttatttattcatctgcctcatgttttatttcattttaaacatcctgaatttatattttattgtatttcatacatttcaattgattgtactgtattgcaggatatggagatttcatcacatactacaatacagtgtattttgttatatttgacgtatattctacttgtattttgtactgagatcatacaatctttcattatctaagtgtattaatgacttgtttggttgctttataattttcattttatgtaataatgaaataaacattaatgttgtttggaattttaaatttctttcatatggaatttgtatttaataaagatgtgaaaaagagaa

SEQ ID NO: 135402 - DNA, 2075 bp, Homo sapiens
  Payload ID: 6472
  Gene Symbol: FRG2C
  Gene Name: FSHD region gene 2 family, member C
  ENST ID: ENST00000464571
  CDS Start-End: 51-896
actctgcctttggacatgtgagagagcgcacctttcacttgagcttcaacatgggaaagggaaatgaagaccccgatctccactgttcctccatccagtgctccactgaccagccccctttccaacagatctcctttacagaaaagggctcagatgagaagaaaccattcaaaggaaaaggcaagaccgccttctcccattccagtgagaagcacacacaaaggcaaggatcagatcccaatccaaacaaggagaattctgaggaaaccaagctcaaggccgggaacagcactgctggatcagaaccagagtccagctcatatcaggaaaactgcaggaaaagaaaaatcagttccaaggatatctgccaagacagagcagggaactgtccagaagaggagtgcaacttgacgttgaataaaaaatcaagatcctccactgctgtgcacaacagtgaaatccaggagacctgtgatgcccaccataggggaagttccagggcttgcactgggcgcagcaagcggcataggtctcgggccctagaagtccaaacaccgtcacttcgaaaaagcttggtgacctctgtgcgagctatgtcggaggctgtttatcaagacctagcccaggtgtgggcacagcagatccattctccactgacctgtgagcagctgacactgctcactcggctccgggggcctctgtgtgcccaggtgcagaccttgtattccatggccactcaggcagcttatgtcttccctgctgagagctggcttgtcccagccacactgcctggtcctggggattcagccctggatagagaagcccatcccttccctgggcaggagataactgagcctgtcagtggatcagatgaggctaagctgggagcaccctgaccctattcagcagagatgcagctctgggaatgagaacaaggacctgcttcttctcagattcttccagacgaccagcagtgacaattttagatgcactgtgttaataaatgacagaacctgaagaagtcataggaaagaaacttgagcggtatactcagaatggtgagccctgaattttgcagaccgctaaggctatagacaaattttatatttcatgttagacatttgataccttttggatgtctgatgacagtcgtgcatttctatataatcagaaaaatattaggttgcaatcgtgaattttcatattttagattgtagaaaagtaaatataaaattatatgctctttttttttttgagacagtcttgctatgtcactcaggctggagtgcagtggcacaatcttagctcactgcaacctctgcttcctgggttcaaacaattctcatgcctcagcctcccaagtagctgggactacaggcatgtaccgccatgcctggctaatgtttttttcttgtattgttagtagagttttgtcacgttggccaggttggcctcggactcaagtgatccaccagcctccacctcccgacgtggtggggttacaggcatgagccgctttaccaagaaattgcttctcttttaattcggaaaaggttgtaggctcttccagcctgaacccatggagtactaacatccacaaaccattaatagcactccctgtgggaaaatgtttatacatttttacagtttgcatagtaaaattactatgcaagctgtttacttttaatatttctacataaaatttaagtcaagatatattaaatggtaaatgattgtacttatttattcatctgcctcatgttttatttcattttaaacatcctgaatttatattttattgtatttcatacatttcaattgattgtactgtattgcaggatatggagatttcatcacatactacaatacagtgtattttgttatatttgacgtatattctacttgtattttgtactgagatcatacaatctttcattatctaagtgtattaatgacttgtttggttgctttataattttcattttatgtaataatgaaataaacattaatgttgtttggaattttaaatttctttcatatggaatttgtatttaataaagatgtgaaaaagagaa

SEQ ID NO: 135403 - DNA, 3559 bp, Homo sapiens
  Payload ID: 6473
  Gene Symbol: FTSJ3
  Gene Name: FtsJ homolog 3 (E. coli)
  Uniprot ID: Q8IY81
  ENST ID: ENST00000427159
  CDS Start-End: 647-3190
gacacagcagatccggtcgcaggcagcgtccagcatggactggtccaggcacctccgacccacccgacgctcctgccccggcccgctctccactcagatcacgctcgctccgcacccagccccgtaacctgccgggccgccactgcacccgccatacctgctctggtccgtcaagcgccatcttctctcttcagcagagaccgccggcatccgagccgtcttggcgcgcaagcgcggaagcggaggattgggacctgaagaccaggcagagaagaattccgggtcaatgggcggggtgtgcggcgagaccacactaagggaaccatgatgggaggggcggctactcgagttcaggggctttggaaggggatgaggaaggagtagaactcctcctcagtgttgcctcattgaaactctgtttatagttcttgtgatatgccttcctagtctcaactttcaacttacaaaacccaaggacagagtattgagaacaatctagggccacactcaaaatggcggaaaacctcgagccagggacgcaggggacgcaagcggaagcggaagtagttagctgcatacttgtgcggttccaagtgtggagaaagcggctctgggtctagattgagggatactccccctttccaccatgggcaagaagggcaaagttggcaagagccgacgagacaagttttatcacttggcgaaggagacgggttaccgttcccgatctgctttcaagctgatccagctcaatcgccgctttcagttcctgcagaaagcccgagccttgctggacctgtgtgctgcgccagggggatggctgcaggtagctgccaagtttatgcctgtatccagccttattgtgggagtggacctggttccaatcaagcctctccccaatgtggtgactctccagcaggacatcacaacagaacgttgtaggcaggccctgaggaaggagctgaagacctggaaggttgatgttgtgctcaatgatggggcccccaacgttggggctagctgggtccatgatgcttactcacaagcccatttgacactgatggctctacgtttggcttgtgactttttggcccgtggtggcagcttcatcacaaaggttttccgttctcgtgactatcagcctctgctatggatctttcagcagctgttccgccgtgtccaggccaccaagccccaagcctctcgccatgaatctgcagagatctttgtagtctgccaaggattcctggcccctgacaaggttgacagtaaattctttgaccccaaatttgcctttaaggaggttgaagttcaggctaagaccgttactgaattggttactaagaagaagccaaaggctgaaggctatgctgagggtgacctcactctctatcaccgtacctcagtcactgacttcctccgagctgccaaccctgttgacttcctctccaaggccagcgaaatcatggtagatgatgaagagttggcacagcatccagctaccactgaggacatacgggtgtgctgtcaggacatcagagtgttggggcgcaaggagctcaggtcgctactaaactggagaacaaaacttcggcgatatgtggccaagaagctgaaagaacaagcaaaggcactggacatcagcctcagctctggagaggaagatgaaggtgatgaggaggactcaacagctggaaccacaaagcagccctctaaggaggaggaggaagaggaggaggaggaacaactgaaccagaccttggcagaaatgaaggcccaggaggtggcggaattgaagaggaagaaaaagaagctgttgcgtgagcagagaaagcagcgggagcgtgtggagctgaagatggatctgcctggggtttccattgcagacgagggggagactggcatgttctccttgagcaccatccggggtcaccagttattagaggaagtaacacaaggggatatgagtgcagcagacacatttctgtccgatctgccaagggatgatatctatgtgtcagatgttgaggacgacggtgatgacacatctctggatagtgacctggatccagaggagctggcaggagtcaggggacatcagggtctaagggaccaaaagcgtatgcgacttactgaagtgcaagatgataaagaggaggaggaggaggagaatccactgctggtaccactggaggaaaaggcagtactgcaggaagaacaagccaacctgtggttctcaaagggcagctttgctgggatcgaggacgatgccgatgaggccctggagatcagtcaggcccagctgttatttgagaaccggcggaagggacggcagcagcagcagaagcagcagctgccacagacacccccttcctgtttgaagactgagataatgtctcccctgtaccaagatgaagcccctaagggaacagaggcttcttcggggacagaagctgccactggccttgaaggggaagaaaaggatggcatctcagacagtgatagcagtactagcagtgaggaagaagagagctgggaacccctccgtggtaagaagcgaagccgtgggcctaagtcagatgatgacgggtttgagatagtgcctattgaggacccagcgaaacatcggatactggaccccgaaggccttgctctaggtgctgttattgcctcttccaaaaaggccaagagagacctcatagataactccttcaaccggtacacatttaatgaggatgagggggagcttccggagtggtttgtgcaagaggaaaagcagcaccggatacgacagttgcctgttggtaagaaggaggtggagcattaccggaaacgctggcgggaaatcaatgcacgtcccatcaagaaggtggctgaggctaaggctagaaagaaaaggaggatgctgaagaggctggagcagaccaggaagaaggcagaagccgtggtgaacacagtggacatctcagaacgagagaaagtggcacagctgcgaagtctctacaagaaggctgggcttggcaaggagaaacgccatgtcacctacgttgtagccaaaaaaggtgtgggccgcaaagtgcgccggccagctggagtcagaggtcatttcaaggtggtggactcaaggatgaagaaggaccaaagagcacagcaacgtaaggaacaaaagaaaaaacacaaacggaagtaagcagagctgccaggctcccaggagagcatggggactaggaggaagggtgtggcatggctcagtctggcccccttgattaccggcctagcccctgctcacatcacagctgtctgaagaacagtgaggtggagtgcctagaactcccgtggtggtcctgagcagagaggaggatgtcctcctgcctgcctgaaggtctcccatgaaaacactgctgaactgtgttgacactcatgaccctttttttaaaccgttaaagggaagttcggtgttggagcgatactcaatgtagtcagtctacacctggacgtgtgggccacttaagccctccccacccccatcctattcctgaataaaaccaggataatggaa

SEQ ID NO: 135404 - DNA, 411 bp, Homo sapiens
  Payload ID: 6473
  Gene Symbol: FTSJ3
  Gene Name: FtsJ homolog 3 (E. coli)
  ENST ID: ENST00000579831
  CDS Start-End: 1-90
gatctgcctggggtttccattgcagacgagggggagactggcatgttctccttgagcaccatccggggtcaccagtatgcgacttactgaagtgcaagatgataaagaggaggaggaggaggagaatccactgctggtaccactggaggaaaaggcagtactgcaggaagaacaagccaacctgtggttctcaaagggcagctttgctgggatcgaggacgatgccgatgaggccctggagatcagtcaggcccagctgttatttgagaaccggcggaagggacggcagcagcagcagaagcagcagctgccacagacacccccttcctgtttgaagactgagataatgtctcccctgtaccaagatgaagcccctaagggaacagaggcttcttcggggacagaagctgc

SEQ ID NO: 135405 - DNA, 615 bp, Homo sapiens
  Payload ID: 6473
  Gene Symbol: FTSJ3
  Gene Name: FtsJ homolog 3 (E. coli)
  ENST ID: ENST00000580272
  CDS Start-End: 163-615
gctctgggtctaggtagtgtgcggagaggggcgcggggtggaattgctgcgggaagtgggaaactggaagtgggaaactggaagtggaatctggtgctccggaaagagacgttcccaacttctactttctccccagattgagggatactccccctttccaccatgggcaagaagggcaaagttggcaagagccgacgagacaagttttatcacttggcgaaggagacgggttaccgttcccgatctgctttcaagctgatccagctcaatcgccgctttcagttcctgcagaaagcccgagccttgctggacctgtgtgctgcgccagggggatggctgcaggtagctgccaagtttatgcctgtatccagccttattgtgggagtggacctggttccaatcaagcctctccccaatgtggtgactctccagcaggacatcacaacagaacgttgtaggcaggccctgaggaaggagctgaagacctggaaggttgatgttgtgctcaatgatggggcccccaacgttggggctagctgggtccatgatgcttactcacaagcccatttgacactgatggctctacgtttggcttgtgactttttggcccgtggt

SEQ ID NO: 135406 - DNA, 522 bp, Homo sapiens
  Payload ID: 6473
  Gene Symbol: FTSJ3
  Gene Name: FtsJ homolog 3 (E. coli)
  ENST ID: ENST00000579569
  CDS Start-End: 9-212
tttccaccatgggcaagaagggcaaagttggcaagagccgacgagacaagttttatcacttggcgaaggagacgggttaccgttcccgatctgctttcaagctgatccagctcaatcgccgctttcagttcctgcagaaagcccgagccttgctggacctgtgtgctgcgccagggggatggttcgtaacactcgccacaggctgcaggtagctgccaagtttatgcctgtatccagccttattgtgggagtggacctggttccaatcaagcctctccccaatgtggtgactctccagcaggacatcacaacagaacgttgtaggcaggccctgaggaaggagctgaagacctggaaggttgatgttgtgctcaatgatggggcccccaacgttggggctagctgggtccatgatgcttactcacaagcccatttgacactgatggctctacgtttggcttgtgactttttggcccgtggtggcagcttcatcacaaaggttttccgttctcgtgactatca

SEQ ID NO: 135407 - DNA, 535 bp, Homo sapiens
  Payload ID: 6473
  Gene Symbol: FTSJ3
  Gene Name: FtsJ homolog 3 (E. coli)
  ENST ID: ENST00000585145
  CDS Start-End: 478-535
agcgtccagcatggactggtccaggcacctccgacccacccgacgctcctgccccggcccgctctccactcagatcacgctcgctccgcacccagccccgtaacctgccgggccgccactgcacccgccatacctgctctggtccgtcaagcgccatcttctctcttcagcagagaccgccggcatccgagccgtcttggcgcgcaagcgcggaagcggaggattgggacctgaagaccaggcagagaagaattccgggtcaatgggcggggtgtgcgtctcaactttcaacttacaaaacccaaggacagagtattgagaacaatctagggccacactcaaaatggcggaaaacctcgagccagggacgcaggggacgcaagcggaagcggaagtagttagctgcatacttgtgcggttccaagtgtggagaaagcggctctgggtctagattgagggatactccccctttccaccatgggcaagaagggcaaagttggcaagagccgacgagacaagttttatcacttggcga

SEQ ID NO: 135408 - DNA, 548 bp, Homo sapiens
  Payload ID: 6473
  Gene Symbol: FTSJ3
  Gene Name: FtsJ homolog 3 (E. coli)
  ENST ID: ENST00000584193
  CDS Start-End: 29-151
agattgagggatactccccctttccaccatgggcaagaagggcaaagttggcaagagccgacgagacaagttttatcacttggcgaaggagacggtttgcgcacttggttgttttgtccaggttaccgttcccgatctgctttcaagctgatccagctcaatcgccgctttcagttcctgcagaaagcccgagccttgctggacctgtgtgctgcgccagggggatggctgcaggtagctgccaagtttatgcctgtatccagccttattgtgggagtggacctggttccaatcaagcctctccccaatgtggtgactctccagcaggacatcacaacagaacgttgtaggcaggccctgaggaaggagctgaagacctggaaggttgatgttgtgctcaatgatggggcccccaacgttggggctagctgggtccatgatgcttactcacaagcccatttgacactgatggctctacgtttggcttgtgactttttggcccgtggtggcagcttcatcacaaaggttttccgttctcgtgactatca

SEQ ID NO: 135409 - DNA, 543 bp, Homo sapiens
  Payload ID: 6473
  Gene Symbol: FTSJ3
  Gene Name: FtsJ homolog 3 (E. coli)
  ENST ID: ENST00000584574
  CDS Start-End: 443-543
agcgtccagcatggactggtccaggcacctccgacccacccgacgctcctgccccggcccgctctccactcagatcacgctcgctccgcacccagccccgtaacctgccgggccgccactgcacccgccatacctgctctggtccgtcaagcgccatcttctctcttcagcagagaccgccggcatccgagccgtcttggcgcgcaagcgcggaagcggaggattgggacctgaagaccaggcagagaagaattccgggtcaatgggcggggtgtgcgttcttgtgatatgccttcctagtctcaactttcaacttacaaaacccaaggacagagtattgagaacaatctagggccacactcaaaatggcggaaaacctcgagccagggacgcaggggacgcaagcggaagcggaaattgagggatactccccctttccaccatgggcaagaagggcaaagttggcaagagccgacgagacaagttttatcacttggcgaaggagacgggttaccgttcccgatctgctttcaagctgatcca

SEQ ID NO: 135410 - DNA, 592 bp, Homo sapiens
  Payload ID: 6473
  Gene Symbol: FTSJ3
  Gene Name:: FtsJ homolog 3 (E. coli)
  ENST ID: ENST00000581209
  CDS Start-End: 248-592
actcgagttcaggggctttggaaggggatgaggaaggagtagaactcctcctcagtgttgcctcattgaaactctgtttatagttcttgtgatatgccttcctagtctcaactttcaacttacaaaacccaaggacagagtattgagaacaatctagggccacactcaaaatggcggaaaacctcgagccagggacgcaggggacgcaagcggaagcggaaattgagggatactccccctttccaccatgggcaagaagggcaaagttggcaagagccgacgagacaagttttatcacttggcgaaggagacgggttaccgttcccgatctgctttcaagctgatccagctcaatcgccgctttcagttcctgcagaaagcccgagccttgctggacctgtgtgctgcgccagggggatggctgcaggtagctgccaagtttatgcctgtatccagccttattgtgggagtggacctggttccaatcaagcctctccccaatgtggtgactctccagcaggacatcacaacagaacgttgtaggcaggccctgaggaaggagctgaagacctggaaggttgatgttgtgctc

SEQ ID NO: 135411 - DNA, 1986 bp, Homo sapiens
  Payload ID: 6474
  Gene Symbol: FTSJ1
  Gene Name: FtsJ RNA methyltransferase homolog 1 (E. coli)
  Uniprot ID: Q9UET6
  ENST ID: ENST00000019019
  CDS Start-End: 430-1413
ggatacgtcgacaatagatgacggggctcacgttgtacgttcacatcaggtcccggcccgccggaacctgggcgatccacgatgccgagtttgccacgctgcgacagcccataggcttgcccccccgggcattcgggtggactacgaacacaaactgaagccctaggacttgtcgcccgtttgcgctctcgccgaggcacaggctgctcgcggaccaccctgctccgaaaactaagaaggggaccagtagacggggtggattcgaggtggggacatgggacgcagcggtcggagccgcctggaggggtacccggtggtcccgatggagctatcatctttgagaggtaggtggtagcccattcatctggttactgatactggccggcatcagtggactgtcggcaggtccttgagcaactggtgtgtgaaatgggacggacgtcaaaggacaagcgggatgtctactaccgcctggccaaggagaatggctggcgtgctcgcagcgccttcaaactgctacaactggataaggaattccaactcttccaaggcgtgacacgggcagttgacctgtgtgcagccccaggcagctggagccaggtgctgagccagaagatcgggggccaagggtccggccacgtggtggctgtggacctgcaggctatggctccactaccaggtgtggtacagatccagggggacatcacccagctgtccactgccaaggagatcatccagcactttaagggctgccctgcggacctagtggtgtgtgacggggctcctgatgtaaccggtctccatgatgttgatgagtatatgcaggcccagctcctcctagctgctctgaacattgctacacatgtcctgaagccagggggctgctttgtggccaagatattccgaggccgggatgtgacgctcctctacagccagctgcaggtcttcttctccagcgtgctgtgtgccaagcccaggagcagccggaactctagcatcgaggccttcgctgtctgtcagggctatgaccctcccgagggcttcatcccggacctgagcaaacccctgctggaccattcttacgatttcaaccagctggatggtcccacccgcatcattgtgccttttgtgacctgtggggacctgagctcctatgattcggaccgcagttacccactggacctagagggcggctcagagtacaagtacactccacccacacagccccccatctcgccaccataccaggaggcctgcacgttgaagaggaaggggcagctggccaaggagatccgcccccaggactgccccatcagcagagtggacacgtttccccagcccctggccgcccctcagtgccacaccctgctggcccctgagatggaagacaatgaaatgagttgttcaccttaacccattacgctggcaaactgatacaactcagaaactgctcaatgtcaggaaaaccggaacttgttgatgaacttgttttcaaaatatcatctcatcaacgaggcctggacaaacaagccctgaggagggatctgcaacaaccctgaagacaacaaggaaagaaaccatgaaagtctgtctgtactgcagtgggaattcttgagtgaggtcttacctcttctttaaacctcttcaggagtgtcctgattatgtccagaattttccctaaaggcagggattcttaacctggatagaagccaggggtaaccatgaacttgatggaagaaaatgttacatctttattttcagcaatgaaactgaaatttagccttactcccaagttataaatgctggcaacaaatcacagtagtaaaagcagtacctgggattttcccaccaatacaaaccagttacagcaactgtaatgtaacataaaaagggcatcttgaagtattgttcatatttgtcacctcttggaatgatagcagatcctgtaagttgatgtattaattaaaaagcccatatattactgca

SEQ ID NO: 135412 - DNA, 1892 bp, Homo sapiens
  Payload ID: 6474
  Gene Symbol: FTSJ1
  Gene Name: FtsJ RNA methyltransferase homolog 1 (E. coli)
  Uniprot ID: Q9UET6
  ENST ID: ENST00000348411
  CDS Start-End: 324-1313
ggatacgtcgacaatagatgacggggctcacgttgtacgttcacatcaggtcccggcccgccggaacctgggcgatccacgatgccgagtttgccacgctgcgacagcccataggcttgcccccccgggcattcgggtggactacgaacacaaactgaagccctaggacttgtcgcccgtttgcgctctcgccgaggcacaggctgctcgcggaccaccctgctccgaaaactaagaggtaggtggtagcccattcatctggttactgatactggccggcatcagtggactgtcggcaggtccttgagcaactggtgtgtgaaatgggacggacgtcaaaggacaagcgggatgtctactaccgcctggccaaggagaatggctggcgtgctcgcagcgccttcaaactgctacaactggataaggaattccaactcttccaaggcgtgacacgggcagttgacctgtgtgcagccccaggcagctggagccaggtgctgagccagaagatcgggggccaagggtccggccacgtggtggctgtggacctgcaggctatggctccactaccaggtgtggtacagatccagggggacatcacccagctgtccactgccaaggagatcatccagcactttaagggctgccctgcggacctagtggtgtgtgacggggctcctgatgtaaccggtctccatgatgttgatgagtatatgcaggcccagctcctcctagctgctctgaacattgctacacatgtcctgaagccagggggctgctttgtggccaagatattccgaggccgggatgtgacgctcctctacagccagctgcaggtcttcttctccagcgtgctgtgtgccaagcccaggagcagccggaactctagcatcgaggccttcgctgtctgtcagggctatgaccctcccgagggcttcatcccggacctgagcaaacccctgctggaccattcttacgacccagatttcaaccagctggatggtcccacccgcatcattgtgccttttgtgacctgtggggacctgagctcctatgattcggaccgcagttacccactggacctagagggcggctcagagtacaagtacactccacccacacagccccccatctcgccaccataccaggaggcctgcacgttgaagaggaaggggcagctggccaaggagatccgcccccaggactgccccatcagcagagtggacacgtttccccagcccctggccgcccctcagtgccacaccctgctggcccctgagatggaagacaatgaaatgagttgttcaccttaacccattacgctggcaaactgatacaactcagaaactgctcaatgtcaggaaaaccggaacttgttgatgaacttgttttcaaaatatcatctcatcaacgaggcctggacaaacaagccctgaggagggatctgcaacaaccctgaagacaacaaggaaagaaaccatgaaagtctgtctgtactgcagtgggaattcttgagtgaggtcttacctcttctttaaacctcttcaggagtgtcctgattatgtccagaattttccctaaaggcagggattcttaacctggatagaagccaggggtaaccatgaacttgatggaagaaaatgttacatctttattttcagcaatgaaactgaaatttagccttactcccaagttataaatgctggcaacaaatcacagtagtaaaagcagtacctgggattttcccaccaatacaaaccagttacagcaactgtaatgtaacataaaaagggcatcttgaagtattgttcatatttgtcacctcttggaatgatagcagatcctgtaagttgatgtattaattaaaaagcccatatattactgcatctcaa

SEQ ID NO: 135413 - DNA, 1669 bp, Homo sapiens
  Payload ID: 6474
  Gene Symbol: FTSJ1
  Gene Name: FtsJ RNA methyltransferase homolog 1 (E. coli)
  ENST ID: ENST00000396894
  CDS Start-End: 453-1031
aaatcgatcttggcctcggaagaaaaagaacaaagaatcgctggcaacttgcgcgtcgcgtcgctgcagccacgcagtgcgtggattcagccgctttggccgtgcccgttgcatgccgggaaacgcagttcgcgagccccggatacgtcgacaatagatgacggggctcacgttgtacgttcacatcaggtcccggcccgccggaacctgggcgatccacgatgccgagtttgccacgctgcgacagcccataggcttgcccccccgggcattcgggtggactacgaacacaaactgaagccctaggacttgtcgcccgtttgcgctctcgccgaggcacaggctgctcgcggaccaccctgctccgaaaactaagctgtccactgccaaggagatcatccagcactttaagggctgccctgcggacctagtggtgtgtgacggggctcctgatggctctgaacattgctacacatgtcctgaagccagggggctgctttgtggccaagatattccgaggccgggatgtgacgctcctctacagccagctgcaggtcttcttctccagcgtgctgtgtgccaagcccaggagcagccggaactctagcatcgaggccttcgctgtctgtcagggctatgaccctcccgagggcttcatcccggacctgagcaaacccctgctggaccattcttacgacccagatttcaaccagctggatggtcccacccgcatcattgtgccttttgtgacctgtggggacctgagctcctatgattcggaccgcagttacccactggacctagagggcggctcagagtacaagtacactccacccacacagccccccatctcgccaccataccaggaggcctgcacgttgaagaggaaggggcagctggccaaggagatccgcccccaggactgccccatcagcagagtggacacgtttccccagcccctggccgcccctcagtgccacaccctgctggcccctgagatggaagacaatgaaatgagttgttcaccttaacccattacgctggcaaactgatacaactcagaaactgctcaatgtcaggaaaaccggaacttgttgatgaacttgttttcaaaatatcatctcatcaacgaggcctggacaaacaagccctgaggagggatctgcaacaaccctgaagacaacaaggaaagaaaccatgaaagtctgtctgtactgcagtgggaattcttgagtgaggtcttacctcttctttaaacctcttcaggagtgtcctgattatgtccagaattttccctaaaggcagggattcttaacctggatagaagccaggggtaaccatgaacttgatggaagaaaatgttacatctttattttcagcaatgaaactgaaatttagccttactcccaagttataaatgctggcaacaaatcacagtagtaaaagcagtacctgggattttcccaccaatacaaaccagttacagcaactgtaatgtaacataaaaagggcatcttgaagtattgttcatatttgtcacctcttggaatgatagcagatcctgtaagttgatgtattaattaaaaagcccatatattactgcatctcaattttgtttcaatttaatatatagtaataattgtaattcaatgtaattggcttccattgt

SEQ ID NO: 135414 - DNA, 1601 bp, Homo sapiens
  Payload ID: 6475
  Gene Symbol: FTSJ2
  Gene Name: FtsJ RNA methyltransferase homolog 2 (E. coli)
  Uniprot ID: Q9UI43
  ENST ID: ENST00000242257
  CDS Start-End: 30-770
gcggcgcgctgcaggcgcggggaacaccaatggcggggtacttgaagctggtgtgtgtttcctttcagcgtcaagggttccacactgttgggagtcgctgcaagaatcggacaggcgctgagcacctgtggctgacccgacatctcagggacccatttgtgaaggctgcgaaggtggagagttaccggtgtcgaagcgccttcaagctcctggaggtgaacgagaggcaccagattctgcggcccggccttcgggtgttagactgtggggcagctcctggggcctggagtcaggtggcggtgcagaaggtcaacgccgcaggcacagatcccagctctcctgttggcttcgtgcttggggtagatcttcttcacatattccccctggaaggagcaacttttctgtgccctgctgacgtgactgacccgagaacctcacagagaatcctcgaggtgcttcctggcaggagagcagatgtgattctgagcgacatggcgcccaatgccacagggttccgggacctcgatcatgacaggctcatcagcctgtgcctgacccttctcagcgtgaccccagacatcctgcaacctggggggacattcctttgtaaaacctgggctggaagtcaaagccgtcggttacagaggagactgacagaggaattccagaatgtaaggatcatcaaacctgaagccagcaggaaagagtcatcagaagtgtacttcttggccacacagtaccacggaaggaagggcactgtgaagcagtgaggatttcttgtgccattttcataatggtcattagctccttttaagctagaaacgtagcctgagctcctgaagagttcctgggagatttgagctgattttggagatggagcaggacaagtggggagtctctctctctctttctctctctctctttttaaccaaaaagagatgacaaaactaagttcaggggccatggaaaatgaaaaagtccgctatattgtgatttgggaagagaaagttatcaagagaaagaggtgaggatggaaggatggagaaaaacagactgtgggaaggatcagaaggaatccgccgaggcagggatgggtgtgcccatgtgtgccttgacgggacttcatcttatagactgttaaactgtcacacacaaacaggctttccacccctgctctgagagcaccacgcacagatttccagttcttagtgtggctgtttaaagtagaaaatctgggggctgggtgaggccactcatgcctgtaaacccagggctttagaaggctgaggctgggggattgcttgaagtcaggagttcaagaccaacctgggcaacatagcaacaccccccatgtctacaaaaatgaaaaaccaaaaagcaaaccaaaagaaaaatctgaaatttccatctggggattaacttctgtctttctggtgaacaatatagcaattcacgcattcttcaagcagcaaaagttcccggaacaattagggaagacgtatggtctgaatttatccaggcagtgggtctgctttggtttttgctggaaatttatatcagtgtctgggctcccaagaacataaatgtaattgccaaagcaa

SEQ ID NO: 135415 - DNA, 582 bp, Homo sapiens
  Payload ID: 6475
  Gene Symbol: FTSJ2
  Gene Name: FtsJ RNA methyltransferase homolog 2 (E. coli)
  ENST ID: ENST00000407040
  CDS Start-End: 49-507
aatgaaagacaaggtagaaaggtgcagtgaacatggaaatcacctcgcatgagaccgcccgcagatcccagctctcctgttggcttcgtgcttggggtagatcttcttcacatattccccctggaaggagcaacttttctgtgccctgctgacgtgactgacccgagaacctcacagagaatcctcgaggtgcttcctggcaggagagcagatgtgattctgagcgacatggcgcccaatgccacagggttccgggacctcgatcatgacaggctcatcagcctgtgcctgacccttctcagcgtgaccccagacatcctgcaacctggggggacattcctttgtaaaacctgggctggaagtcaaagccgtcggttacagaggagactgacagaggaattccagaatgtaaggatcatcaaacctgaagccagcaggaaagagtcatcagaagtgtacttcttggccacacagtaccacggaaggaagggcactgtgaagcagtgaggatttcttgtgccattttcataatggtcattagctccttttaagctagaaacgtagcctgagctcctgaagagt

SEQ ID NO: 135416 - DNA, 1570 bp, Homo sapiens
  Payload ID: 6475
  Gene Symbol: FTSJ2
  Gene Name: FtsJ RNA methyltransferase homolog 2 (E. coli)
  Uniprot ID: Q9UI43
  ENST ID: ENST00000440306
  CDS Start-End: 1-741
atggccgggtacttgaagctggtgtgtgtttcctttcagcgtcaagggttccacactgttgggagtcgctgcaagaatcggacaggcgctgagcacctgtggctgacccgacatctcagggacccatttgtgaaggctgcgaaggtggagagttaccggtgtcgaagcgccttcaagctcctggaggtgaacgagaggcaccagattctgcggcccggccttcgggtgttagactgtggggcagctcctggggcctggagtcaggtggcggtgcagaaggtcaacgccgcaggcacagatcccagctctcctgttggcttcgtgcttggggtagatcttcttcacatattccccctggaaggagcaacttttctgtgccctgctgacgtgactgacccgagaacctcacagagaatcctcgaggtgcttcctggcaggagagcagatgtgattctgagcgacatggcgcccaatgccacagggttccgggacctcgatcatgacaggctcatcagcctgtgcctgacccttctcagcgtgaccccagacatcctgcaacctggggggacattcctttgtaaaacctgggctggaagtcaaagccgtcggttacagaggagactgacagaggaattccagaatgtaaggatcatcaaacctgaagccagcaggaaagagtcatcagaagtgtacttcttggccacacagtaccacggaaggaagggcactgtgaagcagtgaggatttcttgtgccattttcataatggtcattagctccttttaagctagaaacgtagcctgagctcctgaagagttcctgggagatttgagctgattttggagatggagcaggacaagtggggagtctctctctctctttctctctctctctttttaaccaaaaagagatgacaaaactaagttcaggggccatggaaaatgaaaaagtccgctatattgtgatttgggaagagaaagttatcaagagaaagaggtgaggatggaaggatggagaaaaacagactgtgggaaggatcagaaggaatccgccgaggcagggatgggtgtgcccatgtgtgccttgacgggacttcatcttatagactgttaaactgtcacacacaaacaggctttccacccctgctctgagagcaccacgcacagatttccagttcttagtgtggctgtttaaagtagaaaatctgggggctgggtgaggccactcatgcctgtaaacccagggctttagaaggctgaggctgggggattgcttgaagtcaggagttcaagaccaacctgggcaacatagcaacaccccccatgtctacaaaaatgaaaaaccaaaaagcaaaccaaaagaaaaatctgaaatttccatctggggattaacttctgtctttctggtgaacaatatagcaattcacgcattcttcaagcagcaaaagttcccggaacaattagggaagacgtatggtctgaatttatccaggcagtgggtctgctttggtttttgctggaaatttatatcagtgtctgggctcccaagaacataaatgtaattgccaaagc

SEQ ID NO: 135417 - DNA, 4081 bp, Homo sapiens
  Payload ID: 6476
  Gene Symbol: FUK
  Gene Name: fucokinase
  Uniprot ID: Q8N0W3
  ENST ID: ENST00000288078
  CDS Start-End: 233-3487
cttctggattgcagccccgctgcccttcaggaaagcgctgccccggccacccacgctggcctatgcggtggctccgaccgtgttttttgccggacgggggctcggccttgggggggcgcggaggtgaaactacacttcccggagtgcaccgcgagggtcgcgcagcctcgcgttaaagagcccgctccgccgagcgccgggcgacggcaggaagcccctccgcttggccagaatggagcagccgaagggagttgattggacagtcatcatcctgacctgccagtacaaggacagtgtccaggtctttcagagagaactggaagtgcggcagaagcgggagcagatccctgctgggacgctgttactggccgtggaggacccagagaagcgtgtgggcagcggaggagccaccctcaacgccctgctggtggctgctgaacacctgagtgcccgggcaggcttcactgtggtcacatccgatgtcctgcactcggcctggatcctcattctgcacatgggtcgagacttcccctttgatgactgtggcagggctttcacctgcctccccgtggagaaccccgaggcccccgtggaagccttggtctgcaacctggactgcctgctggacatcatgacctatcggctgggcccgggctccccgccaggcgtgtgggtctgcagcaccgacatgctgctgtctgttcctgcaaatcctggtatcagctgggacagcttccggggagccagagtgatcgccctcccagggagcccggcctacgctcagaatcatggcgtctacctaactgacccccagggccttgttttggacatttactaccagggcactgaggcagagattcagcggtgtgtcaggcctgatgggcgggtgccactggtctctggggttgtcttcttctctgtggagactgccgagcgcctcctagccacccacgtgagcccgcccctggatgcctgcacctacctaggcttggactccggagcccggcctgtccagctgtctctgttttttgacattctccactgcatggctgagaacgtgaccagggaggacttcctggtggggaggcccccagagttggggcaaggcgatgcagatgtagcgggttatctgcagagcgcccgggcccagctgtggagggagcttcgcgatcagccccttaccatggcctatgtctccagcggcagctacagctacatgacctcctcagccagtgagttcctgctcagcctcacactccccggggctcctggggcccagattgtgcactcccaggtggaggagcagcagcttctggcggccgggagctctgtggtcagctgcctgctggagggccctgtccagctgggtcctgggagcgtcctgcagcactgccacctgcagggccccattcacataggcgctggctgcttggtgactggcctggatacagcccactccaaggccctgcatggccgggagctgcgtgaccttgtcctgcagggacaccacacgcggctacacggctccccgggccacgccttcaccctcgttggccgtctggacagctgggagagacagggggcaggcacatatctcaacgtgccctggagtgaattcttcaagaggacaggtgttcgagcctgggacctgtgggaccctgagacgctgcccgcagagtactgccttcccagcgcccgcctctttcctgtgctccacccctcgagggagctgggaccccaggacctgctgtggatgctggaccaccaggaggatgggggcgaggccctgcgagcctggcgggcctcctggcgcctgtcctgggagcagctgcagccgtgcctggatcgggctgccacgctggcctctcgccgggacctgttcttccgccaggccctgcataaggcgcggcacgtgctggaggcccggcaggacctcagcctgcgcccgctgatctgggctgctgtccgcgagggctgccccgggcccctgctggccacgctggaccaggttgcagctggggcaggagaccctggtgtggcggcacgggcactggcctgtgtggcggacgtcctgggctgcatggcagagggccgtgggggcttgcggagcgggccagctgccaaccctgagtggatgcggcccttctcatacctggagtgtggagacctggcagcgggcgtggaggcgcttgcccaggagagggacaagtggctaagcaggccagccttgctggtgcgagcggcccgccactatgagggggctggtcagatcctgatccgccaggctgtgatgtcagcccagcactttgtctccacagagcaggtggaactgccgggacctgggcagtgggtggtggctgagtgcccggcccgtgtggatttctctgggggctggagtgacacgccaccccttgcctatgagcttggcggggctgtgctgggcctggctgtgcgagtggacggccgccggcccatcggagccagggcacgccgcatcccggagcctgagctgtggctggcggtggggcctcggcaggatgagatgactgtgaagatagtgtgccggtgcctggctgacctgcgggactactgccagcctcatgccccaggggccctgctgaaggcggccttcatctgtgcagggatcgtgcatgtccactcggaactccagctgagtgagcagctgctccgcaccttcgggggcggctttgagctgcacacctggtctgagctgccccacggctctggcctgggcaccagcagcatcctggcaggcactgccctggctgccttgcagcgagccgcaggccgggtggtgggcacggaagccctgatccacgcagtgctgcacctggagcaggtgctcaccactggaggtggctggcaggaccaagtaggtggcctaatgcctggcatcaaggtggggcgctcccgggctcagctgccactgaaggtggaggtagaagaggtcacggtgcctgagggctttgtccagaagctcaatgaccacctgctcttggtgtacactggcaagacccgcctggctcggaacctgctgcaggatgtgctgaggagctggtatgcccgacttcctgctgtggtgcagaatgcccacagcctggtacggcaaactgaggagtgtgctgaaggcttccgccaaggaagcctgcctctgctgggccagtgcctgacctcgtactgggagcagaagaagctcatggctccaggctgtgagcccctgactgtgcggcgtatgatggatgtcctggccccccacgtgcatggccagagcctggctggggcaggcggtggaggctttctctatctgttgaccaaggagccacagcaaaaggaggccttggaggcggtgctggccaagaccgagggccttgggaattacagcatccacctggttgaagtggacactcagggcctgagcctgaagctgctggggaccgaggcctcaacctgttgccctttcccatgaagctggcttctctctgcaacaggagaaaacctggagctacagtgtcccccaccttccttgccccatgggaacctccacctcctactccccacccacctctgcgaatctgctcccaaaggaagctgaccagagcaagatctgggcaagcagagagtgcctgggacaggactgtgacctggtggacaggggcctagatgtagcctctgttcctcctggacataggaaggtcccaagcttagtatcccacgtggcctttacaaatcctatggctggccttctcattccacaagggccctggaaagggttgacagccagccttggcatatggctgggagtcccttagcaaggccaaccctgaagaggccctttgaggcattccctatggcttagagttgtagacttacactcaaccctcatgtgagcgtgggagtgagggtggcggtcccttgccaagttggtagcagtgacccagtgattcactgccatcccaggccttaactagcaaaactacggagcgtgccaagtgacctggtgcctgtgggaagtgggttctcaggactggcattcttggaataaattcactctgtccttgca

SEQ ID NO: 135418 - DNA, 3925 bp, Homo sapiens
  Payload ID: 6476
  Gene Symbol: FUK
  Gene Name: fucokinase
  Uniprot ID: Q8N0W3
  ENST ID: ENST00000378912
  CDS Start-End: 59-3331
aaagagcccgctccgccgagcgccgggcgacggcaggaagcccctccgcttggccagaatggagcagccgaagggagttgattggacagtcatcatcctgacctgccagtacaaggacagtgtccaggtctttcagagagaactggaagtgcggcagaagcgggagcagatccctgctgggacgctgttactggccgtggaggacccagagaagcgtgtgggcagcggaggagccaccctcaacgccctgctggtggctgctgaacacctgagtgcccgggcaggcttcacttggatttgtgttggagtctctctctggattcgagggtgccatcctccagggcgtctgcctgaggcctctgttcacagggctttcccactcctgcaggtggtcacatccgatgtcctgcactcggcctggatcctcattctgcacatgggtcgagacttcccctttgatgactgtggcagggctttcacctgcctccccgtggagaaccccgaggcccccgtggaagccttggtctgcaacctggactgcctgctggacatcatgacctatcggctgggcccgggctccccgccaggcgtgtgggtctgcagcaccgacatgctgctgtctgttcctgcaaatcctggtatcagctgggacagcttccggggagccagagtgatcgccctcccagggagcccggcctacgctcagaatcatggcgtctacctaactgacccccagggccttgttttggacatttactaccagggcactgaggcagagattcagcggtgtgtcaggcctgatgggcgggtgccactggtctctggggttgtcttcttctctgtggagactgccgagcgcctcctagccacccacgtgagcccgcccctggatgcctgcacctacctaggcttggactccggagcccggcctgtccagctgtctctgttttttgacattctccactgcatggctgagaacgtgaccagggaggacttcctggtggggaggcccccagagttggggcaaggcgatgcagatgtagcgggttatctgcagagcgcccgggcccagctgtggagggagcttcgcgatcagccccttaccatggcctatgtctccagcggcagctacagctacatgacctcctcagccagtgagttcctgctcagcctcacactccccggggctcctggggcccagattgtgcactcccaggtggaggagcagcagcttctggcggccgggagctctgtggtcagctgcctgctggagggccctgtccagctgggtcctgggagcgtcctgcagcactgccacctgcagggccccattcacataggcgctggctgcttggtgactggcctggatacagcccactccaaggccctgcatggccgggagctgcgtgaccttgtcctgcagggacaccacacgcggctacacggctccccgggccacgccttcaccctcgttggccgtctggacagctgggagagacagggggcaggcacatatctcaacgtgccctggagtgaattcttcaagaggacaggtgttcgagcctgggacctgtgggaccctgagacgctgcccgcagagtactgccttcccagcgcccgcctctttcctgtgctccacccctcgagggagctgggaccccaggacctgctgtggatgctggaccaccaggaggatgggggcgaggccctgcgagcctggcgggcctcctggcgcctgtcctgggagcagctgcagccgtgcctggatcgggctgccacgctggcctctcgccgggacctgttcttccgccaggccctgcataaggcgcggcacgtgctggaggcccggcaggacctcagcctgcgcccgctgatctgggctgctgtccgcgagggctgccccgggcccctgctggccacgctggaccaggttgcagctggggcaggagaccctggtgtggcggcacgggcactggcctgtgtggcggacgtcctgggctgcatggcagagggccgtgggggcttgcggagcgggccagctgccaaccctgagtggatgcggcccttctcatacctggagtgtggagacctggcagcgggcgtggaggcgcttgcccaggagagggacaagtggctaagcaggccagccttgctggtgcgagcggcccgccactatgagggggctggtcagatcctgatccgccaggctgtgatgtcagcccagcactttgtctccacagagcaggtggaactgccgggacctgggcagtgggtggtggctgagtgcccggcccgtgtggatttctctgggggctggagtgacacgccaccccttgcctatgagcttggcggggctgtgctgggcctggctgtgcgagtggacggccgccggcccatcggagccagggcacgccgcatcccggagcctgagctgtggctggcggtggggcctcggcaggatgagatgactgtgaagatagtgtgccggtgcctggctgacctgcgggactactgccagcctcatgccccaggggccctgctgaaggcggccttcatctgtgcagggatcgtgcatgtccactcggaactccagctgagcaccagcagcatcctggcaggcactgccctggctgccttgcagcgagccgcaggccgggtggtgggcacggaagccctgatccacgcagtgctgcacctggagcaggtgctcaccactggaggtggctggcaggaccaagtaggtggcctaatgcctggcatcaaggtggggcgctcccgggctcagctgccactgaaggtggaggtagaagaggtcacggtgcctgagggctttgtccagaagctcaatgaccacctgctcttggtgtacactggcaagacccgcctggctcggaacctgctgcaggatgtgctgaggagctggtatgcccgacttcctgctgtggtgcagaatgcccacagcctggtacggcaaactgaggagtgtgctgaaggcttccgccaaggaagcctgcctctgctgggccagtgcctgacctcgtactgggagcagaagaagctcatggctccaggctgtgagcccctgactgtgcggcgtatgatggatgtcctggccccccacgtgcatggccagagcctggctggggcaggcggtggaggctttctctatctgttgaccaaggagccacagcaaaaggaggccttggaggcggtgctggccaagaccgagggccttgggaattacagcatccacctggttgaagtggacactcagggcctgagcctgaagctgctggggaccgaggcctcaacctgttgccctttcccatgaagctggcttctctctgcaacaggagaaaacctggagctacagtgtcccccaccttccttgccccatgggaacctccacctcctactccccacccacctctgcgaatctgctcccaaaggaagctgaccagagcaagatctgggcaagcagagagtgcctgggacaggactgtgacctggtggacaggggcctagatgtagcctctgttcctcctggacataggaaggtcccaagcttagtatcccacgtggcctttacaaatcctatggctggccttctcattccacaagggccctggaaagggttgacagccagccttggcatatggctgggagtcccttagcaaggccaaccctgaagaggccctttgaggcattccctatggcttagagttgtagacttacactcaaccctcatgtgagcgtgggagtgagggtggcggtcccttgccaagttggtagcagtgacccagtgattcactgccatcccaggccttaactagcaaaactacggagcgtgccaagtgacctggtgcctgtgggaagtgggttctcaggactggcattcttggaataaattcactctgtccttgca

SEQ ID NO: 135419 - DNA, 538 bp, Homo sapiens
  Payload ID: 6476
  Gene Symbol: FUK
  Gene Name: fucokinase
  ENST ID: ENST00000572784
  CDS Start-End: 179-538
aaagagcccgctccgccgagcgccgggcgacggcagggtcttgctgtgtcagccaggctggagtgcagtggagtgatcatggctcactgcagccttaacctcctgggctcaagcagtcctcccaccttggtcttccaaagtgctgggattatagacgaagcccctccgcttggccagaatggagcagccgaagggagttgattggacagtcatcatcctgacctgccagtacaaggacagtgtccaggtctttcagagagaactggaagtgcggcagaagcgggagcagatccctgctgggacgctgttactggccgtggaggacccagagaagcgtgtgggcagcggaggagccaccctcaacgccctgctggtggctgctgaacacctgagtgcccgggcaggcttcactgtggtcacatccgatgtcctgcactcggcctggatcctcattctgcacatgggtcgagacttcccctttgatgactgtggcagggctttcacctgcctccccgtggagaaccccgaggcccccgtg

SEQ ID NO: 135420 - DNA, 539 bp, Homo sapiens
  Payload ID: 6476
  Gene Symbol: FUK
  Gene Name: fucokinase
  ENST ID: ENST00000576453
  CDS Start-End: 102-539
accgagtcgacccgcgggccgcccgggtcctgacagggaagagtccccgggagctctgcggtgccccgggagcccacaggaagcccctccgcttggccagaatggagcagccgaagggagttgattggacagtcatcatcctgacctgccagtacaaggacagtgtccaggtctttcagagagaactggaagtgcggcagaagcgggagcagatccctgctgggacgctgttactggccgtggaggacccagagaagcgtgtgggcagcggaggagccaccctcaacgccctgctggtggctgctgaacacctgagtgcccgggcaggcttcactgtggtcacatccgatgtcctgcactcggcctggatcctcattctgcacatgggtcgagacttcccctttgatgactgtggcagggctttcacctgcctccccgtggagaaccccgaggcccccgtggaagccttggtctgcaacctggactgcctgctggacatcatgacctatcggctgggcccgggctccccgccaggcgtg

SEQ ID NO: 135421 - DNA, 590 bp, Homo sapiens
  Payload ID: 6476
  Gene Symbol: FUK
  Gene Name: fucokinase
  ENST ID: ENST00000574784
  CDS Start-End: 122-590
aaagagcccgctccgccgagcgccgggcgacggcagtgcctttgcttgggaccagatatcattatcactatcacctgaataaggatccaaaagacccaggaagcccctccgcttggccagaatggagcagccgaagggagttgattggacagtcatcatcctgacctgccagtacaaggacagtgtccaggtctttcagagagaactggaagtgcggcagaagcgggagcagatccctgctgggacgctgttactggccgtggaggacccagagaagcgtgtgggcagcggaggagccaccctcaacgccctgctggtggctgctgaacacctgagtgcccgggcaggcttcactgtggtcacatccgatgtcctgcactcggcctggatcctcattctgcacatgggtcgagacttcccctttgatgactgtggcagggctttcacctgcctccccgtggagaaccccgaggcccccgtggaagccttggtctgcaacctggactgcctgctggacatcatgacctatcggctgggcccgggctccccgccaggcgtgtgggtctgcagcaccgacatgctgctgtctg

SEQ ID NO: 135422 - DNA, 564 bp, Homo sapiens
  Payload ID: 6476
  Gene Symbol: FUK
  Gene Name: fucokinase
  ENST ID: ENST00000573352
  CDS Start-End: 237-564
accgagtcgacccgcgggccgcccgggtcctgacagggaagagtccccgggagctctgcggtgccccgggagcccacaggtgtttctacgctcccgcgtccatttggcctgggtcttccaaggggagccccgcgacccggctggtgcggccggacctgctggcagctgggaccgggagggatgcgggcctcagaggatcctcaccctgaggcaggaagcccctccgcttggccagaatggagcagccgaagggagttgattggacagtcatcatcctgacctgccagtacaaggacagtgtccaggtctttcagagagaactggaagtgcggcagaagcgggagcagatccctgctgggacgctgttactggccgtggaggacccagagaagcgtgtgggcagcggaggagccaccctcaacgccctgctggtggctgctgaacacctgagtgcccgggcaggcttcactgtggtcacatccgatgtcctgcactcggcctggatcctcattctgcacatgggtcgagacttcccctttgatgactgtggcagggctttcacct

SEQ ID NO: 135423 - DNA, 3054 bp, Homo sapiens
  Payload ID: 6476
  Gene Symbol: FUK
  Gene Name: fucokinase
  ENST ID: ENST00000571514
  CDS Start-End: 734-2461
aaagagcccgctccgccgagcgccgggcgacggcaggtctctggggttgtcttcttctctgtggagactgccgagcgcctcctagccacccacgtgagcccgcccctggatgcctgcacctacctaggcttggactccggagcccggcctgtccagcctatgtctccagcggcagctacagctacatgacctcctcagccagtgagttcctgctcagcctcacactccccggggctcctggggcccagattgtgcactcccaggtggaggagcagcagcttctggcggccgggagctctgtggtcagctgcctgctggagggccctgtccagctgggtcctgggagcgtcctgcagcactgccacctgcaggcgctggctgcttggtgactggcctggatacagcccactccaaggccctgcatggccgggagctgcgtgaccttgtcctgcagggacaccacacgcggctacacggctccccgggccacgccttcaccctcgttggccgtctggacagctgggagccctgactgcttcttcctctcccccagagacagggggcaggcacatatctcaacgtgccctggagtgaattcttcaagaggacaggtgttcgagcctgggacctgtgggaccctgagacgctgcccgcagagtactgccttcccagcgcccgcctctttcctgtgctccacccctcgagggagctgggaccccaggacctgctgtggatgctggaccaccaggaggatgggggcgaggccctgcgagcctggcgggcctcctggcgcctgtcctgggagcagctgcagccgtgcctggatcgggctgccacgctggcctctcgccgggacctgttcttccgccaggccctgcataaggcgcggcacgtgctggaggcccggcaggacctcagcctgcgcccgctgatctgggctgctgtccgcgagggctgccccgggcccctgctggccacgctggaccaggctggggcaggagaccctggtgtggcggcacgggcactggcctgtgtggcggacgtcctgggctgcatggcagagggccgtgggggcttgcggagcgggccagctgccaaccctgagtggatgcggcccttctcatacctggagtgtggagacctggcagcgggcgtggaggcgcttgcccaggagagggacaagtggctaagcaggccagccttgctggtgcgagcggcccgccactatgagggggctggtcagatcctgatccgccaggctgtgatgtcagcccagcactttgtctccacagagcaggtggaactgccgggacctgggcagtgggtggtggctgagtgcccggcccgtgtggatttctctgggggctggagtgacacgccaccccttgcctatgagcttggcggggctgtgctgggcctggctgtgcgagtggacggccgccggcccatcggagccagggcacgccgcatcccggagcctgagctgtggctggcggtggggcctcggcaggatgagatgactgtgaagatagtgtgccggtgcctggctgacctgcgggactactgccagcctcatgccccaggggccctgctgaaggcggccttcatctgtgcagggatcgtgcatgtccactcggaactccagctgagtgagcagctgctccgcaccttcgggggcggctttgagctgcacacctggtctgagctgccccacggctctggcctgggcaccagcagcatcctggcaggcactgccctggctgccttgcagcgagccgcaggccgggtggtgggcacggaagccctgatccacgcagtgctgcacctggagcaggtgctcaccactggaggtggctggcaggaccaagtaggtggcctaatgcctggcatcaaggtggggcgctcccgggctcagctgccactgaaggtggaggtagaagaggtcacggtgcctgagggctttgtccagaagctcaatgaccacctgctcttggtgtacactggcaagacccgcctggctcggaacctgctgcaggatgtgctgaggagctggtatgcccgacttcctgctgtggtgcagaatgcccacagcctggtacggcaaactgaggagtgtgctgaaggcttccgccaaggaagcctgcctctgctgggccagtgcctgacctcgtactgggagcagaagaagctcatggctccaggctgtgagcccctgactgtgcggcgtatgatggatgtcctggccccccacgtgcatggccagagcctggctggggcaggcggtggaggctttctctatctgttgaccaaggagccacagcaaaaggaggccttggaggcggtgctggccaagaccgagggccttgggaattacagcatccacctggttgaagtggacactcagggcctgagcctgaagctgctggggaccgaggcctcaacctgttgccctttcccatgaagctggcttctctctgcaacaggagaaaacctggagctacagtgtcccccaccttccttgccccatgggaacctccacctcctactccccacccacctctgcgaatctgctcccaaaggaagctgaccagagcaagatctgggcaagcagagagtgcctgggacaggactgtgacctggtggacaggggcctagatgtagcctctgttcctcctggacataggaaggtcccaagcttagtatcccacgtggcctttacaaatcctatggctggccttctcattccacaagggccctggaaagggttgacagccagccttggcatatggctgggagtcccttagcaaggccaaccctgaagaggccctttgaggcattccctatggcttagagttgtagacttacactcaaccctcatgtgagcgtgggagtgagggtggcggtcccttgccaagttggtagcagtgacccagtgattcactgccatcccaggccttaactagcaaaactacggagcgtgccaagtgacctggtgcctgtgggaagtgggttctcaggactggcattcttggaataaattcactctgtccttgc

SEQ ID NO: 135424 - DNA, 1319 bp, Homo sapiens
  Payload ID: 6476
  Gene Symbol: FUK
  Gene Name: fucokinase
  ENST ID: ENST00000498702
  CDS Start-End: 1-612
gagcaggtggaactgccgggacctgggcagtgggtggtggctgagtgcccggcccgtgtggatttctctgggggctggagtgacacgccaccccttgcctatgagcttggcggggctgtgctgggcctggctgtgcgagtggacggccgccggcccatcggagccagggcacgccgcatcccggagcctgagctgtggctggcggtggggcctcggcaggatgagatgactgtgaagatagtgtgccggtgcctggctgacctgcgggactactgccagcctcatgccccaggggccctgctgaaggcggccttcatctgtgcagggatcgtgcatgtccactcggaactccagctgagtgagcagctgctccgcaccttcgggggcggctttgagctgcacacctggtctgagctgccccacggctctggcctgggcaccagcagcatcctggcaggcactgccctggctgccttgcagcgagccgcaggccgggtggtgggcacggaagccctgatccacgcagtgctgcacctggagcaggtgctcaccactgtagagacggggtttcaccgtgttagccaggatggtctcgatctcctgacctcgtgatccgcccgcctcggcctcccaaagtgctgggattacaggcgtgagccaccgcgcccggcctgtgctgtgcctctcatgcttgttggaaccaggaggtggctggcaggaccaagtaggtggcctaatgcctggcatcaaggtggggcgctcccgggctcagctgccactgaaggtggaggtagaagaggtcacggtgcctgagggctttgtccagaagctcaatgaccacctgctcttggtgtacactggcaagacccgcctggctcggaacctgctgcaggatgtgctgaggagctggtatgcccgacttcctgctgtggtgcagaatgcccacagcctggtacggcaaactgaggagtgtgctgaaggcttccgccaaggaagcctgcctctgctgggccagtgcctgacctcgtactgggagcagaagaagctcatggctccaggctgtgagcccctgactgtgcggcgtatgatggatgtcctggccccccacgtgcatggccagagcctggctggggcaggcggtggaggctttctctatctgttgaccaaggagccacagcaaaaggaggccttggaggcggtgctggccaagaccgagggccttgggaattacagcatccacctggttgaagtggacactcagggcctgagcctgaagctgctggggaccgaggcctcaacctgttgccctttcccatgaa

SEQ ID NO: 135425 - DNA, 709 bp, Homo sapiens
  Payload ID: 6477
  Gene Symbol: FUOM
  Gene Name: fucose mutarotase
  Uniprot ID: A2VDF0
  ENST ID: ENST00000278025
  CDS Start-End: 29-493
aggccccgcccgccccgtctgccgggccatggtggcgctgaagggtgtccccgcactgctgtcccccgagctgctctacgcgctggcgcggatggggcacggggacgagatcgttcttgcggacttgaacttcccggcctcctccatctgccagtgtgggcccatggagatccgtgcagacggcctgggcatcccgcagctcctggaggccgtgctgaagctgctgcccctggacacctatgtggagagtccggctgcagtcatggagctggtgcccagcgacaaggagaggggcctgcagaccccagtgtggacggagtacgagtccatcctacgcagggccggctgtgtgagagccctggcaaagatagagaggtttgagttttatgaacgggctaagaaggcttttgctgttgtggcaacgggggagacggccctctacggaaacctcatcctcaggaagggggtgcttgccctcaaccccctgctgtaggcctggtgaagaccacctgggccggaagaggaactgggggcaccctgagctccagtaccaccactcacaacaggcctcccagtggcagctcccagacctgggccctggccagggctctaggggccggcagtcttggggtgggccctgccaattgggacgagtatccctgatttgtgaaaatgatggaaaaacgttcagtctcaagagtccaattcc

SEQ ID NO: 135426 - DNA, 628 bp, Homo sapiens
  Payload ID: 6477
  Gene Symbol: FUOM
  Gene Name: fucose mutarotase
  ENST ID: ENST00000368551
  CDS Start-End: 132-461
ctgggcggagccggcccgagcttctcccggagtccctccccagacggcccgagagccctcgcgtctgggctgcccccgaggttcttgcggacttgaacttcccggcctcctccatctgccagtgtgggcccatggagatccgtgcagacggcctgggcatcccgcagctcctggaggccgtgctgaagctgctgcccctggacacctatgtggagagtccggctgcagtcatggagctggtgcccagcgacaaggagaggggcctgcagaccccagtgtggacggagtacgagtccatcctacgcagggccggctgtgtgagagccctggcaaagatagagaggtttgagttttatgaacgggctaagaaggcttttgctgttgtggcaacgggggagacggccctctacggaaacctcatcctcaggaagggggtgcttgccctcaaccccctgctgtaggcctggtgaagaccacctgggccggaagaggaactgggggcaccctgagctccagtaccaccactcacaacaggcctcccagtggcagctcccagacctgggccctggccagggctctaggggccggcagtcttggggtgggccctgccaattgggacgagtatccc

SEQ ID NO: 135427 - DNA, 762 bp, Homo sapiens
  Payload ID: 6477
  Gene Symbol: FUOM
  Gene Name: fucose mutarotase
  Uniprot ID: A2VDF0
  ENST ID: ENST00000368552
  CDS Start-End: 19-423
cgccccgtctgccgggccatggtggcgctgaagggtgtccccgcactgctgtcccccgagctgctctacgcgctggcgcggatggggcacggggacgagatcgttcttgcggacttgaacttcccggcctcctccatctgccagtgtgggcccatggagatccgtgcagacggcctgggcatcccgcagctcctggaggccgtgctgaagctgctgcccctggacacctatgtggagagtccggctgcagtcatggagctggtgcccagcgacaaggagaggggcctgcagaccccagtgtggacggagtacgagtccatcctacgcagggccggctgtgtgagagccctggcaaagatagagaggtttgagttttatgaacgggctaagaaggcttttgctgttgtggcaacgggatgctgaagcagggtctcggcaccctggccctgcagcccagctcagtgctgggcttggctcctctgcagggagacggccctctacggaaacctcatcctcaggaagggggtgcttgccctcaaccccctgctgtaggcctggtgaagaccacctgggccggaagaggaactgggggcaccctgagctccagtaccaccactcacaacaggcctcccagtggcagctcccagacctgggccctggccagggctctaggggccggcagtcttggggtgggccctgccaattgggacgagtatccctgatttgtgaaaatgatggaaaaacgttcagtctcaagagtcc

SEQ ID NO: 135428 - DNA, 590 bp, Homo sapiens
  Payload ID: 6477
  Gene Symbol: FUOM
  Gene Name: fucose mutarotase
  ENST ID: ENST00000447176
  CDS Start-End: 1-384
aagggtgtccccgcactgctgtcccccgagctgctctacgcgctggcgcggatggggcacggggacgagatcggcctgggcatcccgcagctcctggaggccgtgctgaagctgctgcccctggacacctatgtggagagtccggctgcagtcatggagctggtgcccagcgacaaggagaggggcctgcagaccccagtgtggacggagtacgagtccatcctacgcagggccggctgtgtgagagccctggcaaagatagagaggtttgagttttatgaacgggctaagaaggcttttgctgttgtggcaacgggggagacggccctctacggaaacctcatcctcaggaagggggtgcttgccctcaaccccctgctgtaggcctggtgaagaccacctgggccggaagaggaactgggggcaccctgagctccagtaccaccactcacaacaggcctcccagtggcagctcccagacctgggccctggccagggctctaggggccggcagtcttggggtgggccctgccaattgggacgagtatccctgatttgtgaaaatgatggaaaaacgttcagtctcaaga

SEQ ID NO: 135429 - DNA, 1380 bp, Homo sapiens
  Payload ID: 6478
  Gene Symbol: FPGT
  Gene Name: fucose-1-phosphate guanylyltransferase
  Uniprot ID: O14772
  ENST ID: ENST00000370894
  CDS Start-End: 39-548
tgcgtgctgtgcggcgcggtctcagggaaggtggggctatggcagctgctagggaccctccggaagtatcgctgcgagaagccacccagcgaaaattgcggaggttttccgagctaagaggcaaacttgtagcacgtggagaattctgggacatagttgcaataacagcggctgatgaaaaacaggaacttgcttacaaccaacagctgtcagaaaagctgaaaagaaaggagttaccccttggagttcaatatcacgtttttgtggatcctgctggagccaaaattggaaatggaggatcaacactttgtgcccttcaatgtttggaaaagctatatggagataaatggaattcttttaccatcttattaattcactctgtatctttccagatataccagaatgctctggcaaaacatcctgtatcattcaaagcatactggattcaagatgttctgtggcacctggctcagttgtggagtattccagattggggcctgatgtttcagttggggaaaactgcattattagtggttcttacatcctaacaaaagctgccctccccgcacattcttttgtatgttccttaagcttaaagatgaatagatgcttaaagtatgcaactatggcatttggagtgcaagacaacttgaaaaagagtgtgaaaacattgtcagatataaagttacttcaattctttggagtctgtttcctgtcatgcttagatgtttggaatcttaaagttacagaggaactgttctctggtaacaagacatgtctgagtttgtggactgcacgcattttcccagtttgttcttctttgagtgactcagttataacatccctaaagatgttaaatgctgttaagaacaagtcagcattcagcctgaatagctataagttgctgtccattgaagaaatgcttatctacaaagatgtagaagatatgataacttacagggaacaaatttttctagaaatcagtttaaaaagcagtttgatgtagagatattttaaatattgtacactttgcctttttgagtaacattccagagataggtattttttgtaggctgtttcactgaactcagttaatgaaaactgtattaacataattgttgtagcataatattaatagtgcaaaagtacatataagtcattttgatgaaaaatattccaagactaagttgagaaaagagatactattttggatgtgtatcagtatttttgtttttaataatgattgatttgtggagcattgttttttcacataattagttttaaaggtaattttctaagcatacctttggaatttttccatcttttttgaggcttttggtccagtgaagttctaagtattcactggcacttctctcctca

SEQ ID NO: 135430 - DNA, 3254 bp, Homo sapiens
  Payload ID: 6478
  Gene Symbol: FPGT
  Gene Name: fucose-1-phosphate guanylyltransferase
  ENST ID: ENST00000370898
  CDS Start-End: 29-1852
aaccgggcggaggcgcaccccagggcgcatgcgtgctgtgcggcgcggtctcagggaaggtggggctatggcagctgctagggaccctccggaagtatcgctgcgagaagccacccagcgaaaattgcggaggttttccgagctaagaggcaaacttgtagcacgtggagaattctgggacatagttgcaataacagcggctgatgaaaaacaggaacttgcttacaaccaacagctgtcagaaaagctgaaaagaaaggagttaccccttggagttcaatatcacgtttttgtggatcctgctggagccaaaattggaaatggaggatcaacactttgtgcccttcaatgtttggaaaagctatatggagataaatggaattcttttaccatcttattaattcactctggtggctacagtcaacgacttccaaatgcaagtgctctgggaaaaattttcactgctttacctcttggtaaccccatttatcagatgctagaattaaaactagccatgtacattgatttccccttaaatatgaatcctggaattctggttacctgtgcagatgatattgaactttatagtattggagaatttgagtttattaggtttgacaaacctggctttactgctttagctcatccttctagtttgacgataggtaccacacatggagtatttgtcttagatccttttgatgatttaaaacatagagaccttgaatacaggtcttgccatcgtttccttcataagcccagcatagaaaagatgtatcagtttaatgctgtgtgtagacctggaaatttttgtcaacaggactttgctgggggtgacattgccgatcttaaattagactctgactatgtctacacagatagcctattttatatggatcataaatcagcaaaaatgttacttgctttttatgaaaaaataggcacactgagctgtgaaatagatgcctatggtgactttctgcaggctttgggacctggagcaactgtggagtacaccagaaacacatcaaatgtcattaaagaagagtcagagttggtagaaatgaggcagagaatatttcatcttcttaaaggaacatcactaaatgttgttgttcttaataactccaaattttatcacattggaacaaccgaagaatatttgttttactttacctcagataacagtttaaagtcagagctcggcttacagtccataacttttagtatctttccagatataccagaatgctctggcaaaacatcctgtatcattcaaagcatactggattcaagatgttctgtggcacctggctcagttgtggagtattccagattggggcctgatgtttcagttggggaaaactgcattattagtggttcttacatcctaacaaaagctgccctccccgcacattcttttgtatgttccttaagcttaaagatgaatagatgcttaaagtatgcaactatggcatttggagtgcaagacaacttgaaaaagagtgtgaaaacattgtcagatataaagttacttcaattctttggagtctgtttcctgtcatgcttagatgtttggaatcttaaagttacagaggaactgttctctggtaacaagacatgtctgagtttgtggactgcacgcattttcccagtttgttcttctttgagtgactcagttataacatccctaaagatgttaaatgctgttaagaacaagtcagcattcagcctgaatagctataagttgctgtccattgaagaaatgcttatctacaaagatgtagaagatatgataacttacagggaacaaatttttctagaaatcagtttaaaaagcagtttgatgtagagatattttaaatattgtacactttgcctttttgagtaacattccagagataggtattttttgtaggctgtttcactgaactcagttaatgaaaactgtattaacataattgttgtagcataatattaatagtgcaaaagtacatataagtcattttgatgaaaaatattccaagactaagttgagaaaagagatactattttggatgtgtatcagtatttttgtttttaataatgattgatttgtggagcattgttttttcacataattagttttaaaggtaattttctaagcatacctttggaatttttccatcttttttgaggcttttggtccagtgaagttctaagtattcactggcacttctctcctcaactgtaattctatttttaataataaaaatggcatactgtagggtcttcagagtagtgtaggaatactgtagaaatactttttcagaaacgaatccatagctgacaaattcactcagtgcccaatatattgtgattattttcgttgataaagaactagatacaaagacctctgaaattgatgataaaatttgtatctcattaattttatcaaaatgaaactaaaagtacatatgtattatacacttgaacatgtgtttgtatatctttaaaattttcctttatgttccattccataggaaaacacacatatgcacacaaaactcagttatctgtggggaaagtggtagtaataattgagattcatcaataatcatataatttcactatagacattacttgcattatctcctatcagtccttctaacaaaacttcaattaccagatgaactgactttagttttcatcttattttttgtccacatgctggtgatgctgagaaacaataattggcccaaatgcagacatcaagaagcaggcaggaaaatggaaaaactgagataatacacaggtgataaacagtttcgagaaaataaaaattggctagaatctcaagttatgtgtttctatattggtataagcatataagtgaaaagtcttataagtgtaatagagaaaagatttgtcagtgtgtttttttaaatgaaataactagtctgtgctactttatgtcaatataaaaattggtaaactagaagtaacttgtccacaaccctcagttatgatacttatgtgcgtgtttttttttccaaagtttttcccaaggagaagatacaaatatatggtagctattgtttaaaaatgattgatttacttgcagatttttcagaggatgttatgtctttgtcattcattaaatgttcaaaattgtagttttaccaaatctgaagtgccatcagttataagaatcaccattattttatgttccattaagaaaaacacaataaaacatgacactgctttttttgtta

SEQ ID NO: 135431 - DNA, 582 bp, Homo sapiens
  Payload ID: 6478
  Gene Symbol: FPGT
  Gene Name: fucose-1-phosphate guanylyltransferase
  ENST ID: ENST00000529485
  CDS Start-End: 36-341
gtgctgtgcggcgcggtctcagggaaggtggggctatggcagctgctagggaccctccggaagtatcgctgcgagaagccacccagcgaaaattgcggaggttttccgagctaagaggcaaacttgtagcacgtggagaattctgggacatagttgcaataacagcggctgatgaaaaacaggaacttgcttacaaccaacagctgtcagaaaagctgaaaagaaaggagttaccccttggagttcaatatcacgtttttgtggatcctgctggagccaaaattgtagagacggggtttcaccatgttagccaggacggtctgtatctcctgacctcgtgatccacctgcctcggcctcccaaagtgctgggattacaggcgtgatattatttccatagatgagaatctgaggaaatggaggatcaacactttgtgcccttcaatgtttggaaaagctatatggagataaatggaattcttttaccatcttattaattcactctggtggctacagtcaacgacttccaaatgcaagtgctctgggaaaaattttcactgctttacctcttggtaaccccatt

SEQ ID NO: 135432 - DNA, 1426 bp, Homo sapiens
  Payload ID: 6478
  Gene Symbol: FPGT
  Gene Name: fucose-1-phosphate guanylyltransferase
  Uniprot ID: O14772
  ENST ID: ENST00000534056
  CDS Start-End: 13-1035
gaaggtggggctatggcagctgctagggaccctccggaagtatcgctgcgagaagccacccagcgaaaattgcggaggttttccgagctaagaggcaaacttgtagcacgtggagaattctgggacatagttgcaataacagcggctgatgaaaaacaggaacttgcttacaaccaacagctgtcagaaaagctgaaaagaaaggagttaccccttggagttcaatatcacgtttttgtggatcctgctggagccaaaattggaaatggaggatcaacactttgtgcccttcaatgtttggaaaagctatatggagataaatggaattcttttaccatcttattaattcactctggtggctacagtcaacgacttccaaatgcaagtgctctgggaaaaattttcactgctttacctcttgatataccagaatgctctggcaaaacatcctgtatcattcaaagcatactggattcaagatgttctgtggcacctggctcagttgtggagtattccagattggggcctgatgtttcagttggggaaaactgcattattagtggttcttacatcctaacaaaagctgccctccccgcacattcttttgtatgttccttaagcttaaagatgaatagatgcttaaagtatgcaactatggcatttggagtgcaagacaacttgaaaaagagtgtgaaaacattgtcagatataaagttacttcaattctttggagtctgtttcctgtcatgcttagatgtttggaatcttaaagttacagaggaactgttctctggtaacaagacatgtctgagtttgtggactgcacgcattttcccagtttgttcttctttgagtgactcagttataacatccctaaagatgttaaatgctgttaagaacaagtcagcattcagcctgaatagctataagttgctgtccattgaagaaatgcttatctacaaagatgtagaagatatgataacttacagggaacaaatttttctagaaatcagtttaaaaagcagtttgatgtagagatattttaaatattgtacactttgcctttttgagtaacattccagagataggtattttttgtaggctgtttcactgaactcagttaatgaaaactgtattaacataattgttgtagcataatattaatagtgcaaaagtacatataagtcattttgatgaaaaatattccaagactaagttgagaaaagagatactattttggatgtgtatcagtatttttgtttttaataatgattgatttgtggagcattgttttttcacataattagttttaaaggtaattttctaagcatacctttggaatttttccatcttttttgaggcttttggtccagtgaagttctaagtattcactggcacttctctcctcaactgtaattctattttt

SEQ ID NO: 135433 - DNA, 561 bp, Homo sapiens
  Payload ID: 6478
  Gene Symbol: FPGT
  Gene Name: fucose-1-phosphate guanylyltransferase
  ENST ID: ENST00000482102
  CDS Start-End: 38-451
gcgtgctgtgcggcgcggtctcagggaaggtggggctatggcagctgctagggaccctccggaagtatcgctgcgagaagccacccagcgaaaattgcggaggttttccgagctaagaggtaccagagaaggcaccggagttctcctgggcaatgcagagggagggtgcttttacgtgccaggaggcaaacttgtagcacgtggagaattctgggacatagttgcaataacagcggctgatgaaaaacaggaacttgcttacaaccaacagctgtcagaaaagctgaaaagaaaggagttaccccttggagttcaatatcacgtttttgtggatcctgctggagccaaaattggtacgcgctttatggaaatggaggatcaacactttgtgcccttcaatgtttggaaaagctatatggagataaatggaattcttttaccatcttattaattcactctggtggctacagtcaacgacttccaaatgcaagtgctctgggaaaaattttcactgctttacctcttggtaaccccatttatcagatgctagaattaaaacta

SEQ ID NO: 135434 - DNA, 524 bp, Homo sapiens
  Payload ID: 6478
  Gene Symbol: FPGT
  Gene Name: fucose-1-phosphate guanylyltransferase
  ENST ID: ENST00000472069
  CDS Start-End: 1-524
gagctaagaggtaccagagaaggcaccggagttctcctgggcaatgcagagggagggtgcttttacgtgccaggaggcaaacttgtagcacgtggagaattctgggacatagttgcaataacagcggctgatgaaaaacaggaacttgcttacaaccaacagctgtcagaaaagctgaaaagaaaggagttaccccttggagttcaatatcacgtttttgtggatcctgctggagccaaaattggaaatggaggatcaacactttgtgcccttcaatgtttggaaaagctatatggagataaatggaattcttttaccatcttattaattcactctggtggctacagtcaacgacttccaaatgcaagtgctctgggaaaaattttcactgctttacctcttggtaaccccatttatcagatgctagaattaaaactagccatgtacattgatttccccttaaatatgaatcctggaattctggttacctgtgcagatgatattgaactttatagtattggaga

SEQ ID NO: 135435 - DNA, 601 bp, Homo sapiens
  Payload ID: 6478
  Gene Symbol: FPGT
  Gene Name: fucose-1-phosphate guanylyltransferase
  ENST ID: ENST00000467578
  CDS Start-End: 3-389
gcatgcgtgctgtgcggcgcggtctcagggaaggtggggctatggcagctgctagggaccctccggaagtatcgctgcgagaagccacccagcgaaaattgcggaggttttccgagctaagaggcaaacttgtagcacgtggagaattctgggacatagttgcaataacagcggctgatgaaaaacaggaacttgcttacaaccaacagctgtcagaaaagctgaaaagaaaggagttaccccttggagttcaatatcacgtttttgtggatcctgctggagccaaaattggtacgcgctttatggaaatggaggatcaacactttgtgcccttcaatgtttggaaaagctatatggagataaatggaattcttttaccatcttattaattcactctggtggctacagtcaacgacttccaaatgcaagtgctctgggaaaaattttcactgctttacctcttggtaaccccatttatcagatgctagaattaaaactagccatgtacattgatttccccttaaatatgaatcctggaattctggttacctgtgcagatgatattgaactttatagtattggagaatttgagtttattagg

SEQ ID NO: 135436 - DNA, 2047 bp, Homo sapiens
  Payload ID: 6479
  Gene Symbol: FUCA1
  Gene Name: fucosidase, alpha-L- 1, tissue
  Uniprot ID: P04066
  ENST ID: ENST00000374479
  CDS Start-End: 9-1409
gggtagcgatgcgggctccggggatgaggtcgcggccggcgggtcccgcgctgttgctgctgctgctcttcctcggagcggccgagtcggtgcgtcgggcccagcctccgcgccgctacaccccagactggccgagcctggattctcggccgctgccggcctggttcgacgaagccaagttcggggtgttcatccactggggcgtgttctcggtgcccgcctggggcagcgagtggttctggtggcactggcagggcgaggggcggccgcagtaccagcgcttcatgcgcgacaactacccgcccggcttcagctacgccgacttcggaccgcagttcactgcgcgcttcttccacccggaggagtgggccgacctcttccaggccgcgggcgccaagtatgtagttttgacgacaaagcatcacgaaggcttcacaaactggccgagtcctgtgtcttggaactggaactccaaagacgtggggcctcatcgggatttggttggtgaattgggaacagctctccggaagaggaacatccgctatggactataccactcactcttagagtggttccatccactctatctacttgataagaaaaatggcttcaaaacacagcattttgtcagtgcaaaaacaatgccagagctgtacgaccttgttaacagctataaacctgatctgatctggtctgatggggagtgggaatgtcctgatacttactggaactccacaaattttctttcatggctctacaatgacagccctgtcaaggatgaggtggtagtaaatgaccgatggggtcagaactgttcctgtcaccatggaggatactataactgtgaagataaattcaagccacagagcttgccagatcacaagtgggagatgtgcaccagcattgacaagttttcctggggctatcgtcgtgacatggcattgtctgatgttacagaagaatctgaaatcatttcggaactggttcagacagtaagtttgggaggcaactatcttctgaacattggaccaactaaagatggactgattgttcccatcttccaagaaaggcttcttgctgttgggaaatggctgagcatcaatggggaggctatctatgcctccaaaccatggcgggtgcaatgggaaaagaacacaacatctgtatggtatacctcaaagggatcggctgtttatgccatttttctgcactggccagaaaatggagtcttaaaccttgaatcccccataactacctcaactacaaagataacaatgctgggaattcaaggagatctgaagtggtccacagatccagataaaggtctcttcatctctctaccccagttgccaccctctgctgtccccgcagagtttgcttggactataaagctgacaggagtgaagtaatcatttgagtgcaagaagaaagaggcgctgctcactgttttcctgcttcagtttttctcttatagtaccatcactataatcaacgaacttctcttctccacccagagatggcttttccaacacattttaattaaaggaactgagtacattaccctgatgtctaaatggaccaaagatctgagatccattgtgattatatctgtatcaggtcagcagaagaaggaactgagcagttgaactctgagttcatcaattgtaatatttggaaattatctacaatggaatcttccctctgttctctgataacctacttgcttactcaatgcctttaagccaagtcaccctgttgcctatgggaggaggtggaaggatttggcaagctcaaccacatgctatttagttagcatcagttgtcaccaacagtctttctgcaaagggcaggagagctttgggggaaaggaaaaggcttaccaggctgctatggtcaactcttcagaaattttcagagcaatctaaaagcgccaaaattcgctatgtttacagtgatactattaagaaaatgaatgtgattctgctctgtctttttaagtatgatcaaataaaaaatttgtacatcacaatcatttctaccaaaaaaa

SEQ ID NO: 135437 - DNA, 2356 bp, Homo sapiens
  Payload ID: 6480
  Gene Symbol: FUCA2
  Gene Name: fucosidase, alpha-L- 2, plasma
  Uniprot ID: Q9BTY2
  ENST ID: ENST00000002165
  CDS Start-End: 57-1460
cagcgctcccgaggccgcgggagcctgcagagaggacagccggcctgcgccgggacatgcggccccaggagctccccaggctcgcgttcccgttgctgctgttgctgttgctgctgctgccgccgccgccgtgccctgcccacagcgccacgcgcttcgaccccacctgggagtccctggacgcccgccagctgcccgcgtggtttgaccaggccaagttcggcatcttcatccactggggagtgttttccgtgcccagcttcggtagcgagtggttctggtggtattggcaaaaggaaaagataccgaagtatgtggaatttatgaaagataattaccctcctagtttcaaatatgaagattttggaccactatttacagcaaaattttttaatgccaaccagtgggcagatatttttcaggcctctggtgccaaatacattgtcttaacttccaaacatcatgaaggctttaccttgtgggggtcagaatattcgtggaactggaatgccatagatgaggggcccaagagggacattgtcaaggaacttgaggtagccattaggaacagaactgacctgcgttttggactgtactattccctttttgaatggtttcatccgctcttccttgaggatgaatccagttcattccataagcggcaatttccagtttctaagacattgccagagctctatgagttagtgaacaactatcagcctgaggttctgtggtcggatggtgacggaggagcaccggatcaatactggaacagcacaggcttcttggcctggttatataatgaaagcccagttcggggcacagtagtcaccaatgatcgttggggagctggtagcatctgtaagcatggtggcttctatacctgcagtgatcgttataacccaggacatcttttgccacataaatgggaaaactgcatgacaatagacaaactgtcctggggctataggagggaagctggaatctctgactatcttacaattgaagaattggtgaagcaacttgtagagacagtttcatgtggaggaaatcttttgatgaatattgggcccacactagatggcaccatttctgtagtttttgaggagcgactgaggcaaatggggtcctggctaaaagtcaatggagaagctatttatgaaacccatacctggcgatcccagaatgacactgtcaccccagatgtgtggtacacatccaagcctaaagaaaaattagtctatgccatttttcttaaatggcccacatcaggacagctgttccttggccatcccaaagctattctgggggcaacagaggtgaaactactgggccatggacagccacttaactggatttctttggagcaaaatggcattatggtagaactgccacagctaaccattcatcagatgccgtgtaaatggggctgggctctagccctgactaatgtgatctaaagtgcagcagagtggctgatgctgcaagttatgtctaaggctaggaactatcaggtgtctataattgtagcacatggagaaagcaaatgtaaaactggataagaaaattattttggcagttcagccctttccctttttcccactaaattttttcttaaattacccatgtaaccattttaactctccagtgcactttgccattaaagtctcttcacattgatttgtttccatgtgtgactcagaggtgagaattttttcacattatagtagcaaggaattggtggtattatggaccgaactgaaaattttatgttgaagccatatcccccatgattatatagttatgcatcacttaatatggggatattttctgggaaatgcattgctagtcaatttttttttgtgccaacatcatagagtgtatttacaaaatcctagatggcatagcctactacacacctaatgtgtatggtatagactgttgctcctaggctacagacatatacagcatgttactgaatactgtaggcaatagtaacagtggtatttgtatatcgaaacatatggaaacatagagaaggtacagtaaaaatactgtaaaataaatggtgcacctgtatagggcacttaccacgaatggagcttacaggactggaagttgctctgggtgagtcagtgagtgaatgtgaaggcctaggacattattgaacactgccagactttataaatactgtatgcttaggctacactacatttataaaaaaaagtttttctttcttcaattataaattaacataagtgtactgtaactttacaaacgttttaatttttaaaacctttttggctcttttgtaataacacttagcttaaaacataaactcattgtgcaaatgtac

SEQ ID NO: 135438 - DNA, 737 bp, Homo sapiens
  Payload ID: 6480
  Gene Symbol: FUCA2
  Gene Name: fucosidase, alpha-L- 2, plasma
  ENST ID: ENST00000451668
  CDS Start-End: 1-330
caacttgtagagacagtttcatgtggaggaaatcttttgatgaatattgggcccacactagatggcaccatttctgtagtttttgaggagcgactgaggcaaatggggtcctggctaaaagtcaatggagaagctatttatgaaacccatacctggcgatcccagaatgacactgtcaccccagatgtgtggtacacatccaagcctaaagaaaaattagtctatgccatttttcttaaatggcccacatcaggacagctgttccttggccatcccaaagctattctgggggcaacagaggtaagagggaattttaccttattcctttaaattgctgattagaacatcttgatgcaaacattaacttttaaggggagccttataactgtttcacttatacttcataaaaggaattgtaaatgagctccagccaagcattgtggctcacactgtaattccagcactttgggaggctaaggcaggaggatgtcttgaggccagaagtttgagactagcctgggcaacatagcaagacccctgtctacaaaaattttttttaaagttagctgagcatggtggcacgcacctgtagtcctagttactcaggaggctgaggcaggaggattgcttgagcccagtaggtcaagactacagtaagctatgactgcaccacttcagcctgtctctgaaaaaataaaataaaatataataaaataaaatgaatttcaccaatgaca

SEQ ID NO: 135439 - DNA, 4246 bp, Homo sapiens
  Payload ID: 6481
  Gene Symbol: FUT1
  Gene Name: fucosyltransferase 1 (galactoside 2-alpha-L-fucosyltransferase, H blood group)
  Uniprot ID: P19526
  ENST ID: ENST00000310160
  CDS Start-End: 976-2073
gaaagtccctgactggagttggcagccaagccaggccctggagtgggcacccagagggaagacaggttggctaatttcctggagcccctaagggtgcaagggggaagaacacccacccgcaaagccccgtagggctggaccctacgttagcctgccctgctcggggttggcgatgctggaggtgggccttggaccagagaaaatgctttaattaggtgacaagcgggcagaggcctttgtctctggcgccggcagccacggcccccgctgacggcgtgggaaacagaccctgttccactccggtctccagccttggaatggttgccttcgtgcagtgcaggaggacgcggcagagggcggacgatcgctccactcgccgggaccaggtgcgggggccctgcccagccgctggggcgtggccaggctcgaagcacccaggtgtcgggggccgactctaagccctggcaccggaagagagagggcggcggattggacctcccggctccagcattgcaactgggcgctccgtctcctggtccacgcaatgatgctgcggctgctcagaagccaggtagcctgccctgggtgaagccttcgcgcaggtcaatgacggggcggaggggcagggcgcggtcccctgcatccccgatctggggagcggtgggcccaggggccatcgccttagcccctggcgctggggctcggcgccaagtgacgggcggggctccaccttccagccatccgcccggcccgggagggcggacgctgcgagactcccggccgcgccctctccttcctctcctccccaagccctcgctgccagtccggacaggctgcgcggaggggagggctgccgggccggatagccggacgcctggcgttccaggggcggccggatgtggcctgcctttgcggagggtgcgctccggccacgaaaagcggactgtggatctgccacctgcaagcagctcggccatgtggctccggagccatcgtcagctctgcctggccttcctgctagtctgtgtcctctctgtaatcttcttcctccatatccatcaagacagctttccacatggcctaggcctgtcgatcctgtgtccagaccgccgcctggtgacacccccagtggccatcttctgcctgccgggtactgcgatgggccccaacgcctcctcttcctgtccccagcaccctgcttccctctccggcacctggactgtctaccccaatggccggtttggtaatcagatgggacagtatgccacgctgctggctctggcccagctcaacggccgccgggcctttatcctgcctgccatgcatgccgccctggccccggtattccgcatcaccctgcccgtgctggccccagaagtggacagccgcacgccgtggcgggagctgcagcttcacgactggatgtcggaggagtacgcggacttgagagatcctttcctgaagctctctggcttcccctgctcttggactttcttccaccatctccgggaacagatccgcagagagttcaccctgcacgaccaccttcgggaagaggcgcagagtgtgctgggtcagctccgcctgggccgcacaggggaccgcccgcgcacctttgtcggcgtccacgtgcgccgtggggactatctgcaggttatgcctcagcgctggaagggtgtggtgggcgacagcgcctacctccggcaggccatggactggttccgggcacggcacgaagcccccgttttcgtggtcaccagcaacggcatggagtggtgtaaagaaaacatcgacacctcccagggcgatgtgacgtttgctggcgatggacaggaggctacaccgtggaaagactttgccctgctcacacagtgcaaccacaccattatgaccattggcaccttcggcttctgggctgcctacctggctggcggagacactgtctacctggccaacttcaccctgccagactctgagttcctgaagatctttaagccggaggcggccttcctgcccgagtgggtgggcattaatgcagacttgtctccactctggacattggctaagccttgagagccagggagactttctgaagtagcctgatctttctagagccagcagtacgtggcttcagaggcctggcatcttctggagaagcttgtggtgttcctgaagcaaatgggtgcccgtatccagagtgattctagttgggagagttggagagaagggggacgtttctggaactgtctgaatattctagaactagcaaaacatcttttcctgatggctggcaggcagttctagaagccacagtgcccacctgctcttcccagcccatatctacagtacttccagatggctgcccccaggaatggggaactctccctctggtctactctagaagaggggttacttctcccctgggtcctccaaagactgaaggagcatatgattgctccagagcaagcattcaccaagtccccttctgtgtttctggagtgattctagagggagacttgttctagagaggaccaggtttgatgcctgtgaagaaccctgcagggcccttatggacaggatggggttctggaaatccagataactaaggtgaagaatctttttagttttttttttttttttttggagacagggtctcgctctgttgcccaggctggagtgcagtggcgtgatcttggctcactgcaacttccgcctcctgtgttcaagcgattctcctgtctcagcctcctgagtagatgggactacaggcacaggccattatgcctggctaatttttgtatttttagtagagacagggtttcaccatgttggccaggatggtctcgatctcctgaccttgtcatccacctgtcttggcctcccaaagtgctgggattactggcatgagccactgtgcccagcccggatattttttttttaattatttatttatttatttatttattgagacggagtcttgctctgtagcccaggccagagtgcagtggcgcgatctcagctcactgcaagctctgcctcccgggttcatgccattctgcctcagcctcctgagtagctgggactacaggcgcccgccaccacgcccggctaattttttttgtatttttagtagagacggggtttcatcgtgttaaccaggatggtctcgatctcctgacctcgtgatctgcccacctcggcctcccacagtgctgggattaccggcgtgagccaccatgcctggcccggataattttttttaatttttgtagagacgaggtcttgtgatattgcccaggctgttcttcaactcctgggctcaagcagtcctcccaccttggcctcccagaatgctgggtttatagatgtgagccagcacaccgggccaagtgaagaatctaatgaatgtgcaacctaattgtagcatctaatgaatgttccaccattgctggaaaaattgagatggaaaacaaaccatctctagttggccagcgtcttgctctgttcacagtctctggaaaagctggggtagttggtgagcagagcgggactctgtccaacaagccccacagcccctcaaagacttttttttgtttgttttgagcagacaggctaaaatgtgaacgtggggtgagggatcactgccaaaatggtacagcttctggagcagaactttccagggatccagggacacttttttttaaagctcataaactgccaagagctccatatattgggtgtgagttcaggttgcctctcacaatgaaggaagttggtctttgtctgcaggtgggctgctgagggtctgggatctgttttctggaagtgtgcaggtataaacacaccctctgtgcttgtgacaaactggcaggtaccgtgctcattgctaaccactgtctgtccctgaactcccagaaccactacatctggctttgggcaggtctgagataaaacgatctaaaggtaggcagaccctggacccagcctcagatccaggcaggagcacgaggtctggccaaggtggacggggttgtcgagatctcaggagccccttgctgttttttggagggtgaaagaagaaaccttaaacatagtcagctctgatcacatcccctgtctactcatccagaccccatgcctgtaggcttatcagggagttacagttacaattgttacagtactgttcccaactcagctgccacgggtgagagagcaggaggtatgaattaaaagtctacagcactaa

SEQ ID NO: 135440 - DNA, 3825 bp, Homo sapiens
  Payload ID: 6482
  Gene Symbol: FUT10
  Gene Name: fucosyltransferase 10 (alpha (1,3) fucosyltransferase)
  Uniprot ID: Q6P4F1
  ENST ID: ENST00000327671
  CDS Start-End: 633-2072
gctccagtcctagtccagttggagaagcggagagtttcccctgtcttaaagaagagggcccccgcagccttcccgagaactttccatagggccgtggcctcaggcggactgcgaaccaagatcatcagcagggggcggcccggtgttcttagaacccgggtcccaagagcttgtgaacagggcacgagtgaaaacccggatccaggctggctccgccggaacgcgccccgagctcgcccgcgcggccgcctcttccgctcctgatcggctcttcgggtcttcccggcgcccaggcttgggctcatagggagaaaggaagctgcgctgcattctgcgggacgaaccctgctccgcgcgagaatttttttgattccttcttatttggagaaatctccagctgctctgatgatagcctaagaagactgcatgctgcttcctctcgatgccaagccagaccctctcacaacctcggatctcagtccttcatggagacctggtcccagcaggaatggcagtgcaggaaattggcgcccagatggttcttccatgtgaagttgtctcgggctctgggctgacgagagaacacctggtaaccaggttagccctctgtcagtcacccagggcagggcagcatggtgcggattcagaggaggaagcttttggcatcttgcctgtgcgtcacagccaccgtctttctgcttgtcacactccaggtcatggttgagctggggaagtttgaaaggaaggagtttaaaagttccagtttgcaagatggacatacaaaaatggaggaagcacctacgcatcttaattcatttcttaagaaagaaggattgaccttcaacaggaaaagaaaatgggaattggacagctaccccattatgctctggtggtccccgctgacgggggagactgggaggttaggccaatgtggagcagatgcttgtttcttcaccatcaaccggacctacctccatcatcacatgaccaaagcattcctcttctatggtactgactttaacatagatagcttacctctgcctcggaaagcccatcatgactgggctgtttttcatgaagagtccccgaaaaacaattataagctctttcataaaccagtgatcaccttgttcaactacactgccacgttcagcaggcattcccacttgccactaactacccaatacttggagagcattgaagtcctgaagtcactccgatacctagttcctttgcagtccaaaaacaagcttagaaaaagacttgctccgctggtgtatgtacagtcagactgtgacccaccatcagacagggacagctatgttcgcgagctgatgacttacatcgaggtcgattcctatggtgaatgtttacgaaacaaagacctccctcagcagctgaaaaatccagcctctatggatgccgatggcttttataggatcattgcacagtataagtttatcctagcttttgagaatgcagtttgtgatgactacatcactgagaagttctggaggccactgaaactgggggtagtccctgtatattacggatcccccagcatcacagactggcttccaagtaacaaaagtgctattcttgtatcagaattttctcaccccagggaactggcaagttacatcagacgactggattctgatgacagattgtatgaggcctatgtagaatggaagctgaagggtgagatctctaaccagcgacttctgacagctctcagggaacggaaatggggagtgcaagacgtcaaccaggacaattacatcgatgcatttgagtgtatggtgtgcaccaaggtgtgggctaatatcaggcttcaggaaaagggcttaccacccaaaagatgggaggcagaagatacccacctgagttgcccagagcccacagtgtttgctttctcaccactccggactccacctttgagctctttgcgagagatgtggatttccagctttgaacaatccaagaaagaagcccaggcactaaggtggctggttgataggaatcaaaacttttcatctcaagagttttggggcctagtattcaaggactgatttcaaaaatgatcagaatgaaacagactagagccttcttgaggtttattttctaggttgccttaatatttgaacataatagctattctgttgactatccatcaggataataattagttgctgcagtactcataatgagccctttcaaggaatagatgtaaattacccttaggggtagccactatattttttatactaaaaaaggaaatatttcttatggacactggttatcttccatgtccgtgtctgtggacccacatacttactgccttttgtggaaattcacctagagtgagtactttccttgtgcaatggagggagacgatctagctatagattcttgatactcacctcactctcaacagcttattggtatttggcaaacctggtatcctgcagccgagcatgaacatgaaatacattagaacttggcaatgagagatcccatctgttggtttccagggatgtaagtgagtaataaaagctgtttcaagtttatccactatccactcttcaagtgaaaagaacttatgtgtgtctaccttcttctccataccctgagccacctctctcactttctttagttgtgccttgccctatcgcctcccattttcccttcaaagtagaatgtcttgtaaagacacagtaactcctgtgtgttttgattagtgagatgttaccacttaccccttctgctgcgcagaataatattaagaattgctatgcttatgattcaggctggacagcctggacattttgagcagcgcgagagtagaagtgaatacccccaggaactccaattgtgctgaagctgatttgtctgttcgtaggatgatgtgcagcctgtcacagtggcagccacaggcattcagtttgtgggcatttcctgtcatttcggatcctgctatagggaaggttcagctctcctgtctggggcatctactggagcacctcagaagacaaggaggaaaacactggctcatgttttctttccatgtgagggaggggaggtttctagatgatactaaaagcctgttgccactgttgtgtcatgatttccattcttcatcatggaaagccacaagcctcagaaggcagccagaggacaggaagagtctgtgatgctcatgtctgtgtcatggcatgagggggaattgacgagtgcttgcttagcatcagctctcattgtattgaaggctgtgcccttggtgtgcttagcagtgagcagcgtcttcattaggtagctctggctgggctttgtcagccagcgtgtgagaaaggagaaccaaaaccaatacctccttatagaagccagaaggatcacattggatgagagaaggtgtctataactgggttcttcccaatcccagctctttcattaactaaatatgatcttggacatatctcttaacctccatcggccttagtttttgcatccaaaaagaagtgattgggctggtcttggaaggtttttttcttttttttcccctgtgtaacattcttcattgttcatcaacatttaagaaatttaattttgtagatgtttttactaaagagggtaacaaactattttggaactgctgtatgttattcaagggaagcacgctgtttggaggaaggagcatacttaatgggtagtattgaggatgaaagggaatttctctctctgccattttatttgataatattaaagaaataaagactggaaagggggattccttgttaaaggtcagattttaaattgcatataaaa

SEQ ID NO: 135441 - DNA, 2042 bp, Homo sapiens
  Payload ID: 6482
  Gene Symbol: FUT10
  Gene Name: fucosyltransferase 10 (alpha (1,3) fucosyltransferase)
  Uniprot ID: Q6P4F1
  ENST ID: ENST00000524021
  CDS Start-End: 374-1729
atagggagaaaggaagctgcgctgcattctgcgggacgaaccctgctccgcgcgagaatttttttgattccttcttatttggagaaatctccagctgctctgatgatagcctaagaagactgcatgctgcttcctctcgatgccaagccagaccctctcacaacctcggatctcagtccttcatggagacctggtcccagcaggaatggcagtgcaggaaattggcgcccagatggttcttccatgtgaagttgtctcgggctctgggctgacgagagaacacctggtaaccaggttagccctctgtcagtcacccagggcagggcagcatggtgcggattcagaggaggaagcttttggcatcttgcctgtcatggttgagctggggaagtttgaaaggaaggagtttaaaagttccagtttgcaagatggacatacaaaaatggaggaagcacctacgcatcttaattcatttcttaagaaagaaggattgaccttcaacaggaaaagaaaatgggaattggacagctaccccattatgctctggtggtccccgctgacgggggagactgggaggttaggccaatgtggagcagatgcttgtttcttcaccatcaaccggacctacctccatcatcacatgaccaaagcattcctcttctatggtactgactttaacatagatagcttacctctgcctcggaaagcccatcatgactgggctgtttttcatgaagagtccccgaaaaacaattataagctctttcataaaccagtgatcaccttgttcaactacactgccacgttcagcaggcattcccacttgccactaactacccaatacttggagagcattgaagtcctgaagtcactccgatacctagttcctttgcagtccaaaaacaagcttagaaaaagacttgctccgctggtgtatgtacagtcagactgtgacccaccatcagacagggacagctatgttcgcgagctgatgacttacatcgaggtcgattcctatggtgaatgtttacgaaacaaagacctccctcagcagctgaaaaatccagcctctatggatgccgatggcttttataggatcattgcacagtataagtttatcctagcttttgagaatgcagtttgtgatgactacatcactgagaagttctggaggccactgaaactgggggtagtccctgtatattacggatcccccagcatcacagactggcttccaagtaacaaaagtgctattcttgtatcagaattttctcaccccagggaactggcaagttacatcagacgactggattctgatgacagattgtatgaggcctatgtagaatggaagctgaagggtgagatctctaaccagcgacttctgacagctctcagggaacggaaatggggagtgcaagacgtcaaccaggacaattacatcgatgcatttgagtgtatggtgtgcaccaaggtgtgggctaatatcaggcttcaggaaaagggcttaccacccaaaagatgggaggcagaagatacccacctgagttgcccagagcccacagtgtttgctttctcaccactccggactccacctttgagctctttgcgagagatgtggatttccagctttgaacaatccaagaaagaagcccaggcactaaggtggctggttgataggaatcaaaacttttcatctcaagagttttggggcctagtattcaaggactgatttcaaaaatgatcagaatgaaacagactagagccttcttgaggtttattttctaggttgccttaatatttgaacataatagctattctgttgactatccatcaggataataattagttgctgcagtactcataatgagccctttcaaggaatagatgtaaattacccttaggggtagccactatattttttatactaaaaaaggaaatatttcttatggacactggttatcttccatgtccgtgtctgtggacccacatacttactgccttttgtggaaattcacctagagtgagtactttccttgtgcaat

SEQ ID NO: 135442 - DNA, 3115 bp, Homo sapiens
  Payload ID: 6482
  Gene Symbol: FUT10
  Gene Name: fucosyltransferase 10 (alpha (1,3) fucosyltransferase)
  Uniprot ID: Q6P4F1
  ENST ID: ENST00000518672
  CDS Start-End: 244-1599
agaatttttttgattccttcttatttggagaaatctccagctgctctgatgatagcctaagaagactgcatgctgcttcctctcgatgccaagccagaccctctcacaacctcggatctcagtccttcatggagacctggtcccagcaggaatggcagtgcaggaaattggcgcccagatggttcttccatgtgaagttgtctcgggctctgggctgacgagagaacacctggtaaccaggtcatggttgagctggggaagtttgaaaggaaggagtttaaaagttccagtttgcaagatggacatacaaaaatggaggaagcacctacgcatcttaattcatttcttaagaaagaaggattgaccttcaacaggaaaagaaaatgggaattggacagctaccccattatgctctggtggtccccgctgacgggggagactgggaggttaggccaatgtggagcagatgcttgtttcttcaccatcaaccggacctacctccatcatcacatgaccaaagcattcctcttctatggtactgactttaacatagatagcttacctctgcctcggaaagcccatcatgactgggctgtttttcatgaagagtccccgaaaaacaattataagctctttcataaaccagtgatcaccttgttcaactacactgccacgttcagcaggcattcccacttgccactaactacccaatacttggagagcattgaagtcctgaagtcactccgatacctagttcctttgcagtccaaaaacaagcttagaaaaagacttgctccgctggtgtatgtacagtcagactgtgacccaccatcagacagggacagctatgttcgcgagctgatgacttacatcgaggtcgattcctatggtgaatgtttacgaaacaaagacctccctcagcagctgaaaaatccagcctctatggatgccgatggcttttataggatcattgcacagtataagtttatcctagcttttgagaatgcagtttgtgatgactacatcactgagaagttctggaggccactgaaactgggggtagtccctgtatattacggatcccccagcatcacagactggcttccaagtaacaaaagtgctattcttgtatcagaattttctcaccccagggaactggcaagttacatcagacgactggattctgatgacagattgtatgaggcctatgtagaatggaagctgaagggtgagatctctaaccagcgacttctgacagctctcagggaacggaaatggggagtgcaagacgtcaaccaggacaattacatcgatgcatttgagtgtatggtgtgcaccaaggtgtgggctaatatcaggcttcaggaaaagggcttaccacccaaaagatgggaggcagaagatacccacctgagttgcccagagcccacagtgtttgctttctcaccactccggactccacctttgagctctttgcgagagatgtggatttccagctttgaacaatccaagaaagaagcccaggcactaaggtggctggttgataggaatcaaaacttttcatctcaagagttttggggcctagtattcaaggactgatttcaaaaatgatcagaatgaaacagactagagccttcttgaggtttattttctaggttgccttaatatttgaacataatagctattctgttgactatccatcaggataataattagttgctgcagtactcataatgagccctttcaaggaatagatgtaaattacccttaggggtagccactatattttttatactaaaaaaggaaatatttcttatggacactggttatcttccatgtccgtgtctgtggacccacatacttactgccttttgtggaaattcacctagagtgagtactttccttgtgcaatggagggagacgatctagctatagattcttgatactcacctcactctcaacagcttattggtatttggcaaacctggtatcctgcagccgagcatgaacatgaaatacattagaacttggcaatgagagatcccatctgttggtttccagggatgtaagtgagtaataaaagctgtttcaagtttatccactatccactcttcaagtgaaaagaacttatgtgtgtctaccttcttctccataccctgagccacctctctcactttctttagttgtgccttgccctatcgcctcccattttcccttcaaagtagaatgtcttgtaaagacacagtaactcctgtgtgttttgattagtgagatgttaccacttaccccttctgctgcgcagaataatattaagaattgctatgcttatgattcaggctggacagcctggacattttgagcagcgcgagagtagaagtgaatacccccaggaactccaattgtgctgaagctgatttgtctgttcgtaggatgatgtgcagcctgtcacagtggcagccacaggcattcagtttgtgggcatttcctgtcatttcggatcctgctatagggaaggttcagctctcctgtctggggcatctactggagcacctcagaagacaaggaggaaaacactggctcatgttttctttccatgtgagggaggggaggtttctagatgatactaaaagcctgttgccactgttgtgtcatgatttccattcttcatcatggaaagccacaagcctcagaaggcagccagaggacaggaagagtctgtgatgctcatgtctgtgtcatggcatgagggggaattgacgagtgcttgcttagcatcagctctcattgtattgaaggctgtgcccttggtgtgcttagcagtgagcagcgtcttcattaggtagctctggctgggctttgtcagccagcgtgtgagaaaggagaaccaaaaccaatacctccttatagaagccagaaggatcacattggatgagagaaggtgtctataactgggttcttcccaatcccagctctttcattaactaaatatgatcttggacatatctcttaacctccatcggccttagtttttgcatccaaaaagaagtgattgggctggtcttggaaggtttttttcttttttttcccctgtgtaacattcttcattgttcatcaa

SEQ ID NO: 135443 - DNA, 2056 bp, Homo sapiens
  Payload ID: 6483
  Gene Symbol: FUT11
  Gene Name: fucosyltransferase 11 (alpha (1,3) fucosyltransferase)
  Uniprot ID: Q495W5
  ENST ID: ENST00000372841
  CDS Start-End: 44-1522
ggggtcggtgctggccgagggggcgccggctgccggagtggacatggcggccggccccattagggtggtgttggtccttctaggggtgctcagtgtctgtgcagccagcggccatgggtccgtagcggagagggaggccggcggggaggcggagtgggcggaaccgtgggatggcgcggttttccggccgccctcggcgctgggcgcagtgggggtgacgcgcagctctgggacgccgcggccagggagggaggaggcgggggacttgccggtactgctgtggtggagcccagggctattcccccacttcccgggagactcggagcgcatcgagtgtgcgcgcggcgcgtgcgtggcgtcccggaaccgccgagcgctgagggactcgcggacgcgcgcgctgctcttctacggcacagacttccgcgcgtcggccgccccgctgccgcgcctggcgcaccagagctgggcgctcctccacgaggagtcgcccctcaacaacttcttgctgagccacggcccgggcatccgcctcttcaatcttacctccaccttcagtcgccactcggattacccgctgtcgctgcagtggctgcccgggaccgcctatctgcgccgcccggtgcctccgcccatggaacgcgcggagtggcgccgccgcggctacgcgccgctgctctatctgcagtcacactgcgacgtgccagcggaccgggaccgctacgtgcgcgagctcatgcgccacatcccggtagactcctacgggaaatgcctgcagaatcgggagctgcctaccgcgcggctacaggacacagccacggccaccaccgaggatccagagctcttggctttcttgtcccgctataagttccacttggccctggaaaatgccatctgtaacgactacatgacagaaaaactgtggcgtcccatgcacctgggcgctgtgcccgtgtaccgcggttctccctctgtgagggactggatgccgaacaatcactccgtcatcctgattgatgattttgagtctcctcagaagctggcagagtttattgactttctggacaagaatgatgaggagtatatgaaatacctggcatacaagcaacctgggggcatcaccaaccaatttcttctggatagtctgaagcatcgggagtggggagtgaatgatcctttgctgcctaactacctcaacggcttcgagtgtttcgtctgtgactacgaactggctcggctggatgccgagaaagcccacgcggcctctcccggggacagccccgtctttgagccccacattgcccagccctcacacatggactgcccagtgcccacacctggctttggcaatgtggaagagattcctgagaatgacagttggaaagagatgtggctgcaagattattggcaaggtctggaccagggggaagctctcactgccatgatccacaacaatgaaacagagcagacgaaattttgggattacctacatgaaatcttcatgaagaggcaacatctctaagtgcccttgcaagagcctttaacttggcggagctaaggagatcttattctaccatgggacataaggagcatccactgcacaaacccttaatgaacactgtcttttcatggattcaaggaattccagttttatctattaagattttatcttaatgatgagtagccaaggtctaacatagggcctctcctcaaggagagatggagggatacaattcttggttcagtgggaaacagaaccctaaaacatccatttgattcaaggtgctggtccaacagagtttttaaactactcacttctttatttcatcctttcgactgtacttgattaccagtgaagtaagatgggtcaggttacgacttacaacttttgttctattccccagactcctcattattcagtacatttcccaataatctctttttctcatctcttgctttataaattgttacgttggtggagaagcaaaacatttggtgagttgtattctggttttccggagttggatttttttatattatatactttcatgtcaaa

SEQ ID NO: 135444 - DNA, 2175 bp, Homo sapiens
  Payload ID: 6483
  Gene Symbol: FUT11
  Gene Name: fucosyltransferase 11 (alpha (1,3) fucosyltransferase)
  Uniprot ID: Q495W5
  ENST ID: ENST00000394790
  CDS Start-End: 44-1474
ggggtcggtgctggccgagggggcgccggctgccggagtggacatggcggccggccccattagggtggtgttggtccttctaggggtgctcagtgtctgtgcagccagcggccatgggtccgtagcggagagggaggccggcggggaggcggagtgggcggaaccgtgggatggcgcggttttccggccgccctcggcgctgggcgcagtgggggtgacgcgcagctctgggacgccgcggccagggagggaggaggcgggggacttgccggtactgctgtggtggagcccagggctattcccccacttcccgggagactcggagcgcatcgagtgtgcgcgcggcgcgtgcgtggcgtcccggaaccgccgagcgctgagggactcgcggacgcgcgcgctgctcttctacggcacagacttccgcgcgtcggccgccccgctgccgcgcctggcgcaccagagctgggcgctcctccacgaggagtcgcccctcaacaacttcttgctgagccacggcccgggcatccgcctcttcaatcttacctccaccttcagtcgccactcggattacccgctgtcgctgcagtggctgcccgggaccgcctatctgcgccgcccggtgcctccgcccatggaacgcgcggagtggcgccgccgcggctacgcgccgctgctctatctgcagtcacactgcgacgtgccagcggaccgggaccgctacgtgcgcgagctcatgcgccacatcccggtagactcctacgggaaatgcctgcagaatcgggagctgcctaccgcgcggctacaggacacagccacggccaccaccgaggatccagagctcttggctttcttgtcccgctataagttccacttggccctggaaaatgccatctgtaacgactacatgacagaaaaactgtggcgtcccatgcacctgggcgctgtgcccgtgtaccgcggttctccctctgtgagggactggatgccgaacaatcactccgtcatcctgattgatgattttgagtctcctcagaagctggcagagtttattgactttctggacaagaatgatgaggagtatatgaaatacctggcatacaagcaacctgggggcatcaccaaccaatttcttctggatagtctgaagcatcgggagtggggagtgaatgatcctttgctgcctaactacctcaacggcttcgagtgtttcgtctgtgactacgaactggctcggctggatgccgagaaagcccacgcggcctctcccggggacagccccgtctttgagccccacattgcccagccctcacacatggactgcccagtgcccacacctggctttggcaatgtggaagagattcctgagaatgacagcagtcttgtccaagttagagaccactgtatctgcttaagatttctttggccccactcggaaaaaggcaggactcataactatgctgcagttccataatccaacccccattttgatatttcagttggaaagagatgtggctgcaagattattggcaaggtctggaccagggggaagctctcactgccatgatccacaacaatgaaacagagcagacgaaattttgggattacctacatgaaatcttcatgaagaggcaacatctctaagtgcccttgcaagagcctttaacttggcggagctaaggagatcttattctaccatgggacataaggagcatccactgcacaaacccttaatgaacactgtcttttcatggattcaaggaattccagttttatctattaagattttatcttaatgatgagtagccaaggtctaacatagggcctctcctcaaggagagatggagggatacaattcttggttcagtgggaaacagaaccctaaaacatccatttgattcaaggtgctggtccaacagagtttttaaactactcacttctttatttcatcctttcgactgtacttgattaccagtgaagtaagatgggtcaggttacgacttacaacttttgttctattccccagactcctcattattcagtacatttcccaataatctctttttctcatctcttgctttataaattgttacgttggtggagaagcaaaacatttggtgagttgtattctggttttccggagttggatttttttatattatatactttcatgtc

SEQ ID NO: 135445 - DNA, 1593 bp, Homo sapiens
  Payload ID: 6484
  Gene Symbol: FUT2
  Gene Name: fucosyltransferase 2 (secretor status included)
  Uniprot ID: Q10981
  ENST ID: ENST00000391876
  CDS Start-End: 44-1075
ctgcccaaccactctgtcccggtttccttcagcaggaccagccatgctggtcgttcagatgcctttctcctttcccatggcccacttcatcctctttgtctttacggtttccactatatttcacgttcagcagcggctagcgaagattcaagccatgtgggagttaccggtgcagataccagtgctagcctcaacatcaaaggcactgggacccagccagctcagggggatgtggacgatcaatgcaataggccgcctggggaaccagatgggcgagtacgccacactgtacgccctggccaagatgaacgggcggcccgccttcatcccggcccagatgcacagcaccctggcccccatcttcagaatcaccctgccggtgctgcacagcgccacggccagcaggatcccctggcagaactaccacctgaacgactggatggaggaggaataccgccacatcccgggggagtacgtccgcttcaccggctacccctgctcctggaccttctaccaccacctccgccaggagatcctccaggagttcaccctgcacgaccacgtgcgggaggaggcccagaagttcctgcggggcctgcaggtgaacgggagccggccgggcacctttgtaggggtccatgttcgccgaggggactatgtccatgtcatgccaaaagtgtggaagggggtggtggccgaccggcgatacctacagcaggccctggactggttccgagctcgctacagctccctcatcttcgtggtcaccagtaatggcatggcctggtgtcgggagaacattgacacctcccacggtgatgtggtgtttgctggcgatggcattgagggctcacctgccaaagattttgctctactcacacagtgtaaccacaccatcatgaccattgggacgttcgggatctgggccgcatacctcacgggcggagacaccatctacctggccaattacaccctccccgactcccctttcctcaaaatctttaagccagaggcagccttcctgccggagtggacagggattgccgcagacctgtcccccttactcaagcactaatgctggcccattctttgagaccttttctccttctctgcctccctcaagatgagtgcccgggcatgagaagcacatggttccatgagcaggacccatctctcttctgtgaagatgcgttgggctgcaagtaacagaaatctcagtgaacagtggcctggcgtggtggctcatgcctgtaatgctcgcactttgtgaggccagggtgggtggatcacttgaggtcaggctggtctcaaactcctgacctcatgatccgccttcctcggcctcccaaagtgctgggattacaggtgttagccactgcgcccggccctagagctcactgttttctagttagtccatctggaagtggagcctttttccagtttgcacaaatgtgccatattggcttgtagctggcatgcatccaagtccataggtcctgcctcttcaatcctggctttctagggcctgggatgatcattgctagaactgagagaccagcctggctcagtgaacttcagggcgttccgttcatt

SEQ ID NO: 135446 - DNA, 3111 bp, Homo sapiens
  Payload ID: 6484
  Gene Symbol: FUT2
  Gene Name: fucosyltransferase 2 (secretor status included)
  Uniprot ID: Q10981
  ENST ID: ENST00000425340
  CDS Start-End: 118-1149
accgatgctggaagggtttctttggccctgagtgaagagagacccagagggaacactgaggtgcctgcccaaccactctgtcccggtttccttcagcaggaccaggtgagagaagccatgctggtcgttcagatgcctttctcctttcccatggcccacttcatcctctttgtctttacggtttccactatatttcacgttcagcagcggctagcgaagattcaagccatgtgggagttaccggtgcagataccagtgctagcctcaacatcaaaggcactgggacccagccagctcagggggatgtggacgatcaatgcaataggccgcctggggaaccagatgggcgagtacgccacactgtacgccctggccaagatgaacgggcggcccgccttcatcccggcccagatgcacagcaccctggcccccatcttcagaatcaccctgccggtgctgcacagcgccacggccagcaggatcccctggcagaactaccacctgaacgactggatggaggaggaataccgccacatcccgggggagtacgtccgcttcaccggctacccctgctcctggaccttctaccaccacctccgccaggagatcctccaggagttcaccctgcacgaccacgtgcgggaggaggcccagaagttcctgcggggcctgcaggtgaacgggagccggccgggcacctttgtaggggtccatgttcgccgaggggactatgtccatgtcatgccaaaagtgtggaagggggtggtggccgaccggcgatacctacagcaggccctggactggttccgagctcgctacagctccctcatcttcgtggtcaccagtaatggcatggcctggtgtcgggagaacattgacacctcccacggtgatgtggtgtttgctggcgatggcattgagggctcacctgccaaagattttgctctactcacacagtgtaaccacaccatcatgaccattgggacgttcgggatctgggccgcatacctcacgggcggagacaccatctacctggccaattacaccctccccgactcccctttcctcaaaatctttaagccagaggcagccttcctgccggagtggacagggattgccgcagacctgtcccccttactcaagcactaatgctggcccattctttgagaccttttctccttctctgcctccctcaagatgagtgcccgggcatgagaagcacatggttccatgagcaggacccatctctcttctgtgaagatgcgttgggctgcaagtaacagaaatctcagtgaacagtggcctggcgtggtggctcatgcctgtaatgctcgcactttgtgaggccagggtgggtggatcacttgaggtcaggagttcaagactagcctggccaacatggtgaaaccccatctcgactaaaaatacaaaaattagccaggcgtggtggtgcacacctgtaatcccagctactcgggaggctgaggcaagagaatcacttgaacccaggaggcggaggttgcagtgagccaagatggtgccgctgcactccagtctgggtgacacagcaagactccatctcaaaaaaaaaaaaaaaaaaaagaaaagaaaaagaaatgaatgggttcaaagaccataatcatgcatatcacataagaccagaagtggcccaggtccagggtcagttaatttagcggctccacaaagtcatcagtcacctgagctccatccatcttcacatgctgtgctaccatttcttagctgtatcatcccatggtcccaaaagggctgctacacatccagccatcacatgcagataattcctttcaaaaacagcagaaagaggctcgttcttgtcttggtcccttttgaagaatgaatgaaaccttcctaagccttccagcaatttccccccaactccgatgggtaggaattgtcacatacccatgtgacccgataggaggcaaaagaaatgagacttctgggattagtttagcctcagattctgcagctgagaagttgatcagccacctctgaaggacatgcagcttgcagaaaattagggtggtgttaccaaggtgaaaaggggaaatggctttagagtagacaacagagatgccctgaggggttgtgtaggttgttcactgcaggaagtcccctggttaagaaggcaagtggggtttaaacagacccacagtctactcatcaaaccaggtgtccttggcattgtgtccacccagagagctcactgttttcttttctttttcttttctttttttttttttttttgagatggagtcttgctgcatcccccaggctggagtgcagtggcatgatcttggctcactgcagcctccgcctcccaggttcaagcgattctcctgcctcagcctcccgagtagctaggattacaggtgcgtgccaccacgcccagctaatttttatatgtttagtggaaatggagtttcaccatgttggtcaggctggtctcaaactcctgacctcatgatccgccttcctcggcctcccaaagtgctgggattacaggtgttagccactgcgcccggccctagagctcactgttttctagttagtccatctggaagtggagcctttttccagtttgcacaaatgtgccatattggcttgtagctggcatgcatccaagtccataggtcctgcctcttcaatcctggctttctagggcctgggatgatcattgctagaactgagagaccagcctggctcagtgaacttcagggcgttccgttcattctttcagtaaatgtttgcagcacatgtgttacatgtcaggcagtgaaaccccccacagcagccttccctctcagaggatacatttgtaaccattacacagtcatcaaaggaataattttttttaatcaccagtgtgcatacagtcatggagttgggtattcccagctaccagggaggctgaggtgggaggattgcttgatgccaggagttagggaatatagtgcaccgtgattggacttgcgaatagccactgcactgcggcctggacgacgtagtgataccctgactcttataaataaataaatgaataaacacaattatgactttgcggatggg

SEQ ID NO: 135447 - DNA, 771 bp, Homo sapiens
  Payload ID: 6484
  Gene Symbol: FUT2
  Gene Name: fucosyltransferase 2 (secretor status included)
  ENST ID: ENST00000522966
  CDS Start-End: 112-771
agtcaccgatgctggaagggtttctttggccctgagtgaagagagacccagagggaacactgaggtgcctgcccaaccactctgtcccggtttccttcagcaggaccagccatgctggtcgttcagatgcctttctcctttcccatggcccacttcatcctctttgtctttacggtttccactatatttcacgttcagcagcggctagcgaagattcaagccatgtgggagttaccggtgcagataccagtgctagcctcaacatcaaaggcactgggacccagccagctcagggggatgtggacgatcaatgcaataggccgcctggggaaccagatgggcgagtacgccacactgtacgccctggccaagatgaacgggcggcccgccttcatcccggcccagatgcacagcaccctggcccccatcttcagaatcaccctgccggtgctgcacagcgccacggccagcaggatcccctggcagaactaccacctgaacgactggatggaggaggaataccgccacatcccgggggagtacgtccgcttcaccggctacccctgctcctggaccttctaccaccacctccgccaggagatcctccaggagttcaccctgcacgaccacgtgcgggaggaggcccagaagttcctgcggggcctgcaggtgaacgggagccggccgggcacctttgtaggggtccatgttcgccgaggggactatgtccatgtcatgccaaaagtgtggaagggggtggtggccgaccgg

SEQ ID NO: 135448 - DNA, 2584 bp, Homo sapiens
  Payload ID: 6485
  Gene Symbol: FUT3
  Gene Name: fucosyltransferase 3 (galactoside 3(4)-L-fucosyltransferase, Lewis blood group)
  Uniprot ID: P21217
  ENST ID: ENST00000303225
  CDS Start-End: 636-1721
gttcccacttcctccccgccccaggaaacctgccatggcctcctggtgagctgtcctcatccactgctcgctgcctctccagatcttcagttgcttcaggccatttgaacgtatatgagccggtcgtaggggatatgatggcttagcttgggctcagaggcctgaaaatcgcccccaccaatcacctgtttcccccaatctaccctcctgaaggtcactgacaaagacttcattgtctcctaggagaggctgccatatatccagggctgacgtaattccatcttaatatcagttacattataaaaatttacctcgtgcctgaggccccagagcccaagggtgcaaagcagtaattggtcaaagttcaacttccctcccactctgggctcaggctgtcccctgagggcctgtgttttgagtctctttccagaaccttggtgtgaacttaggtcttggcgtcgggatcccttttcgtcacactcaggtgacctacagggagctccgctcgacactgcaaggcttagaccagttcggtccaacagagaaagcaggcaaccaccatgtcatttgaaaacagtttcatcgggatataattcgcaacccatacagtgaatccatttaagatactctgacccatggatcccctgggtgcagccaagccacaatggccatggcgccgctgtctggccgcactgctatttcagctgctggtggctgtgtgtttcttctcctacctgcgtgtgtcccgagacgatgccactggatcccctagggctcccagtgggtcctcccgacaggacaccactcccacccgccccaccctcctgatcctgctacggacatggcctttccacatccctgtggctctgtcccgctgttcagagatggtgcccggcacagccgactgccacatcactgccgaccgcaaggtgtacccacaggcagacatggtcatcgtgcaccactgggatatcatgtccaaccctaagtcacgcctcccaccttccccgaggccgcaggggcagcgctggatctggttcaacttggagccaccccctaactgccagcacctggaagccctggacagatacttcaatctcaccatgtcctaccgcagcgactccgacatcttcacgccctacggctggctggagccgtggtccggccagcctgcccacccaccgctcaacctctcggccaagaccgagctggtggcctgggcggtgtccaactggaagccggactcagccagggtgcgctactaccagagcctgcaggctcatctcaaggtggacgtgtacggacgctcccacaagcccctgcccaaggggaccatgatggagacgctgtcccggtacaagttctacctggccttcgagaactccttgcaccccgactacatcaccgagaagctgtggaggaacgccctggaggcctgggccgtgcccgtggtgctgggccccagcagaagcaactacgagaggttcctgccacccgacgccttcatccacgtggacgacttccagagccccaaggacctggcccggtacctgcaggagctggacaaggaccacgcccgctacctgagctactttcgctggcgggagacgctgcggcctcgctccttcagctgggcactggatttctgcaaggcctgctggaaactgcagcaggaatccaggtaccagacggtgcgcagcatagcggcttggttcacctgagaggccggcatggtgcctgggctgccgggaacctcatctgcctggggcctcacctgctggagtcctttgtggccaaccctctctcttacctgggacctcacacgctgggcttcacggctgccaggagcctctcccctccagaagacttgcctgctagggacctcgcctgctggggacctcgcctgttggggacctcacctgctggggacctcacctgctggggaccttggctgctggaggctgcacctactgaggatgtcggcggtcggggactttacctgctgggacctgctcccagagaccttgccacactgaatctcacctgctggggacctcaccctggagggccctgggccctggggaactggcttacttggggccccacccgggagtgatggttctggctgatttgtttgtgatgttgttagccgcctgtgaggggtgcagagagatcatcacggcacggtttccagatgtaatactgcaaggaaaaatgatgacgtgtctcctcactctagaggggttggtcccatgggttaagagctcaccccaggttctcacctcaggggttaagagctcagagttcagacaggtccaagttcaagcccaggaccaccacttatagggtacaggtgggatcgactgtaaatgaggacttctggaacattccaaatattctggggttgagggaaattgctgctgtctacaaaatgccaagggtggacaggcgctgtggctcacgcctgtaatcccagcactttgggaggctgaggtaggaggattgattgaggccaagagttaaagaccagcctggtcaatatagcaagaccacgtctctaaataaaaaataataggccggccag

SEQ ID NO: 135449 - DNA, 2024 bp, Homo sapiens
  Payload ID: 6485
  Gene Symbol: FUT3
  Gene Name: fucosyltransferase 3 (galactoside 3(4)-L-fucosyltransferase, Lewis blood group)
  Uniprot ID: P21217
  ENST ID: ENST00000458379
  CDS Start-End: 73-1158
aggaaacctgccatggcctcctggtgagctgtcctcatccactgctcgctgcctctccagatactctgacccatggatcccctgggtgcagccaagccacaatggccatggcgccgctgtctggccgcactgctatttcagctgctggtggctgtgtgtttcttctcctacctgcgtgtgtcccgagacgatgccactggatcccctagggctcccagtgggtcctcccgacaggacaccactcccacccgccccaccctcctgatcctgctacggacatggcctttccacatccctgtggctctgtcccgctgttcagagatggtgcccggcacagccgactgccacatcactgccgaccgcaaggtgtacccacaggcagacatggtcatcgtgcaccactgggatatcatgtccaaccctaagtcacgcctcccaccttccccgaggccgcaggggcagcgctggatctggttcaacttggagccaccccctaactgccagcacctggaagccctggacagatacttcaatctcaccatgtcctaccgcagcgactccgacatcttcacgccctacggctggctggagccgtggtccggccagcctgcccacccaccgctcaacctctcggccaagaccgagctggtggcctgggcggtgtccaactggaagccggactcagccagggtgcgctactaccagagcctgcaggctcatctcaaggtggacgtgtacggacgctcccacaagcccctgcccaaggggaccatgatggagacgctgtcccggtacaagttctacctggccttcgagaactccttgcaccccgactacatcaccgagaagctgtggaggaacgccctggaggcctgggccgtgcccgtggtgctgggccccagcagaagcaactacgagaggttcctgccacccgacgccttcatccacgtggacgacttccagagccccaaggacctggcccggtacctgcaggagctggacaaggaccacgcccgctacctgagctactttcgctggcgggagacgctgcggcctcgctccttcagctgggcactggatttctgcaaggcctgctggaaactgcagcaggaatccaggtaccagacggtgcgcagcatagcggcttggttcacctgagaggccggcatggtgcctgggctgccgggaacctcatctgcctggggcctcacctgctggagtcctttgtggccaaccctctctcttacctgggacctcacacgctgggcttcacggctgccaggagcctctcccctccagaagacttgcctgctagggacctcgcctgctggggacctcgcctgttggggacctcacctgctggggacctcacctgctggggaccttggctgctggaggctgcacctactgaggatgtcggcggtcggggactttacctgctgggacctgctcccagagaccttgccacactgaatctcacctgctggggacctcaccctggagggccctgggccctggggaactggcttacttggggccccacccgggagtgatggttctggctgatttgtttgtgatgttgttagccgcctgtgaggggtgcagagagatcatcacggcacggtttccagatgtaatactgcaaggaaaaatgatgacgtgtctcctcactctagaggggttggtcccatgggttaagagctcaccccaggttctcacctcaggggttaagagctcagagttcagacaggtccaagttcaagcccaggaccaccacttatagggtacaggtgggatcgactgtaaatgaggacttctggaacattccaaatattctggggttgagggaaattgctgctgtctacaaaatgccaagggtggacaggcgctgtggctcacgcctgtaatcccagcactttgggaggctgaggtaggaggattgattgaggccaagagttaaagaccagcctggtcaatatagcaagaccacgtctctaaataaaaaataataggccggccaggca

SEQ ID NO: 135450 - DNA, 2239 bp, Homo sapiens
  Payload ID: 6485
  Gene Symbol: FUT3
  Gene Name: fucosyltransferase 3 (galactoside 3(4)-L-fucosyltransferase, Lewis blood group)
  Uniprot ID: P21217
  ENST ID: ENST00000589620
  CDS Start-End: 291-1376
tctgttcccacttcctccccgccccaggaaacctgccatggcctcctggtgagctgtcctcatccactgctcgctgcctctccagaaccttggtgtgaacttaggtcttggcgtcgggatcccttttcgtcacactcaggtgacctacagggagctccgctcgacactgcaaggcttagaccagttcggtccaacagagaaagcaggcaaccaccatgtcatttgaaaacagtttcatcgggatataattcgcaacccatacagtgaatccatttaagatactctgacccatggatcccctgggtgcagccaagccacaatggccatggcgccgctgtctggccgcactgctatttcagctgctggtggctgtgtgtttcttctcctacctgcgtgtgtcccgagacgatgccactggatcccctagggctcccagtgggtcctcccgacaggacaccactcccacccgccccaccctcctgatcctgctacggacatggcctttccacatccctgtggctctgtcccgctgttcagagatggtgcccggcacagccgactgccacatcactgccgaccgcaaggtgtacccacaggcagacatggtcatcgtgcaccactgggatatcatgtccaaccctaagtcacgcctcccaccttccccgaggccgcaggggcagcgctggatctggttcaacttggagccaccccctaactgccagcacctggaagccctggacagatacttcaatctcaccatgtcctaccgcagcgactccgacatcttcacgccctacggctggctggagccgtggtccggccagcctgcccacccaccgctcaacctctcggccaagaccgagctggtggcctgggcggtgtccaactggaagccggactcagccagggtgcgctactaccagagcctgcaggctcatctcaaggtggacgtgtacggacgctcccacaagcccctgcccaaggggaccatgatggagacgctgtcccggtacaagttctacctggccttcgagaactccttgcaccccgactacatcaccgagaagctgtggaggaacgccctggaggcctgggccgtgcccgtggtgctgggccccagcagaagcaactacgagaggttcctgccacccgacgccttcatccacgtggacgacttccagagccccaaggacctggcccggtacctgcaggagctggacaaggaccacgcccgctacctgagctactttcgctggcgggagacgctgcggcctcgctccttcagctgggcactggatttctgcaaggcctgctggaaactgcagcaggaatccaggtaccagacggtgcgcagcatagcggcttggttcacctgagaggccggcatggtgcctgggctgccgggaacctcatctgcctggggcctcacctgctggagtcctttgtggccaaccctctctcttacctgggacctcacacgctgggcttcacggctgccaggagcctctcccctccagaagacttgcctgctagggacctcgcctgctggggacctcgcctgttggggacctcacctgctggggacctcacctgctggggaccttggctgctggaggctgcacctactgaggatgtcggcggtcggggactttacctgctgggacctgctcccagagaccttgccacactgaatctcacctgctggggacctcaccctggagggccctgggccctggggaactggcttacttggggccccacccgggagtgatggttctggctgatttgtttgtgatgttgttagccgcctgtgaggggtgcagagagatcatcacggcacggtttccagatgtaatactgcaaggaaaaatgatgacgtgtctcctcactctagaggggttggtcccatgggttaagagctcaccccaggttctcacctcaggggttaagagctcagagttcagacaggtccaagttcaagcccaggaccaccacttatagggtacaggtgggatcgactgtaaatgaggacttctggaacattccaaatattctggggttgagggaaattgctgctgtctacaaaatgccaagggtggacaggcgctgtggctcacgcctgtaatcccagcactttgggaggctgaggtaggaggattgattgaggccaagagttaaagaccagcctggtcaatatagcaagaccacgtctctaaataaaaaataataggccggccag

SEQ ID NO: 135451 - DNA, 567 bp, Homo sapiens
  Payload ID: 6485
  Gene Symbol: FUT3
  Gene Name: fucosyltransferase 3 (galactoside 3(4)-L-fucosyltransferase, Lewis blood group)
  ENST ID: ENST00000589714
  CDS Start-End: 247-567
aggaaacctgccatggcctcctggtgagctgtcctcatccactgctcgctgcctctccaggtcttggcgtcgggatcccttttcgtcacactcaggtgacctacagggagctccgctcgacactgcaaggcttagaccagttcggtccaacagagaaagcaggcaaccaccatgtcatttgaaaacagtttcatcgggatataattcgcaacccatacagtgaatccatttaagatactctgacccatggatcccctgggtgcagccaagccacaatggccatggcgccgctgtctggccgcactgctatttcagctgctggtggctgtgtgtttcttctcctacctgcgtgtgtcccgagacgatgccactggatcccctagggctcccagtgggtcctcccgacaggacaccactcccacccgccccaccctcctgatcctgctacggacatggcctttccacatccctgtggctctgtcccgctgttcagagatggtgcccggcacagccgactgccacatcactgccgaccgcaaggtgtacccacaggcagacatggtcatc

SEQ ID NO: 135452 - DNA, 754 bp, Homo sapiens
  Payload ID: 6485
  Gene Symbol: FUT3
  Gene Name: fucosyltransferase 3 (galactoside 3(4)-L-fucosyltransferase, Lewis blood group)
  ENST ID: ENST00000585715
  CDS Start-End: 622-754
gggtggggcagaaacagatcacaatggtggaatgtcatcagctaaggctattttcacttcttttgtagatcttcagttgcttcaggccatttgaacgtatatgagccggtcgtaggggatatgatggcttagcttgggctcagaggcctgaaaatcgcccccaccaatcacctgtttcccccaatctaccctcctgaaggtcactgacaaagacttcattgtctcctaggagaggctgccatatatccagggctgacgtaattccatcttaatatcagttacattataaaaatttacctcgtgcctgaggccccagagcccaagggtgcaaagcagtaattggtcaaagttcaacttccctcccactctgggctcaggctgtcccctgagggcctgtgttttgagtctctttccagaaccttggtgtgaacttaggtcttggcgtcgggatcccttttcgtcacactcaggtgacctacagggagctccgctcgacactgcaaggcttagaccagttcggtccaacagagaaagcaggcaaccaccatgtcatttgaaaacagtttcatcgggatataattcgcaacccatacagtgaatccatttaagatactctgacccatggatcccctgggtgcagccaagccacaatggccatggcgccgctgtctggccgcactgctatttcagctgctggtggctgtgtgtttcttctcctacctgcgtgtgtcccgagacgatgccactggatccc

SEQ ID NO: 135453 - DNA, 2182 bp, Homo sapiens
  Payload ID: 6485
  Gene Symbol: FUT3
  Gene Name: fucosyltransferase 3 (galactoside 3(4)-L-fucosyltransferase, Lewis blood group)
  Uniprot ID: P21217
  ENST ID: ENST00000589918
  CDS Start-End: 234-1319
gttcccacttcctccccgccccaggaaacctgccatggcctcctggtgagctgtcctcatccactgctcgctgcctctccaggtgacctacagggagctccgctcgacactgcaaggcttagaccagttcggtccaacagagaaagcaggcaaccaccatgtcatttgaaaacagtttcatcgggatataattcgcaacccatacagtgaatccatttaagatactctgacccatggatcccctgggtgcagccaagccacaatggccatggcgccgctgtctggccgcactgctatttcagctgctggtggctgtgtgtttcttctcctacctgcgtgtgtcccgagacgatgccactggatcccctagggctcccagtgggtcctcccgacaggacaccactcccacccgccccaccctcctgatcctgctacggacatggcctttccacatccctgtggctctgtcccgctgttcagagatggtgcccggcacagccgactgccacatcactgccgaccgcaaggtgtacccacaggcagacatggtcatcgtgcaccactgggatatcatgtccaaccctaagtcacgcctcccaccttccccgaggccgcaggggcagcgctggatctggttcaacttggagccaccccctaactgccagcacctggaagccctggacagatacttcaatctcaccatgtcctaccgcagcgactccgacatcttcacgccctacggctggctggagccgtggtccggccagcctgcccacccaccgctcaacctctcggccaagaccgagctggtggcctgggcggtgtccaactggaagccggactcagccagggtgcgctactaccagagcctgcaggctcatctcaaggtggacgtgtacggacgctcccacaagcccctgcccaaggggaccatgatggagacgctgtcccggtacaagttctacctggccttcgagaactccttgcaccccgactacatcaccgagaagctgtggaggaacgccctggaggcctgggccgtgcccgtggtgctgggccccagcagaagcaactacgagaggttcctgccacccgacgccttcatccacgtggacgacttccagagccccaaggacctggcccggtacctgcaggagctggacaaggaccacgcccgctacctgagctactttcgctggcgggagacgctgcggcctcgctccttcagctgggcactggatttctgcaaggcctgctggaaactgcagcaggaatccaggtaccagacggtgcgcagcatagcggcttggttcacctgagaggccggcatggtgcctgggctgccgggaacctcatctgcctggggcctcacctgctggagtcctttgtggccaaccctctctcttacctgggacctcacacgctgggcttcacggctgccaggagcctctcccctccagaagacttgcctgctagggacctcgcctgctggggacctcgcctgttggggacctcacctgctggggacctcacctgctggggaccttggctgctggaggctgcacctactgaggatgtcggcggtcggggactttacctgctgggacctgctcccagagaccttgccacactgaatctcacctgctggggacctcaccctggagggccctgggccctggggaactggcttacttggggccccacccgggagtgatggttctggctgatttgtttgtgatgttgttagccgcctgtgaggggtgcagagagatcatcacggcacggtttccagatgtaatactgcaaggaaaaatgatgacgtgtctcctcactctagaggggttggtcccatgggttaagagctcaccccaggttctcacctcaggggttaagagctcagagttcagacaggtccaagttcaagcccaggaccaccacttatagggtacaggtgggatcgactgtaaatgaggacttctggaacattccaaatattctggggttgagggaaattgctgctgtctacaaaatgccaagggtggacaggcgctgtggctcacgcctgtaatcccagcactttgggaggctgaggtaggaggattgattgaggccaagagttaaagaccagcctggtcaatatagcaagaccacgtctctaaataaaaaataataggccggccag

SEQ ID NO: 135454 - DNA, 577 bp, Homo sapiens
  Payload ID: 6485
  Gene Symbol: FUT3
  Gene Name: fucosyltransferase 3 (galactoside 3(4)-L-fucosyltransferase, Lewis blood group)
  ENST ID: ENST00000587048
  CDS Start-End: 278-577
ctttagctccagccacctctttaagaggaaactgttgggcagatggaggagggctagtcacggaaagaaactaaccttggtgtgaacttaggtcttggcgtcgggatcccttttcgtcacactcaggtgacctacagggagctccgctcgacactgcaaggcttagaccagttcggtccaacagagaaagcaggcaaccaccatgtcatttgaaaacagtttcatcgggatataattcgcaacccatacagtgaatccatttaagatactctgacccatggatcccctgggtgcagccaagccacaatggccatggcgccgctgtctggccgcactgctatttcagctgctggtggctgtgtgtttcttctcctacctgcgtgtgtcccgagacgatgccactggatcccctagggctcccagtgggtcctcccgacaggacaccactcccacccgccccaccctcctgatcctgctacggacatggcctttccacatccctgtggctctgtcccgctgttcagagatggtgcccggcacagccgactgccacatcactgccgaccgcaaggtgtac

SEQ ID NO: 135455 - DNA, 599 bp, Homo sapiens
  Payload ID: 6485
  Gene Symbol: FUT3
  Gene Name: fucosyltransferase 3 (galactoside 3(4)-L-fucosyltransferase, Lewis blood group)
  ENST ID: ENST00000587183
  CDS Start-End: 586-599
gctgaggaagaattgggacctagctcggcctgatcttcagttgcttcaggccatttgaacgtatatgagccggtcgtaggggatatgatggcttagcttgggctcagaggcctgaaaatcgcccccaccaatcacctgtttcccccaatctaccctcctgaaggtcactgacaaagacttcattgtctcctaggagaggctgccatatatccagggctgacgtaattccatcttaatatcagttacattataaaaatttacctcgtgcctgaggccccagagcccaagggtgcaaagcagtaattggtcaaagttcaacttccctcccactctgggctcaggctgtcccctgagggcctgtgttttgagtctctttccagaaccttggtgtgaacttaggtcttggcgtcgggatcccttttcgtcacactcaggtgacctacagggagctccgctcgacactgcaaggcttagaccagttcggtccaacagagaaagcaggcaaccaccatgtcatttgaaaacagtttcatcgggatataattcgcaacccatacagtgaatccatttaagatactctgacccatggatcccctggg

SEQ ID NO: 135456 - DNA, 6059 bp, Homo sapiens
  Payload ID: 6486
  Gene Symbol: FUT4
  Gene Name: fucosyltransferase 4 (alpha (1,3) fucosyltransferase, myeloid-specific)
  Uniprot ID: P22083
  ENST ID: ENST00000358752
  CDS Start-End: 295-1887
ctccctccctcaatccctccctccggcgggcgtcgctggcgggtggctaggcccaacggcaggaagccgacgctatcctccgttccgcggcgccgggtccgccttccgtctgttctagggcctgctcctgcgcggcagctgctttagaaggtctcgagcctcctgtaccttcccagggatgaaccgggccttccctctggaaggcgagggttcgggccacagtgagcgagggccagggcggtgggcgcgcgcagagggaaaccggatcagttgagagagaatcaagagtagcggatgaggcgcttgtggggcgcggcccggaagccctcgggcgcgggctgggagaaggagtgggcggaggcgccgcaggaggctcccggggcctggtcgggccggctgggccccgggcgcagtggaagaaagggacgggcggtgcccggttgggcgtcctggccagctcaccttgccctggcggctcgccccgcccggcacttgggaggagcagggcagggcccgcggcctttgcattctgggaccgcccccttccattcccgggccagcggcgagcggcagcgacggctggagccgcagctacagcatgagagccggtgccgctcctccacgcctgcggacgcgtggcgagcggaggcagcgctgcctgttcgcgccatgggggcaccgtggggctcgccgacggcggcggcgggcgggcggcgcgggtggcgccgaggccgggggctgccatggaccgtctgtgtgctggcggccgccggcttgacgtgtacggcgctgatcacctacgcttgctgggggcagctgccgccgctgccctgggcgtcgccaaccccgtcgcgaccggtgggcgtgctgctgtggtgggagcccttcggggggcgcgatagcgccccgaggccgccccctgactgccggctgcgcttcaacatcagcggctgccgcctgctcaccgaccgcgcgtcctacggagaggctcaggccgtgcttttccaccaccgcgacctcgtgaaggggccccccgactggcccccgccctggggcatccaggcgcacactgccgaggaggtggatctgcgcgtgttggactacgaggaggcagcggcggcggcagaagccctggcgacctccagccccaggcccccgggccagcgctgggtttggatgaacttcgagtcgccctcgcactccccggggctgcgaagcctggcaagtaacctcttcaactggacgctctcctaccgggcggactcggacgtctttgtgccttatggctacctctaccccagaagccaccccggcgacccgccctcaggcctggccccgccactgtccaggaaacaggggctggtggcatgggtggtgagccactgggacgagcgccaggcccgggtccgctactaccaccaactgagccaacatgtgaccgtggacgtgttcggccggggcgggccggggcagccggtgcccgaaattgggctcctgcacacagtggcccgctacaagttctacctggctttcgagaactcgcagcacctggattatatcaccgagaagctctggcgcaacgcgttgctcgctggggcggtgccggtggtgctgggcccagaccgtgccaactacgagcgctttgtgccccgcggcgccttcatccacgtggacgacttcccaagtgcctcctccctggcctcgtacctgcttttcctcgaccgcaaccccgcggtctatcgccgctacttccactggcgccggagctacgctgtccacatcacctccttctgggacgagccttggtgccgggtgtgccaggctgtacagagggctggggaccggcccaagagcatacggaacttggccagctggttcgagcggtgaagccgcgctcccctggaagcgacccaggggaggccaagttgtcagctttttgatcctctactgtgcatctccttgactgccgcatcatgggagtaagttcttcaaacacccatttttgctctatgggaaaaaaacgatttaccaattaatattactcagcacagagatgggggcccggtttccatattttttgcacagctagcaattgggctccctttgctgctgatgggcatcattgtttaggggtgaaggagggggttcttcctcaccttgtaaccagtgcagaaatgaaatagcttagcggcaagaagccgttgaggcggtttcctgaatttccccatctgccacaggccatatttgtggcccgtgcagcttccaaatctcatacacaactgttcccgattcacgtttttctggaccaaggtgaagcaaatttgtggttgtagaaggagccttgttggtggagagtggaaggactgtggctgcaggtgggactttgttgtttggattcctcacagccttggctcctgagaaaggtgaggagggcagtccaagaggggccgctgacttctttcacaagtactatctgttcccctgtcctgtgaatggaagcaaagtgctggattgtccttggaggaaacttaagatgaatacatgcgtgtacctcactttacataagaaatgtattcctgaaaagctgcatttaaatcaagtcccaaattcattgacttaggggagttcagtatttaatgaaaccctatggagaatttatccctttacaatgtgaatagtcatctcctaatttgtttcttctgtctttatgtttttctataacctggattttttaaatcatattaaaattacagatgtgaaaataaagcagaagcaacctttttccctcttcccagaaaaccagtctgtgtttacagacagaagagaaggaagccatagtgtcacttccacacaattatttatttcatgtctttactggacctgaaatttaaactgcaatgccagtcctgcaggagtgctggcattaccctctgcagaacagtgaaaggtattgcactacattatggaatcatgcaaaaggaaaaaaagtttcatgatatctgttgttggcagtttttgtttatctctgacagtttttagttaaatgtttagatcctcagaactacattagtgcctactattaacttactctgtctcttgttaaaggctaaatctgcgcttctccctggtgccagcaggttcccctcacagtcaatgcagtggtatagcatatcctcacatttctagtgcccttgagactgtgctatggaaccaatcttgaacatacatgcattgacttgacaagttactgagtaagcagcatattcagcaggtgccactacatgcctactctgccagacactgagcttggggccctagggaagatagagaattatacaaggcaaagtccttctctttagggctcttacaatctatcacttccaaaaagtaaatggtgactgataaaacaattggcagaacctgtttgattactgtgacagtcttaatgataccataaatcaatattagaaagctagttgacttaaagcctgaaataatgggagttttctcctccacttattagaataaggaccctcagtgactaattattgtgggtagggtcaagattaactagttttatacagagttctgctgtaaatagtcattttgcatttgattagtgcagttctctgaatcataaagcaagttttacctctctgtacatgtttttgcagacatacttgaaaagctcacttaaatctaggtgcttcaattcactttcttgagaggacaaatgaaaagctgtggagaaaatgtcctcattaaagtattaaagtgtgggcagaattacaattacaaagtgccagccaccgaataaagataaaagttcagttcttaaaatgagtttttatgagataacagtcagtgatcttggtgttaccgggattccacatggggcagtgggaaagagttcaggttttgaaggtaacctagtttagatttgaattccagctatgtgacattgggtaaattagtagtagtcctgagcctcagcgtcctcatctataaaatgactggcgaaaatacttcacaagctcattttgagcactttaggaagtaagtgaaagtacctaaaatagcaggcacccaattgatgattttatatcttccttctttgcttgcagtgatttcaggatgtcctcatatctatttataggtctaaaattatatcttaaggtatgttgtagaataaattaaaaggataatctaaatcaccatttagattaagcttgacttgcaaactaggaagaagcacctaggctttctttgaaaatatttttttggttcgttttggtaaagctctataaattggtatctattattttaccaatttttttttagtattaagtccatttagaactaaccatattatttatggaataattagcatgaggaaggtataattgcatttttttttttttgagacggagtcttgcactgtagccccagctggactgcagtggcgtgatcttggctcactgcaacctccgcctcccaggttcaagcgattctcctgcctcagcctcccgagcagctgagactacaggcgcctgccaccacgcctggccaattttttgtatttttagtagagactgcgtttcaccatgttgggcaggctggtcttgaactcctgaccttgtgatccacctgcctcggcctctcagagagctgggattacaggtgtgagccgccgtgcccagccattgcatttttattcacatacacattgttaatgtggaacaatttaacactaatctcatcagagagcgagatgaatgtggcaattgctcattttattttgcatatattaaattgagtaggttcagctctaacataccttaagaaaaatgcatatcggtgcactgtatgtatttcaaaatgcctttcctatgattgtcatgtcctcctttaaggcttttccctcaaatttattacaaatttagtatttttagtacttgatgactctaattacatgaatgcacctggaatgacatttgtaacagaagacggtctgacttgctttcagtattcacaagttctttccagtttccaagtcttttcctagcagtaatttaggggagacagaggagtttcatgtaaagagcatgcagtttggagtcagaacctgggtatgactctgtggccttgatgaagcaagttacttaaactcttgagttttagctttctcctttacaatgcatgaatgcctatccccctacaaaacaaagattaaatgtgatgatgtatgccaaggtgctttgtatattgtaaagtgctatataattataagatgttctaaattttcaaggatctaaaccagggattggcaaacgtttttccagggagtaaatattttacgctttgcatatataatttatggaggtgttgagaggatagattagacacttgaagtactcaggatagtgcctggcatgtaggaagcacctggaaaatattcgctgtgattaccatcagtccattttaccgaggaaggagccaaggtccaggcccactgaaggacttgcataacattacaatagcagtggcagaaccagccatgcttctgcaaatcacaacctctttgagcctctgtcacctgaactgcaaaatgagtgggttagacaaaatcatctgttgggacctcctagttccacgtgctatcattctactaactggcaccctaaggttgaaagtgcttatctgctttccaatgtggcttccttacagtctggaactgacaatatgcaggagcagtaaactggcagaaaaccaggaatcagagaaagaaaatataatttaactttaaagatgtaaattatatatatagtatattatatatatttttaaagctttatatgcctcaaatatcagggaaaggagccaagtccttggtatttagtttggtgaatacttgcattgaatacatgtcaagatgtcaagtcatttttgaatgtgtctcagggatttctatgctacacattcttttaacaaatcaagtatttatgtacacatgttcagattttttgacaaaatgattaaaataatgagatggaaaatga

SEQ ID NO: 135457 - DNA, 1916 bp, Homo sapiens
  Payload ID: 6487
  Gene Symbol: FUT5
  Gene Name: fucosyltransferase 5 (alpha (1,3) fucosyltransferase)
  Uniprot ID: Q11128
  ENST ID: ENST00000252675
  CDS Start-End: 17-1141
ccagctactctgacccatggatcccctgggcccagccaagccacagtggctgtggcgccgctgtctggccgggctgctgtttcagctgctggtggctgtgtgtttcttctcctacctgcgtgtgtcccgagacgatgccactggatcccctaggccagggcttatggcagtggaacctgtcaccggggctcccaatgggtcccgctgccaggacagcatggcgacccctgcccaccccaccctactgatcctgctgtggacgtggccttttaacacacccgtggctctgccccgctgctcagagatggtgcccggcgcggccgactgcaacatcactgccgactccagtgtgtacccacaggcagacgcggtcatcgtgcaccactgggatatcatgtacaaccccagtgccaacctcccgccccccaccaggccgcaggggcagcgctggatctggttcagcatggagtcccccagcaactgccggcacctggaagccctggacggatacttcaatctcaccatgtcctaccgcagcgactccgacatcttcacgccctacggctggctggagccgtggtccggccagcctgcccacccaccgctcaacctctcggccaagaccgagctggtggcctgggcggtgtccaactggaagccggactcggccagggtgcgctactaccagagcctgcaggctcatctcaaggtggacgtgtacggacgctcccacaagcccctgcccaaggggaccatgatggagacgctgtcccggtacaagttctatctggccttcgagaactccttgcaccccgactacatcaccgagaagctgtggaggaacgccctggaggcctgggccgtgcccgtggtgctgggccccagcagaagcaactacgagaggttcctgccacccgacgccttcatccacgtggacgacttccagagccccaaggacctggcccggtacctgcaggagctggacaaggaccacgcccgctacctgagctactttcactggcgggagacgctgcggcctcgctccttcagctgggcactggctttctgcaaggcctgctggaagctgcagcaggaatctaggtaccagacggtgcgcagcatagcggcttggttcacctgagaggccggcatggggcctgggctgccgggacctcactttcccagggcctcacctacctagggtctcactagtcgggggatttacctacctggggcctcggctgcctggggcctcggctgcctggggtctcacctgcctggggcctcacctgctggagtctttggtggccaggcatgtgacttacctgggatttcacttgccgggcttcactgccaggagcctcccctgctggggaccttgccagctggggctggggatggtgcctactggggaccttgctttctggaggctgcacctactgaggatctcggctgttggggactttacctgctgggacctgctcccagagaccttgccacactgaatgtcacctgctaggagcctcacccgctgggaggcacagggcccaagggagctggatgtgttgcccaaggtgtgcagggcaggtcagggaagggcagggtcccctaaggaggagggcgaagggtatgtgtgtgaccatcagcagtggtgtgcacatggctgggggacactcggtttgaccgccagcggatgggtgtcacaaatgcatcactatgggtgtgacctcggcgtgactctgatagtgcctgtggatgtgttgcgatgcctcaccctggagggcactgggccctgagaacgggtgcccttgaggccctgcccccgggcgatggtgcaggctggtttgcttgtggttttattgctgttgttaaccacccatgaggggtgcaaacagataatgctgttaacattttca

SEQ ID NO: 135458 - DNA, 1988 bp, Homo sapiens
  Payload ID: 6487
  Gene Symbol: FUT5
  Gene Name: fucosyltransferase 5 (alpha (1,3) fucosyltransferase)
  ENST ID: ENST00000588525
  CDS Start-End: 89-1213
gattacagacatgagccacctcgcccagccttttcatggctgagtgatattccattgtgtggatggatcacactagctactctgacccatggatcccctgggcccagccaagccacagtggctgtggcgccgctgtctggccgggctgctgtttcagctgctggtggctgtgtgtttcttctcctacctgcgtgtgtcccgagacgatgccactggatcccctaggccagggcttatggcagtggaacctgtcaccggggctcccaatgggtcccgctgccaggacagcatggcgacccctgcccaccccaccctactgatcctgctgtggacgtggccttttaacacacccgtggctctgccccgctgctcagagatggtgcccggcgcggccgactgcaacatcactgccgactccagtgtgtacccacaggcagacgcggtcatcgtgcaccactgggatatcatgtacaaccccagtgccaacctcccgccccccaccaggccgcaggggcagcgctggatctggttcagcatggagtcccccagcaactgccggcacctggaagccctggacggatacttcaatctcaccatgtcctaccgcagcgactccgacatcttcacgccctacggctggctggagccgtggtccggccagcctgcccacccaccgctcaacctctcggccaagaccgagctggtggcctgggcggtgtccaactggaagccggactcggccagggtgcgctactaccagagcctgcaggctcatctcaaggtggacgtgtacggacgctcccacaagcccctgcccaaggggaccatgatggagacgctgtcccggtacaagttctatctggccttcgagaactccttgcaccccgactacatcaccgagaagctgtggaggaacgccctggaggcctgggccgtgcccgtggtgctgggccccagcagaagcaactacgagaggttcctgccacccgacgccttcatccacgtggacgacttccagagccccaaggacctggcccggtacctgcaggagctggacaaggaccacgcccgctacctgagctactttcactggcgggagacgctgcggcctcgctccttcagctgggcactggctttctgcaaggcctgctggaagctgcagcaggaatctaggtaccagacggtgcgcagcatagcggcttggttcacctgagaggccggcatggggcctgggctgccgggacctcactttcccagggcctcacctacctagggtctcactagtcgggggatttacctacctggggcctcggctgcctggggcctcggctgcctggggtctcacctgcctggggcctcacctgctggagtctttggtggccaggcatgtgacttacctgggatttcacttgccgggcttcactgccaggagcctcccctgctggggaccttgccagctggggctggggatggtgcctactggggaccttgctttctggaggctgcacctactgaggatctcggctgttggggactttacctgctgggacctgctcccagagaccttgccacactgaatgtcacctgctaggagcctcacccgctgggaggcacagggcccaagggagctggatgtgttgcccaaggtgtgcagggcaggtcagggaagggcagggtcccctaaggaggagggcgaagggtatgtgtgtgaccatcagcagtggtgtgcacatggctgggggacactcggtttgaccgccagcggatgggtgtcacaaatgcatcactatgggtgtgacctcggcgtgactctgatagtgcctgtggatgtgttgcgatgcctcaccctggagggcactgggccctgagaacgggtgcccttgaggccctgcccccgggcgatggtgcaggctggtttgcttgtggttttattgctgttgttaaccacccatgaggggtgcaaacagataatgctgttaacattttca

SEQ ID NO: 135459 - DNA, 2847 bp, Homo sapiens
  Payload ID: 6488
  Gene Symbol: FUT6
  Gene Name: fucosyltransferase 6 (alpha (1,3) fucosyltransferase)
  Uniprot ID: P51993
  ENST ID: ENST00000286955
  CDS Start-End: 1054-2133
agatcatttctctccattccaggaagtttgcatagctccctggacttctgctttgcactgccctgcaggagtgggtggggaaaggaagtggctttgaggcacacagaggggcttgttgaggccaccggaggaagcttctgccaccaatatgggacctgtgcccagcctaccagaagagagcatctgaaaacatgtatcgacatggtaacccctctgcttgaagcctcacatggctccctattgccttggtgctgaacaccctatggctgaccgtggcccagcctctgcaacagctctgcctcctctccagtggtgaagacccagcctgctgagactcctcctgcagttcctcaacatgcctgcatttctgctgcctcagggcctttgcgaaggttgttccttgtaactggaatgcccttccatcccttttttattcaaaaggctgcaattttaattgaagaaagttcccttccaaggttcatgagttgcctgacttgcccaccggtttcctgcaagatcccttggcctggcacttagtgctcaggaaatatttggtgatgggccaactgagtgagaaggtgggatctggtgggaaggaaagcggaaaggtagaaattctgctcacttcctcattcccacctcccaaggaacccctggtgtccctgtggaacccgctttgggaaccggtggttcaggtcagccttttcactttgtactcaaagccacatcgcattgaagccacaggtggggcaaggtcatgcatgacctgagtctccaaatcccttcaccctgtttggttctgcaacggggattaggggagccccacgatttgttttcaaaggatgtccgggctccaggacaggatgccctgggtcacctgatgacaggtgtggtggttggaaagggcctggtttcagctccgggtacacttcctccttccttctgctgcgtggtgtggcctcttccacgtcctcagaatccagctgttactccgtccgcggcctctcagctctagggccctctgcacactggcccccccagatactctgacccatggatcccctgggcccggccaagccacagtggtcgtggcgctgctgtctgaccacgctgctgtttcagctgctgatggctgtgtgtttcttctcctatctgcgtgtgtctcaagacgatcccactgtgtaccctaatgggtcccgcttcccagacagcacagggacccccgcccactccatccccctgatcctgctgtggacgtggccttttaacaaacccatagctctgccccgctgctcagagatggtgcctggcacggctgactgcaacatcactgccgaccgcaaggtgtatccacaggcagacgcggtcatcgtgcaccaccgagaggtcatgtacaaccccagtgcccagctcccacgctccccgaggcggcaggggcagcgatggatctggttcagcatggagtccccaagccactgctggcagctgaaagccatggacggatacttcaatctcaccatgtcctaccgcagcgactccgacatcttcacgccctacggctggctggagccgtggtccggccagcctgcccacccaccgctcaacctctcggccaagaccgagctggtggcctgggcagtgtccaactgggggccaaactccgccagggtgcgctactaccagagcctgcaggcccatctcaaggtggacgtgtacggacgctcccacaagcccctgccccagggaaccatgatggagacgctgtcccggtacaagttctatctggccttcgagaactccttgcaccccgactacatcaccgagaagctgtggaggaacgccctggaggcctgggccgtgcccgtggtgctgggccccagcagaagcaactacgagaggttcctgccacccgacgccttcatccacgtggacgacttccagagccccaaggacctggcccggtacctgcaggagctggacaaggaccacgcccgctacctgagctactttcgctggcgggagacgctgcggcctcgctccttcagctgggcactcgctttctgcaaggcctgctggaaactgcaggaggaatccaggtaccagacacgcggcatagcggcttggttcacctgagaggctggtgtggggcctgggctgccaggaacctcattttcctggggcctcacctgagtgggggcctcatctacctaaggactcgtttgcctgaagcttcacctgcctgaggactcacctgcctgggacggtcacctgttgcagcttcacctgcctggggattcacctacctgggtcctcactttcctggggcctcacctgctggagtcttcggtggccaggtatgtcccttacctgggatttcacatgctggcttccaggagcgtcccctgcggaagcctggcctgctggggatgtctcctggggactttgcctactggggacctcggctgttggggactttacctgctgggacctgctcccagagaccttccacactgaatctcacctgctaggagcctcacctgctggggacctcaccctggagggcactgggccctgggaactggcacccatggggccccacccatgagtgatggttctggctgatttgtttgtgatgttgttagccgcctgtgaggggtgcagagagataatcaccgcaccgtttccagatgtaatactgcaaagaaaaccgatgatgaggccgggtgcggtggctcacacctgtaatcccagcactttgggaggccgaggcaggcggatcacaaggtcaggagatcgagaccatcctggccaatatggtgaaacccgtctctactaaaaatacaaaaa

SEQ ID NO: 135460 - DNA, 3137 bp, Homo sapiens
  Payload ID: 6488
  Gene Symbol: FUT6
  Gene Name: fucosyltransferase 6 (alpha (1,3) fucosyltransferase)
  Uniprot ID: P51993
  ENST ID: ENST00000318336
  CDS Start-End: 1196-2275
aaaaccagtattccagatcatttctctccattccaggaagtttgcatagctccctggacttctgctttgcactgccctgcaggagtgggtggggaaaggaagtggctttgaggcacacagaggggcttgttgaggccaccggaggaagcttctgccaccaatatgggacctgtgcccagcctaccagaagagagcatctgaaaacatgtatcgacatggtaacccctctgcttgaagcctcacatggctccctattgccttggtgctgaacaccctatggctgaccgtggcccagcctctgcaacagctctgcctcctctccagtggtgaagacccagcctgctgagactcctcctgcagttcctcaacatgcctgcatttctgctgcctcagggcctttgcgaaggttgttccttgtaactggaatgcccttccatcccttttttattcaaaaggctgcaattttaattgaagaaagttcccttccaaggttcatgagttgcctgacttgcccaccggtttcctgcaagatcccttggcctggcacttagtgctcaggaaatatttggtgatgggccaactgagtgagaaggtgggatctggtgggaaggaaagcggaaaggtagaaattctgctcacttcctcattcccacctcccaaggaacccctggtgtccctgtggaacccgctttgggaaccggtggttcaggtcagccttttcactttgtactcaaagccacatcgcattgaagccacaggtggggcaaggtcatgcatgacctgagtctccaaatcccttcaccctgtttggttctgcaacggggattaggggagccccacgatttgttttcaaaggatgtccgggctccaggacaggatgccctgggtcacctgatgacaggtgtggtggttggaaagggcctggtttcagctccgggtacacttcctccttccttctgctgcgtggtgtggcctcttccacgtcctcagaatccagctgttactccgtccgcggcctctcagctctagggccctctgcacactggcccccccagtgtcacgggcatccagacgggatccagtgcatcctcttttagaagaaaggcctgtctccagatccccgagtccctctagcatctcccagaaggtgtcagacgcagcagtgtccagggagcggcagcagatactctgacccatggatcccctgggcccggccaagccacagtggtcgtggcgctgctgtctgaccacgctgctgtttcagctgctgatggctgtgtgtttcttctcctatctgcgtgtgtctcaagacgatcccactgtgtaccctaatgggtcccgcttcccagacagcacagggacccccgcccactccatccccctgatcctgctgtggacgtggccttttaacaaacccatagctctgccccgctgctcagagatggtgcctggcacggctgactgcaacatcactgccgaccgcaaggtgtatccacaggcagacgcggtcatcgtgcaccaccgagaggtcatgtacaaccccagtgcccagctcccacgctccccgaggcggcaggggcagcgatggatctggttcagcatggagtccccaagccactgctggcagctgaaagccatggacggatacttcaatctcaccatgtcctaccgcagcgactccgacatcttcacgccctacggctggctggagccgtggtccggccagcctgcccacccaccgctcaacctctcggccaagaccgagctggtggcctgggcagtgtccaactgggggccaaactccgccagggtgcgctactaccagagcctgcaggcccatctcaaggtggacgtgtacggacgctcccacaagcccctgccccagggaaccatgatggagacgctgtcccggtacaagttctatctggccttcgagaactccttgcaccccgactacatcaccgagaagctgtggaggaacgccctggaggcctgggccgtgcccgtggtgctgggccccagcagaagcaactacgagaggttcctgccacccgacgccttcatccacgtggacgacttccagagccccaaggacctggcccggtacctgcaggagctggacaaggaccacgcccgctacctgagctactttcgctggcgggagacgctgcggcctcgctccttcagctgggcactcgctttctgcaaggcctgctggaaactgcaggaggaatccaggtaccagacacgcggcatagcggcttggttcacctgagaggctggtgtggggcctgggctgccaggaacctcattttcctggggcctcacctgagtgggggcctcatctacctaaggactcgtttgcctgaagcttcacctgcctgaggactcacctgcctgggacggtcacctgttgcagcttcacctgcctggggattcacctacctgggtcctcactttcctggggcctcacctgctggagtcttcggtggccaggtatgtcccttacctgggatttcacatgctggcttccaggagcgtcccctgcggaagcctggcctgctggggatgtctcctggggactttgcctactggggacctcggctgttggggactttacctgctgggacctgctcccagagaccttccacactgaatctcacctgctaggagcctcacctgctggggacctcaccctggagggcactgggccctgggaactggcacccatggggccccacccatgagtgatggttctggctgatttgtttgtgatgttgttagccgcctgtgaggggtgcagagagataatcaccgcaccgtttccagatgtaatactgcaaagaaaaccgatgatgaggccgggtgcggtggctcacacctgtaatcccagcactttgggaggccgaggcaggcggatcacaaggtcaggagatcgagaccatcctggccaatatggtgaaacccgtctctactaaaaatacaaaaatttgccgggcgtggtggtgcatgcctgtaatcccagctacttgggaagctgaggcaggagaatcgcttgaaccagagagtcggaggttgcagtaagccgagatcgcgccactgcactccagcctggcgacagagcgagactctgtctc

SEQ ID NO: 135461 - DNA, 2598 bp, Homo sapiens
  Payload ID: 6488
  Gene Symbol: FUT6
  Gene Name: fucosyltransferase 6 (alpha (1,3) fucosyltransferase)
  Uniprot ID: P51993
  ENST ID: ENST00000524754
  CDS Start-End: 641-1720
gtttgcatagctccctggacttctgctttgcactgccctgcaggagtgggtggggaaaggaagtggctttgaggcacacagaggggcttgttgaggccaccggaggaagcttctgccaccaatatgggacctgtgcccagcctaccagaagagagcatctgaaaacatgtatcgacatggtaacccctctgcttgaagcctcacatggctccctattgccttggtgctgaacaccctatggctgaccgtggcccagcctctgcaacagctctgcctcctctccagtgccttttcactttgtactcaaagccacatcgcattgaagccacaggtggggcaaggtcatgcatgacctgagtctccaaatcccttcaccctgtttggttctgcaacggggattaggggagccccacgatttgttttcaaaggatgtccgggctccaggacaggatgccctgggtcacctgatgacaggtgtggtggttggaaagggcctggtttcagctccgggtacacttcctccttccttctgctgcgtggtgtggcctcttccacgtcctcagaatccagctgttactccgtccgcggcctctcagctctagggccctctgcacactggcccccccagatactctgacccatggatcccctgggcccggccaagccacagtggtcgtggcgctgctgtctgaccacgctgctgtttcagctgctgatggctgtgtgtttcttctcctatctgcgtgtgtctcaagacgatcccactgtgtaccctaatgggtcccgcttcccagacagcacagggacccccgcccactccatccccctgatcctgctgtggacgtggccttttaacaaacccatagctctgccccgctgctcagagatggtgcctggcacggctgactgcaacatcactgccgaccgcaaggtgtatccacaggcagacgcggtcatcgtgcaccaccgagaggtcatgtacaaccccagtgcccagctcccacgctccccgaggcggcaggggcagcgatggatctggttcagcatggagtccccaagccactgctggcagctgaaagccatggacggatacttcaatctcaccatgtcctaccgcagcgactccgacatcttcacgccctacggctggctggagccgtggtccggccagcctgcccacccaccgctcaacctctcggccaagaccgagctggtggcctgggcagtgtccaactgggggccaaactccgccagggtgcgctactaccagagcctgcaggcccatctcaaggtggacgtgtacggacgctcccacaagcccctgccccagggaaccatgatggagacgctgtcccggtacaagttctatctggccttcgagaactccttgcaccccgactacatcaccgagaagctgtggaggaacgccctggaggcctgggccgtgcccgtggtgctgggccccagcagaagcaactacgagaggttcctgccacccgacgccttcatccacgtggacgacttccagagccccaaggacctggcccggtacctgcaggagctggacaaggaccacgcccgctacctgagctactttcgctggcgggagacgctgcggcctcgctccttcagctgggcactcgctttctgcaaggcctgctggaaactgcaggaggaatccaggtaccagacacgcggcatagcggcttggttcacctgagaggctggtgtggggcctgggctgccaggaacctcattttcctggggcctcacctgagtgggggcctcatctacctaaggactcgtttgcctgaagcttcacctgcctgaggactcacctgcctgggacggtcacctgttgcagcttcacctgcctggggattcacctacctgggtcctcactttcctggggcctcacctgctggagtcttcggtggccaggtatgtcccttacctgggatttcacatgctggcttccaggagcgtcccctgcggaagcctggcctgctggggatgtctcctggggactttgcctactggggacctcggctgttggggactttacctgctgggacctgctcccagagaccttccacactgaatctcacctgctaggagcctcacctgctggggacctcaccctggagggcactgggccctgggaactggcacccatggggccccacccatgagtgatggttctggctgatttgtttgtgatgttgttagccgcctgtgaggggtgcagagagataatcaccgcaccgtttccagatgtaatactgcaaagaaaaccgatgatgaggccgggtgcggtggctcacacctgtaatcccagcactttgggaggccgaggcaggcggatcacaaggtcaggagatcgagaccatcctggccaatatggtgaaacccgtctctactaaaaatacaaaaatttgccgggcgtggtggtgcatgcctgtaatcccagctacttgggaagctgaggcaggagaatcgcttgaaccagagagtcggaggttgcagtaagccgagatcgcgccactgcactccagcctggcgacagagcgagactctgtctcaaaaaaaaaaaaaaaa

SEQ ID NO: 135462 - DNA, 530 bp, Homo sapiens
  Payload ID: 6488
  Gene Symbol: FUT6
  Gene Name: fucosyltransferase 6 (alpha (1,3) fucosyltransferase)
  ENST ID: ENST00000532464
  CDS Start-End: 397-530
gttactccgtccgcggcctctcagctctagggccctctgcacactggcccccccagagctctgcggtagaatcccgtgccccccgaccccatcagcagcctacaccccttcatccttcctggccccggattttctctgcctctgccactcccggtggtaaaagagggcttagaatgcggtttgctttctggctttgtttttttgcatcctgatctttgtggcgtggatcgatcattttccagggaaagtaccttggtgtcacgggcatccagacgggatccagtgcatcctcttttagaagaaaggcctgtctccagatccccgagtccctctagcatctcccagaaggtgtcagacgcagcagtgtccagggagcggcagcagatactctgacccatggatcccctgggcccggccaagccacagtggtcgtggcgctgctgtctgaccacgctgctgtttcagctgctgatggctgtgtgtttcttctcctatctgcgtgtgtctcaagacgatcccactgtgtaccc

SEQ ID NO: 135463 - DNA, 682 bp, Homo sapiens
  Payload ID: 6488
  Gene Symbol: FUT6
  Gene Name: fucosyltransferase 6 (alpha (1,3) fucosyltransferase)
  ENST ID: ENST00000531085
  CDS Start-End: 476-682
tgtcacgggcatccagacgggatccagtgcatcctcttttagaagaaaggcctgtctccagatccccgagtccctctagcatctcccagaaggtgtcagacgcagcagtgtccagggagcggcagcaggtccttatcatggtccaagggtccctcccagcctccaagtctcaccccatacatgaaaaaaggtggccccggtttcccgccacctcctccacagcaccatctctttgaagacccagtgcccacactccgggggatttgggccctcccctgtctccctccagccccctggggccagtccgctgctgggtatctccaggacgggccaggctcagcaagttccaccaaagcctgcttctctcctgggggttccccatgtctctgggtggccccactgccctcctggtcagcatattgaggaagagtctggggacacaccagaaaaggacaggatcaagatactctgacccatggatcccctgggcccggccaagccacagtggtcgtggcgctgctgtctgaccacgctgctgtttcagctgctgatggctgtgtgtttcttctcctatctgcgtgtgtctcaagacgatcccactgtgtaccctaatgggtcccgcttcccagacagcacagggacccccgcccactccatccccctgatcctgctgtggacgtgg

SEQ ID NO: 135464 - DNA, 2211 bp, Homo sapiens
  Payload ID: 6488
  Gene Symbol: FUT6
  Gene Name: fucosyltransferase 6 (alpha (1,3) fucosyltransferase)
  Uniprot ID: P51993
  ENST ID: ENST00000527106
  CDS Start-End: 270-1349
gcctcttccacgtcctcagaatccagctgttactccgtccgcggcctctcagctctagggccctctgcacactggcccccccagtgtcacgggcatccagacgggatccagtgcatcctcttttagaagaaaggcctgtctccagatccccgagtccctctagcatctcccagaaggtgtcagacgcagcagtgtccagggagcggcagcagattgaggaagagtctggggacacaccagaaaaggacaggatcaagatactctgacccatggatcccctgggcccggccaagccacagtggtcgtggcgctgctgtctgaccacgctgctgtttcagctgctgatggctgtgtgtttcttctcctatctgcgtgtgtctcaagacgatcccactgtgtaccctaatgggtcccgcttcccagacagcacagggacccccgcccactccatccccctgatcctgctgtggacgtggccttttaacaaacccatagctctgccccgctgctcagagatggtgcctggcacggctgactgcaacatcactgccgaccgcaaggtgtatccacaggcagacgcggtcatcgtgcaccaccgagaggtcatgtacaaccccagtgcccagctcccacgctccccgaggcggcaggggcagcgatggatctggttcagcatggagtccccaagccactgctggcagctgaaagccatggacggatacttcaatctcaccatgtcctaccgcagcgactccgacatcttcacgccctacggctggctggagccgtggtccggccagcctgcccacccaccgctcaacctctcggccaagaccgagctggtggcctgggcagtgtccaactgggggccaaactccgccagggtgcgctactaccagagcctgcaggcccatctcaaggtggacgtgtacggacgctcccacaagcccctgccccagggaaccatgatggagacgctgtcccggtacaagttctatctggccttcgagaactccttgcaccccgactacatcaccgagaagctgtggaggaacgccctggaggcctgggccgtgcccgtggtgctgggccccagcagaagcaactacgagaggttcctgccacccgacgccttcatccacgtggacgacttccagagccccaaggacctggcccggtacctgcaggagctggacaaggaccacgcccgctacctgagctactttcgctggcgggagacgctgcggcctcgctccttcagctgggcactcgctttctgcaaggcctgctggaaactgcaggaggaatccaggtaccagacacgcggcatagcggcttggttcacctgagaggctggtgtggggcctgggctgccaggaacctcattttcctggggcctcacctgagtgggggcctcatctacctaaggactcgtttgcctgaagcttcacctgcctgaggactcacctgcctgggacggtcacctgttgcagcttcacctgcctggggattcacctacctgggtcctcactttcctggggcctcacctgctggagtcttcggtggccaggtatgtcccttacctgggatttcacatgctggcttccaggagcgtcccctgcggaagcctggcctgctggggatgtctcctggggactttgcctactggggacctcggctgttggggactttacctgctgggacctgctcccagagaccttccacactgaatctcacctgctaggagcctcacctgctggggacctcaccctggagggcactgggccctgggaactggcacccatggggccccacccatgagtgatggttctggctgatttgtttgtgatgttgttagccgcctgtgaggggtgcagagagataatcaccgcaccgtttccagatgtaatactgcaaagaaaaccgatgatgaggccgggtgcggtggctcacacctgtaatcccagcactttgggaggccgaggcaggcggatcacaaggtcaggagatcgagaccatcctggccaatatggtgaaacccgtctctactaaaaatacaaaaatttgccgggcgtggtggtgcatgcctgtaatcccagctacttgggaagctgaggcaggagaatcgcttgaaccagagagtcggaggttgcagtaagccgagatcgcgccactgcactccagcctggcgacagagcgagactctgtctc

SEQ ID NO: 135465 - DNA, 527 bp, Homo sapiens
  Payload ID: 6488
  Gene Symbol: FUT6
  Gene Name: fucosyltransferase 6 (alpha (1,3) fucosyltransferase)
  ENST ID: ENST00000528505
  CDS Start-End: 437-527
ctcagaatccagctgttactccgtccgcggcctctcagctctagggccctctgcacactggcccccccagtgggtgtctgtctgtctctcttgcagagctctgcggtagaatcccgtgccccccgaccccatcagcagcctacaccccttcatccttcctggccccggattttctctgcctctgccactcccggtggtaaaagagggcttagaatgcggtttgctttctggctttgtttttttgcatcctgatctttgtggcgtggatcgatcattttccagggaaagtaccttggtgtcacgggcatccagacgggatccagtgcatcctcttttagaagaaaggcctgtctccagatccccgagtccctctagcatctcccagaaggtgtcagacgcagcagtgtccagggagcggcagcagatactctgacccatggatcccctgggcccggccaagccacagtggtcgtggcgctgctgtctgaccacgctgctgtttcagctgctgatggctgtgtgtttct

SEQ ID NO: 135466 - DNA, 564 bp, Homo sapiens
  Payload ID: 6488
  Gene Symbol: FUT6
  Gene Name: fucosyltransferase 6 (alpha (1,3) fucosyltransferase)
  ENST ID: ENST00000531199
  CDS Start-End: 365-564
acttcctccttccttctgctgcgtggtgtggcctcttccacgtcctcagaatccagctgttactccgtccgcggcctctcagctctagggccctctgcacactggcccccccagtgtcacgggcatccagacgggatccagtgcatcctcttttagaagaaaggcctgtctccagatccccgagtccctctagcatctcccagaaggtgtcagacgcagcagtgtccagggagcggcagcaggtccttatcatggtccaagggtccctcccagcctccaagtctcaccccatacatgaaaaaaggtggccccggtttcccgccacctcctccacagcaccatctctttgaagatactctgacccatggatcccctgggcccggccaagccacagtggtcgtggcgctgctgtctgaccacgctgctgtttcagctgctgatggctgtgtgtttcttctcctatctgcgtgtgtctcaagacgatcccactgtgtaccctaatgggtcccgcttcccagacagcacagggacccccgcccactccatccccctgatcctgctgtg

SEQ ID NO: 135467 - DNA, 700 bp, Homo sapiens
  Payload ID: 6488
  Gene Symbol: FUT6
  Gene Name: fucosyltransferase 6 (alpha (1,3) fucosyltransferase)
  ENST ID: ENST00000529165
  CDS Start-End: 290-700
gtggttggaaagggcctggtttcagctccgggtacacttcctccttccttctgctgcgtggtgtggcctcttccacgtcctcagaatccagctgttactccgtccgcggcctctcagctctagggccctctgcacactggcccccccagtgtcacgggcatccagacgggatccagtgcatcctcttttagaagaaaggcctgtctccagatccccgagtccctctagcatctcccagaaggtgtcagacgcagcagtgtccagggagcggcagcagatactctgacccatggatcccctgggcccggccaagccacagtggtcgtggcgctgctgtctgaccacgctgctgtttcagctgctgatggctgtgtgtttcttctcctatctgcgtgtgtctcaagacgatcccactgtgtaccctaatgggtcccgcttcccagacagcacagggacccccgcccactccatccccctgatcctgctgtggacgtggccttttaacaaacccatagctctgccccgctgctcagagatggtgcctggcacggctgactgcaacatcactgccgaccgcaaggtgtatccacaggcagacgcggtcatcgtgcaccaccgagaggtcatgtacaaccccagtgcccagctcccacgctccccgaggcggcaggggcagcgatggatctggttcagcatggag

SEQ ID NO: 135468 - DNA, 1095 bp, Homo sapiens
  Payload ID: 6488
  Gene Symbol: FUT6
  Gene Name: fucosyltransferase 6 (alpha (1,3) fucosyltransferase)
  Uniprot ID: P51993
  ENST ID: ENST00000592563
  CDS Start-End: 1-1095
atggatcccctgggcccggccaagccacagtggtcgtggcgctgctgtctgaccacgctgctgtttcagctgctgatggctgtgtgtttcttctcctatctgcgtgtgtctcaagacgatcccactgtgtaccctaatgggtcccgcttcccagacagcacagggacccccgcccactccatccccctgatcctgctgtggacgtggccttttaacaaacccatagctctgccccgctgctcagagatggtgcctggcacggctgactgcaacatcactgccgaccgcaaggtgtatccacaggcagacgcggtcatcgtgcaccaccgagaggtcatgtacaaccccagtgcccagctcccacgctccccgaggcggcaggggcagcgatggatctggttcagcatggagtccccaagccactgctggcagctgaaagccatggacggatacttcaatctcaccatgtcctaccgcagcgactccgacatcttcacgccctacggctggctggagccgtggtccggccagcctgcccacccaccgctcaacctctcggccaagaccgagctggtggcctgggcagtgtccaactgggggccaaactccgccagggtgcgctactaccagagcctgcaggcccatctcaaggtggacgtgtacggacgctcccacaagcccctgccccagggaaccatgatggagacgctgtcccggtacaagttctatctggccttcgagaactccttgcaccccgactacatcaccgagaagctgtggaggaacgccctggaggcctgggccgtgcccgtggtgctgggccccagcagaagcaactacgagaggttcctgccacccgacgccttcatccacgtggacgacttccagagccccaaggacctggcccggtacctgcaggagctggacaaggaccacgcccgctacctgagctactttcgctggcgggagacgctgcggcctcgctccttcagctgggcactcgctttctgcaaggcctgctggaaactgcaggaggaatccagtgggggcctcatctacctaaggactcgtttgcctgaagcttcacctgcctga

SEQ ID NO: 135469 - DNA, 2584 bp, Homo sapiens
  Payload ID: 6489
  Gene Symbol: FUT7
  Gene Name: fucosyltransferase 7 (alpha (1,3) fucosyltransferase)
  Uniprot ID: Q11130
  ENST ID: ENST00000314412
  CDS Start-End: 1020-2048
ccaggctccaggccctggcttagagggagcggggagtctggacttcaggctggatcccttcctcttcctggagcgggtgctggcccccaacccgcttgcgtcagggacaaaaggactccttccctttccagcctggaaagcccctctgctgcaggctggaggaagggaccctgggcccagcctatagtcagcggtgtctatgggcatggatctggacggggaaaaggacaaagcagcctccatccacagttcattccgggaccaggcccttgcaggcacgcgctgggctcctgtgggaagacactaagggccccaggacagacctcctctccgggcatctgggttcctagatggcagaggtggcagagtggggtgggatggcccaattgggagctttagcttccggcaaagagctgagcacagtacatcttcaatgtgtaagattctcctgggagaccagggcccagctggtggtgagctgggggaagtgggtgatactgccgtgggaggagccacctggccctctggggaagtgcactcgctgtctgcagcgcccaggcctgggtagctgggtgggggctggggggccatctgtgctcagggtgcctgcacctgggccttctctgccctgggccaagcctgcccgagcctctctgtcctctgcctgcccagctggacatctctgggcctctctggagaccagtggggtgggctgtgggggcgtcatattgccctggcttggcatccctcttgtggctgtacccctcccagcagccccaggactagcaagtccccgagatgggggtggggacagtggttgatgccaaaggttgtgggggcaggggcggggcaggagcaggaaggtcccctgagttccctcaccttgggcagagataaaaggagcacagttccaggcggggctgagctagggcgtagctgtgatttcaggggcacctctggcggctgccgtgatttgagaatctcgggtctcttggctgactgatcctgggagactgtggatgaataatgctgggcacggccccacccggaggctgcgaggcttgggggtcctggccggggtggctctgctcgctgccctctggctcctgtggctgctggggtcagcccctcggggtaccccggcaccccagcccacgatcaccatccttgtctggcactggcccttcactgaccagcccccagagctgcccagcgacacctgcacccgctacggcatcgcccgctgccacctgagtgccaaccgaagcctgctggccagcgccgacgccgtggtcttccaccaccgcgagctgcagacccggcggtcccacctgcccctggcccagcggccgcgagggcagccctgggtgtgggcctccatggagtctcctagccacacccacggcctcagccacctccgaggcatcttcaactgggtgctgagctaccggcgcgactcggacatctttgtgccctatggccgcctggagccccactgggggccctcgccaccgctgccagccaagagcagggtggccgcctgggtggtcagcaacttccaggagcggcagctgcgtgccaggctgtaccggcagctggcgcctcatctgcgggtggatgtctttggccgtgccaatggacggccactgtgcgccagctgcctggtgcccaccgtggcccagtaccgcttctacctgtcctttgagaactctcagcaccgcgactacattacggagaaattctggcgcaacgcactggtggctggcactgtgccagtggtgctggggcccccacgggccacctatgaggccttcgtgccggctgacgccttcgtgcatgtggatgactttggctcagcccgagagctggcggctttcctcactggcatgaatgagagccgataccaacgcttctttgcctggcgtgacaggctccgcgtgcgactgttcaccgactggcgggaacgtttctgtgccatctgtgaccgctacccacacctaccccgcagccaagtctatgaggaccttgagggttggtttcaggcctgagatccgctggccgggggaggtgggtgtgggtggaagggctgggtgtcgaaatcaaaccaccaggcatccggcccttaccggcaagcagcgggctaacgggaggctgggcacagaggtcaggaagcaggggtggggggtgcaggtgggcactggagcatgcagaggaggtgagagtgggagggaggtaacgggtgcctgctgcggcagacgggaggggaaaggctgccgaggaccctccccaccctgaacaaatcttgggtgggtgaaggcctggctggaagagggtgaaaggcagggcccttggggctggggggcaccccagcctgaagtttgtgggggccaaacctgggaccccgagcttcctcggtagcagaggccctgtggtccccgagacacaggcacgggtccctgccacgtccatagttctgaggtccctgtgtgtaggctggggcggggcccaggagaccacggggagcaaaccagcttgttctgggctcagggagggagggcggtggacaataaacatctgagcagtg

SEQ ID NO: 135470 - DNA, 2490 bp, Homo sapiens
  Payload ID: 6490
  Gene Symbol: FUT8
  Gene Name: fucosyltransferase 8 (alpha (1,6) fucosyltransferase)
  Uniprot ID: Q9BYC5
  ENST ID: ENST00000342677
  CDS Start-End: 455-1381
gactactttgtgtgctggggcggcgcgctccggtcctcccgctcagctggcggtctgggctgctctggggcagcccttcggtccactgctctgcatcgcgggcgccgggaattttccgagtccgagcgggttgctgcttttgctcagaggacatccatgaccctaatggtctttttgttcaagataaagtgattttttgcctttgttgattaactggacaaattcagcatgtagagcgcatgaagtacaggacaataaagcttcctacacatatcaccaggaggatctctttgaaagattcactgcaggactaccagagagaataatttgtctgaagcatcatgtgttgaaacaacagaagtctattcacctgtgcactaactagaaacagagttacaatgttttcaattctttgagctccaggactccagggaagtgagttgaaaatctgaaaatgcggccatggactggttcctggcgttggattatgctcattctttttgcctgggggaccttgctgttttatataggtggtcacttggtacgagataatgaccatcctgatcactctagccgagaactgtccaagattctggcaaagcttgaacgcttaaaacaacagaatgaagacttgaggcgaatggccgaatctctccggataccagaaggccctattgatcaggggccagctataggaagagtacgcgttttagaagagcagcttgttaaggccaaagaacagattgaaaattacaagaaacagaccagaaatggtctggggaaggatcatgaaatcctgaggaggaggattgaaaatggagctaaagagctctggtttttcctacagagtgaattgaagaaattaaagaacttagaaggaaatgaactccaaagacatgcagatgaatttcttttggatttaggacatcatgaaaggtctataatgacggatctatactacctcagtcagacagatggagcaggtgattggcgggaaaaagaggccaaagatctgacagaactggttcagcggagaataacatatcttcagaatcccaaggactgcagcaaagccaaaaagctggtgtgtaatatcaacaaaggctgtggctatggctgtcagctccatcatgtggtctactgcttcatgattgcatatggcacccagcgaacactcatcttggaatctcagaattggcgctatgctactggtggatgggagactgtatttaggcctgtaagtgagacatgcacagacagatctggcatctccactggacactggtcaggtaccccaattatgaatttattagtgataactctatttcctggtcagctggactgcacaatcgatacacagaaaattcacttcgtggagtgatcctggatatacattttctctctcaggcagacttcctagtgtgtactttttcatcccaggtctgtcgagttgcttatgaaattatgcaaacactacatcctgatgcctctgcaaacttccattctttagatgacatctactattttgggggccagaatgcccacaatcaaattgccatttatgctcaccaaccccgaactgcagatgaaattcccatggaacctggagatatcattggtgtggctggaaatcattgggatggctattctaaaggtgtcaacaggaaattgggaaggacgggcctatatccctcctacaaagttcgagagaagatagaaacggtcaagtaccccacatatcctgaggctgagaaataaagctcagatggaagagataaacgaccaaactcagttcgaccaaactcagttcaaaccatttcagccaaactgtagatgaagagggctctgatctaacaaaataaggttatatgagtagatactctcagcaccaagagcagctgggaactgacataggcttcaattggtggaattcctctttaacaagggctgcaatgccctcatacccatgcacagtacaataatgtactcacatataacatgcaaacaggttgttttctactttgcccctttcagtatgtccccataagacaaacactgccatattgtgtaatttaagtgacacagacattttgtgtgagacttaaaacatggtgcctatatctgagagacctgtgtgaactattgagaagatcggaacagctccttactctgaggaagttgattcttatttgatggtggtattgtgaccactgaattcactccagtcaacagattcagaatgagaatggacgtttggtttttttttgtttttgtttttgttttttcctttataaggttgtctgtttttttttttttaaataattgcatcagttcattgacctcatcattaataagtgaagaatacatcagaaaataaaatattcactctccattagaaaattttgtaaaacaatgccatgaacaaattctttagtactcaatgtttctggacattctctttgataacaaaaaataaattttaaaaaggaa

SEQ ID NO: 135471 - DNA, 2664 bp, Homo sapiens
  Payload ID: 6490
  Gene Symbol: FUT8
  Gene Name: fucosyltransferase 8 (alpha (1,6) fucosyltransferase)
  ENST ID: ENST00000358307
  CDS Start-End: 592-1932
gctctgcctcagtcagtggcgccgaaggctccgttaagcggcggcggcggttcctgtttccgtttcttcctctccgttcggtcgggagtagcatcctccactcagccacccttcccactcccccatcgtggggcagctgcggctgagggctgtggctttggcagctgcgacggggagcggcggagaccgcctctgctcccgcctggggttgctgcttttgctcagaggacatccatgaccctaatggtctttttgttcaagataaagtgattttttgcctttgttgattaactggacaaattcaggataccagaaggccctattgatcaggggccagctataggaagagtacgcgttttagaagagcagcttgttaaggccaaagaacagattgaaaattacaagaaacagaccagaaatggtctggggaaggatcatgaaatcctgaggaggaggattgaaaatggagctaaagagctctggtttttcctacagagtgaattgaagaaattaaagaacttagaaggaaatgaactccaaagacatgcagatgaatttcttttggatttaggacatcatgaaaggattctgatggcaattactgtctcattagtgaacaataaaagaaaaattgttgtattagcacaacctactactgtgaagaggaaaagaattaccccatacaagtctataatgacggatctatactacctcagtcagacagatggagcaggtgattggcgggaaaaagaggccaaagatctgacagaactggttcagcggagaataacatatcttcagaatcccaaggactgcagcaaagccaaaaagctggtgtgtaatatcaacaaaggctgtggctatggctgtcagctccatcatgtggtctactgcttcatgattgcatatggcacccagcgaacactcatcttggaatctcagaattggcgctatgctactggtggatgggagactgtatttaggcctgtaagtgagacatgcacagacagatctggcatctccactggacactggtcaggtgaagtgaaggacaaaaatgttcaagtggtcgagcttcccattgtagacagtcttcatccccgtcctccatatttacccttggctgtaccagaagacctcgcagatcgacttgtacgagtgcatggtgaccctgcagtgtggtgggtgtctcagtttgtcaaatacttgatccgcccacagccttggctagaaaaagaaatagaagaagccaccaagaagcttggcttcaaacatccagttattggagtccatgtcagacgcacagacaaagtgggaacagaagctgccttccatcccattgaagagtacatggtgcatgttgaagaacattttcagcttcttgcacgcagaatgcaagtggacaaaaaaagagtgtatttggccacagatgacccttctttattaaaggaggcaaaaacaaagtaccccaattatgaatttattagtgataactctatttcctggtcagctggactgcacaatcgatacacagaaaattcacttcgtggagtgatcctggatatacattttctctctcaggcagacttcctagtgtgtactttttcatcccaggtctgtcgagttgcttatgaaattatgcaaacactacatcctgatgcctctgcaaacttccattctttagatgacatctactattttgggggccagaatgcccacaatcaaattgccatttatgctcaccaaccccgaactgcagatgaaattcccatggaacctggagatatcattggtgtggctggaaatcattgggatggctattctaaaggtgtcaacaggaaattgggaaggacgggcctatatccctcctacaaagttcgagagaagatagaaacggtcaagtaccccacatatcctgaggctgagaaataaagctcagatggaagagataaacgaccaaactcagttcgaccaaactcagttcaaaccatttcagccaaactgtagatgaagagggctctgatctaacaaaataaggttatatgagtagatactctcagcaccaagagcagctgggaactgacataggcttcaattggtggaattcctctttaacaagggctgcaatgccctcatacccatgcacagtacaataatgtactcacatataacatgcaaacaggttgttttctactttgcccctttcagtatgtccccataagacaaacactgccatattgtgtaatttaagtgacacagacattttgtgtgagacttaaaacatggtgcctatatctgagagacctgtgtgaactattgagaagatcggaacagctccttactctgaggaagttgattcttatttgatggtggtattgtgaccactgaattcactccagtcaacagattcagaatgagaatggacgtttggtttttttttgtttttgtttttgttttttcctttataaggttgtctgtttttttttttttaaataattgcatcagttcattgacctcatcattaataagtgaagaatacatcagaaaataaaatattcactctccattagaaaattttgtaaaacaatgccatgaacaaattctttagtactcaatgtttctggacattctctttgataacaaaaaataaattttaaaaaggaa

SEQ ID NO: 135472 - DNA, 5166 bp, Homo sapiens
  Payload ID: 6490
  Gene Symbol: FUT8
  Gene Name: fucosyltransferase 8 (alpha (1,6) fucosyltransferase)
  Uniprot ID: Q9BYC5
  ENST ID: ENST00000360689
  CDS Start-End: 1728-3455
tttcagttggaaggaggtagggaaaataagtgctttaattcctaggattttggaagtaaaaatggaacaccagacaaaaatggaatttttaggcaaatgtaaagctttgtacttgggtatctcaaagtattatacagtgtaaactatcatgattattaaccaactagaagtagttcttttttttaaattttatttttaattttagacatgagggtcttgctatgttgcccaggctgaagtggctactgacaggcacgatgtggcactgcagcctggaactcttgggcttaagtgatccttcctgcttcttctatcttaaaaaaaaaaagttacgcttgcttgttaaaatatttttaaaatgctgtgtttaaactaagaagtaaatatccaccccacctctgacttctaaaaattatctaaagtatgactggtaagatttttacctttaatcccacataagtctaaaatttgtgttcatttccaacaaccaaagtgtgtcacttttataccagaattttgtcctgcttatacgtttagtacagaaatctcatgggagagagcatccatgcatttacaaattgttattgaattattttattgaatgatgacacccaaactgagctagaacataattctggctctgctagtacatcttctgtgtgatcttggacaagtcactctactttcctttcaattttcttttctcacagggagataatcataaaaacgactgtaaagtacagcacttcatagagtgctttttgtttaaagagctgacaataaatacgagtctcaaggtctaggaaagcctccctcacaacctgagctgcttgaggacaagggattttcttttgaatcagcagtaccttatttgtgtatctgtgatagagttcctggtacataagaaggtctcaataaatatgtgaatttatgaatattaggcagattgcaaccttgacaggccactgcctcttaaatctcctttctgtgatcttttaatatttaacatctaaaaggccgccgctacttgctttgggataagtatccccggtatgtactttaaaatgcccaagcctagagaaatgattcttgtcttaagggcaccatttcgctctcccaccgtaaagcgccccaggcttgggatctgggtcccaaggctacagggaagagtttggaacgggaagctcatcttccggccctctgattggccggctcgcactccactcacgcggcgcgcagctctgattggcctcggcggcacccctcgtcccgcgactactttgtgtgctggggcggcgcgctccggtcctcccgctcagctggcggtctgggctgctctggggcagcccttcggtccactgctctgcatcgcgggcgccgggaattttccgagtccgagcgggttgctgcttttgctcagaggacatccatgaccctaatggtctttttgttcaagataaagtgattttttgcctttgttgattaactggacaaattcagcatgtagagcgcatgaagtacaggacaataaagcttcctacacatatcaccaggaggatctctttgaaagattcactgcaggactaccagagagaataatttgtctgaagcatcatgtgttgaaacaacagaagtctattcacctgtgcactaactagaaacagagttacaatgttttcaattctttgagctccaggactccagggaagtgagttgaaaatctgaaaatgcggccatggactggttcctggcgttggattatgctcattctttttgcctgggggaccttgctgttttatataggtggtcacttggtacgagataatgaccatcctgatcactctagccgagaactgtccaagattctggcaaagcttgaacgcttaaaacaacagaatgaagacttgaggcgaatggccgaatctctccggataccagaaggccctattgatcaggggccagctataggaagagtacgcgttttagaagagcagcttgttaaggccaaagaacagattgaaaattacaagaaacagaccagaaatggtctggggaaggatcatgaaatcctgaggaggaggattgaaaatggagctaaagagctctggtttttcctacagagtgaattgaagaaattaaagaacttagaaggaaatgaactccaaagacatgcagatgaatttcttttggatttaggacatcatgaaaggtctataatgacggatctatactacctcagtcagacagatggagcaggtgattggcgggaaaaagaggccaaagatctgacagaactggttcagcggagaataacatatcttcagaatcccaaggactgcagcaaagccaaaaagctggtgtgtaatatcaacaaaggctgtggctatggctgtcagctccatcatgtggtctactgcttcatgattgcatatggcacccagcgaacactcatcttggaatctcagaattggcgctatgctactggtggatgggagactgtatttaggcctgtaagtgagacatgcacagacagatctggcatctccactggacactggtcaggtgaagtgaaggacaaaaatgttcaagtggtcgagcttcccattgtagacagtcttcatccccgtcctccatatttacccttggctgtaccagaagacctcgcagatcgacttgtacgagtgcatggtgaccctgcagtgtggtgggtgtctcagtttgtcaaatacttgatccgcccacagccttggctagaaaaagaaatagaagaagccaccaagaagcttggcttcaaacatccagttattggagtccatgtcagacgcacagacaaagtgggaacagaagctgccttccatcccattgaagagtacatggtgcatgttgaagaacattttcagcttcttgcacgcagaatgcaagtggacaaaaaaagagtgtatttggccacagatgacccttctttattaaaggaggcaaaaacaaagtaccccaattatgaatttattagtgataactctatttcctggtcagctggactgcacaatcgatacacagaaaattcacttcgtggagtgatcctggatatacattttctctctcaggcagacttcctagtgtgtactttttcatcccaggtctgtcgagttgcttatgaaattatgcaaacactacatcctgatgcctctgcaaacttccattctttagatgacatctactattttgggggccagaatgcccacaatcaaattgccatttatgctcaccaaccccgaactgcagatgaaattcccatggaacctggagatatcattggtgtggctggaaatcattgggatggctattctaaaggtgtcaacaggaaattgggaaggacgggcctatatccctcctacaaagttcgagagaagatagaaacggtcaagtaccccacatatcctgaggctgagaaataaagctcagatggaagagataaacgaccaaactcagttcgaccaaactcagttcaaaccatttcagccaaactgtagatgaagagggctctgatctaacaaaataaggttatatgagtagatactctcagcaccaagagcagctgggaactgacataggcttcaattggtggaattcctctttaacaagggctgcaatgccctcatacccatgcacagtacaataatgtactcacatataacatgcaaacaggttgttttctactttgcccctttcagtatgtccccataagacaaacactgccatattgtgtaatttaagtgacacagacattttgtgtgagacttaaaacatggtgcctatatctgagagacctgtgtgaactattgagaagatcggaacagctccttactctgaggaagttgattcttatttgatggtggtattgtgaccactgaattcactccagtcaacagattcagaatgagaatggacgtttggtttttttttgtttttgtttttgttttttcctttataaggttgtctgtttttttttttttaaataattgcatcagttcattgacctcatcattaataagtgaagaatacatcagaaaataaaatattcactctccattagaaaattttgtaaaacaatgccatgaacaaattctttagtactcaatgtttctggacattctctttgataacaaaaaataaattttaaaaaggaattttgtaaagtttctagaattttatatcattggatgatatgttgatcagccttatgtggaagaactgtgataaaaagaggagctttttagtttttcagcttatttactttgttttttttcctgtttctgatatagtaactaattcttaactcagagacattggtccattttaatactgaaaaccaattttcattggtacacattacaaaattgctaagaacactgtttgggagctttcattctcatattttggacattgttttaattgagtgaaataatcataactccttgctcccagagaagctatcacctccatttctaaaaccatttcaggtttgtttggtagtctttcttaatgtatttattatcgctttttgtgagtagggtcctgttttatccaggaaccaatttctgccctagcctatcatgccctgcttttgagagtaccaggtatctttgggattgggaagctggctgtttcagaagtatatgtctcatagtgtgcagaacttggtgaccaagtgagaagcgggaccaatgggagactcacaatggactgagtcttgggattatcttttccaaattcttccatgttagaatcacttcagaaaataagactttgatgctttgtctctgagcatcatttttctcctcataaaaacacttccttattgtatgtagcctgcctcctacagaggcctggtaggtgttactgcattctaaaagaaaaatgtcatctctgtaggagcgactatcaggcctagtgtgaaatattagggatcctaggcagaagagctattagtcctggccttcatatcttcaccaaatgaaaatactgtatataaaatttcaccaccaaacttaactaaattctttttctcaagtcaagcctcccaaagaaaaaagaaattaacttcctacagtgtcagcaagcaattttccatttagttttggtacaaataaaagtcatttgaaacaa

SEQ ID NO: 135473 - DNA, 3559 bp, Homo sapiens
  Payload ID: 6490
  Gene Symbol: FUT8
  Gene Name: fucosyltransferase 8 (alpha (1,6) fucosyltransferase)
  Uniprot ID: Q9BYC5
  ENST ID: ENST00000394586
  CDS Start-End: 1100-2827
cgtttagtacagaaatctcatgggagagagcatccatgcatttacaaattgttattgaattattttattgaatgatgacacccaaactgagctagaacataattctggctctgctagtacatcttctgtgtgatcttggacaagtcactctactttcctttcaattttcttttctcacagggagataatcataaaaacgactgtaaagtacagcacttcatagagtgctttttgtttaaagagctgacaataaatacgagtctcaaggtctaggaaagcctccctcacaacctgagctgcttgaggacaagggattttcttttgaatcagcagtaccttatttgtgtatctgtgatagagttcctggtacataagaaggtctcaataaatatgtgaatttatgaatattaggcagattgcaaccttgacaggccactgcctcttaaatctcctttctgtgatcttttaatatttaacatctaaaaggccgccgctacttgctttgggataagtatccccggtatgtactttaaaatgcccaagcctagagaaatgattcttgtcttaagggcaccatttcgctctcccaccgtaaagcgccccaggcttgggatctgggtcccaaggctacagggaagagtttggaacgggaagctcatcttccggccctctgattggccggctcgcactccactcacgcggcgcgcagctctgattggcctcggcggcacccctcgtcccgcgactactttgtgtgctggggcggcgcgctccggtcctcccgctcagctggcggtctgggctgctctggggcagcccttcggtccactgctctgcatcgcgggcgccgggaattttccgagtccgagcggcatgtagagcgcatgaagtacaggacaataaagcttcctacacatatcaccaggaggatctctttgaaagattcactgcaggactaccagagagaataatttgtctgaagcatcatgtgttgaaacaacagaagtctattcacctgtgcactaactagaaacagagttacaatgttttcaattctttgagctccaggactccagggaagtgagttgaaaatctgaaaatgcggccatggactggttcctggcgttggattatgctcattctttttgcctgggggaccttgctgttttatataggtggtcacttggtacgagataatgaccatcctgatcactctagccgagaactgtccaagattctggcaaagcttgaacgcttaaaacaacagaatgaagacttgaggcgaatggccgaatctctccggataccagaaggccctattgatcaggggccagctataggaagagtacgcgttttagaagagcagcttgttaaggccaaagaacagattgaaaattacaagaaacagaccagaaatggtctggggaaggatcatgaaatcctgaggaggaggattgaaaatggagctaaagagctctggtttttcctacagagtgaattgaagaaattaaagaacttagaaggaaatgaactccaaagacatgcagatgaatttcttttggatttaggacatcatgaaaggtctataatgacggatctatactacctcagtcagacagatggagcaggtgattggcgggaaaaagaggccaaagatctgacagaactggttcagcggagaataacatatcttcagaatcccaaggactgcagcaaagccaaaaagctggtgtgtaatatcaacaaaggctgtggctatggctgtcagctccatcatgtggtctactgcttcatgattgcatatggcacccagcgaacactcatcttggaatctcagaattggcgctatgctactggtggatgggagactgtatttaggcctgtaagtgagacatgcacagacagatctggcatctccactggacactggtcaggtgaagtgaaggacaaaaatgttcaagtggtcgagcttcccattgtagacagtcttcatccccgtcctccatatttacccttggctgtaccagaagacctcgcagatcgacttgtacgagtgcatggtgaccctgcagtgtggtgggtgtctcagtttgtcaaatacttgatccgcccacagccttggctagaaaaagaaatagaagaagccaccaagaagcttggcttcaaacatccagttattggagtccatgtcagacgcacagacaaagtgggaacagaagctgccttccatcccattgaagagtacatggtgcatgttgaagaacattttcagcttcttgcacgcagaatgcaagtggacaaaaaaagagtgtatttggccacagatgacccttctttattaaaggaggcaaaaacaaagtaccccaattatgaatttattagtgataactctatttcctggtcagctggactgcacaatcgatacacagaaaattcacttcgtggagtgatcctggatatacattttctctctcaggcagacttcctagtgtgtactttttcatcccaggtctgtcgagttgcttatgaaattatgcaaacactacatcctgatgcctctgcaaacttccattctttagatgacatctactattttgggggccagaatgcccacaatcaaattgccatttatgctcaccaaccccgaactgcagatgaaattcccatggaacctggagatatcattggtgtggctggaaatcattgggatggctattctaaaggtgtcaacaggaaattgggaaggacgggcctatatccctcctacaaagttcgagagaagatagaaacggtcaagtaccccacatatcctgaggctgagaaataaagctcagatggaagagataaacgaccaaactcagttcgaccaaactcagttcaaaccatttcagccaaactgtagatgaagagggctctgatctaacaaaataaggttatatgagtagatactctcagcaccaagagcagctgggaactgacataggcttcaattggtggaattcctctttaacaagggctgcaatgccctcatacccatgcacagtacaataatgtactcacatataacatgcaaacaggttgttttctactttgcccctttcagtatgtccccataagacaaacactgccatattgtgtaatttaagtgacacagacattttgtgtgagacttaaaacatggtgcctatatctgagagacctgtgtgaactattgagaagatcggaacagctccttactctgaggaagttgattcttatttgatggtggtattgtgaccactgaattcactccagtcaacagattcagaatgagaatggacgtttggtttttttttgtttttgtttttgttttttcctttataaggttgtctgtttttttttttttaaataattgcatcagttcattgacctcatcattaataagtgaagaatacatcagaaaataaaatattcactctccattagaaaattttgtaaaacaatgccatgaacaaattctttagtactcaatgtttctggacattctctttgataacaaaaaataaattttaaaaaggaa

SEQ ID NO: 135474 - DNA, 727 bp, Homo sapiens
  Payload ID: 6490
  Gene Symbol: FUT8
  Gene Name: fucosyltransferase 8 (alpha (1,6) fucosyltransferase)
  ENST ID: ENST00000553924
  CDS Start-End: 681-727
gcgctctgcctcagtcagtggcgccgaaggctccgttaagcggcggcggcggttcctgtttccgtttcttcctctccgttcggtcgggagtagcatcctccactcagccacccttcccactcccccatcgtggggcagctgcggctgagggctgtggctttggcagctgcgacggggagcggcggagaccgcctctgctcccgcctggggttgctgcttttgctcagaggacatccatgaccctaatggtctttttgttcaagataaagtgattttttgcctttgttgattaactggacaaattcagctccttatttgaccctgaaaatgttgcagtgagaatagcctttgcatgcatagtccttaaccctgaagaaaaggataaaagaaaataaaatcaaaacttagttgaaaatcaggaagtgcggacaagcttctgtcgagaaaatggagcatgtagagcgcatgaagtacaggacaataaagcttcctacacatatcaccaggaggatctctttgaaagattcactgcaggactaccagagagaataatttgtctgaagcatcatgtgttgaaacaacagaagtctattcacctgtgcactaactagaaacagagttacaatgttttcaattctttgagctccaggactccagggaagtgagttgaaaatctgaaaatgcggccatggactggttcctggcgttggattatgctcattctttt

SEQ ID NO: 135475 - DNA, 583 bp, Homo sapiens
  Payload ID: 6490
  Gene Symbol: FUT8
  Gene Name: fucosyltransferase 8 (alpha (1,6) fucosyltransferase)
  ENST ID: ENST00000555559
  CDS Start-End: 462-583
agcccttcggtccactgctctgcatcgcgggcgccgggaattttccgagtccgagcgggttgctgcttttgctcagaggacatccatgaccctaatggtctttttgttcaagataaagtgattttttgcctttgttgattaactggacaaattcagattctattttgaccagcaataagttgaattatggggctagaagataaggactaaaaacaagaattggtgtccagaaagcatgtagagcgcatgaagtacaggacaataaagcttcctacacatatcaccaggaggatctctttgaaagattcactgcaggactaccagagagaataatttgtctgaagcatcatgtgttgaaacaacagaagtctattcacctgtgcactaactagaaacagagttacaatgttttcaattctttgagctccaggactccagggaagtgagttgaaaatctgaaaatgcggccatggactggttcctggcgttggattatgctcattctttttgcctgggggaccttgctgttttatataggtggtcacttggtacgagataatgaccatcctgatcactctagccg

SEQ ID NO: 135476 - DNA, 751 bp, Homo sapiens
  Payload ID: 6490
  Gene Symbol: FUT8
  Gene Name: fucosyltransferase 8 (alpha (1,6) fucosyltransferase)
  ENST ID: ENST00000557338
  CDS Start-End: 600-751
gtcagtggcgccgaaggctccgttaagcggcggcggcggttcctgtttccgtttcttcctctccgttcggtcgggagtagcatcctccactcagccacccttcccactcccccatcgtggggcagctgcggctgagggctgtggctttggcagctgcgacggggagcggcggagaccgcctctgctcccgcctggggttgctgcttttgctcagaggacatccatgaccctaatggtctttttgttcaagataaagtgattttttgcctttgttgattaactggacaaattcagattctattttgaccagcaataagttgaattatggggctagaagataaggactaaaaacaagaattggtgtccagaaagcatgtagagcgcatgaagtacaggacaataaagcttcctacacatatcaccaggaggatctctttgaaagattcactgcaggactaccagagagaataatttgtctgaagcatcatgtgttgaaacaacagaagtctattcacctgtgcactaactagaaacagagttacaatgttttcaattctttgagctccaggactccagggaagtgagttgaaaatctgaaaatgcggccatggactggttcctggcgttggattatgctcattctttttgcctgggggaccttgctgttttatataggtggtcacttggtacgagataatgaccatcctgatcactctagccgagaactgtccaagattctggcaaagcttga

SEQ ID NO: 135477 - DNA, 632 bp, Homo sapiens
  Payload ID: 6490
  Gene Symbol: FUT8
  Gene Name: fucosyltransferase 8 (alpha (1,6) fucosyltransferase)
  ENST ID: ENST00000554667
  CDS Start-End: 494-632
gatgatcctagtagaagtcaaatgagatcatttttgatagttggtttgcaggcttcggtgtatgcacccaacctttcaaagactgcctgtgcttttcagggagctcagttttgtgactgaaaggatcagctattctcttctacctttttaatgcactactggtttctagcagctgctgcttaacgctgttcattcttgagtttggtgaattgttttctgtgctccatgtgatttctttgtctttatgaggtacattttgactacagcatgtagagcgcatgaagtacaggacaataaagcttcctacacatatcaccaggaggatctctttgaaagattcactgcaggactaccagagagaataatttgtctgaagcatcatgtgttgaaacaacagaagtctattcacctgtgcactaactagaaacagagttacaatgttttcaattctttgagctccaggactccagggaagtgagttgaaaatctgaaaatgcggccatggactggttcctggcgttggattatgctcattctttttgcctgggggaccttgctgttttatataggtggtcacttggtacgagataatgaccatcctgatcactctagccgagaactgtccaagattc

SEQ ID NO: 135478 - DNA, 554 bp, Homo sapiens
  Payload ID: 6490
  Gene Symbol: FUT8
  Gene Name: fucosyltransferase 8 (alpha (1,6) fucosyltransferase)
  ENST ID: ENST00000554610
  CDS Start-End: 421-554
agtggcgccgaaggctccgttaagcggcggcggcggttcctgtttccgtttcttcctctccgttcggtcgggagtagcatcctccactcagccacccttcccactcccccatcgtggggcagctgcggctgagggctgtggctttggcagctgcgacggggagcggcggagaccgcctctgctcccgcctgggcatgtagagcgcatgaagtacaggacaataaagcttcctacacatatcaccaggaggatctctttgaaagattcactgcaggactaccagagagaataatttgtctgaagcatcatgtgttgaaacaacagaagtctattcacctgtgcactaactagaaacagagttacaatgttttcaattctttgagctccaggactccagggaagtgagttgaaaatctgaaaatgcggccatggactggttcctggcgttggattatgctcattctttttgcctgggggaccttgctgttttatataggtggtcacttggtacgagataatgaccatcctgatcactctagccgagaactgtccaa

SEQ ID NO: 135479 - DNA, 2269 bp, Homo sapiens
  Payload ID: 6490
  Gene Symbol: FUT8
  Gene Name: fucosyltransferase 8 (alpha (1,6) fucosyltransferase)
  Uniprot ID: Q9BYC5
  ENST ID: ENST00000557164
  CDS Start-End: 505-1743
gtgtgctggggcggcgcgctccggtcctcccgctcagctggcggtctgggctgctctggggcagcccttcggtccactgctctgcatcgcgggcgccgggaattttccgagtccgagcgggttgctgcttttgctcagaggacatccatgaccctaatggtctttttgttcaagataaagtgattttttgcctttgttgattaactggacaaattcaggataccagaaggccctattgatcaggggccagctataggaagagtacgcgttttagaagagcagcttgttaaggccaaagaacagattgaaaattacaagaaacagaccagaaatggtctggggaaggatcatgaaatcctgaggaggaggattgaaaatggagctaaagagctctggtttttcctacagagtgaattgaagaaattaaagaacttagaaggaaatgaactccaaagacatgcagatgaatttcttttggatttaggacatcatgaaaggtctataatgacggatctatactacctcagtcagacagatggagcaggtgattggcgggaaaaagaggccaaagatctgacagaactggttcagcggagaataacatatcttcagaatcccaaggactgcagcaaagccaaaaagctggtgtgtaatatcaacaaaggctgtggctatggctgtcagctccatcatgtggtctactgcttcatgattgcatatggcacccagcgaacactcatcttggaatctcagaattggcgctatgctactggtggatgggagactgtatttaggcctgtaagtgagacatgcacagacagatctggcatctccactggacactggtcaggtgaagtgaaggacaaaaatgttcaagtggtcgagcttcccattgtagacagtcttcatccccgtcctccatatttacccttggctgtaccagaagacctcgcagatcgacttgtacgagtgcatggtgaccctgcagtgtggtgggtgtctcagtttgtcaaatacttgatccgcccacagccttggctagaaaaagaaatagaagaagccaccaagaagcttggcttcaaacatccagttattggagtccatgtcagacgcacagacaaagtgggaacagaagctgccttccatcccattgaagagtacatggtgcatgttgaagaacattttcagcttcttgcacgcagaatgcaagtggacaaaaaaagagtgtatttggccacagatgacccttctttattaaaggaggcaaaaacaaagtaccccaattatgaatttattagtgataactctatttcctggtcagctggactgcacaatcgatacacagaaaattcacttcgtggagtgatcctggatatacattttctctctcaggcagacttcctagtgtgtactttttcatcccaggtctgtcgagttgcttatgaaattatgcaaacactacatcctgatgcctctgcaaacttccattctttagatgacatctactattttgggggccagaatgcccacaatcaaattgccatttatgctcaccaaccccgaactgcagatgaaattcccatggaacctggagatatcattggtgtggctggaaatcattgggatggctattctaaaggtgtcaacaggaaattgggaaggacgggcctatatccctcctacaaagttcgagagaagatagaaacggtcaagtaccccacatatcctgaggctgagaaataaagctcagatggaagagataaacgaccaaactcagttcgaccaaactcagttcaaaccatttcagccaaactgtagatgaagagggctctgatctaacaaaataaggttatatgagtagatactctcagcaccaagagcagctgggaactgacataggcttcaattggtggaattcctctttaacaagggctgcaatgccctcatacccatgcacagtacaataatgtactcacatataacatgcaaacaggttgttttctactttgcccctttcagtatgtccccataagacaaacactgccatattgtgtaatttaagtgacacagacattttgtgtgagacttaaaacatggtgcctatatctgagagacctgtgtgaactattgagaagatcggaacagctccttactctgaggaagttgattcttatttgatggtggtattgtgaccactgaattcactccagtcaacagattcagaatgagaatggacgtttggtttttttttgtttttgtttttgttttt

SEQ ID NO: 135480 - DNA, 639 bp, Homo sapiens
  Payload ID: 6490
  Gene Symbol: FUT8
  Gene Name: fucosyltransferase 8 (alpha (1,6) fucosyltransferase)
  ENST ID: ENST00000556518
  CDS Start-End: 551-639
gcgactactttgtgtgctggggcggcgcgctccggtcctcccgctcagctggcggtctgggctgctctggggcagcccttcggtccactgctctgcatcgcgggcgccgggaattttccgagtccgagcggagacagggtttctctgtgttgcccaggctggtctcgaactctgagctcaagcgacctgcccacctcggccacccaaaatgttgggattacaggggttgctgcttttgctcagaggacatccatgaccctaatggtctttttgttcaagataaagtgattttttgcctttgttgattaactggacaaattcagcatgtagagcgcatgaagtacaggacaataaagcttcctacacatatcaccaggaggatctctttgaaagattcactgcaggactaccagagagaataatttgtctgaagcatcatgtgttgaaacaacagaagtctattcacctgtgcactaactagaaacagagttacaatgttttcaattctttgagctccaggactccagggaagtgagttgaaaatctgaaaatgcggccatggactggttcctggcgttggattatgctcattctttttgcctgggggaccttgctgttttatataggtggtcacttggt

SEQ ID NO: 135481 - DNA, 12783 bp, Homo sapiens
  Payload ID: 6491
  Gene Symbol: FUT9
  Gene Name: fucosyltransferase 9 (alpha (1,3) fucosyltransferase)
  Uniprot ID: Q9Y231
  ENST ID: ENST00000302103
  CDS Start-End: 327-1406
gcagcttcagcgaagccggagatgggcagagagcgcgcgcggcgcagcagctccagattcactgctctcccctgcagctccccgcgcccccgccgctgtcgctgcctcggtgtcccccagccccagtcgcgctcttaggacagcgccgccaccgccgcctggccctgcctgcctcctgcgccgcgcagccctcgcgagcgccccggatggcgctttacccctaggaccgatttagaatgtaataactcaaggatttgataatacagtgaagtagtataacaactgtctacgtgcttcccatgatatgttctctatattgaaaaattatgacatcaacatccaaaggaattcttcgcccatttttaattgtctgcattatcctgggctgtttcatggcatgtcttctcatttacatcaaacctaccaacagctggatcttcagtccaatggaatcagccagctctgtgctgaaaatgaaaaacttcttttccaccaaaactgattattttaatgaaactactattctggtgtgggtgtggccatttgggcagacctttgaccttacatcctgccaagcaatgttcaacatccaaggatgccatctcacaacggaccgttcactgtacaacaaatcccatgcagttctgatccatcaccgagacatcagttgggatctgacaaatttacctcagcaagctaggccacccttccagaaatggatttggatgaatttggaatcaccaactcacactccccaaaagagtggcattgagcacttgtttaacctgactctgacttaccgccgtgattcagatatccaagtgccttatggcttcttgacggtaagcacaaatcccttcgtgtttgaagtgccaagcaaagagaaattggtgtgctgggttgtgagtaactggaaccctgagcatgccagagtcaagtattacaatgagctaagcaaaagcattgaaatccatacctacgggcaagcatttggagaatatgtcaatgataaaaatttgattcctaccatatctacttgtaaattttatctttcctttgaaaattcaatccacaaggattacatcacggaaaagctatacaatgcttttctggctggctctgtacctgttgttctgggaccatctagggaaaactatgagaattatattccagcagattcattcattcatgtggaagattataactctcccagtgagctagcaaagtatctgaaggaagtcgacaaaaacaataagttataccttagttactttaactggaggaaggatttcactgtaaatcttccacgattttgggaatcacatgcatgtttggcttgcgatcatgtgaaaaggcatcaagaatataagtctgttggtaatttagagaaatggttttggaattaaaatttttcatcacttgcacacttgataaatattttgatgagatatcatccaagtattgaggataagaagagatgcaacatactacttttgtgtcacaatttatttttatcaccctctctagggtaacgtgtatattttggtggagatttttaaaagctcagcatgagcaatcattccattcggttttaaattatcctgtatatacctaattatgtgcactggagagtaatttattcttcattatcatttgtaaacattgttttttcacatttttgtagttgtccataatgtaagcttgtggtttgattattgtttccacactgatcagctgtttaatctatttgggaaatgaagatgcacatcttaaagtatgaaaaattttcactaagtattacaatgtctagttccaactttgcatactataacagaggaagaacatgttgcgattgaattctaacctctttgactccgaagatgaatgaagtgtataactgtctctatttgatctattttttttacctgtttatcacatttgtgaaggtgaaattattcatggagtgaataagaaagatatgaagcagaactgttctattcgggaagctattagacttctcatttattttcattaagctgatttgcagctacttattctcatggtcttaaattaaattattcaagtatttttaaatatccaatttgttgtgattttcagcacctgggaagtaatcccaataatactttagaaaatctaagacagttctttctgctactgatgacactcattgtcataataaaacaaataatttcctcaaataacaaagaaaaatgatacctataaatatatttataaatggtgtcatttatgaacaatgtttaattatgtatcaatttaagatttttttctgaagccctaatatttaaaatggtcttattttaccatatggatataagatttggctcataatgatgagccctatcatttgatttgagttctatcatttaagagagcctaaataaaattatcatcaaggtattaaatataagacgttaaatataataaagtggggatatatagaaaacacacagtgttagcacacagtaagatctcaatgcacatttgttggatgaataaataaatgcaattgaattcccagaaaaatgattgtttcaaggaagtgacagttctactttagaagtactaattggagatgacttttatatcccattttggtaattattcatacatagcacatatgaccatgatgttcagggctttatagaaccaaataaacctaccattacatgaaaattttgaagagtatattcctgaacttgcagctgcctatagcattctcctccataaggctagaggagagctggatataagcagagatcgtaggtgaaaaaagatgggccattaaggattcttcaaggaaaacattcctcaaaatgatctttagtgcctttattcctttcaggccaataatccacccaaaaattagaatgttctgagacatccatttgggtctatttgtgacttattcgtattacaaattgacatcagcaaaattcaaaaagaattcagtaaaaagggcatagatccagctatccagactatcttgtgagagaataagctcaccccagcaccagaaagatttgagcagaggaatattcctgtaatgaatagaggattgtttgattctcaggtatatttcttaagccaagattgaatgcagtgtcaggcactgccttaacacccacagagataagatgaacaaggtactatcactgcctaaaatgagcttacaattaagtggatagacatataaaagcttcctttcaattcagcctgagactgtttatatgcatgtgctactccgaatgacgtttgtatgggtcaatgctgatttaatggggaaaaaaagtagaaaatttccccaattgcttagctgtttgacatgtttctgagctgcaaactttgtcaactcttttgacccaacatattattctctccgtattatctcttctaaccacaatgcattaagaaataatatttttatgtggatgtcctcctcaataagtaaagatctccatccatatttaattaattggtaagacagtcaaattcatacatttacatttactttgtcaaattttttggtctataaaaagcatagagatctaaagaggatacactgctaacaagtttagaaagcacctgcttttttttattattattatttttgtgatagagtcttgctctgtcgcccaggccggagtgcagtggtgcagtctcggctcactgcaacctcggcctcccaggttcaagtgattctcctgtatcagcctcccgagtagctaggattacaggcgtgtaccactatgcctggctagtttttgtatttttagtagagatgggtttcactgtgttggccaggctggtcttgaactcctgacctcaaatgatccacttgcctcagcctcccaaagtgctgggattacaggtatgagccactgtgtctggcccacctgttttttttgaaggcagaaaaacattcaatattaaaagcattcaatattatttcaacctgccttggctctagtgaatgttcatgatttgaaagaactgaaagacctaaaggcagtgtctctattgttgactacaaatgtaggctctttgttggactatgactataatcacacactgataatatgacgcaagtagaggcagtactactaagtatctagcaggtgctttgaaaccccattactaagtcccagaagactgtttcctaaatttgaagtggaagaattaaatgactcaatggaaccctttagctgtgggtccattgatgtgtgagttttagagctggaaggaattataattttgttgtttataattgctataatatagaaattataattgcttttctttctacttatgagttaactagatccagagatatttattcaagacacacattcacacacacatacacacacacacacacacaccccacagctagtgacaatagttaagatttggatttaaggatcctatctttctttatcccactttcttttcaatcgcattcataacttattatagaattatgtctcaatttttacaaatgtgaatgtcttattggtatttttagggcctatagaatggtacacctcatgtagaagaacttcgacttttgaaggtatacaataaataaaacatcaaacttgttagcattcgttctggtttaaatattttaggagttgagttcagcagaaggaaatgggctatcactacatttaagtgaaatacaaccctcaagaaagtgtatggttcacagccactcctttaataaatcctgtgggttgcaattctttgtaagaaactcatgaaaaagatatattgattcaacaaaattggtttgctgttgattatacaaaccaataattatgcctagaattaaattgtggacacaaaaaagggaacagaccatttaaaatgttttatttcaaaatatcgaaaagctattaccttcaatactctaaatatttaaatattaattattgtagacatcagtaagaataaataaatgttaatcattatagaccttactaataagaatatatactgaattgtccacatccagagtattacaccctgaacaagaaagacatgagagcctgacagtcatatatattatgacagctgtatatctgacaatatgaagtagaaactgaaaaaaaaaatcatcttagtgggaaacaaatacatgcttaaaattgttatatttactgtaaaactcctgataatcttagattgtgcagaaatgtttcttattttgaggggcttagaaagctcagcgcatttgatgtataaagcaacagaatatttaggaattatttgcggaggctttaaattcttacctccaattggaggttaaatattaaaagaataggaaactatgcctctgatattttttttgtcagcctatttttaaactagattccatgagtcttaaggtaatatcctagaattttttttttgcgtgaattaaagttaccacaaatttcaggtccttaccttatgactgtgtttgatcatatctttgagttcccttgaactctgatctcattttgagaaacattttgagaaacttcttaacaattacaatcgagctgttaaatataacaaacatcagaatctaaaggataagcacagtgcctaatgtacaggagggtcatatcaaatacttgttgaataaatacatgaatgtgataagtggtcctgtaaaatattttttaagagtagtgacaatgtttattggtaccaattggagatgatattttatatttattttgttagtttgtcacctggatgcaaaaggaaggcattttaattcctttctatcttacaacattgtaaagcatcaaaagaagtaacatctcaagaaagattagaaaggatttggatcacgttaacattctatgcaaatattagtaacatatcaactgtttctaaaaggaaagaaaattagtatttaaggagagtataaagtgcgagcactgtgaagggcagatatctattaccaaaccacatggagagaaatatagtctctctcctaacttcattccattgtattgcaatcagtcaattaaggtgattttttttttctggatgtctcaatctagagattttgtagcattttgcaaatgggtatgcttcactactatccacagtgttctcccctttagtaattcatattgaatatatccatattcatatgcattttataaaacagttaacagaatctaaataagatatagccggctaaatctggaatgtgagtgctaccctaggttattagttcaacaaactaattttgagagagccacttaacctctctggaccttgtttgtaagctttcttctagcactattactcttatctaagatcgaaattgatatatgcatgaaattcctaatggaatttcaatgtccatctcaaagtaattttttaggatattccatacagatttccttctcatttctctgtgtagatatttaaagtatgaaattgattatttaaactaatatgtggaaagaacctaatccagagcttggaatatagaaagtgctcaattaactgacattcctcctgtatttcctccctccccttagttgtctatgacttttgaactcactgctcactgacatcttaattgcctgcagaaaaatcaatcatattttaggcattattttgaaatattttagagttttctgtactattcaaactcttattacaaaaatctaaagatatttattgatgcaaaaaatttagggagtcattggaaatacctgaggcaatcccaggctaacaataaaatagcataattttaagtaagctagattgagttcatttgaacatttagttattttttagctcatagttaacatatgtccatgcatttgatttactttaaaaatattttatttaaaaataacctctcaaacaccagttgctttctgtcagttttactcaaagcatgcttcctaggtcacctgacctagaatcaccagaagtgttaacaataccgatttctgggctttgagccatgaaattagaatttcttcaaataatccatgcccccccgtcacccaaaaaaagagcatgcttttaatacatttccaaaattatcctgtttctgctataactggtgaaccatcctgtcctaaactagcagttctcaaacatgcatatgcctttgaaacttcctagatcatctacataaaaatcatttgaaatattgttaataatacacagcttctgaatctctgggtgtgagatgggaccaggaatcttattttaaaaatctccccagatggttctggtgtcctgctagttttgaggttttcatcccacctgtttagatgggtagtattctattaaatatgaggtattacctttctttagttcacctggaatcttcttaaatatatcggtaaagtattctacttcaaaatccaagacattttgtatacctaattatttcacacaagagcgtggaactcaccagtcttgtgacttggggcaggttatttatagtctccagacactttttccagttgcgagttgcttatagtagttcgcgaacctgaatgcacattagaaccatctggagaggctttaaaattgcagatgtccaaaccccacctccagagagctgatctatttagtttgaggaagagcccagaagtctaacaggtgtaaatgttccacaggtaatactaatgcaggcatacctcaggaaatcaccagttctcgtcttggaggaactattaggaaaataaaagattatatatcttgaaaaaaatctctaatttgctttctaggttctaactgcatgtttatattttgcaacaggaaagactggtctagacaattactaggatatatgcttctgtgatctgcttttctattgtatgtgtttaagagaccacattcttgggttccaaagtctccttgtctgataggtaatttgcaattgagatatggcaaagaattgtagcatccaaatttttgacaactacagatttagaattgaatccaaggtctgccattcactagctatgtgcaagttactcaacttctcttatcctcagattttgcagctgtaaagcagaggtagcatatttctgagaaattatattcaggtgactagatatgtgttcaagtgttatcttttattcttataaaagataattgtgaggaatccagtgctattttcacaattttaattctaaaactctgaagacattaaacaggcagtttgtaggaatcattgaaattttatacaagccgaaggaacaacattcagcaaaacggaaacaaataaatacagcatggaagcatatattcatgtttcccataattactaagttacggaaggggtgtgaggagctggcagtggtggtgaataggcattgtttgcattactaaatatatataccatttcttaagataattggaactcaagcagtcctaattttctctccctgttatgagcaatcagtaaatttgtagtcaatttaacttattatcagttggtatagcgcatgtcacagaataggatagcaagaagattctcagagatcattttctggtaaagaaaaaggcctagcaatatttaacagtttgacttaatccatcacttcagctggtccactagttttgacacaggactagttaatgatttgttaggaagtctccatctactcttaaactaatttaaaaaaaagctaaaagttgcttttaatatgttagggtataacttcaataaacaggagtatttatctagtggttcagaaataaaataattgttagccagcctgtgattaaggctaccataattgcataataaatagctttgacgtgaataatctcagttgttcaagtgtacaaatttaaagctgtactatgttagaataaaaaagtaggctcaaggaaaatttctatttttctatatgaaaaagagaatgatattcaaaatagtatttttaagtagtttctaattgtgttcctttaaagagtattagaaatgtctgttatgtcagtaacattagaaaacttcaaaaactgatttatttttctgagttctctggaaaccaaacaattttgaattagttgtgtaagtaaagtaagttaagttatagcttgctggaattttattgtggaaaacaaatatagattttatctgaaaaattttaagggccaattctacagaaagttatgctaacatgctaactttccacacatggctgcattccattttgattaatgagggttcaggaaatagaaaggcagtctctgcagaagcagtatccaaaggctaaattaacaacccaggactaccactcattatgtgagaaatatgggccagagttacaatatcacatctccagtctcagattggcctcattagccaccttcagttccttaaatgagataatcctgaagatgccatccttgtccaaggtgagattgccagaggatatgagctcatctaggatggaatacatgtctccagggactgtaatgagatcaggcttttcatttactggttttctgcctcaagagtccttaagcaaatgaagattatctgattgtctatgtaaacctggaagtagtctactttttagataaaagataatctatcttgaatatttcatatgtgattttaaaataattaatcaaaaaacaaagactatcatatttgagaacaagattttacttagaagggaaaaaaaagaactttcagcttaatcggggttaagggagtaattgtgacaatataaaatggcattgttatagaatccctaaaaggtaaataatgtatgagatgaaggtaggaagtaatgtgtgcttgcagaaatgcaactggtcaaaattacttgaatgaaattgttgaggttaaacatcttcattataataatatgtcttattctgattccaagacaatacgaatgtagagaagagatttttaaatggaaaaagtaaggagctaacaagtctgtacctagattcaagttcacaaagcggcaaaaaggagaaaagtgtcaacaagaaacaagaagaggagtagtaaactaaggatcaaagcccaagttccagttttcacaatctgctgtataattcactaacatttctgagccatagatttttaatctgtaaaaggagtgtgatggactgtacattagaagtacctgagaagctcttaataaatcttgatgaattggttagaaattctaatttaattagcctggcacagtgcacaaactgccatatattcgtgcagatgttttcttcttttcttactgcgcatttccatgtggccatgtcactacaaggggtggggaagaagttaatgtgtaattgcttcaggagctctgaataaaaggttgctgaagcaaaatactgcaatgaagttctgaaaatgaagagttaggactttacatgatttctcttgcctcattccctcaagaatgcacatatagacacacatatgccaatatcttttttatgtagttcaagtataactttgaataaaatgacttacattcaaggaaggtcaaaactattattctgaaacaaaatgtgacaattctagccattatgtgaattgtaagggtcagtaatccataaattatttggatggtaattgtatgttttattaatgtgatgtaattttgcactattgtattgtcatatttaatcaaactcttaaaaataccctgaaacataatgccaaatgtacagtttataggttcgtgttatttctgataagaatttaattgcattgtgctaatagttgtttattgctattaactttctgtgtatgtattattgcgatgcagacccaatagggttattttaagcacactaattagtcatctggatttttatagataaaatcacatgttgatcagaaatcatttttctacttatttttttgtagagtatttttccacacttgaaaaaaacatgattattttatatcaaacatcaacttttctttaaatcttattttagtagctaatgcatgtttgaaataagatgtgttagaaattatatgactatattaaggttgtgtttatattaggtgaaaaattgcatgcaattggtgaatcatgcagctttggggacatttacactgccactcacacacaggctctgtctcaatccgtatgcatgattcacgtcctttcaaaagtcccttttcaacatttggtaaagtgaaaatgttattcatagtgctaatgagccaataaacaatgctgcgtttcttttttctaactgcagcatattgtggtaaattttctcccaaaactttatttttggagttattgttggcaataaatacaacaaattatttgttggcaagtgatacaatttactgtataacaacttaatagtacaaagcatgaagatgtgaaaatatcatcttaaccagtttcattctatgaacataatattctggcagctttttctataactgagaatggtatatctttttatacactgcctaaatcagtactactgccagtcacctgaggtcaggtctgcacaacactaaattgggcaataacatagaacatctaggcagtcttgacagtcaaccagtgtaatcactaggggaagaaaaagtaggcctacccttttacttattaacttaagtaataaaaattgtataaaaatatgaatgttggctgcagaggagcctttacatgcagataatttgaagcagtctttgaaaataacaaaaattattccatttaatgaagggtttgttttgtttagcttttctcttttattcagaaaacatacctgtgcttttgaaagggcttaatcccaaacaggtaatatgtgtggatcaatcatctctcctcccatgaaattaatcattcatggtaatatattaaggctggaacgtagctcttagtgacttaaaacatgacagtaagcatttacactgttggaaggtaatttcattgctatgttattaaaatgatgggaatcctatttatacatttatttatttatttatttacagaagattggttccttccagttcaatttaacagcttcagtgaagttagtataatgataagaaaaattgactgtagctattattccaagtgaaaatcatgcagctgagtcctgctgcatcctgggagcaaagcattaattcaaatgaggagtagtcagtcctagcactgtagacgccgactttaccaaccaagatagtgtatgtgtgtgacattcagctaacattgatctaggcacttagtttgctaccacattgttcccttcattgattgaaactgtaaataacataacactttaaggcagctaagcaaatattttaataagccatgaaaggcaagatgccagagaaaatctgtatattcagctatttggagaactcgtgttttccacaaattaaactggagatgtcatttgaaattttcttcccttaaacatgctgtcacaacatggattccttctcatggatgtctttctaggcttataaatatatggtgtgattgctataattttgtgaaattttattcagcaattaatagtgatttcagcaatatgtactaagattccaaggcagaaataaatgtataaaggatttgagcctgtatgtgtaagaagaaactctctcttcagtcatatttcctaaattcagtgtaagtacctcgctgatttagcactggagttattccttgaatgtgtaaataatgatgttctattctgacctaatgaattcctgtaatgtgaatatttaaaataaaagaattcaatttaaatgta

SEQ ID NO: 135482 - DNA, 7364 bp, Homo sapiens
  Payload ID: 6492
  Gene Symbol: FKTN
  Gene Name: fukutin
  Uniprot ID: O75072
  ENST ID: ENST00000223528
  CDS Start-End: 125-1510
gtaaagcggagcggctgcagcctgctgttgagtgagaaaacaaaattatcttcctttccaaatccaaaaagatgaaaacgactgagatactttcaaaagacaaccaagtgagcagcacagactaatgagtagaatcaataagaacgtggttttggcccttttaacgctgacaagttctgcatttctgctgtttcagttgtactactacaagcactatttatcaacaaagaatggagctggtttgtcaaaatccaaaggaagccgaattggatttgatagcacacagtggcgtgcagttaaaaaatttattatgttaacatccaaccaaaatgtaccagtgtttcttattgatcctttgatactggaattgattaataagaactttgaacaagtcaaaaatacttctcatggctctacttcacaatgcaagtttttctgtgttccaagagactttactgcatttgcactgcagtatcacctatggaagaatgaggaaggctggtttcggatagctgagaatatgggatttcagtgcctaaagattgagagtaaagatccccggctagacgggatagactcactctctggaactgaaatccccctgcactatatctgcaaactggccactcatgcgatccacttggtagtctttcatgagaggagtggcaactacctctggcacggccacttgagacttaaagaacacattgacaggaaatttgttcccttccgaaagttacagtttggtcgttatccaggagcttttgacaggccagagttacagcaagttactgttgatggactggaagttctcattccaaaggatccaatgcactttgtagaagaagtaccacactctaggtttattgagtgtaggtataaagaagctcgagcattctttcagcagtaccttgatgataacactgtggaagctgtggcctttcggaagagtgcaaaggaattactgcaactagcagcgaaaacattaaacaaattgggagtaccattctggctgagcagtggaacttgtctaggatggtatcgacaatgcaacattattccttatagcaaagatgttgacctaggaatttttatacaagattacaaatctgatattattttagcatttcaggatgcaggacttccgctcaaacacaaatttgggaaggtagaagacagcttggaactatccttccagggaaaagatgatgtaaaacttgatgtttttttcttctatgaagaaactgatcacatgtggaatggaggcactcaggccaaaacaggaaaaaaattcaaatacctgtttccgaagtttacactgtgctggactgagtttgtagacatgaaggtccatgtaccctgtgaaaccctcgaatacattgaagccaactatggtaagacctggaagattcctgtaaagacgtgggactggaagcgctctcctcccaatgtgcaacccaatggaatctggcctatttctgagtgggatgaggttatccagttatattgagatagtaggttgaaatgggagaatttctcttttggaaaaaaaggtagataactgtttaaaaaatacatgtctatttgtcaaacataagtgggaaccaaagaaaaaatgtgacaagtttgaagacacagaaagagtcatctgatgtaattctctcacttagtactgaggaattttcatgtgccacatacaatgctaggttacagtggagaagcctagatgaatgagacaaatacctacttcttttattcctccttttggtaaacaactcaattttcctttgagggaaccctcccccaccctttgaagagttcaagttctgtacaggtttttaaaacgtgaagtaatgtttgaactggaagatgagctcaccaggcaaagctaaggaaggatatactagttgaaaagaataacccactcctcttctgggcatttaagctggtatgttagtgctacttttaagattgtggagtctgagttaatattcaagtgatcagactttgagtgacatcaagaaaagatgatatcaggttcatttttcaactaatcttatgtggaattgaattagagaacaaggcattattcttttagggaaggtgagagcttatttgtatcagagcttattacttgtcaggataagtaaatttctgtacatgtactgttttcatatgtgaagtgagaagaaactttatgcttgtttaatgcttaaatttccatccattgtgagaatattttcactgacctctgatggcacttgttgacaaatcattcaagtgagaccatgttactagacatgatcttgaaagaggccatgatttcacaaaactcatttttattttattctcagacagtctgttaggtaaaaatatgagaaattcatgtacattttatattttctgaatttataatctgtgcactcccaattttaatgacactaaaatattaatagaattttttaaatatactctaatttttaaaacatactctttattatcttcatttatcaattacagcttcgtatctctaatttatggtctatataccaatttaaatggcatgtaaacctgcctgtttcttctcctcttctaatatatcagatctccaaaatggaagctaaatggtggacttgacaactattcaccctacctcagatcatagagtttgtaaagtttgtgtccctccccagtttttcagtctgttgaatgtcgatggggcaagaactcagacttctactttaccaagtaccacacactctggaatgctttagtttccttttcccctcaagatgtctgagtcagctaggatgctgtttaccccatctctctcttatatcacttgaatgatatattgtaagtgagaggtaaaggaaaatgtaggcacaataagcactgctatttttctctttgtctaggaaaggaagctgaatcttatatcttatctatgctatttaggactactttctggagcttggcagattttcctctgacaccagagaacaatagtagtctcaagaatggaaacctgaatgtctgagggaatgggctggtagactttttcgaaaacaaattagagaaagtaacttacaaccacccattccggatttgtaaagcaacatgaaaacctttgataaatgataaccaacagtcttctgtcctaatttgcattctcaatgcagaattattgggtctttcataaataacatgagtggtttctggagacatttaagattgtcagcaaacttgtcccaaaatggcacatcatcataatccattttctctttgctagaaaatcagcccatagagtgcattcccaaattctaaatagctgaccctaaattcatttttcatgcttaaaaataatagaacaaataataatactatttttgggcaaaatccaccctacttgatgaggaccatttgcttgtgctcagtatttagaaatgcatacactccacatttctccccatttccaattgggactcccattctttgccaggagatcttacccatcccttttcagattaatcttttatcctttcctgaagtacaaagtcttaagagtgtctgaaatccaagacatcttggcccaattgacacaggttctatattcttccctacatagaccactggctgctgaaatacttttcttgtcttctggtttcacaggcttcagctcatgggttccaccctaacttggggaaacaaaagccttctctagaatctgaaggccaggcttacctctgattctgattcatccatacttcatcttatgtattttaacagttgggttctgtggagtgtccagagaccttgggttaggtatatccatcttcagtacctcattggatcacttttctttcatcacttgagtattctagcagtcattctcctaatctgaccactttcaggtttagtttacctggcttacctggggaagttgacaacttgttggtagttaggcacccatgaatgtctccagagacatcctgagaggcaagattcctcttaattgataaccaggacaaccaggtagtcacccagtcctctctaagcagggagcacttgtccttctctcctctgctgcagctactgatatctggcccctggaataaaaccatagttcctaaaattgagcatccctaagagtagctgcttggtgggacagctgatttctttgattccctagctgcaaaacctgaaattgaccactaggtgacagaatgtttgccagtatccccacaaaacaagttaaaacttaagtgaaaatcattctgcttttgaatcttaaaagctagaaaaaccataatgtaatattctttttaaaccctcttattttataactaaataaataatcacagaaaagaatgatctgaacaagaacagctgaggctaaaacccaagactgccgtgactcctagtccaatgtctgtttcgcatcacaacacagtatctttaacagtgcttgagatgcttaacagagaaggcatccagtgcttcattgaggctaagtctcagggtgtttctgccgcttagtatctttttgttcagattgagaacctaaggcgacagagaggtcaaggggaagtattttctagttcagaattcagaattcttaggcaaccttcatacctttatctggaaaatgccttctctccagacaataagacagttcacatctggagacatcagcctttggtacctaattctctaagctcaagatgcatcccattgccactttaccattctatttcccaagggaaccatcagcaccaacctgctaaatgcctgtatttgaagtctctccccttcctgaagtgaccttttatgaggctctttccttcctaagggacctttccctggtagtagtggtctcattcacaaaaaagaataatagatgtaactggagtcactttgcagttttcaagattttttttttatctgcttggctggaaaggagactagagtatctagtttttagtatttaaactacttttaattatttatattgatactctctgataaatgcaggtagttaagaatagattgtactcattcctttttgagtttgtgacctcaaaccattgtttttattcttacacgactacagtacttcaaatggcacatagataggcaggatattacataggtaagcaggaatttatacattgggtaccagagctaaatctggaaaacacatttggaatgagcttccacacttcagtctaaaatctcacccaaacttatggctacatatttttctaagtttcccccctagtttcactttctggaaagtgaacagttttttaaatcctaaatgttataaatccttaggagaaatattccctcaaaacctagtcaagaaagtgccacattcccaccttctaacaggtaattattagttgtaatagctttaatgcatggaaaaacttcagttactgaccagtcaagagaatttctcaagaaaaatcccagcaacgttccctctttcctccttgtcttccactatcattaagacctgggctagatcacctctaacatctcactcagggaaggcaatgtgttgccataaaaagaccacaagcttttgagttaggcctgaatttgaatttcagcttaatcatgtgggatttatggtgggggccctttcagtctcaatttccacattagtgaactggggaaatgatacatacttctaagggtttttagggggattaaatgaagtatacagttcttagcctcaggcctaggattaagtaagtactcaagaaatgtgcaattttctagttccatgtttcttttctaatcttcaaatggaattatagaaaccatgggtcagaacatattcctttactcaaaagattgcatgactgaatttgcttaagaaaaaaaaaattgtatcaagtcattaatacaattatacattaattatattacattaatacaatatatggtttgtgaattcagagacattaccagtttgcctccttctctcaatagaacttgtattttcattttcttggttaagcagttgtctcctaatattatcccatatgctacctagtttgctggtcccaagcagtttactgtacttcactagatttggtacctgctctcccctggacttctttttcaatattctagcctttcctagatgtaaatctttacctccttgttagtgaaattagatataagccatgatttggagagggaagaaatctggaatacttaatttcatttaattatctatgctgatgaatgcctgtatcattgttaataaaggagaattgaaaatactcatttctactttctgccctcaaatttctgtttctatctcaactaggcaagaatcagcagggtgcatgatgccattttaagctgcttcacatcagactgaaatcctaattacagttcataagtgaaacagactaattcaatggcaataccttttgtataggtcctgtgcttaaaggaggcaagtataaattttctaataagaaatccctgcttcttttgggtgcagtggctcacacctgtaataccagcagtttgagaagctaaggcaggtggatcacttgaggccaggagttcgagaccagcctggccaacatagtgaaaccccgtctcttctaaaaatacaaaaaaattagctgggcatggtggtgcacgcctatagtcccagctacacaggaggctgaggcaggagaatcacttgaacccgggaagcagagtctgcagtgagccaagatcgcggcattgcacttcagcctgggcgatagagcaagactctgtctcagaaaaaaaaaaaaaggaaagaaagaaatctctgcttccgtactatcaaaacttctaccctagaataccccctggcaccttctaacccaacctaatacagagattttgtagggacccattaacaagctcctatataattataagcagctctcacagtagggttgaaagagaatataaggaaaattagaagtactgtatttttgctattggaaatgaaatattgtttcatgcacctttgaaaaaaataacaggattttacagccttctgatgattcattcaaagcatggggaatagttcatatgtttgttaaatgaaaatcttatgtagctatttgtgtgtccctcccacttcataactacaaaaacatatatatgaatttctaaacaaagtgatattttaaagatgaattgattcaatgtgtacttaccagtttactgtgtggttttatcttcaggtacagatagtttgtggtactacttgaaaatacctttaatattattttcatcagaatttgtaatatataatccagtttgggatgatgaataaaatttttctaatctcttga

SEQ ID NO: 135483 - DNA, 2404 bp, Homo sapiens
  Payload ID: 6492
  Gene Symbol: FKTN
  Gene Name: fukutin
  Uniprot ID: O75072
  ENST ID: ENST00000357998
  CDS Start-End: 117-1409
tctttaaaaatatcttttttgttcacagaaaacaaaattatcttcctttccaaatccaaaaagatgaaaacgactgagatactttcaaaagacaaccaagtgagcagcacagactaatgagtagaatcaataagaacgtggttttggcccttttaacgctgacaagttctgcatttctgctgtttcagttgtactactacaagcactatttatcaacaaagaatggagctggtttgtcaaaatccaaaggaagccgaattggatttgatagcacacagtggcgtgcagttaaaaaatttattatgttaacatccaaccaaaatgtaccagtgtttcttattgatcctttgatactggaattgattaataagaactttgaacaagtcaaaaatacttctcatggctctacttcacaatgcaagtttttctgtgttccaagagactttactgcatttgcactgcagtatcacctatggaagaatgaggaaggctggtttcggatagctgagaatatgggatttcagtgcctaaagattgagagtaaagatccccggctagacgggatagactcactctctggaactgaaatccccctgcactatatctgcaaactggccactcatgcgatccacttggtagtctttcatgagaggagtggcaactacctctggcacggccacttgagacttaaagaacacattgacaggaaatttgttcccttccgaaagttacagtttggtcgttatccaggagcttttgacaggccagagttacagcaagttactgttgatggactggaagttctcattccaaaggatccaatgcactttgtagaagaagtaccacactctaggtttattgagtgtaggtataaagaagctcgagcattctttcagcagtaccttgatgataacactgtggaagctgtggcctttcggaagagtgcaaaggaattactgcaactagcagcgaaaacattaaacaaattgggagtaccattctggctgagcagtggaacttgtctaggatggtatcgacaatgcaacattattccttatagcaaagatgttgacctaggaatttttatacaagattacaaatctgatattattttagcatttcaggatgcaggacttccgctcaaacacaaatttgggaaggtagaagacagcttggaactatccttccagggaaaagatgatgtaaaacttgatgtttttttcttctatgaagaaactgatcacatgtggaatggaggcactcaggccaaaacaggaaaaaaattcaaatacctgtttccgaagtttacactgtgctggactgagtttgtagacatgaaggtccatgtaccctgtgaaaccctcgaatacattgaagccaactatggcaagaatcagcagggtgcatgatgccattttaagctgcttcacatcagactgaaatcctaattacagttcataagtgaaacagactaattcaatggcaataccttttgtataggtcctgtgcttaaaggaggcaagtataaattttctaataagaaatccctgcttcttttgggtgcagtggctcacacctgtaataccagcagtttgagaagctaaggcaggtggatcacttgaggccaggagttcgagaccagcctggccaacatagtgaaaccccgtctcttctaaaaatacaaaaaaattagctgggcatggtggtgcacgcctatagtcccagctacacaggaggctgaggcaggagaatcacttgaacccgggaagcagagtctgcagtgagccaagatcgcggcattgcacttcagcctgggcgatagagcaagactctgtctcagaaaaaaaaaaaaaggaaagaaagaaatctctgcttccgtactatcaaaacttctaccctagaataccccctggcaccttctaacccaacctaatacagagattttgtagggacccattaacaagctcctatataattataagcagctctcacagtagggttgaaagagaatataaggaaaattagaagtactgtatttttgctattggaaatgaaatattgtttcatgcacctttgaaaaaaataacaggattttacagccttctgatgattcattcaaagcatggggaatagttcatatgtttgttaaatgaaaatcttatgtagctatttgtgtgtccctcccacttcataactacaaaaacatatatatgaatttctaaacaaagtgatattttaaagatgaattgattcaatgtgtacttaccagtttactgtgtggttttatcttcaggtacagatagtttgtggtactacttgaaaatacctttaatattattttcatcagaatttgtaatatataatccagtttgggatgatgaataaaatttttctaatctcttga

SEQ ID NO: 135484 - DNA, 786 bp, Homo sapiens
  Payload ID: 6492
  Gene Symbol: FKTN
  Gene Name: fukutin
  ENST ID: ENST00000374705
  CDS Start-End: 81-786
cactatttatcaacaaagaatggagctggtttgtcaaaatccaaaggaagccgaattggatttgatagcacacagtggaaatgatccttgaggtgggagaaaataatggatttttttcaaagtctttacttccacggtacgcaagcaaaaagttgaagagcagcttaccacattcacgtgcagttaaaaaatttattatgttaacatccaaccaaaatgtaccagtgtttcttattgatcctttgatactggaattgattaataagaactttgaacaagtcaaaaatacttctcatggctctacttcacaatgcaagtttttctgtgttccaagagactttactgcatttgcactgcagtatcacctatggaagaatgaggaaggctggtttcggatagctgagaatatgggatttcagtgcctaaagattgagagtaaagatccccggctagacgggatagactcactctctggaactgaaatccccctgcactatatctgcaaactggccactcatgcgatccacttggtagtctttcatgagaggagtggcaactacctctggcacggccacttgagacttaaagaacacattgacaggaaatttgttcccttccgaaagttacagtttggtcgttatccaggagcttttgacaggccagagttacagcaagttactgttgatggactggaagttctcattccaaaggatccaatgcactttgtagaagaagtaccacactctaggtttattgagtgtaggtataaagaagctcgagcattct

SEQ ID NO: 135485 - DNA, 1700 bp, Homo sapiens
  Payload ID: 6492
  Gene Symbol: FKTN
  Gene Name: fukutin
  Uniprot ID: O75072
  ENST ID: ENST00000448551
  CDS Start-End: 215-1507
aaagcggagcggctgcagcctgctgttgagtgagattgaaaggaaacacactgaatgaggaaaaactaacatacggtcatcaacatccttgtataacctagtttttaaaaaaattggatttcaaagaaaacaaaattatcttcctttccaaatccaaaaagatgaaaacgactgagatactttcaaaagacaaccaagtgagcagcacagactaatgagtagaatcaataagaacgtggttttggcccttttaacgctgacaagttctgcatttctgctgtttcagttgtactactacaagcactatttatcaacaaagaatggagctggtttgtcaaaatccaaaggaagccgaattggatttgatagcacacagtggcgtgcagttaaaaaatttattatgttaacatccaaccaaaatgtaccagtgtttcttattgatcctttgatactggaattgattaataagaactttgaacaagtcaaaaatacttctcatggctctacttcacaatgcaagtttttctgtgttccaagagactttactgcatttgcactgcagtatcacctatggaagaatgaggaaggctggtttcggatagctgagaatatgggatttcagtgcctaaagattgagagtaaagatccccggctagacgggatagactcactctctggaactgaaatccccctgcactatatctgcaaactggccactcatgcgatccacttggtagtctttcatgagaggagtggcaactacctctggcacggccacttgagacttaaagaacacattgacaggaaatttgttcccttccgaaagttacagtttggtcgttatccaggagcttttgacaggccagagttacagcaagttactgttgatggactggaagttctcattccaaaggatccaatgcactttgtagaagaagtaccacactctaggtttattgagtgtaggtataaagaagctcgagcattctttcagcagtaccttgatgataacactgtggaagctgtggcctttcggaagagtgcaaaggaattactgcaactagcagcgaaaacattaaacaaattgggagtaccattctggctgagcagtggaacttgtctaggatggtatcgacaatgcaacattattccttatagcaaagatgttgacctaggaatttttatacaagattacaaatctgatattattttagcatttcaggatgcaggacttccgctcaaacacaaatttgggaaggtagaagacagcttggaactatccttccagggaaaagatgatgtaaaacttgatgtttttttcttctatgaagaaactgatcacatgtggaatggaggcactcaggccaaaacaggaaaaaaattcaaatacctgtttccgaagtttacactgtgctggactgagtttgtagacatgaaggtccatgtaccctgtgaaaccctcgaatacattgaagccaactatggcaagaatcagcagggtgcatgatgccattttaagctgcttcacatcagactgaaatcctaattacagttcataagtgaaacagactaattcaatggcaataccttttgtataggtcctgtgcttaaaggaggcaagtataaattttctaataagaaatccctgcttcttttgggtgcagtggctcacacctgtaataccagcagtttgagaagct

SEQ ID NO: 135486 - DNA, 606 bp, Homo sapiens
  Payload ID: 6492
  Gene Symbol: FKTN
  Gene Name: fukutin
  ENST ID: ENST00000457847
  CDS Start-End: 1-482
gatggtatcgacaatgcaacattattccttatagcaaagatgttgacctaggaatttttatacaagattacaaatctgatattattttagcatttcaggatgcaggacttccgctcaaacacaaatttgggaaggtagaagacagcttggaactatccttccagggaaaagatgatgtaaaacttgatgtttttttcttctatgaagaaactgatcacatgtggaatggaggcactcaggccaaaacaggaaaaaaattcaaatacctgtttccgaagtttacactgtgctggactgagtttgtagacatgaaggtccatgtaccctgtgaaaccctcgaatacattgaagccaactatggaaaggaagctgaatcttatatcttatctatgctatttaggactactttctggagcttggcagattttcctctgacaccagagaacaatagtagtctcaagaatggaaacctgaatgtctgagggaatgggctggtagactttttcgaaaacaaattagagaaagtaacttacaaccacccattccggatttgtaaagcaacatgaaaacctttgataaatgataaccaacagtcttctgtcctaa

SEQ ID NO: 135487 - DNA, 7036 bp, Homo sapiens
  Payload ID: 6492
  Gene Symbol: FKTN
  Gene Name: fukutin
  ENST ID: ENST00000602526
  CDS Start-End: 33-236
tcaaaagacaaccaagtgagcagcacagactaatgagtagaatcaataagaacgtggttttggcccttttaacgctgacaagttctgcatttctgctgtttcagttgtactactacaagcactatttatcaacaaagaatggagctggtttgtcaaaatccaaaggaagccgaattggatttgatagcacacagtggcatatttcaccttatattgaaaatgttcatctttcttagaagactgcttattgagagcagagaccatatgtgctatttaatcatttgtattttttagcacaatgataagcatggtatctattggcgtgcagttaaaaaatttattatgttaacatccaaccaaaatgtaccagtgtttcttattgatcctttgatactggaattgattaataagaactttgaacaagtcaaaaatacttctcatggctctacttcacaatgcaagtttttctgtgttccaagagactttactgcatttgcactgcagtatcacctatggaagaatgagggtctcactttgtcacccaggcttgagtgcagtggcacaatcttggctcactgcagccttgatctctcaggttcaagtgatcctcctggctcagacccccaagtagctgggactacaggaaggctggtttcggatagctgagaatatgggatttcagtgcctaaagattgagagtaaagatccccggctagacgggatagactcactctctggaactgaaatccccctgcactatatctgcaaactggccactcatgcgatccacttggtagtctttcatgagaggagtggcaactacctctggcacggccacttgagacttaaagaacacattgacaggaaatttgttcccttccgaaagttacagtttggtcgttatccaggagcttttgacaggccagagttacagcaagttactgttgatggactggaagttctcattccaaaggatccaatgcactttgtagaagaagtaccacactctaggtttattgagtgtaggtataaagaagctcgagcattctttcagcagtaccttgatgataacactgtggaagctgtggcctttcggaagagtgcaaaggaattactgcaactagcagcgaaaacattaaacaaattgggagtaccattctggctgagcagtggaacttgtctaggatggtatcgacaatgcaacattattccttatagcaaagatgttgacctaggaatttttatacaagattacaaatctgatattattttagcatttcaggatgcaggacttccgctcaaacacaaatttgggaaggtagaagacagcttggaactatccttccagggaaaagatgatgtaaaacttgatgtttttttcttctatgaagaaactgatcacatgtggaatggaggcactcaggccaaaacaggaaaaaaattcaaatacctgtttccgaagtttacactgtgctggactgagtttgtagacatgaaggtccatgtaccctgtgaaaccctcgaatacattgaagccaactatggtaagacctggaagattcctgtaaagacgtgggactggaagcgctctcctcccaatgtgcaacccaatggaatctggcctatttctgagtgggatgaggttatccagttatattgagatagtaggttgaaatgggagaatttctcttttggaaaaaaaggtagataactgtttaaaaaatacatgtctatttgtcaaacataagtgggaaccaaagaaaaaatgtgacaagtttgaagacacagaaagagtcatctgatgtaattctctcacttagtactgaggaattttcatgtgccacatacaatgctaggttacagtggagaagcctagatgaatgagacaaatacctacttcttttattcctccttttggtaaacaactcaattttcctttgagggaaccctcccccaccctttgaagagttcaagttctgtacaggtttttaaaacgtgaagtaatgtttgaactggaagatgagctcaccaggcaaagctaaggaaggatatactagttgaaaagaataacccactcctcttctgggcatttaagctggtatgttagtgctacttttaagattgtggagtctgagttaatattcaagtgatcagactttgagtgacatcaagaaaagatgatatcaggttcatttttcaactaatcttatgtggaattgaattagagaacaaggcattattcttttagggaaggtgagagcttatttgtatcagagcttattacttgtcaggataagtaaatttctgtacatgtactgttttcatatgtgaagtgagaagaaactttatgcttgtttaatgcttaaatttccatccattgtgagaatattttcactgacctctgatggcacttgttgacaaatcattcaagtgagaccatgttactagacatgatcttgaaagaggccatgatttcacaaaactcatttttattttattctcagacagtctgttaggtaaaaatatgagaaattcatgtacattttatattttctgaatttataatctgtgcactcccaattttaatgacactaaaatattaatagaattttttaaatatactctaatttttaaaacatactctttattatcttcatttatcaattacagcttcgtatctctaatttatggtctatataccaatttaaatggcatgtaaacctgcctgtttcttctcctcttctaatatatcagatctccaaaatggaagctaaatggtggacttgacaactattcaccctacctcagatcatagagtttgtaaagtttgtgtccctccccagtttttcagtctgttgaatgtcgatggggcaagaactcagacttctactttaccaagtaccacacactctggaatgctttagtttccttttcccctcaagatgtctgagtcagctaggatgctgtttaccccatctctctcttatatcacttgaatgatatattgtaagtgagaggtaaaggaaaatgtaggcacaataagcactgctatttttctctttgtctaggaaaggaagctgaatcttatatcttatctatgctatttaggactactttctggagcttggcagattttcctctgacaccagagaacaatagtagtctcaagaatggaaacctgaatgtctgagggaatgggctggtagactttttcgaaaacaaattagagaaagtaacttacaaccacccattccggatttgtaaagcaacatgaaaacctttgataaatgataaccaacagtcttctgtcctaatttgcattctcaatgcagaattattgggtctttcataaataacatgagtggtttctggagacatttaagattgtcagcaaacttgtcccaaaatggcacatcatcataatccattttctctttgctagaaaatcagcccatagagtgcattcccaaattctaaatagctgaccctaaattcatttttcatgcttaaaaataatagaacaaataataatactatttttgggcaaaatccaccctacttgatgaggaccatttgcttgtgctcagtatttagaaatgcatacactccacatttctccccatttccaattgggactcccattctttgccaggagatcttacccatcccttttcagattaatcttttatcctttcctgaagtacaaagtcttaagagtgtctgaaatccaagacatcttggcccaattgacacaggttctatattcttccctacatagaccactggctgctgaaatacttttcttgtcttctggtttcacaggcttcagctcatgggttccaccctaacttggggaaacaaaagccttctctagaatctgaaggccaggcttacctctgattctgattcatccatacttcatcttatgtattttaacagttgggttctgtggagtgtccagagaccttgggttaggtatatccatcttcagtacctcattggatcacttttctttcatcacttgagtattctagcagtcattctcctaatctgaccactttcaggtttagtttacctggcttacctggggaagttgacaacttgttggtagttaggcacccatgaatgtctccagagacatcctgagaggcaagattcctcttaattgataaccaggacaaccaggtagtcacccagtcctctctaagcagggagcacttgtccttctctcctctgctgcagctactgatatctggcccctggaataaaaccatagttcctaaaattgagcatccctaagagtagctgcttggtgggacagctgatttctttgattccctagctgcaaaacctgaaattgaccactaggtgacagaatgtttgccagtatccccacaaaacaagttaaaacttaagtgaaaatcattctgcttttgaatcttaaaagctagaaaaaccataatgtaatattctttttaaaccctcttattttataactaaataaataatcacagaaaagaatgatctgaacaagaacagctgaggctaaaacccaagactgccgtgactcctagtccaatgtctgtttcgcatcacaacacagtatctttaacagtgcttgagatgcttaacagagaaggcatccagtgcttcattgaggctaagtctcagggtgtttctgccgcttagtatctttttgttcagattgagaacctaaggcgacagagaggtcaaggggaagtattttctagttcagaattcagaattcttaggcaaccttcatacctttatctggaaaatgccttctctccagacaataagacagttcacatctggagacatcagcctttggtacctaattctctaagctcaagatgcatcccattgccactttaccattctatttcccaagggaaccatcagcaccaacctgctaaatgcctgtatttgaagtctctccccttcctgaagtgaccttttatgaggctctttccttcctaagggacctttccctggtagtagtggtctcattcacaaaaaagaataatagatgtaactggagtcactttgcagttttcaagattttttttttatctgcttggctggaaaggagactagagtatctagtttttagtatttaaactacttttaattatttatattgatactctctgataaatgcaggtagttaagaatagattgtactcattcctttttgagtttgtgacctcaaaccattgtttttattcttacacgactacagtacttcaaatggcacatagataggcaggatattacataggtaagcaggaatttatacattgggtaccagagctaaatctggaaaacacatttggaatgagcttccacacttcagtctaaaatctcacccaaacttatggctacatatttttctaagtttcccccctagtttcactttctggaaagtgaacagttttttaaatcctaaatgttataaatccttaggagaaatattccctcaaaacctagtcaagaaagtgccacattcccaccttctaacaggtaattattagttgtaatagctttaatgcatggaaaaacttcagttactgaccagtcaagagaatttctcaagaaaaatcccagcaacgttccctctttcctccttgtcttccactatcattaagacctgggctagatcacctctaacatctcactcagggaaggcaatgtgttgccataaaaagaccacaagcttttgagttaggcctgaatttgaatttcagcttaatcatgtgggatttatggtgggggccctttcagtctcaatttccacattagtgaactggggaaatgatacatacttctaagggtttttagggggattaaatgaagtatacagttcttagcctcaggcctaggattaagtaagtactcaagaaatgtgcaattttctagttccatgtttcttttctaatcttcaaatggaattatagaaaccatgggtcagaacatattcctttactcaaaagattgcatgactgaatttgcttaagaaaaaaaaaattgtatcaagtcattaatacaattatacattaattatattacattaatacaatatatggtttgtgaattcagagacattaccagtttgcctccttctctcaatagaacttgtattttcattttcttggttaagcagttgtctcctaatattatcccatatgctacctagtttgctggtcccaagcagtttactgtacttcactagatttggtacctgctctcccctggacttctttttcaatattctagcctttcctagatgtaaatctttacctccttgttagtgaaattagatataagccatgatttggagagggaagaaatctggaatacttaatttcatttaattatctatgctgatgaatgcctgtatcattgttaataaaggagaattgaaaatactcatttctactttctgccctcaaatttctgtttctatctcaactaggcaagaatcagcagggtgcatgatgccattttaagctgcttcacatcagactgaaatcctaattacagttcataagtgaaacagactaattcaatggcaataccttttgtataggtcctgtgcttaaaggaggcaagtataaattttctaataagaaatccctgcttcttttgggtgcagtggctcacacctgtaataccagcagtttgagaagctaaggcaggtggatcacttgaggccaggagttcgagaccagcctggccaacatagtgaaaccccgtctcttctaaaaatacaaaaaaattagctgggcatggtggtgcacgcctatagtcccagctacacaggaggctgaggcaggagaatcacttgaacccgggaagcagagtctgcagtgagccaagatcgcggcattgcacttcagcctgggcgatagagcaagactctgtctcagaaaaaaaaaaaaaggaaagaaagaaatctctgcttccgtactatcaaaacttctaccctagaataccccctggcaccttctaaccc

SEQ ID NO: 135488 - DNA, 2576 bp, Homo sapiens
  Payload ID: 6492
  Gene Symbol: FKTN
  Gene Name: fukutin
  Uniprot ID: O75072
  ENST ID: ENST00000602661
  CDS Start-End: 217-1602
gtaaagcggagcggctgcagcctgctgttgagtgagattgaaaggaaacacactgaatgaggaaaaactaacatacggtcatcaacatccttgtataacctagtttttaaaaaaattggatttcaaagaaaacaaaattatcttcctttccaaatccaaaaagatgaaaacgactgagatactttcaaaagacaaccaagtgagcagcacagactaatgagtagaatcaataagaacgtggttttggcccttttaacgctgacaagttctgcatttctgctgtttcagttgtactactacaagcactatttatcaacaaagaatggagctggtttgtcaaaatccaaaggaagccgaattggatttgatagcacacagtggcgtgcagttaaaaaatttattatgttaacatccaaccaaaatgtaccagtgtttcttattgatcctttgatactggaattgattaataagaactttgaacaagtcaaaaatacttctcatggctctacttcacaatgcaagtttttctgtgttccaagagactttactgcatttgcactgcagtatcacctatggaagaatgaggaaggctggtttcggatagctgagaatatgggatttcagtgcctaaagattgagagtaaagatccccggctagacgggatagactcactctctggaactgaaatccccctgcactatatctgcaaactggccactcatgcgatccacttggtagtctttcatgagaggagtggcaactacctctggcacggccacttgagacttaaagaacacattgacaggaaatttgttcccttccgaaagttacagtttggtcgttatccaggagcttttgacaggccagagttacagcaagttactgttgatggactggaagttctcattccaaaggatccaatgcactttgtagaagaagtaccacactctaggtttattgagtgtaggtataaagaagctcgagcattctttcagcagtaccttgatgataacactgtggaagctgtggcctttcggaagagtgcaaaggaattactgcaactagcagcgaaaacattaaacaaattgggagtaccattctggctgagcagtggaacttgtctaggatggtatcgacaatgcaacattattccttatagcaaagatgttgacctaggaatttttatacaagattacaaatctgatattattttagcatttcaggatgcaggacttccgctcaaacacaaatttgggaaggtagaagacagcttggaactatccttccagggaaaagatgatgtaaaacttgatgtttttttcttctatgaagaaactgatcacatgtggaatggaggcactcaggccaaaacaggaaaaaaattcaaatacctgtttccgaagtttacactgtgctggactgagtttgtagacatgaaggtccatgtaccctgtgaaaccctcgaatacattgaagccaactatggtaagacctggaagattcctgtaaagacgtgggactggaagcgctctcctcccaatgtgcaacccaatggaatctggcctatttctgagtgggatgaggttatccagttatattgagatagtaggttgaaatgggagaatttctcttttggaaaaaaaggtagataactgtttaaaaaatacatgtctatttgtcaaacataagtgggaaccaaagaaaaaatgtgacaagtttgaagacacagaaagagtcatctgatgtaattctctcacttagtactgaggaattttcatgtgccacatacaatgctaggttacagtggagaagcctagatgaatgagacaaatacctacttcttttattcctccttttggtaaacaactcaattttcctttgagggaaccctcccccaccctttgaagagttcaagttctgtacaggtttttaaaacgtgaagtaatgtttgaactggaagatgagctcaccaggcaaagctaaggaaggatatactagttgaaaagaataacccactcctcttctgggcatttaagctggtatgttagtgctacttttaagattgtggagtctgagttaatattcaagtgatcagactttgagtgacatcaagaaaagatgatatcaggttcatttttcaactaatcttatgtggaattgaattagagaacaaggcattattcttttagggaaggtgagagcttatttgtatcagagcttattacttgtcaggataagtaaatttctgtacatgtactgttttcatatgtgaagtgagaagaaactttatgcttgtttaatgcttaaatttccatccattgtgagaatattttcactgacctctgatggcacttgttgacaaatcattcaagtgagaccatgttactagacatgatcttgaaagaggccatgatttcacaaaactcatttttattttattctcagacagtctgttaggtaaaaatatgagaaattcatgtacattttatattttctgaatttataatctgtgcactcccaattttaatgacactaaaatattaatagaattttttaaatatactctaatttttaa

SEQ ID NO: 135489 - DNA, 3332 bp, Homo sapiens
  Payload ID: 6493
  Gene Symbol: FKRP
  Gene Name: fukutin related protein
  Uniprot ID: Q9H9S5
  ENST ID: ENST00000318584
  CDS Start-End: 298-1785
gtcccggcggccattgctccaagatggcggcggcggcggcagcgggagcgcagctcagctgggctggaactgccctcctggaactcccccagcctacaacctaggaggtgcagggactgaggctcaggccaaatcgcaactcagacccagtgaacccaaggcctgaagagaatttggattcatttaccttgttttgtggggactggagagacaagtaaactctcagagtaactgtcccctctgactaccatttctaaggatgccccggaggcccagctagccccagacttcggccccatgcggctcacccgctgccaggctgccctggcggccgccatcaccctcaaccttctggtcctcttctatgtctcgtggctgcagcaccagcctaggaattcccgggcccgggggccccgtcgtgcctctgctgccggcccccgtgtcaccgtcctggtgcgggagttcgaggcatttgacaacgcggtgcccgagctggtagactccttcctgcagcaagacccagcccagcccgtggtggtggcagccgacacgctcccctacccgcccctggccctgccccgcatccccaacgtgcgtctggcgctgctccagcccgccctggaccggccagccgcagcctcgcgcccggagacctacgtggccaccgagtttgtggccctagtacctgatggggcgcgggctgaggcacctggcctgctggagcgcatggtggaggcgctccgcgcaggaagcgcacgtctggtggccgccccggttgccacggccaaccctgccaggtgcctggccctgaacgtcagcctgcgagagtggaccgcccgctatggcgcagcccccgccgcgccccgctgcgacgccctggacggagatgctgtggtgctcctgcgcgcccgcgacctcttcaacctctcggcgcccctggcccggccggtgggcaccagcctctttctgcagaccgcccttcgcggctgggcggtgcagctgctggacttgaccttcgccgcggcgcgccagcccccgctggccacggcccacgcgcgctggaaggctgagcgcgagggacgcgctcggcgggcggcgctgctccgcgcgctgggcatccgcctagtgagctgggaaggcgggcggctggagtggttcggctgcaacaaggagaccacgcgctgcttcggaaccgtggtgggcgacacgcccgcctacctctacgaggagcgctggacgcccccctgctgcctgcgcgcgctgcgcgagaccgcccgctatgtggtgggcgtgctggaggctgcgggcgtgcgctactggctcgagggcggctcactgctgggggccgcccgccacggggacatcatcccatgggactacgacgtggacctgggcatctacttggaggacgtgggcaactgcgagcagctgcggggggcagaggccggctcggtggtggatgagcgcggcttcgtatgggagaaggcggtcgagggcgactttttccgcgtgcagtacagcgaaagcaaccacttgcacgtggacctgtggcccttctacccccgcaatggcgtcatgaccaaggacacgtggctggaccaccggcaggatgtggagtttcccgagcacttcctgcagccgctggtgcccctgccctttgccggcttcgtggcgcaggcgcctaacaactaccgccgcttcctggagctcaagttcgggcccggggtcatcgagaacccccagtaccccaacccggcactgctgagtctgacgggaagcggctgaagccctgataacctcgcctttgtttttcgggggtctgtctggatgtggagaagctctgtgtgagcggtgaggggtggagggatgtcgcggagaggggaagggggaaactgaccaagaaagaaattctaaggagagcatgagagaaggctggcattggcaggaggagagcaccaggacgaggatgggaagcgacctccagatttatcaaatggtcatgcccactgggagccgtggatatgcgtggggacatcctgggtcatctcagtcatggagggagacggggatgtcacgccgtcccgcagggcccagcacagccccagacccgaaaaaagtgttctgcccaagattccgagagccctgcgctctagggcaggggcagagttttggaaacagtgcaggctctggagccagactggcgagattcaaatcctggctctatcgcttcggagccaggtgggcctgggggggcgtcgcagtctctctgtgcctcagttgcttccaggatgcgggacccttggctgcaggggttgcttccgccactagagggcgcgccggtcccgctcctggtggcccactgtggctgcccgggcgacagtacgcccagggcctgtgttccatagccatctactctcttgagcctttggacttctctccaagcccctgtgggaggcggacagcagtgaccacctccccttcttttggactgcgacctccttccctcctgggagagccctgtgacctgcatgctactcttaactgttctattcaagactgaatagaagtatttcagtcttgcagaggaggaaatgctcagagctccgaggtgcggctgtggtcgagaaccgggtgctgggccgggcgcgggggctcacgcctgtaatcccagcactttgggaggccgaggtgggaggatcgcttgagcccaggagtctgagaccagcctcggcaacatgccaagaccccgtctctatttttaaaaaagaaaaagaaccgacttctgaatcgcagctccactcatgactaatacctcattatttcagctgtctgcacctaattccccacttgcacggcagtgtagacaataaccatagctcacactcactgagcacctactgggtaccaggcaccattctcagtgtttcacctggatcaactaatgcgtccctcacctcagccctctgaagtgacagctgctattattttcattacacagatgaaaaagctgaggccagaatcgtgaagtcacttgctcaaggtcaggcagcttaggaaggggcagatcgggggcttgaacccaggtggtcaggctctggagcccacaattgtcttacccactatgcccctctctagtcatggtccccaagaggggcttggagacccacttagcaggtgaaagcaatggcagccttccttatttgattatgcacctaagaataaatggtatttgggcatgtattcccaatatgtgtatatttatttataaatatatacagatactattatctgtatgttagtaataaagcttaaattattccattttaaaatta

SEQ ID NO: 135490 - DNA, 2801 bp, Homo sapiens
  Payload ID: 6493
  Gene Symbol: FKRP
  Gene Name: fukutin related protein
  Uniprot ID: Q9H9S5
  ENST ID: ENST00000391909
  CDS Start-End: 339-1826
cattgctccaagatggcggcggcggcggcagcgggagcgcagctcagctgggctggaactgccctcctggaactcccccagcctacaacctaggaggtgcagggactgaggctcaggccaaatcgcaactcagacccagtgaacccaaggcctgaagagaatttggattcatttaccttgttttgtggggactggagagacaagtaaactctcagagtaactgtcccctctgactaccatttctaaggcaagccccctgtttctactcttgcgccccctgctggtttcctgccctgtctgatgccccggaggcccagctagccccagacttcggccccatgcggctcacccgctgccaggctgccctggcggccgccatcaccctcaaccttctggtcctcttctatgtctcgtggctgcagcaccagcctaggaattcccgggcccgggggccccgtcgtgcctctgctgccggcccccgtgtcaccgtcctggtgcgggagttcgaggcatttgacaacgcggtgcccgagctggtagactccttcctgcagcaagacccagcccagcccgtggtggtggcagccgacacgctcccctacccgcccctggccctgccccgcatccccaacgtgcgtctggcgctgctccagcccgccctggaccggccagccgcagcctcgcgcccggagacctacgtggccaccgagtttgtggccctagtacctgatggggcgcgggctgaggcacctggcctgctggagcgcatggtggaggcgctccgcgcaggaagcgcacgtctggtggccgccccggttgccacggccaaccctgccaggtgcctggccctgaacgtcagcctgcgagagtggaccgcccgctatggcgcagcccccgccgcgccccgctgcgacgccctggacggagatgctgtggtgctcctgcgcgcccgcgacctcttcaacctctcggcgcccctggcccggccggtgggcaccagcctctttctgcagaccgcccttcgcggctgggcggtgcagctgctggacttgaccttcgccgcggcgcgccagcccccgctggccacggcccacgcgcgctggaaggctgagcgcgagggacgcgctcggcgggcggcgctgctccgcgcgctgggcatccgcctagtgagctgggaaggcgggcggctggagtggttcggctgcaacaaggagaccacgcgctgcttcggaaccgtggtgggcgacacgcccgcctacctctacgaggagcgctggacgcccccctgctgcctgcgcgcgctgcgcgagaccgcccgctatgtggtgggcgtgctggaggctgcgggcgtgcgctactggctcgagggcggctcactgctgggggccgcccgccacggggacatcatcccatgggactacgacgtggacctgggcatctacttggaggacgtgggcaactgcgagcagctgcggggggcagaggccggctcggtggtggatgagcgcggcttcgtatgggagaaggcggtcgagggcgactttttccgcgtgcagtacagcgaaagcaaccacttgcacgtggacctgtggcccttctacccccgcaatggcgtcatgaccaaggacacgtggctggaccaccggcaggatgtggagtttcccgagcacttcctgcagccgctggtgcccctgccctttgccggcttcgtggcgcaggcgcctaacaactaccgccgcttcctggagctcaagttcgggcccggggtcatcgagaacccccagtaccccaacccggcactgctgagtctgacgggaagcggctgaagccctgataacctcgcctttgtttttcgggggtctgtctggatgtggagaagctctgtgtgagcggtgaggggtggagggatgtcgcggagaggggaagggggaaactgaccaagaaagaaattctaaggagagcatgagagaaggctggcattggcaggaggagagcaccaggacgaggatgggaagcgacctccagatttatcaaatggtcatgcccactgggagccgtggatatgcgtggggacatcctgggtcatctcagtcatggagggagacggggatgtcacgccgtcccgcagggcccagcacagccccagacccgaaaaaagtgttctgcccaagattccgagagccctgcgctctagggcaggggcagagttttggaaacagtgcaggctctggagccagactggcgagattcaaatcctggctctatcgcttcggagccaggtgggcctgggggggcgtcgcagtctctctgtgcctcagttgcttccaggatgcgggacccttggctgcaggggttgcttccgccactagagggcgcgccggtcccgctcctggtggcccactgtggctgcccgggcgacagtacgcccagggcctgtgttccatagccatctactctcttgagcctttggacttctctccaagcccctgtgggaggcggacagcagtgaccacctccccttcttttggactgcgacctccttccctcctgggagagccctgtgacctgcatgctactcttaactgttctattcaagactgaatagaagtatttcagtcttgcagaggaggaaatgctcagagctccgaggtgcggctgtggtcgagaaccgggtgctgggccgggcgcgggggctcacgcctgtaatcccagcactttgggaggccgaggtgggaggatcgcttgagcccaggagtctgagaccagcctcggcaacatgccaagaccccgtctctattttt

SEQ ID NO: 135491 - DNA, 559 bp, Homo sapiens
  Payload ID: 6493
  Gene Symbol: FKRP
  Gene Name: fukutin related protein
  ENST ID: ENST00000600227
  CDS Start-End: 242-559
attgctccaagatggcggcggcggcggcagcgggagcgcagctcagctgggctggaactgccctcctggaactcccccagcctacaacctaggaggtgcagggactgaggctcaggccaaatcgcaactcagacccagtgaacccaaggcctgaagagaatttggattcatttaccttgttttgtggggactggagagacaagatgccccggaggcccagctagccccagacttcggccccatgcggctcacccgctgccaggctgccctggcggccgccatcaccctcaaccttctggtcctcttctatgtctcgtggctgcagcaccagcctaggaattcccgggcccgggggccccgtcgtgcctctgctgccggcccccgtgtcaccgtcctggtgcgggagttcgaggcatttgacaacgcggtgcccgagctggtagactccttcctgcagcaagacccagcccagcccgtggtggtggcagccgacacgctcccctacccgcccctggccctgccccgcatccccaacgtgcgtctggcgctgctccagccc

SEQ ID NO: 135492 - DNA, 569 bp, Homo sapiens
  Payload ID: 6493
  Gene Symbol: FKRP
  Gene Name: fukutin related protein
  ENST ID: ENST00000596460
  CDS Start-End: 365-569
ttgctccaagatggcggcggcggcggcagcgggagcgcagctcagctgggctggaactgccctcctggaactcccccagcctacaacctaggaggtgcagggactgaggctcaggccaaatcgcaactcagacccagtgaacccaaggcctgaagagaatttggattcatttaccttgttttgtggggactggagagacaagtaaactctcagagtaactgtcccctctgactaccatttctaaggctgagtgcagtggcatgatcatggctcactggctcaagccatccccccacctcagcatcctgagtggctgggaccataggatgccccggaggcccagctagccccagacttcggccccatgcggctcacccgctgccaggctgccctggcggccgccatcaccctcaaccttctggtcctcttctatgtctcgtggctgcagcaccagcctaggaattcccgggcccgggggccccgtcgtgcctctgctgccggcccccgtgtcaccgtcctggtgcgggagttcgaggcatttgacaacgcggtgcccgagctggtagact

SEQ ID NO: 135493 - DNA, 551 bp, Homo sapiens
  Payload ID: 6493
  Gene Symbol: FKRP
  Gene Name: fukutin related protein
  ENST ID: ENST00000600834
  CDS Start-End: 336-551
gagcagccttcccctcgcttccacctttgtggttatggagccccaaacctcttaggactctgcaccaggagaaggttgctaaggagcgcagctcagctgggctggaactgccctcctggaactcccccagcctacaacctaggaggtgcagggactgaggctcaggccaaatcgcaactcagacccagtgaacccaaggcctgaagagaatttggattcatttaccttgttttgtggggactggagagacaagtaaactctcagagtaactgtcccctctgactaccatttctaaggatgccccggaggcccagctagccccagacttcggccccatgcggctcacccgctgccaggctgccctggcggccgccatcaccctcaaccttctggtcctcttctatgtctcgtggctgcagcaccagcctaggaattcccgggcccgggggccccgtcgtgcctctgctgccggcccccgtgtcaccgtcctggtgcgggagttcgaggcatttgacaacgcggtgcccgagctggtagactccttcctgcag

SEQ ID NO: 135494 - DNA, 597 bp, Homo sapiens
  Payload ID: 6493
  Gene Symbol: FKRP
  Gene Name: fukutin related protein
  ENST ID: ENST00000600629
  CDS Start-End: 358-597
attgctccaagatggcggcggcggcggcagcggaggagatgctctgctgaggggcagttgctatggttacagggcctggaccttcctccggaaggtgagaaacaggagcgcagctcagctgggctggaactgccctcctggaactcccccagcctacaacctaggaggtgcagggactgaggctcaggccaaatcgcaactcagacccagtgaacccaaggcctgaagagaatttggattcatttaccttgttttgtggggactggagagacaagtaaactctcagagtaactgtcccctctgactaccatttctaaggatgccccggaggcccagctagccccagacttcggccccatgcggctcacccgctgccaggctgccctggcggccgccatcaccctcaaccttctggtcctcttctatgtctcgtggctgcagcaccagcctaggaattcccgggcccgggggccccgtcgtgcctctgctgccggcccccgtgtcaccgtcctggtgcgggagttcgaggcatttgacaacgcggtgcccgagctggtagactccttcctgcagcaagacccagcccagcccgtggtg

SEQ ID NO: 135495 - DNA, 633 bp, Homo sapiens
  Payload ID: 6493
  Gene Symbol: FKRP
  Gene Name: fukutin related protein
  ENST ID: ENST00000601299
  CDS Start-End: 147-633
gtcccggcggccattgctccaagatggcggcggcggcggcagcgggagcgcagctcagctgggctggaactgccctcctggaactcccccagcctacaacctaggaggatgccccggaggcccagctagccccagacttcggccccatgcggctcacccgctgccaggctgccctggcggccgccatcaccctcaaccttctggtcctcttctatgtctcgtggctgcagcaccagcctaggaattcccgggcccgggggccccgtcgtgcctctgctgccggcccccgtgtcaccgtcctggtgcgggagttcgaggcatttgacaacgcggtgcccgagctggtagactccttcctgcagcaagacccagcccagcccgtggtggtggcagccgacacgctcccctacccgcccctggccctgccccgcatccccaacgtgcgtctggcgctgctccagcccgccctggaccggccagccgcagcctcgcgcccggagacctacgtggccaccgagtttgtggccctagtacctgatggggcgcgggctgaggcacctggcctgctggagcgcatggtggaggcgctccgcgcaggaagcgcacgtctggtggccgccccggttgccacgg

SEQ ID NO: 135496 - DNA, 593 bp, Homo sapiens
  Payload ID: 6493
  Gene Symbol: FKRP
  Gene Name: fukutin related protein
  ENST ID: ENST00000593875
  CDS Start-End: 335-593
cattgctccaagatggcggcggcggcggcagagcgcagctcagctgggctggaactgccctcctggaactcccccagcctacaacctaggaggtgcagggactgaggctcaggccaaatcgcaactcagacccagtgaacccaaggcctgaagagaatttggattcatttaccttgttttgtggggactggagagacaagtaaactctcagagtaactgtcccctctgactaccatttctaaggcaagccccctgtttctactcttgcgccccctgctggtttcctgccctgtctgatgccccggaggcccagctagccccagacttcggccccatgcggctcacccgctgccaggctgccctggcggccgccatcaccctcaaccttctggtcctcttctatgtctcgtggctgcagcaccagcctaggaattcccgggcccgggggccccgtcgtgcctctgctgccggcccccgtgtcaccgtcctggtgcgggagttcgaggcatttgacaacgcggtgcccgagctggtagactccttcctgcagcaagacccagcccagcccgtggtggtggcagccgacacgctcc

SEQ ID NO: 135497 - DNA, 548 bp, Homo sapiens
  Payload ID: 6493
  Gene Symbol: FKRP
  Gene Name: fukutin related protein
  ENST ID: ENST00000600005
  CDS Start-End: 207-548
attgctccaagatggcggcggcggcggcagcggaggagatgctctgctgaggggcagttgctatggttacagggcctggaccttcctccggaaggtgagaaacaggagcgcagctcagctgggctggaactgccctcctggaactcccccagcctacaacctaggaggatgccccggaggcccagctagccccagacttcggccccatgcggctcacccgctgccaggctgccctggcggccgccatcaccctcaaccttctggtcctcttctatgtctcgtggctgcagcaccagcctaggaattcccgggcccgggggccccgtcgtgcctctgctgccggcccccgtgtcaccgtcctggtgcgggagttcgaggcatttgacaacgcggtgcccgagctggtagactccttcctgcagcaagacccagcccagcccgtggtggtggcagccgacacgctcccctacccgcccctggccctgccccgcatccccaacgtgcgtctggcgctgctccagcccgccctggaccggccagccgcagcc

SEQ ID NO: 135498 - DNA, 577 bp, Homo sapiens
  Payload ID: 6493
  Gene Symbol: FKRP
  Gene Name: fukutin related protein
  ENST ID: ENST00000593902
  CDS Start-End: 167-577
tgtttgttttgagacagggtctcacccaggctagagtgaagtggagcaatctcggctcactgcaacctccgcctcctgagttcaagtgattctcacacctcagcctccccaatagctgggattacaggatgccccggaggcccagctagccccagacttcggccccatgcggctcacccgctgccaggctgccctggcggccgccatcaccctcaaccttctggtcctcttctatgtctcgtggctgcagcaccagcctaggaattcccgggcccgggggccccgtcgtgcctctgctgccggcccccgtgtcaccgtcctggtgcgggagttcgaggcatttgacaacgcggtgcccgagctggtagactccttcctgcagcaagacccagcccagcccgtggtggtggcagccgacacgctcccctacccgcccctggccctgccccgcatccccaacgtgcgtctggcgctgctccagcccgccctggaccggccagccgcagcctcgcgcccggagacctacgtggccaccgagtttgtggccctagtacctgatggggcgcgggctgaggca

SEQ ID NO: 135499 - DNA, 583 bp, Homo sapiens
  Payload ID: 6493
  Gene Symbol: FKRP
  Gene Name: fukutin related protein
  ENST ID: ENST00000595570
  CDS Start-End: 400-583
ggccattgctccaagatggcggcggcggcggcagcgggagcgcagctcagctgggctggaactgccctcctggaactcccccagcctacaacctaggaggtgcagggactgaggctcaggccaaatcgcaactcagacccagtgaacccaaggcctgaagagaatttggattcatttaccttgttttgtggggactggagagacaagtaaactctcagagtaactgtcccctctgactaccatttctaagggtctcacccaggctagagtgaagtggagcaatctcggctcactgcaacctccgcctcctgagttcaagtgattctcacacctcagcctccccaatagctgggattacaggatgccccggaggcccagctagccccagacttcggccccatgcggctcacccgctgccaggctgccctggcggccgccatcaccctcaaccttctggtcctcttctatgtctcgtggctgcagcaccagcctaggaattcccgggcccgggggccccgtcgtgcctctgctgccggcccccgtgtcaccgtcctggtgcgggagttcgaggcatttgacaacg

SEQ ID NO: 135500 - DNA, 592 bp, Homo sapiens
  Payload ID: 6493
  Gene Symbol: FKRP
  Gene Name: fukutin related protein
  ENST ID: ENST00000598271
  CDS Start-End: 506-592
cattgctccaagatggcggcggcggcggcagcgggagcgcagctcagctgggctggaactgccctcctggaactcccccagcctacaacctaggaggtgcagggactgaggctcaggccaaatcgcaactcagacccagtgaacccaaggcctgaagagaatttggattcatttaccttgttttgtggggactggagagacaagtaaactctcagagtaactgtcccctctgactaccatttctaaggcaagccccctgtttctactcttgcgccccctgctggtttcctgccctgtctgtaagttgcatggcttttgtccgtcttttttttgtttgtttgtttgttttgagacagggtctcacccaggctagagtgaagtggagcaatctcggctcactgcaacctccgcctcctgagttcaagtgattctcacacctcagcctccccaatagctgggattacaggatgccccggaggcccagctagccccagacttcggccccatgcggctcacccgctgccaggctgccctggcggccgccatcaccctcaaccttctggtcctcttctatgtctcgtggctgcagcac

SEQ ID NO: 135501 - DNA, 591 bp, Homo sapiens
  Payload ID: 6493
  Gene Symbol: FKRP
  Gene Name: fukutin related protein
  ENST ID: ENST00000593800
  CDS Start-End: 289-591
attgctccaagatggcggcggcggcggcagcggtaaagacggggtttctccatgttggtcacgctggtcttgaactcccgacctcaggtgatctgcctcaggcccgcctcggcctcccaaagtgctgggattacaggtgtgagccatcacgcccggccaggggatgttttaagaatgtctctcagaggagcgcagctcagctgggctggaactgccctcctggaactcccccagcctacaacctaggaggatgccccggaggcccagctagccccagacttcggccccatgcggctcacccgctgccaggctgccctggcggccgccatcaccctcaaccttctggtcctcttctatgtctcgtggctgcagcaccagcctaggaattcccgggcccgggggccccgtcgtgcctctgctgccggcccccgtgtcaccgtcctggtgcgggagttcgaggcatttgacaacgcggtgcccgagctggtagactccttcctgcagcaagacccagcccagcccgtggtggtggcagccgacacgctcccctacccgcccctggccctgccccgcatccccaacgtgcgtctg

SEQ ID NO: 135502 - DNA, 556 bp, Homo sapiens
  Payload ID: 6493
  Gene Symbol: FKRP
  Gene Name: fukutin related protein
  ENST ID: ENST00000595868
  CDS Start-End: 347-556
attgctccaagatggcggcggcggcggcagcggaggagatgctctgctgaggggcagttgctatggttacagggcctggaccttcctccggaaggagcgcagctcagctgggctggaactgccctcctggaactcccccagcctacaacctaggaggtgcagggactgaggctcaggccaaatcgcaactcagacccagtgaacccaaggcctgaagagaatttggattcatttaccttgttttgtggggactggagagacaagtaaactctcagagtaactgtcccctctgactaccatttctaaggatgccccggaggcccagctagccccagacttcggccccatgcggctcacccgctgccaggctgccctggcggccgccatcaccctcaaccttctggtcctcttctatgtctcgtggctgcagcaccagcctaggaattcccgggcccgggggccccgtcgtgcctctgctgccggcccccgtgtcaccgtcctggtgcgggagttcgaggcatttgacaacgcggtgcccgagctggtagactccttc

SEQ ID NO: 135503 - DNA, 545 bp, Homo sapiens
  Payload ID: 6493
  Gene Symbol: FKRP
  Gene Name: fukutin related protein
  ENST ID: ENST00000594467
  CDS Start-End: 441-545
attgctccaagatggcggcggcggcggcagcgggagcgcagctcagctgggctggaactgccctcctggaactcccccagcctacaacctaggagcaccagcctaggaattcccgggcccgggggccccgtcgtgcctctgctgccggcccccgtgtcaccgtcctggtgcgggagttcgaggcatttgacaacgcggtgcccgagctggtagactccttcctgcagcaagacccagcccagcccgtggtggtggcagccgacacgctcccctacccgcccctggccctgccccgcatccccaacgtgcgtctggcgctgctccagcccgccctggaccggccagccgcagcctcgcgcccggagacctacgtggccaccgagtttgtggccctagtacctgatggggcgcgggctgaggcacctggcctgctggagcgcatggtggaggcgctccgcgcaggaagcgcacgtctggtggccgccccggttgccacggccaaccctgccaggtgcctggccctgaacgtcagcctgcgagagtgg

SEQ ID NO: 135504 - DNA, 584 bp, Homo sapiens
  Payload ID: 6493
  Gene Symbol: FKRP
  Gene Name: fukutin related protein
  ENST ID: ENST00000597313
  CDS Start-End: 406-584
cattgctccaagatggcggcggcggcggcagcgggagcgcagctcagctgggctggaactgccctcctggaactcccccagcctacaacctaggaggtgcagggactgaggctcaggccaaatcgcaactcagacccagtgaacccaaggcctgaagagaatttggattcatttaccttgttttgtggggactggagagacaagtaaactctcagagtaactgtcccctctgactaccatttctaaggcaagccccctgtttctactcttgcgccccctgctggtttcctgccctgtctgttggtctcgaactcctggactcaagtgatcctcctgccttggcctcccaaattgctgggatcacaggatgccccggaggcccagctagccccagacttcggccccatgcggctcacccgctgccaggctgccctggcggccgccatcaccctcaaccttctggtcctcttctatgtctcgtggctgcagcaccagcctaggaattcccgggcccgggggccccgtcgtgcctctgctgccggcccccgtgtcaccgtcctggtgcgggagttcgaggcatttga

SEQ ID NO: 135505 - DNA, 569 bp, Homo sapiens
  Payload ID: 6493
  Gene Symbol: FKRP
  Gene Name: fukutin related protein
  ENST ID: ENST00000602250
  CDS Start-End: 410-569
attgctccaagatggcggcggcggcggcagcggaggagatgctctgctgaggggcagttgctatggttacagggcctggaccttcctccggaaggtgagaaacaggagcgcagctcagctgggctggaactgccctcctggaactcccccagcctacaacctaggaggtgcagggactgaggctcaggccaaatcgcaactcagacccagtgaacccaaggcctgaagagaatttggattcatttaccttgttttgtggggactggagagacaagtaaactctcagagtaactgtcccctctgactaccatttctaaggcaagccccctgtttctactcttgcgccccctgctggtttcctgccctgtctgatgccccggaggcccagctagccccagacttcggccccatgcggctcacccgctgccaggctgccctggcggccgccatcaccctcaaccttctggtcctcttctatgtctcgtggctgcagcaccagcctaggaattcccgggcccgggggccccgtcgtgcctctgctgccggcccccgtgtcaccgtcctggtgc

SEQ ID NO: 135506 - DNA, 633 bp, Homo sapiens
  Payload ID: 6493
  Gene Symbol: FKRP
  Gene Name: fukutin related protein
  ENST ID: ENST00000593877
  CDS Start-End: 621-633
ctcccaaagtgctgggattacaggtgtgagccatcacgcccggccaggggatgttttaagaatgtctctcagaggtagagtgtgtctatggaaggggttgtcatggtaacagcttctgttggcttctagccctaccttttctggacacattcatgctagagggatggttataggttgctataataactgacatccctcccattcaccccaccccactcctgagacaccccaggtggtgcccgagattataggacttcaagagaaaggattccctgacctttctcttgccacttttgtggataagatgaaattgtgctctattgtacggaaatggctgatttgggattttctggttctcctcctctcaggagcgcagctcagctgggctggaactgccctcctggaactcccccagcctacaacctaggaggtgcagggactgaggctcaggccaaatcgcaactcagacccagtgaacccaaggcctgaagagaatttggattcatttaccttgttttgtggggactggagagacaagtaaactctcagagtaactgtcccctctgactaccatttctaaggatgccccggaggcccagctagccccagacttcggccccatgcggctcaccc

SEQ ID NO: 135507 - DNA, 482 bp, Homo sapiens
  Payload ID: 6493
  Gene Symbol: FKRP
  Gene Name: fukutin related protein
  ENST ID: ENST00000602181
  CDS Start-End: 196-482
attgctccaagatggcggcggcggcggcagcggaggagatgctctgctgaggggcagttgctatggttacagggcctggaccttcctccggaaggagcgcagctcagctgggctggaactgccctcctggaactcccccagcctacaacctaggaggatgccccggaggcccagctagccccagacttcggccccatgcggctcacccgctgccaggctgccctggcggccgccatcaccctcaaccttctggtcctcttctatgtctcgtggctgcagcaccagcctaggaattcccgggcccgggggccccgtcgtgcctctgctgccggcccccgtgtcaccgtcctggtgcgggagttcgaggcatttgacaacgcggtgcccgagctggtagactccttcctgcagcaagacccagcccagcccgtggtggtggcagccgacacgctcccctacccgcccctggccctgccccgcat

SEQ ID NO: 135508 - DNA, 1797 bp, Homo sapiens
  Payload ID: 6494
  Gene Symbol: FH
  Gene Name: fumarate hydratase
  Uniprot ID: P07954
  ENST ID: ENST00000366560
  CDS Start-End: 40-1572
acagccgcccagaaattctacccaagctccctcagcaccatgtaccgagcacttcggctcctcgcgcgctcgcgtcccctcgtgcgggctccagccgcagccttagcttcggctcccggcttgggtggcgcggccgtgccctcgttttggcctccgaacgcggctcgaatggcaagccaaaattccttccggatagaatatgatacctttggtgaactaaaggtgccaaatgataagtattatggcgcccagaccgtgagatctacgatgaactttaagattggaggtgtgacagaacgcatgccaaccccagttattaaagcttttggcatcttgaagcgagcggccgctgaagtaaaccaggattatggtcttgatccaaagattgctaatgcaataatgaaggcagcagatgaggtagctgaaggtaaattaaatgatcattttcctctcgtggtatggcagactggatcaggaactcagacaaatatgaatgtaaatgaagtcattagcaatagagcaattgaaatgttaggaggtgaacttggcagcaagatacctgtgcatcccaacgatcatgttaataaaagccagagctcaaatgatacttttcccacagcaatgcacattgctgctgcaatagaagttcatgaagtactgttaccaggactacagaagttacatgatgctcttgatgcaaaatccaaagagtttgcacagatcatcaagattggacgtactcatactcaggatgctgttccacttactcttgggcaggaatttagtggttatgttcaacaagtaaaatatgcaatgacaagaataaaagctgccatgccaagaatctatgagctcgcagctggaggcactgctgttggtacaggtttaaatactagaattggctttgcagaaaaggttgctgcaaaagtggctgcacttacaggcttgccttttgtcactgctccgaataaatttgaagctctggctgctcatgacgctctggttgagctcagtggagccatgaacactactgcctgcagtctgatgaagatagcaaatgatattcgatttttgggttctggtcctcggtcaggtctgggagaattgatcttgcctgaaaatgaaccaggaagcagtatcatgccaggcaaggtgaaccctactcagtgtgaagcaatgaccatggttgcagcccaagtcatggggaaccatgttgctgtcactgtcggaggcagcaatggacattttgagttgaatgttttcaagccaatgatgattaaaaatgtgttacactcagccaggctgctgggggatgcttcagtttcctttacagaaaactgcgtggtgggaatccaggccaatacagaaaggatcaacaagctgatgaatgagtctctaatgttggtgacagctctcaatcctcatatagggtatgacaaggcagcaaagattgctaagacagcacacaaaaatggatcaaccttaaaggaaactgctatcgaacttggctatctcacagcagagcagtttgacgaatgggtaaaacctaaggacatgctgggtccaaagtgatttacataaatttataatgaaaataaacatgtataaaatttaaaaaaacagactcccatttcttaaaaacggataagtttgaaaggaaactgctattgaacttaagcatctctagcagagcaatttgatcagtatataaaaccctaggatgtgctaggtctaagatggattaaacaagtataaaataaaatacatttataaaataaaaaggaaaacagacttaaa

SEQ ID NO: 135509 - DNA, 1471 bp, Homo sapiens
  Payload ID: 6495
  Gene Symbol: FAH
  Gene Name: fumarylacetoacetate hydrolase (fumarylacetoacetase)
  Uniprot ID: P16930
  ENST ID: ENST00000261755
  CDS Start-End: 78-1337
ggaagggcgggcgagactgtggaggacctggagctggcgggggtcagggcccgcagccgtgccgggtgctcttcagcatgtccttcatcccggtggccgaggattccgacttccccatccacaacctgccctacggcgtcttctcgaccagaggcgacccaagaccgaggataggtgtggccattggcgaccagatcctggacctcagcatcatcaagcacctctttactggtcctgtcctctccaaacaccaggatgtcttcaatcagcctacactcaacagcttcatgggcctgggtcaggctgcctggaaggaggcgagagtgttcttgcagaacttgctgtctgtgagccaagccaggctcagagatgacaccgaacttcggaagtgtgcattcatctcccaggcttctgccacgatgcaccttccagccaccataggagactacacagacttctattcctctcggcagcatgctaccaacgtcggaatcatgttcagggacaaggagaatgcgttgatgccaaattggctgcacttaccagtgggctaccatggccgtgcctcctctgtcgtggtgtctggcaccccaatccgaaggcccatgggacagatgaaacctgatgactctaagcctcccgtatatggtgcctgcaagctcttggacatggagctggaaatggctttttttgtaggccctggaaacagattgggagagccgatccccatttccaaggcccatgagcacatttttggaatggtccttatgaacgactggagtgcacgagacattcagaagtgggagtatgtccctctcgggccattccttgggaagagttttgggaccactgtctctccgtgggtggtgcccatggatgctctcatgccctttgctgtgcccaacccgaagcaggaccccaggcccctgccgtatctgtgccatgacgagccctacacatttgacatcaacctctctgttaacctgaaaggagaaggaatgagccaggcggctaccatatgcaagtccaattttaagtacatgtactggacgatgctgcagcagctcactcaccactctgtcaacggctgcaacctgcggccgggggacctcctggcttctgggaccatcagcgggccggagccagaaaacttcggctccatgttggaactgtcgtggaagggaacgaagcccatagacctggggaatggtcagaccaggaagtttctgctggacggggatgaagtcatcataacagggtactgccagggggatggttaccgcatcggctttggccagtgtgctggaaaagtgctgcctgctctcctgccatcatgagattttctctgctcttctggaaacaaagggctcaagcacccctttcaaccctgtgactggggtcctccctcgggctgtaggcctggtccgccattcagtgacaaataaagccattgtgctctgaggcctgcact

SEQ ID NO: 135510 - DNA, 2152 bp, Homo sapiens
  Payload ID: 6495
  Gene Symbol: FAH
  Gene Name: fumarylacetoacetate hydrolase (fumarylacetoacetase)
  Uniprot ID: P16930
  ENST ID: ENST00000407106
  CDS Start-End: 156-1415
cggggcggggctctggaagggcgggcgagactgtggaggacctggagctggcgggggtcagggtaggggggaggggcagggctcggggttcgggggcggggtgttcacggtgagaccaaaagtcaggcccgcagccgtgccgggtgctcttcagcatgtccttcatcccggtggccgaggattccgacttccccatccacaacctgccctacggcgtcttctcgaccagaggcgacccaagaccgaggataggtgtggccattggcgaccagatcctggacctcagcatcatcaagcacctctttactggtcctgtcctctccaaacaccaggatgtcttcaatcagcctacactcaacagcttcatgggcctgggtcaggctgcctggaaggaggcgagagtgttcttgcagaacttgctgtctgtgagccaagccaggctcagagatgacaccgaacttcggaagtgtgcattcatctcccaggcttctgccacgatgcaccttccagccaccataggagactacacagacttctattcctctcggcagcatgctaccaacgtcggaatcatgttcagggacaaggagaatgcgttgatgccaaattggctgcacttaccagtgggctaccatggccgtgcctcctctgtcgtggtgtctggcaccccaatccgaaggcccatgggacagatgaaacctgatgactctaagcctcccgtatatggtgcctgcaagctcttggacatggagctggaaatggctttttttgtaggccctggaaacagattgggagagccgatccccatttccaaggcccatgagcacatttttggaatggtccttatgaacgactggagtgcacgagacattcagaagtgggagtatgtccctctcgggccattccttgggaagagttttgggaccactgtctctccgtgggtggtgcccatggatgctctcatgccctttgctgtgcccaacccgaagcaggaccccaggcccctgccgtatctgtgccatgacgagccctacacatttgacatcaacctctctgttaacctgaaaggagaaggaatgagccaggcggctaccatatgcaagtccaattttaagtacatgtactggacgatgctgcagcagctcactcaccactctgtcaacggctgcaacctgcggccgggggacctcctggcttctgggaccatcagcgggccggagccagaaaacttcggctccatgttggaactgtcgtggaagggaacgaagcccatagacctggggaatggtcagaccaggaagtttctgctggacggggatgaagtcatcataacagggtactgccagggggatggttaccgcatcggctttggccagtgtgctggaaaagtgctgcctgctctcctgccatcatgagattttctctgctcttctggaaacaaagggctcaagcacccctttcaaccctgtgactggggtcctccctcgggctgtaggcctggtccgccattcagtgacaaataaagccattgtgctctgaggcctgcactgccgcagatgcagctgtgtccacttatgatcgtgatttgatccagtgggtcaaggtgtgtaaagcctccctgccagatattcattaatatgttttctcactcttattagtgaggtcaggggtctttgtgggattttcttattagacatcccaggcctcctggtattccatggaatttgaaaagagactggcacctgtagtagtcagggctctccagagaaatagaaccaaggagaaagagatcgatttattgattgattgattgattttaagcaaattggcttctgggattctggagggtggcaagcccaaaacctgctgggtgggttgctggctggagacccaaggaagagctgcagtttgagtctgaagcagtctgctgtcaaaatttcctcttcctctgggaagtgagtcattgtttggtgaaggccatcaactgattagatgaggcccagccacactgtgggggtcttctgctttactccactgatttaagttttatttcacctaaaaagtactttcttagaaacatgtagaatagcatttgagcaaatatttgggtaccttagtctagccaaattaatacagaaaactgcccatcaca

SEQ ID NO: 135511 - DNA, 568 bp, Homo sapiens
  Payload ID: 6495
  Gene Symbol: FAH
  Gene Name: fumarylacetoacetate hydrolase (fumarylacetoacetase)
  ENST ID: ENST00000558022
  CDS Start-End: 86-568
aggggaggggcggggctcggggagtgaggcaagactggagggcctgggactctcgggcccgcagccgtgccgggtgctcttcagcatgtccttcatcccggtggccgaggattccgacttccccatccacaacctgccctacggcgtcttctcgaccagaggcgacccaagaccgaggataggtgtggccattggcgaccagatcctggacctcagcatcatcaagcacctctttactggtcctgtcctctccaaacaccaggatgtcttcaatcagcctacactcaacagcttcatgggcctgggtcaggctgcctggaaggaggcgagagtgttcttgcagaacttgctgtctgtgagccaagccaggctcagagatgacaccgaacttcggaagtgtgcattcatctcccaggcttctgccacgatgcaccttccagccaccataggagactacacagacttctattcctctcggcagcatgctaccaacgtcggaatcatgttcagggacaaggagaatgcgttgatgccaaattggctgcacttaccagtgggctaccatggc

SEQ ID NO: 135512 - DNA, 1549 bp, Homo sapiens
  Payload ID: 6495
  Gene Symbol: FAH
  Gene Name: fumarylacetoacetate hydrolase (fumarylacetoacetase)
  Uniprot ID: P16930
  ENST ID: ENST00000561421
  CDS Start-End: 159-1418
aaaagtcaggtaggagcctccggggtccctgctgtgtcacccggacaggccgtgggggcgggcaggggggcggggccgggcctgaccacagcggccgagttcagtcctgctctccgcacgccaccttaggcccgcagccgtgccgggtgctcttcagcatgtccttcatcccggtggccgaggattccgacttccccatccacaacctgccctacggcgtcttctcgaccagaggcgacccaagaccgaggataggtgtggccattggcgaccagatcctggacctcagcatcatcaagcacctctttactggtcctgtcctctccaaacaccaggatgtcttcaatcagcctacactcaacagcttcatgggcctgggtcaggctgcctggaaggaggcgagagtgttcttgcagaacttgctgtctgtgagccaagccaggctcagagatgacaccgaacttcggaagtgtgcattcatctcccaggcttctgccacgatgcaccttccagccaccataggagactacacagacttctattcctctcggcagcatgctaccaacgtcggaatcatgttcagggacaaggagaatgcgttgatgccaaattggctgcacttaccagtgggctaccatggccgtgcctcctctgtcgtggtgtctggcaccccaatccgaaggcccatgggacagatgaaacctgatgactctaagcctcccgtatatggtgcctgcaagctcttggacatggagctggaaatggctttttttgtaggccctggaaacagattgggagagccgatccccatttccaaggcccatgagcacatttttggaatggtccttatgaacgactggagtgcacgagacattcagaagtgggagtatgtccctctcgggccattccttgggaagagttttgggaccactgtctctccgtgggtggtgcccatggatgctctcatgccctttgctgtgcccaacccgaagcaggaccccaggcccctgccgtatctgtgccatgacgagccctacacatttgacatcaacctctctgttaacctgaaaggagaaggaatgagccaggcggctaccatatgcaagtccaattttaagtacatgtactggacgatgctgcagcagctcactcaccactctgtcaacggctgcaacctgcggccgggggacctcctggcttctgggaccatcagcgggccggagccagaaaacttcggctccatgttggaactgtcgtggaagggaacgaagcccatagacctggggaatggtcagaccaggaagtttctgctggacggggatgaagtcatcataacagggtactgccagggggatggttaccgcatcggctttggccagtgtgctggaaaagtgctgcctgctctcctgccatcatgagattttctctgctcttctggaaacaaagggctcaagcacccctttcaaccctgtgactggggtcctccctcgggctgtaggcctggtccgccattcagtgacaaataaagccattgtgctctgaggcctgc

SEQ ID NO: 135513 - DNA, 3427 bp, Homo sapiens
  Payload ID: 6495
  Gene Symbol: FAH
  Gene Name: fumarylacetoacetate hydrolase (fumarylacetoacetase)
  Uniprot ID: P16930
  ENST ID: ENST00000539156
  CDS Start-End: 2239-3288
gaacatgaaagtggacaaggagcgtgaccattgaagcacagcaccacagggaggggtttaggcctccagatgactgcgggcaggcctggataatatccagcctcctacaggaagctggtggagcagagtgttccctgactcctccaaggaaagggagactcccttttgcggtctgctaagtaatgggtgccttcccaggcactggcgttaccgcttgaccaaggagcgctcaagcggcccttatgcgggtgtgacagggctcacctcttgccttctaggtcacttctcagaatgtcccttcagtacctgaccctatacccaccggttattcctaggttatattgtactacaataaagagtaatattaaaaactaatgattaataatgtttatactaataatcgataattgtccatgatcatctgtatatctaatttgtattacaactgtatagcagtatagctacagtttatgccttcagtctcttgcctcggcacctgggtaatccttcgcccacaccaatcccatgcttccccctctatgtcaggctgggagttgggtaatgctttcctttggacaactttatatcagatatgaccaactattttaaaacaaaggcaatgcacattcattctcttgaagttagacaaatgcggtctccctccttagtttgtttccctcaagttgcagatgggaaactgaggcccagagacttgtccaaggtgataagatggtgaatgagggagcagacttggagcccaggaatcctggatctgacctgtgagccccctctagttttgtgctgaagaaaataactcccaaggttgaaagtagagggactcactctctcagactttttctgggtcctcaggtcatagtttgaagcacaagtttgaagcttctaggctttgtttgcatttgaggcagcaggcagctgcacttgtgaccccattttggaagttgcttactggtggtgactccttcttgccttcagctggggtgtggggaccagggtcagagatgtggtccaagggtctgccctgcacattccctgaatggaaagccacttggattcaggtggttcagctctttgcctaaagcagatttgccattttcaggaggggaagactgaggcccagggagttggcagtggggctgagaatgagtaactaagctctccaggcagcctcttctagggtaggctctgctgggacctcagatgaggagtatggctctggtctaccccgattccaagagctgacatgcgtggagaaatggtcatcttttctcagcccaccccagtgagcagccaatggagataaggccagccaataatcccaccactaagctcgctggcactgaaatggccaagctggtggttcaggagagctggaagcctggctcaggacagagccctgggaagttgagtctgcaaacatgccctcgggttcttgttgacgagcaaagctcagggttgtggggacaaagaccaggacttaacaaatatttaagacatctttgttgatgctgggattttgtggtacagaaaggaacttgccttgcatgttctgagcagtctggcttcctgcagctcccttacaacccgagctctcctccatttgagctacaacagagctcattaatccaagccacctggccctcagcactgtgtgttgggcactcatgctccaccgcacaactgaactaccctagtcaaggcctagaaacctggaaaataatccaacatcctggtaaggtggtaagctcctcatcactggaggcatttatgtaatgcctagggaactttgcaggggtctttgcccaggttaagtggctaggaccaggctgactgctcttcccccagtccaagggatatttgatttctttcccattcagggaacacagattatttttccttttagttctggaagcagagatggcacaagggagctggggcaggatgctgagaacatggttcttcagtccgctctgcatacagggccacctaaagggggacctgtggactcttcaatagataggctttctgagtaaatgagccaagcccagccaggggctttttctggtgctgacggtgtcgtcttcctcctagccaagaccgaggataggtgtggccattggcgaccagatcctggacctcagcatcatcaagcacctctttactggtcctgtcctctccaaacaccaggatgtcttcaatcagcctacactcaacagcttcatgggcctgggtcaggctgcctggaaggaggcgagagtgttcttgcagaacttgctgtctgtgagccaagccaggctcagagatgacaccgaacttcggaagtgtgcattcatctcccaggcttctgccacgatgcaccttccagccaccataggagactacacagacttctattcctctcggcagcatgctaccaacgtcggaatcatgttcagggacaaggagaatgcgttgatgccaaattggctgcacttaccagtgggctaccatggccgtgcctcctctgtcgtggtgtctggcaccccaatccgaaggcccatgggacagatgaaacctgatgactctaagcctcccgtatatggtgcctgcaagctcttggacatggagctggaaatggctttttttgtaggccctggaaacagattgggagagccgatccccatttccaaggcccatgagcacatttttggaatggtccttatgaacgactggagtgcacgagacattcagaagtgggagtatgtccctctcgggccattccttgggaagagttttgggaccactgtctctccgtgggtggtgcccatggatgctctcatgccctttgctgtgcccaacccgaagcaggaccccaggcccctgccgtatctgtgccatgacgagccctacacatttgacatcaacctctctgttaacctgaaaggagaaggaatgagccaggcggctaccatatgcaagtccaattttaagtacatgtactggacgatgctgcagcagctcactcaccactctgtcaacggctgcaacctgcggccgggggacctcctggcttctgggaccatcagcgggccggagccagaaaacttcggctccatgttggaactgtcgtggaagggaacgaagcccatagacctggggaatggtcagaccaggaagtttctgctggacggggatgaagtcatcataacagggtactgccagggggatggttaccgcatcggctttggccagtgtgctggaaaagtgctgcctgctctcctgccatcatgagattttctctgctcttctggaaacaaagggctcaagcacccctttcaaccctgtgactggggtcctccctcgggctgtaggcctggtccgccattcagtgacaaataaagccattgtgctctgaggcctgcactgccgc

SEQ ID NO: 135514 - DNA, 324 bp, Homo sapiens
  Payload ID: 6495
  Gene Symbol: FAH
  Gene Name: fumarylacetoacetate hydrolase (fumarylacetoacetase)
  ENST ID: ENST00000561353
  CDS Start-End: 1-181
taacctgaaaggagaaggaatgagccaggcggctaccatatgcaagtccaattttaagtacatgtactggacgatgctgcagcagctcactcaccactctgtcaacggctgcaacctgcggccgggggacctcctggcttctgggaccatcagcgggccggtgagtatctggctgcactgagggctgcccacgcagagcatccctgctccccacacagccccaagggccctcagctcagcctcgagaagagatttcaggcccgaggagccagaaaacttcggctccatgttggaactgtcgtggaagggaacgaagcccataga

SEQ ID NO: 135515 - DNA, 1964 bp, Homo sapiens
  Payload ID: 6496
  Gene Symbol: FAHD1
  Gene Name: fumarylacetoacetate hydrolase domain containing 1
  Uniprot ID: Q6P587
  ENST ID: ENST00000382666
  CDS Start-End: 264-1010
cacgggccgggagacgggcctgggagcggcggcggcggcccgagagctgcgccgggagagctgtgccgcgagcctccgcctcttttttggcaccgcacagtggatccctggaggccgagcgccacgccgcccgggtacccggcagatcgcgaggtggaacgggccgtcgctgcgggggacagcgttccgaggcagttggtcctctccgggatgccgtaggcatcagctgaccggcccagcccacgtgactacaggggcacttgatgggaatcatggcagcatccaggccattgtcccgcttctgggagtggggaaagaacatcgtctgcgtggggaggaactacgcggaccacgtcagggagatgcgcagcgcggtgttgagcgagcccgtgctgttcctgaagccgtccacggcctacgcgcccgagggctcgcccatcctcatgcccgcgtacactcgcaacctgcaccacgagctggagctgggcgtggtgatgggcaagcgctgccgcgcagtccccgaggctgcggccatggactacgtgggcggctatgccctgtgcctggatatgaccgcccgggacgtgcaggacgagtgcaagaagaaggggctgccctggactctggcgaagagcttcacggcgtcctgcccggtcagcgcgttcgtgcccaaggagaagatccctgaccctcacaagctgaagctctggctcaaggtcaacggcgaactcagacaggagggtgagacatcctccatgattttttccatcccctacatcatcagctatgtttctaagatcataaccttggaagaaggagatattatcttgactgggacgccaaagggagttggaccggttaaagaaaacgatgagatcgaggctggcatacacgggctgagacagggtctcactctgtcgcccaagctggagtgcagcagtgctatcacagctcactgcagcctcgaactcccggggtcaagcaatcctccctcagcttcccgtttctgaggttacagcccaaagtctcctcagcaacacttcctgtgagactacaggaatgaagggtgcctgtgtgatcagtcagatcaatcagcacatggaaactgagaaagacagatttaaagtccaaggagtttttgttgcaagttgtgcacatgttagatgcttcatttacaatataaccacagctggaactgaaaagaaacaaagacaatgataaaatgtgatgccctaagctacaaatttcatctgtagcagaaaaagaattgtcactaaaaactctacgacagtgtgtggaaaacttactgagtgttcagtgctatgcggtctacaagacagtcgtaaaaaacagtaaaacacactttctacgcagccattctcaggagtcatctgaaactgcgtacaccagtcctctgcctgccctccttccctccctctgccaagccctcgaggtccatcccagtctcatttccttgctggggccctcccttctcgtatcccagcctgcagcctttctctcttggaacagcagcagagtgcacgcctcaggactgactggtgctgttgcatcagctccttattctcacctccctggctgggagttctgagggcaggaactgtgtcttgtgcctggaaagcacgagttcaacagctgctcactggatgggcctgcacggggccttctctacaaatacagaaagccttgcaaggctggccgggtagcacccagatgctattaacactgctggtgatacactctcctctctttcagtgatttatgctattccatatttctgaagcaagccttactttagcaattttaaacagggaaactaattcaaatttctcaaataggggaaatgaactgaagatagtggtttcttatctagccacagatcacttggtctagcaaattttagatgcttttcctcagatatcaataataaatgtacaggaaaaaaa

SEQ ID NO: 135516 - DNA, 1845 bp, Homo sapiens
  Payload ID: 6496
  Gene Symbol: FAHD1
  Gene Name: fumarylacetoacetate hydrolase domain containing 1
  Uniprot ID: Q6P587
  ENST ID: ENST00000382668
  CDS Start-End: 264-944
cacgggccgggagacgggcctgggagcggcggcggcggcccgagagctgcgccgggagagctgtgccgcgagcctccgcctcttttttggcaccgcacagtggatccctggaggccgagcgccacgccgcccgggtacccggcagatcgcgaggtggaacgggccgtcgctgcgggggacagcgttccgaggcagttggtcctctccgggatgccgtaggcatcagctgaccggcccagcccacgtgactacaggggcacttgatgggaatcatggcagcatccaggccattgtcccgcttctgggagtggggaaagaacatcgtctgcgtggggaggaactacgcggaccacgtcagggagatgcgcagcgcggtgttgagcgagcccgtgctgttcctgaagccgtccacggcctacgcgcccgagggctcgcccatcctcatgcccgcgtacactcgcaacctgcaccacgagctggagctgggcgtggtgatgggcaagcgctgccgcgcagtccccgaggctgcggccatggactacgtgggcggctatgccctgtgcctggatatgaccgcccgggacgtgcaggacgagtgcaagaagaaggggctgccctggactctggcgaagagcttcacggcgtcctgcccggtcagcgcgttcgtgcccaaggagaagatccctgaccctcacaagctgaagctctggctcaaggtcaacggcgaactcagacaggagggtgagacatcctccatgattttttccatcccctacatcatcagctatgtttctaagatcataaccttggaagaaggagatattatcttgactgggacgccaaagggagttggaccggttaaagaaaacgatgagatcgaggctggcatacacgggctgcccaaagtctcctcagcaacacttcctgtgagactacaggaatgaagggtgcctgtgtgatcagtcagatcaatcagcacatggaaactgagaaagacagatttaaagtccaaggagtttttgttgcaagttgtgcacatgttagatgcttcatttacaatataaccacagctggaactgaaaagaaacaaagacaatgataaaatgtgatgccctaagctacaaatttcatctgtagcagaaaaagaattgtcactaaaaactctacgacagtgtgtggaaaacttactgagtgttcagtgctatgcggtctacaagacagtcgtaaaaaacagtaaaacacactttctacgcagccattctcaggagtcatctgaaactgcgtacaccagtcctctgcctgccctccttccctccctctgccaagccctcgaggtccatcccagtctcatttccttgctggggccctcccttctcgtatcccagcctgcagcctttctctcttggaacagcagcagagtgcacgcctcaggactgactggtgctgttgcatcagctccttattctcacctccctggctgggagttctgagggcaggaactgtgtcttgtgcctggaaagcacgagttcaacagctgctcactggatgggcctgcacggggccttctctacaaatacagaaagccttgcaaggctggccgggtagcacccagatgctattaacactgctggtgatacactctcctctctttcagtgatttatgctattccatatttctgaagcaagccttactttagcaattttaaacagggaaactaattcaaatttctcaaataggggaaatgaactgaagatagtggtttcttatctagccacagatcacttggtctagcaaattttagatgcttttcctcagatatcaataataaatgtacaggaaaaaaa

SEQ ID NO: 135517 - DNA, 1974 bp, Homo sapiens
  Payload ID: 6496
  Gene Symbol: FAHD1
  Gene Name: fumarylacetoacetate hydrolase domain containing 1
  Uniprot ID: Q6P587
  ENST ID: ENST00000427358
  CDS Start-End: 290-964
ttgttttgtccgcgagccccgactgccacgggccgggagacgggcctgggagcggcggcggcggcccgagagctgcgccgggagagctgtgccgcgagcctccgcctcttttttggcaccgcacagtggatccctggaggccgagcgccacgccgcccgggtacccggcagatcgcgaggtggaacgggccgtcgctgcgggggacagcgttccgaggcagttggtcctctccgggatgccgtaggcatcagctgaccggcccagcccacgtgactacaggggcacttgatgggaatcatggcagcatccaggccattgtcccgcttctgggagtggggaaagaacatcgtctgcgtggggaggaactacgcggaccacgtcagggagatgcgcagcgcggtgttgagcgagcccgtgctgttcctgaagccgtccacggcctacgcgcccgagggctcgcccatcctcatgcccgcgtacactcgcaacctgcaccacgagctggagctgggcgtggtgatgggcaagcgctgccgcgcagtccccgaggctgcggccatggactacgtgggcggctatgccctgtgcctggatatgaccgcccgggacgtgcaggacgagtgcaagaagaaggggctgccctggactctggcgaagagcttcacggcgtcctgcccggtcagcgcgttcgtgcccaaggagaagatccctgaccctcacaagctgaagctctggctcaaggtcaacggcgaactcagacaggagggtgagacatcctccatgattttttccatcccctacatcatcagctatgtttctaagatcataaccttggaagaaggagatattatcttgactgggacgccaaagggagttggaccggttaaagaaaacgatgagatcgaggctggcatacacgggctggtcagtatgacatttaaagtggaaaagccagaatattgagttatttcttaacaagtttcgagagagaagggagcaagacaagagcaagcaacggctattaaatgtcacaatcctttaattagaaaccatttattggccggacgcggtggctcacgcctgtaatcgcagcactttgggaggccgaggcgggcggctcacgacgtcaggagatccagaccatcttggctaacagggtgaaaccccgtctctactaaaaatacaaaaaattagccgggcgtggtggcgggcgcctgtagtcccagctactctggaggctgaggcaggagaatcaattgaacccgggaggcggagcttacagtgagctgagattgcgccactgtactcctgggcaacagcgagactccgtctcaaaaaaaaaaaaaaaaaaagaaaccatttattttaaaaatgattagattgctatgcctcaactcatagaagatgaacccttcaagaaaacgtgaagtagaacgggtgggccagaaatgaaaacaggcaagtaaagtatttcttcggaaaacattttatcaaaccaaatgttaaaaagactttccttttgtaaaactggattagagaagacttttcagtgggttatctctaggatgatcagtagttcagcacttaaaaactgcagagaaaactgaaagttatgttccagataactttccgttgtttaccaaattttcttagatttggtcatcatcaggaagcatttgtaaaaataaaaatctccacaaattactggcccatctcggacttgctgaatcaatttgataggattaatctccagtgaagctgtgtttacagggcattccaagtgattcttatcaggaaatgtgaaaaacactcctgtacataatcggttaatttaaaattttacttaataagtgaacaagtaatgaagatttcacctgtttacttagggtatctacccagacccatcgattctgagttcgggagatgattttgaaattactgttttccaaataaaggtgctcccttctaagtgg

SEQ ID NO: 135518 - DNA, 757 bp, Homo sapiens
  Payload ID: 6496
  Gene Symbol: FAHD1
  Gene Name: fumarylacetoacetate hydrolase domain containing 1
  Uniprot ID: Q6P587
  ENST ID: ENST00000615972
  CDS Start-End: 11-757
ggggcacttgatgggaatcatggcagcatccaggccattgtcccgcttctgggagtggggaaagaacatcgtctgcgtggggaggaactacgcggaccacgtcagggagatgcgcagcgcggtgttgagcgagcccgtgctgttcctgaagccgtccacggcctacgcgcccgagggctcgcccatcctcatgcccgcgtacactcgcaacctgcaccacgagctggagctgggcgtggtgatgggcaagcgctgccgcgcagtccccgaggctgcggccatggactacgtgggcggctatgccctgtgcctggatatgaccgcccgggacgtgcaggacgagtgcaagaagaaggggctgccctggactctggcgaagagcttcacggcgtcctgcccggtcagcgcgttcgtgcccaaggagaagatccctgaccctcacaagctgaagctctggctcaaggtcaacggcgaactcagacaggagggtgagacatcctccatgattttttccatcccctacatcatcagctatgtttctaagatcataaccttggaagaaggagatattatcttgactgggacgccaaagggagttggaccggttaaagaaaacgatgagatcgaggctggcatacacgggctgagacagggtctcactctgtcgcccaagctggagtgcagcagtgctatcacagctcactgcagcctcgaactcccggggtcaagcaatcctccctcagcttcccgtttctga

SEQ ID NO: 135519 - DNA, 4757 bp, Homo sapiens
  Payload ID: 6497
  Gene Symbol: FAHD2A
  Gene Name: fumarylacetoacetate hydrolase domain containing 2A
  Uniprot ID: Q96GK7
  ENST ID: ENST00000233379
  CDS Start-End: 154-1098
ccggccgagtggccctgggttagcagctgctgcatttccccggctggctgcggtcactggtggcagtgctcaggcgcccgccgcccttgaccttcggccccgcgagctctaaccctacagcgcaggaagatcggccgccgcggccaggctctgatgctggtgtctggtagaagaaggttactcacagttctgctgcaggctcagaagtggccctttcaaccctccagagacatgagactagtgcagttccgggcaccccacctggtggggcctcacttgggcctggagacagggaatggtggaggggttatcaacctcaatgcctttgaccccacactcccgaagacgatgacgcagttcctagagcagggagaggccaccctctcagtggcaagaagagccctggctgcccagttgccagtcctaccacggtcggaggtaaccttcctggctccagtcacacgaccagataaggtggtgtgtgtgggcatgaattatgtggaccactgcaaagaacagaacgtgcccgtgcccaaggagcccatcatcttcagcaagtttgccagctccatcgtggggccctatgatgaggtggtcctcccaccacagagccaggaggtagattgggaagtggagctggccgtggtcattggaaagaaaggcaagcacatcaaggccacagatgctatggcccacgtggccggcttcactgtggctcatgacgtgagtgctcgtgactggcaaatgagacgtaatgggaaacaatggctgctgggaaaaaccttcgacaccttctgccctctgggccctgccttggtgaccaaggacagtgtagcagatccacacaacttaaagatctgctgccgagtgaatggggaagtggtccagagcggcaacaccaaccagatggtattcaagacagaggacctgatagcctgggtctcccagtttgttaccttttacccaggggatgtcatcctaactgggacccccccaggtgtcggtgtattcaggaaacctcctgtctttctcaagaagggggatgaagtccagtgtgagattgaagaactaggtgtcatcatcaacaaggtggtgtgatggctcctgcacaggccctgcacataggatgagggcatctgctcccactcagcctagcccagggaaaggcccagtgacaggtgtggacaggtgccagccctgcaagccgcctcttctcggtagaagggagaaggacagagctctcttcaataaattcgtcaggtcaaagcagcagctttgcttctgctgtttgtcttcttttgggctttgtttcatgggacaagttggggcattttgtgggactggggaagaagagagcaaatacacacacatatgccaaaaagatgctgctgggctggggaaaagacaattcgtgtcgtccccttgtttatcacatcaaagaagggaaaaagcaagagatggcaagggacaatcaagcctcaatgattatatttatagctaagggtttgcagcctcctctccatcttctggctctaggacacagctgtgttctggggctcagaagtctcagcacaggctccttctcacagttctagctacaagtgaactgccggatgaactgttctagtttttcctgattgtccaggctggcaaaagtaggggacaggtggagcctggggcctgcagggctcggcgtctgctgcagaacctgggccatggaagatgggccgtgagtgcactcaccacagggactgtgtccacatggcccaggggccaggcctgtcccccagaaacctgccttgagacctctgaccccttaggcctcagtgtttgagtgcaaatgctgcctcaaagcagccccaataccccacctagaaggatgagccagtgatttgggagaccaagaggcaggaaaccatcccaccttctccaacccatcaccacgtctattgctggaagacaccaagtaaatcccagggtcttaatgaggcaccatcaggccagccctgtggggtgatgggaacatagctgggtttccctgagccactctattggggtgggagcagggggacagaagatggtgacactggctcctctcacccctaggtctctgaaggtccagatagcactgatggcaagctttgggtctgcacactctggaaagaagagagaagtgaaggctctaggtagggaggacagggagacactgggcacaggcttctctcctcttgtttaaagaagcccagggagggatagatctccgactggacagaagactactctgcagcccgccttcctagagttgggttgtcactgtccggcagggggcagcagccaccagcaaacaccactgcctgcaggagcctgggctgactggttgggactcaccaaagatcccttcttcctgggcggtggcctgcaggaactggaacagctgttggagaggagaagaaaaagaagacatcaaaaagaaaatctagtgctgggtggatatagagtatgaagatgtggagctgggaaaacagaggatgtggtgggatggggaaggaaaggttgtggaaggcctgcaccccgtctcagttcctccactgcttcgtcccagattctgtttttgttttcctgaatcagacttagtctccctccattctcccgtcccctgtgtgcccccatcctggtcctgcctcactggacagcctctccgcggccttcctcctccctgctccagaattctacttggtgccccccaaccccactcgactcattgtccacctggcctctgaggccaggcaccctcattcccctctcccacccaccccacccaaggaagcccagcacagaccatctcatctcactccaccatcacttctttgccaaatgcatttccaaacaccctcatgagctttgctgatctctttgccatctctccctgccccactccgatggctcctcctgcctggtgaagactgccctgggtatcccagaactgaacctgcagcagccagcacagctgaccttggggcgataagcagccagggaaaggctttcttaaaaaaaaacaaaaaacaaaaccaataactcagtaagcagattaaacaaaggtagagacggagccctccacccctctcacacactcatcctcacacccagctataccacaccccacaaatgttgcttatgtttccttggtcattctgtccatcctcctgtctgtccaaagccaaggacactgctctactctaaattttttgtcccgaagcccccaaatactgcaaccctgacccaatgcacgaagccaccccaaaatacagcagaggacaccaggactttcattttccctcagtatggcccatcctttgggtatgccaactccatgtccaccaagcactgcatgtaggacagggcacagtttggaggccttggtccagccactgccccagacccaccttggctctctcctcactaacacccgagaagcccagacttcccagtgtttagcaacagattaaactctaagccaacaacaacagaacagggtggagtgagtggaaagcaaatgaaatgttaaaaaaaaaaaaaaagcaatacttgcattctcattagtaggaacatgtgagatgaagcatgttatgttattaggcattctcttgattcggtaaacacaagctgaataaatttataaatatcagcattaagcgagatttaacggggagctgtttatcttctgcctgtcaggcaggcggcaacactctccatgtatcactcgccagccgtgcagtcctcactctcttgcccaggtaagctggggaagagcctgctgccgcccagctctggttgtggaagggctggcaccaaggagctgcgagcttacctcaactcatctcacctcaccatgccggctgcgaggcggcccgtgcagtccgtgcgcaggaggtcacactcccatgctgcatcccagcccctccagaagcagagcatgacctgggtgactttgaggatgctatttaacctctctaagctaaagctcctcgactgcagcatcaacagatcagtgccgacctgttaaggccgtcgagagcatcaaatgctactgttcagcaggtgcctgacacatagtaggtccacaagcaaatgattttcctgcttgcatcatttctagcacagagctggaggaaatggcgaggtgcaggtggccgctgggccctgctgttctacatgggagcaagacagctgctaggtgaaggggaatgaccaggcagccacagggaggacatgtggcctcaggaagcctgggtgtgtatcctggttctgctaggaacacgtgtggggctttgtgtgggtgactctctggctccccaagcctccctttcctactgttatatccttaaagtgcctctgaggccaaagcctttgtggcaattgtcaaatgagtccatatgcagtgagtaccgtgttgagggaggacaaggtcaccaagagctgagaatgtttctccgactgatgagacctagatattgggtacatggaggtccccggtccctttgtgattcctgcagcctgttgcctccttgcctggaccccgcctcagctcagaaagccaattccctagattccaaaggccttcccagaccaattagcatgtcctgcagctgtcagctccctgtgcctagcctggacctcagctcatgtctagcacccagtctcccaaccccacacatattcacaaataaaagaaaataacaaatgacatgaattcttca

SEQ ID NO: 135520 - DNA, 715 bp, Homo sapiens
  Payload ID: 6497
  Gene Symbol: FAHD2A
  Gene Name: fumarylacetoacetate hydrolase domain containing 2A
  ENST ID: ENST00000418606
  CDS Start-End: 335-715
gtgctcaggcgcccgccgcccttgaccttcggccccgcgagctctaaccctacagcgcaggaagatcggccgccgcggccaggtaggacgagcctggctgggtctaggccagaagggtgtccgtggcgccggtctcccgcggagcgcagaactagtaccggatccccagccgcttctgaccacacagacggggcggacctgtcagagccaagcacagtgggaactttcagaaagcactggttgaaggaacgctggaatccctgggacttactgcgtagcatgtagtagttgctcctctagaaaagtttcaccttatgaagtatagcaggctctgatgctggtgtctggtagaagaaggttactcacagttctgctgcaggctcagaagtggccctttcaaccctccagagacatgagactagtgcagttccgggcaccccacctggtggggcctcacttgggcctggagacagggaatggtggaggggttatcaacctcaatgcctttgaccccacactcccgaagacgatgacgcagttcctagagcagggagaggccaccctctcagtggcaagaagagccctggctgcccagttgccagtcctaccacggtcggaggtaaccttcctggctccagtcacacgaccagataaggtggtgtgtgtgggcatgaattatgtggaccactgcaaagaacagaacgtgcccgtgccc

SEQ ID NO: 135521 - DNA, 522 bp, Homo sapiens
  Payload ID: 6497
  Gene Symbol: FAHD2A
  Gene Name: fumarylacetoacetate hydrolase domain containing 2A
  ENST ID: ENST00000445649
  CDS Start-End: 279-522
gtgatccggccgagtggccctgggttagcagctgctgcatttccccggctggctgcggtcactggtggcagtgctcaggcgcccgccgcccttgaccttcggccccgcgagctctaaccctacagcgcaggaagatcggccgccgcggccaggtaggacgagcctggctgggtctaggccagaagggtgtccgtggcgccggtctcccgcggagcgcagaactagtaccggatccccagccgcttctgaccacacagacggggcggacctgtgctctgatgctggtgtctggtagaagaaggttactcacagttctgctgcaggctcagaagtggccctttcaaccctccagagacatgagactagtgcagttccgggcaccccacctggtggggcctcacttgggcctggagacagggaatggtggaggggttatcaacctcaatgcctttgaccccacactcccgaagacgatgacgcagttcctagagcagggagaggccaccctctcagtggcaagaa

SEQ ID NO: 135522 - DNA, 1366 bp, Homo sapiens
  Payload ID: 6497
  Gene Symbol: FAHD2A
  Gene Name: fumarylacetoacetate hydrolase domain containing 2A
  Uniprot ID: Q96GK7
  ENST ID: ENST00000447036
  CDS Start-End: 283-1227
gatccggccgagtggccctgggttagcagctgctgcatttccccggctggctgcggtcactggtggcagtgctcaggcgcccgccgcccttgaccttcggccccgcgagctctaaccctacagcgcaggaagatcggccgccgcggccagcagagccaagcacagtgggaactttcagaaagcactggttgaaggaacgctggaatccctgggacttactgcgtagcatgtagtagttgctcctctagaaaagtttcaccttatgaagtatagcaggctctgatgctggtgtctggtagaagaaggttactcacagttctgctgcaggctcagaagtggccctttcaaccctccagagacatgagactagtgcagttccgggcaccccacctggtggggcctcacttgggcctggagacagggaatggtggaggggttatcaacctcaatgcctttgaccccacactcccgaagacgatgacgcagttcctagagcagggagaggccaccctctcagtggcaagaagagccctggctgcccagttgccagtcctaccacggtcggaggtaaccttcctggctccagtcacacgaccagataaggtggtgtgtgtgggcatgaattatgtggaccactgcaaagaacagaacgtgcccgtgcccaaggagcccatcatcttcagcaagtttgccagctccatcgtggggccctatgatgaggtggtcctcccaccacagagccaggaggtagattgggaagtggagctggccgtggtcattggaaagaaaggcaagcacatcaaggccacagatgctatggcccacgtggccggcttcactgtggctcatgacgtgagtgctcgtgactggcaaatgagacgtaatgggaaacaatggctgctgggaaaaaccttcgacaccttctgccctctgggccctgccttggtgaccaaggacagtgtagcagatccacacaacttaaagatctgctgccgagtgaatggggaagtggtccagagcggcaacaccaaccagatggtattcaagacagaggacctgatagcctgggtctcccagtttgttaccttttacccaggggatgtcatcctaactgggacccccccaggtgtcggtgtattcaggaaacctcctgtctttctcaagaagggggatgaagtccagtgtgagattgaagaactaggtgtcatcatcaacaaggtggtgtgatggctcctgcacaggccctgcacataggatgagggcatctgctcccactcagcctagcccagggaaaggcccagtgacaggtgtggacaggtgccagccctgcaagccgcctcttctcggtagaagggagaaggacaga

SEQ ID NO: 135523 - DNA, 1305 bp, Homo sapiens
  Payload ID: 6498
  Gene Symbol: FAHD2B
  Gene Name: fumarylacetoacetate hydrolase domain containing 2B
  Uniprot ID: Q6P2I3
  ENST ID: ENST00000272610
  CDS Start-End: 189-1133
acaggacgcgcccgcttctcgctggagtgcgcaccgagcggcagtgacttcgccgctgctgtagttccccggctggatgcggtgactggtgccagtgctcaggcgcccgctgcccttgacctcccgccccgcgagccctaactcagcgcaggaggaccggctgccgccgccgccgccgccaggctctgatgctggtgtctggtagaagaagattactcacagctctgctgcaggctcagaagtggccctttcaaccctccagagacatgagactagtgcagttccgggcaccccacctggtggggcctcacttgggcctggagacagggaatggtggaggggttatcaacctcaatgcctttgaccccacactcccaaagacgatgacgcagttcctagagcagggagaggccaccctctcagtggcaagaagagccttggctgcccagttgccagtcctaccatggtcggaggtaaccttcctggctccagtcacatggccagataaggtggtgtgtgtgggcatgaattatgtggaccactgcaaagaacagaacgtgcccgtgcccaaggagcccatcatcttcagcaagtttgccagctccatcgtggggccctatgatgaggtggtcctcccaccacagagccaggaggtagattgggaagtggagctggccgtggtcattggaaagaaaggcaagcacatcaaggccacagatgccatggcccacgtggccggcttcactgtggctcatgacgtgagtgctcgtgactggctaacaagacgcaatgggaaacagtggctgctgggaaaaaccttcgacaccttctgccctctgggccctgccttggtgaccaaggacagtgtagcagatccacacaacttaaagatctgctgccgagtgaatggggaagtcgtccagagcagcaacaccaaccagatggtattcaagacagaggacctgatagcctgggtctcccagtttgttaccttttacccaggggatgtcatcctaactgggacccccccaggtgtcggtgtattcaggaaacctcctgtctttctcaagaagggggatgaagtccagtgtgagattgaagaactaggtgtcatcatcaacaaggtggtgtgatggctcctgcacaggcccgacataggatgagggcatctgctcccactcagcctagcccagggaaaggcccagtggcaggtgtgggcaggtgccagccctgcaagccgcctcttctcggtagaagggagaaggacagagctctcttcaataaatgcgtcgggtcaaagcagca

SEQ ID NO: 135524 - DNA, 1388 bp, Homo sapiens
  Payload ID: 6498
  Gene Symbol: FAHD2B
  Gene Name: fumarylacetoacetate hydrolase domain containing 2B
  Uniprot ID: Q6P2I3
  ENST ID: ENST00000414820
  CDS Start-End: 272-1216
gtgacttcgccgctgctgtagttccccggctggatgcggtgactggtgccagtgctcaggcgcccgctgcccttgacctcccgccccgcgagccctaactcagcgcaggaggaccggctgccgccgccgccgccgccagcagagccaagcacagtgggaactttcagaaagcactggttgaaggaacgctggaatccctgggacttactgcgtagcatgtagtagttgctcctctacaaaagtttcaccttatgaagtatagcaggctctgatgctggtgtctggtagaagaagattactcacagctctgctgcaggctcagaagtggccctttcaaccctccagagacatgagactagtgcagttccgggcaccccacctggtggggcctcacttgggcctggagacagggaatggtggaggggttatcaacctcaatgcctttgaccccacactcccaaagacgatgacgcagttcctagagcagggagaggccaccctctcagtggcaagaagagccttggctgcccagttgccagtcctaccatggtcggaggtaaccttcctggctccagtcacatggccagataaggtggtgtgtgtgggcatgaattatgtggaccactgcaaagaacagaacgtgcccgtgcccaaggagcccatcatcttcagcaagtttgccagctccatcgtggggccctatgatgaggtggtcctcccaccacagagccaggaggtagattgggaagtggagctggccgtggtcattggaaagaaaggcaagcacatcaaggccacagatgccatggcccacgtggccggcttcactgtggctcatgacgtgagtgctcgtgactggctaacaagacgcaatgggaaacagtggctgctgggaaaaaccttcgacaccttctgccctctgggccctgccttggtgaccaaggacagtgtagcagatccacacaacttaaagatctgctgccgagtgaatggggaagtcgtccagagcagcaacaccaaccagatggtattcaagacagaggacctgatagcctgggtctcccagtttgttaccttttacccaggggatgtcatcctaactgggacccccccaggtgtcggtgtattcaggaaacctcctgtctttctcaagaagggggatgaagtccagtgtgagattgaagaactaggtgtcatcatcaacaaggtggtgtgatggctcctgcacaggcccgacataggatgagggcatctgctcccactcagcctagcccagggaaaggcccagtggcaggtgtgggcaggtgccagccctgcaagccgcctcttctcggtagaagggagaaggacagagctctcttcaataaatgcgtcgggtcaaagcagca

SEQ ID NO: 135525 - DNA, 1196 bp, Homo sapiens
  Payload ID: 6499
  Gene Symbol: FUNDC1
  Gene Name: FUN14 domain containing 1
  Uniprot ID: Q8IVP5
  ENST ID: ENST00000378045
  CDS Start-End: 170-637
agaaggtcctgcgctgagagaagggggcggagacaggactacgcgcctggagtaggagaaggaggaaaaaagagaccatagacttccatcctggcctagagcggcccttaaagtgccagggagaggagggcgggtggggaccactccagaattggccgctggcggtatcatggcgacccggaacccccctccccaagactatgaaagtgatgacgactcttatgaagtgttggatttaactgagtatgcaagaagacaccagtggtggaatcgagtgtttggccacagttcgggacctatggtagaaaaatactcagtagctacccagattgtaatgggtggcgttactggctggtgtgcaggatttctgttccagaaagttggaaaacttgcagcaactgcagtaggtggtggctttcttcttcttcagattgctagtcatagtggctatgtgcagattgactggaagagagttgaaaaagatgtaaataaagcaaaaagacagattaagaaacgagcgaacaaagcagcacctgaaatcaacaatttaattgaagaagcaacagaatttatcaagcagaacattgtgatatccagtggatttgtgggaggctttttgctcggacttgcatcttaaggacatgaatattctcccataacggattcaactatgagaagagaagtggcagcaataaggcagtctctcaaaagtcatactgccagagtctctagggcaaggagaaacaactagctggacaatactcaattcacaacttagcattttgccatctgaagcttggcaaactagtatctgctgtaaaacaacctatatggtatgtgaaccgtagtattcctgagcaaaacgtggctttcatcgctttgtaaaaatttgcatctgtttagaaactagcctataaaatatcaccattggatgtagatatggagagaaaagaaatatgttgggtttattgcttagcgaaatattctctttttatttaaataaaatgttcttcattgtgttttatggtatgtgtccataatttaaaattcatgttatagtttcagtattaaggctgactttttttttttaagatatgtttgcaataagttaaaaaactgtaatacccttttgtggaaagctttagaaatgatataattattaaagatattaaacagactctgctgatgtaatatga

SEQ ID NO: 135526 - DNA, 6455 bp, Homo sapiens
  Payload ID: 6500
  Gene Symbol: FUNDC2
  Gene Name: FUN14 domain containing 2
  Uniprot ID: Q9BWH2
  ENST ID: ENST00000369498
  CDS Start-End: 255-824
tgagcgagcgagccccgacggccgcggtgggtggaggggggaaagtgggggagagtggggcgggagtagagggagagcgagggagggagcctcacccccgggacgctttctgcgcacgcgcatctcggtgcatctgttgggcgggaccgcggggcctgtgacaccgcacgctgagctctgtgatgtagccgcttgcggagactgcaagcagccgcggcgcgcccggccctccctcttccgctgccgccgtgggaatggaaacatctgccccacgtgccggaagccaagtggtggcgacaactgcgcgccactccgcggcctaccgcgcagatcctctacgtgtgtcctcgcgagacaagctcaccgaaatggccgcgtccagtcaaggaaactttgagggaaattttgagtcactggaccttgcggaatttgctaagaagcagccatggtggcgtaagctgttcgggcaggaatctggaccttcagcagaaaagtatagcgtggcaacccagctgttcattggaggtgtcactggatggtgcacaggtttcatattccagaaggttggaaagttggctgcaacagctgtgggaggtggattttttctccttcagcttgcaaaccatactgggtacatcaaagttgactggcaacgagtggagaaggacatgaagaaagccaaagagcagctgaagatccgtaagagcaatcagatacctactgaggtcaggagcaaagctgaggaggtggtgtcatttgtgaagaagaatgttctagtaactgggggatttttcggaggctttctgcttggcatggcatcctaaggaagatgacctcatgttcattgttcctggttttttccagccagcagcctctacactccatcataggacatcgagtccctcctcctcttctcccatgccttcttccctgccatggcaaatctgagtggcttctctaagcatctgctggtacaagtcaatgtggcaccatgagcttcatggtggcagaagagacaatagtccttagctctcctcccagtacaccccctacttggccagtctgtaggccaacaagaaggttcctttacccccatgcaagacacttatgagaacacattacaagatggctgaccgtggaggatgagtggatcctgaaaggttgtcccaaactgttgatttggaaaagaaataagcacatagataaccttattgtgtgctgcatggaaaggaactgaatacatttgcctttaagcatgaaagattttggtatcttggtgtctactttcttttttagttggttttacattacagaaagctatttaaatgtgttataattatgccgacaaaattggcagcataattactgtaattgaaaaatctgatattgtccaggaatgctttctaccgtacaggataatgtatctcatggctgtttccaaagggtttatttattgtaaaacaagtgatttaggtgggaaagggaagattttggatttttattttgtagaaaaggttttaagctttgaaatgtgaatgaaatatccttatcaaaacattaggggtggccataactcctctgtgccacttctactatttttttttttaatctagttagtatgaaatacaacatttaaaccggaattttaaagaagtagctttccagggattcagaattaagaaagatagtgataggacatgagaaataaatttccatcaagtgtaatctaccgtctcatgatgaccacaaccctgagaattattctttaaaagcttacacacacacacacacacgggcacacacgcacacacagaatcttaccacattttgctgtagtggcatgttaccatgtctacagtccctactagaatatcagtcagctttcagagggcaagacttctgtcttcaccattatactcacagggcctagcacttaataggtgctgagtatttgaataatgactttatagaaagaaaactcactattaaaggttagttttactcagaattgttaatcttggagatgatctcttgtgaaatatgagtgtgtttctaaggccatacatttaaaaatgtttgcattttaacccgtcttgagaatgatgtattgaatttgaaaatcaaaactaccagtggatgtgtggaactttacagaaaccacctatttgcgtttttctccttacatttaaggaaacataagccattttgcttgcaatatgtatgaatcatctcaaaaccataatggtatgagcctctttgctgcatattttgctataagaacttattttttttcactttttattatggacgctttcaggaatatataaaagtagagaatatagtacaataatccccctgtgtatctatcactcactcacaacaatcatcaaattatagctctgctggtttttaccagttattgtgaaacaaatatcaaaatgtcattttatcatatttcagtatgtatctctaaaaggtaagaattatttctaaaaatcataaatacctcatcatatcagacattaacagtaattacataatatccaaaatctgatcagtgttcaaaatttcctcaagtgttttatatttagtttgtttgaatcaaaattcatgcaaggttcacatcgtatttgcatgatttggataagtctcttaaccttatagatcctcctctatttttttttttttgcttgctatatatttatatctctatatatattgatatagacatatgtagtgacactgagtcatctgtttcctgcttccccacactctgcctctcctgacatctgggtctctgggttatgccatatatggtgatagtggctgcagccactttacctgtgtgacttacccacagcaatgggatggtaacagcaaagctaaccaaagtgctctgtgcccctttgggttgcatgtggggagactggccacccaatgcctctccagtggggtaggggttgtcttttggtgcatctgtttttcctgtgattattggtgagggcagcaaagattagcaggtggttgtaaactaccttgagtaggttgtaataaatagtctggcctcagactgtattctgattgtctgaattaagatctgtaggtaggtccctcctgaagttttttcccagctggctgcctctacgactgtgagggtcatggttgaggtcagtattgcaggttggcctcatcctgctagtatgagaacggctgtgagttctgcccacggtgtgaggccactgtgaccacttgggattgtgcagagctggcatggaggttgaacacgcacagctgcacaccttgttttcagtttagctgaaccatcggtgaaggaggctcaggcatttggggttacctgtgaatcaaggccctattgtgccagcagttttgtttcaggtggtgaagtgggagttaaggtttcccccaaaagaacagctgccactcctccatgcaaaaccgagatgattcaaggaccaggcagctccacctttcagtgcactactttcatttgactggagaggcctgcttagctaggcacgtattttctccagtagcagagtccaatgacgctctggacttcctaattagtggtggtggggcggaagtttttccttgggaagagcgttgtcgctgtatatggtccgcagaaacttgacttggaatgtgttcggggtttcatcgcccccttgtggcggcgacgtggtaacaccgcactcaaggcttccaacttgtcaaccaataggatggcatctacgtagtgaaggcttcccttcccttgtcctgcagcgtgctggacagtgtcccggctcagggaccccttctgtccccttcctggctactatgggtcggccctgcgtcctcaccactttgagccaccctttgacccagcgtctctcccgcaatgggacctggtgggatggggacttggagcatgctacaggagaggtagaacttttgagtctcttcttcccaaggttctccccagagtcggagagcagagacggatccaggggcactttctggccgctgcctgctcgggctcaacagatggagtccaatgtttcagtctcccccaagaatgtgtatcctcattgctgacacgggagctgggtgcggggagagatgtggtggtggggacccttgcctgagcagcccattgtcatgagtgttattgccattgtgataatatgttagcatgactctcctcccaaatggccgcttgtttgttgcaatctcccgccactcagcctccagacattcattaacaggacagtggggttcttgactcccctaccactggggtgacagtccttgctactggatctgggcagttactgtctcatggatgctggcagaagacgattcaagttggcggactagattctacaaggaatgatctcttgcataattctagccaacatgctcttggggtgggtgcttctggttttggaaagcaaagttactgtgtagttaacaactattgtggtaagaatagtctctccatcattcttttgtttcacggttgtcagaaagatgggcataactaatggttgggctcttatttggaacctctacttttgtacagtttgggaatctctgcttgaaaagatggtatactgatggatttgaaatttctgagtatcatcaatgtttcatgatgatctcaatttcttctcagagggaagctcacagccagttttggaccccagagaaaaatgtggctgctgccctctactccctctaccaaattatcagcttcatttctttgtcatgaaatctagtatgatttctcagaaatcaggcccagaactaaaatacattttctgcccaattttctaagaggtcacactaacatctgagtaattgggcagaaaacctattttagttctgagcctgatttttctagaagtcatatggtatagcttatatttccgatgcttgcattctttttaaggggtcatgaatcttaatacttttttttttaaaagaaaagtgtcgcactttttcacatttttataaagctttaaagtcagtttactgacttttcaaaagtgtctacctttttaaattttaaaatggtaagaaatgacattcctgagagcagtggctttcatccttgcttgcacttgggaatcacctgtgaaattttaaaaactactaatgcctggctctcatcctagagattctgatttcactggtctggagtgctgttcaggcatcctgaggttttaaagtgtcttagctttttctaatgagcagcagagactgagaaccactgaagtacacagttggaagctggtgctgaaaaaattaagagttttgctgttaactccttaagagggctttaaagccttttatattaagtgccatacaacttcagatgccttctgaatactgaacacaagtgtaatattatagttcattaaatgtcttaggaatcgtgtggagtgaatgcaaggaaaggagtgacaagatatcaccccacaaatgacttacccattacgaagggaaaactacctttctagctaaaaggtctgtcagtcactaaccaagtgattaaacttagcatcactaatagccaacttaacaaagtttttttttttttttggtttctaaaatgggagatcatagttttcaccttcctagagttctttgcttaagactgagattcagtgttactcttggtccctaacaataagaagcactcagtaaatgttaagccttctatgatggctattttatttttttgtatgtcataataatacctaagaataagaagagttaaattaatgtcttcaaatggatttgttgacttaaactgacacaatcctttaaaagaaggaactgatttgaacctttcaaaactgaaagaaagtcgtatactgatacagtttggagccaccgaatgtcatgttgaaccgtattccctaatggaggtggatcctggtgagaggtgattggatcgtgggggccatcccctcttggtacttcactcatgatagtgagttctcatgagatctggcacttcacccctcactctctcttgctcctgctttggccatgtggagtgctcactccccttttgctttctgccatggctgtaagtttcctgaggcgtccccagaagcccatcagataccagtgccatgcttcctgtacagcccatggaactgtgagccaactaaacctcttttatttataaattaccgagtctcaggcactttttatagcaatgcaacaatggactaatacatatactttagcataaaaacatttaaaagagtctgaaactggagtagttaactcagtaaaaataacttggcaataaaacacagaaaaacaatctatttgatcatgtagtgattcctaatgtaaatcctagtacaactgtcaactgataattttaaatgtaatttagatttgtagatggtgtaacattaaagttgtatgatgtt

SEQ ID NO: 135527 - DNA, 871 bp, Homo sapiens
  Payload ID: 6500
  Gene Symbol: FUNDC2
  Gene Name: FUN14 domain containing 2
  ENST ID: ENST00000456179
  CDS Start-End: 1-285
tcactggaccttgcggaatttgctaagaagcagccatggtggcgtaagctgttcgggcaggaatctggaccttcagcagaaaagtatagcgtggcaacccagctgttcattggaggtgtcactggatggtgcacaggtttcatattccagaaggttggaaagttggctgcaacagctgtgggaggtggattttttctccttcagttggcaaccctcacttttgcaagcttgcaaaccatactgggtacatcaaagttgactggcaacgagtggagaaggacatgaagaaagccaaagagcagctgaagatccgtaagagcaatcagatacctactgaggtcaggagcaaagctgaggaggtggtgtcatttgtgaagaagaatgttctagtaactgggggatttttcggaggctttctgcttggcatggcatcctaaggaagatgacctcatgttcattgttcctggttttttccagccagcagcctctacactccatcataggacatcgagtccctcctcctcttctcccatgccttcttccctgccatggcaaatctgagtggcttctctaagcatctgctggtacaagtcaatgtggcaccatgagcttcatggtggcagaagagacaatagtccttagctctcctcccagtacaccccctacttggccagtctgtaggccaacaagaaggttcctttacccccatgcaagacacttatgagaacacattacaagatggctgaccgtggaggatgagtggatcctgaaaggttgtcccaaactgttgatttggaaaagaaataagcacatagataaccttattgtgtgctgcatggaaaggaactgaatacatttgcctttaagcatg

SEQ ID NO: 135528 - DNA, 4244 bp, Homo sapiens
  Payload ID: 6501
  Gene Symbol: FURIN
  Gene Name: furin (paired basic amino acid cleaving enzyme)
  Uniprot ID: P09958
  ENST ID: ENST00000268171
  CDS Start-End: 280-2664
agaactggaagggccccgccctgtgaagggataggagcctgactgttgcagctgcagtgagtggcggggaagcagcagcggccaggatgaatcccaggtgctctggagctggatggtgaaggtcggcactcttcaccctcccgagccctgcccgtctcggccccatgcccccaccagtcagccccgggccacaggcagtgagcaggcacctgggagccgaggccctgtgaccaggccaaggagacgggcgctccagggtcccagccacctgtcccccccatggagctgaggccctggttgctatgggtggtagcagcaacaggaaccttggtcctgctagcagctgatgctcagggccagaaggtcttcaccaacacgtgggctgtgcgcatccctggaggcccagcggtggccaacagtgtggcacggaagcatgggttcctcaacctgggccagatcttcggggactattaccacttctggcatcgaggagtgacgaagcggtccctgtcgcctcaccgcccgcggcacagccggctgcagagggagcctcaagtacagtggctggaacagcaggtggcaaagcgacggactaaacgggacgtgtaccaggagcccacagaccccaagtttcctcagcagtggtacctgtctggtgtcactcagcgggacctgaatgtgaaggcggcctgggcgcagggctacacagggcacggcattgtggtctccattctggacgatggcatcgagaagaaccacccggacttggcaggcaattatgatcctggggccagttttgatgtcaatgaccaggaccctgacccccagcctcggtacacacagatgaatgacaacaggcacggcacacggtgtgcgggggaagtggctgcggtggccaacaacggtgtctgtggtgtaggtgtggcctacaacgcccgcattggaggggtgcgcatgctggatggcgaggtgacagatgcagtggaggcacgctcgctgggcctgaaccccaaccacatccacatctacagtgccagctggggccccgaggatgacggcaagacagtggatgggccagcccgcctcgccgaggaggccttcttccgtggggttagccagggccgaggggggctgggctccatctttgtctgggcctcggggaacgggggccgggaacatgacagctgcaactgcgacggctacaccaacagtatctacacgctgtccatcagcagcgccacgcagtttggcaacgtgccgtggtacagcgaggcctgctcgtccacactggccacgacctacagcagtggcaaccagaatgagaagcagatcgtgacgactgacttgcggcagaagtgcacggagtctcacacgggcacctcagcctctgcccccttagcagccggcatcattgctctcaccctggaggccaataagaacctcacatggcgggacatgcaacacctggtggtacagacctcgaagccagcccacctcaatgccaacgactgggccaccaatggtgtgggccggaaagtgagccactcatatggctacgggcttttggacgcaggcgccatggtggccctggcccagaattggaccacagtggccccccagcggaagtgcatcatcgacatcctcaccgagcccaaagacatcgggaaacggctcgaggtgcggaagaccgtgaccgcgtgcctgggcgagcccaaccacatcactcggctggagcacgctcaggcgcggctcaccctgtcctataatcgccgtggcgacctggccatccacctggtcagccccatgggcacccgctccaccctgctggcagccaggccacatgactactccgcagatgggtttaatgactgggccttcatgacaactcattcctgggatgaggatccctctggcgagtgggtcctagagattgaaaacaccagcgaagccaacaactatgggacgctgaccaagttcaccctcgtactctatggcaccgcccctgaggggctgcccgtacctccagaaagcagtggctgcaagaccctcacgtccagtcaggcctgtgtggtgtgcgaggaaggcttctccctgcaccagaagagctgtgtccagcactgccctccagggttcgccccccaagtcctcgatacgcactatagcaccgagaatgacgtggagaccatccgggccagcgtctgcgccccctgccacgcctcatgtgccacatgccaggggccggccctgacagactgcctcagctgccccagccacgcctccttggaccctgtggagcagacttgctcccggcaaagccagagcagccgagagtccccgccacagcagcagccacctcggctgcccccggaggtggaggcggggcaacggctgcgggcagggctgctgccctcacacctgcctgaggtggtggccggcctcagctgcgccttcatcgtgctggtcttcgtcactgtcttcctggtcctgcagctgcgctctggctttagttttcggggggtgaaggtgtacaccatggaccgtggcctcatctcctacaaggggctgccccctgaagcctggcaggaggagtgcccgtctgactcagaagaggacgagggccggggcgagaggaccgcctttatcaaagaccagagcgccctctgatgagcccactgcccaccccctcaagccaatcccctccttgggcactttttaattcaccaaagtatttttttatcttgggactgggtttggaccccagctgggaggcaagaggggtggagactgcttcccatcctaccctcgggcccacctggccacctgaggtgggcccaggaccagctggggcgtggggagggccgtaccccaccctcagcaccccttccatgtggagaaaggagtgaaacctttagggcagcttgccccggccccggccccagccagagttcctgcggagtgaagaggggcagcccttgcttgttgggattcctgacccaggccgcagctcttgcccttccctgtccctctaaagcaataatggtcccatccaggcagtcgggggctggcctaggagatatctgagggaggaggccacctctccaagggcttctgcaccctccaccctgtcccccagctctggtgagtcttggcggcagcagccatcataggaagggaccaaggcaaggcaggtgcctccaggtgtgcacgtggcatgtggcctgtggcctgtgtcccatgacccacccctgtgctccgtgcctccaccaccactggccaccaggctggcgcagccaaggccgaagctctggctgaaccctgtgctggtgtcctgaccaccctcccctctcttgcacccgcctctcccgtcagggcccaagtccctgttttctgagcccgggctgcctgggctgttggcactcacagacctggagcccctgggtgggtggtggggaggggcgctggcccagccggcctctctggcctcccacccgatgctgctttcccctgtggggatctcaggggctgtttgaggatatattttcactttgtgattatttcactttagatgctgatgatttgtttttgtatttttaatgggggtagcagctggactacccacgttctcacacccaccgtccgccctgctcctccctggctgccctggccctgaggtgtgggggctgcagcatgttgctgaggagtgaggaatagttgagccccaagtcctgaagaggcgggccagccaggcgggctcaaggaaagggggtcccagtgggaggggcaggctgacatctgtgtttcaagtggggctcgccatgccgggggttcataggtcactggctctccaagtgccagaggtgggcaggtggtggcactgagcccccccaacactgtgccctggtggagaaagcactgacctgtcatgcccccctcaaacctcctcttctgacgtgccttttgcacccctcccattaggacaatcagtcccctcccatctgggagtccccttttcttttctaccctagccattcctggtacccagccatctgcccaggggtgccccctcctctcccatccccctgccctcgtggccagcccggctggttttgtaagatgctgggttggtgcacagtgatttttttcttgtaatttaaacaggcccagcattgctggttctatttaatggacatgagataatgttagaggttttaaagtgattaaacgtgcagactatgcaaaccagg

SEQ ID NO: 135529 - DNA, 587 bp, Homo sapiens
  Payload ID: 6501
  Gene Symbol: FURIN
  Gene Name: furin (paired basic amino acid cleaving enzyme)
  ENST ID: ENST00000559353
  CDS Start-End: 381-587
aaacagcagtcggtcctggggtgaggcgcaatttgagtggcccagagtggctctctgtgtcaggaggttctggtgctggagaaaagggctttgcccaagaacacagccaggaagagcacccacagctctctctggccacagcctggaacagagtcccatgtgaaacaagaccatgagaaatacagcaagcctccaggtttgagacaaactgggactagaggggtcggcactcttcaccctcccgagccctgcccgtctcggccccatgcccccaccagtcagccccgggccacaggcagtgagcaggcacctgggagccgaggccctgtgaccaggccaaggagacgggcgctccagggtcccagccacctgtcccccccatggagctgaggccctggttgctatgggtggtagcagcaacaggaaccttggtcctgctagcagctgatgctcagggccagaaggtcttcaccaacacgtgggctgtgcgcatccctggaggcccagcggtggccaacagtgtggcacggaagcatgggttcctcaacctgggccagatcttcggggactattaccacttctggcat

SEQ ID NO: 135530 - DNA, 580 bp, Homo sapiens
  Payload ID: 6501
  Gene Symbol: FURIN
  Gene Name: furin (paired basic amino acid cleaving enzyme)
  ENST ID: ENST00000560824
  CDS Start-End: 54-580
gtgaccaggccaaggagacgggcgctccagggtcccagccacctgtcccccccatggagctgaggccctggttgctatgggtggtagcagcaacaggaaccttggtcctgctagcagctgatgctcagggccagaaggtcttcaccaacacgtgggctgtgcgcatccctggaggcccagcggtggccaacagtgtggcacggaagcatgggttcctcaacctgggccagatcttcggggactattaccacttctggcatcgaggagtgacgaagcggtccctgtcgcctcaccgcccgcggcacagccggctgcagagggagcctcaatggctggaacagcaggtggcaaagcgacggactaaacgggacgtgtaccaggagcccacagaccccaagtttcctcagcagtggtacctgtctggtgtcactcagcgggacctgaatgtgaaggcggcctgggcgcagggctacacagggcacggcattgtggtctccattctggacgatggcatcgagaagaaccacccggacttggcaggcaattatgatcctggggccagttttgatgtcaatgacca

SEQ ID NO: 135531 - DNA, 844 bp, Homo sapiens
  Payload ID: 6501
  Gene Symbol: FURIN
  Gene Name: furin (paired basic amino acid cleaving enzyme)
  ENST ID: ENST00000558794
  CDS Start-End: 1-651
cccaaccacatccacatctacagtgccagctggggccccgaggatgacggcaagacagtggatgggccagcccgcctcgccgaggaggccttcttccgtggggttagccagggccgaggggggctgggctccatctttgtctgggcctcggggaacgggggccgggaacatgacagctgcaactgcgacggctacaccaacagtatctacacgctgtccatcagcagcgccacgcagtttggcaacgtgccgtggtacagcgaggcctgctcgtccacactggccacgacctacagcagtggcaaccagaatgagaagcagatcgtgacgactgacttgcggcagaagtgcacggagtctcacacgggcacctcagcctctgcccccttagcagccggcatcattgctctcaccctggaggccaataagaacctcacatggcgggacatgcaacacctggtggtacagacctcgaagccagcccacctcaatgccaacgactgggccaccaatggtgtgggccggaaagtgagccactcatatggctacgggcttttggacgcaggcgccatggtggccctggcccagaattggaccacagtggccccccagcggaagtgcatcatcgacatcctcaccgagcccaagtgagggctggacccaggctgggagggggccagtgggacctgagagtcgcagggggtgcccgctggtccctctgggccaggctgaccatcatggtgctctcctgcacagagacatcgggaaacggctcgaggccacatgactactccgcagatgggtttaatgactgggccttcatgacaactcattcctgggatga

SEQ ID NO: 135532 - DNA, 4345 bp, Homo sapiens
  Payload ID: 6501
  Gene Symbol: FURIN
  Gene Name: furin (paired basic amino acid cleaving enzyme)
  Uniprot ID: P09958
  ENST ID: ENST00000618099
  CDS Start-End: 381-2765
aaacagcagtcggtcctggggtgaggcgcaatttgagtggcccagagtggctctctgtgtcaggaggttctggtgctggagaaaagggctttgcccaagaacacagccaggaagagcacccacagctctctctggccacagcctggaacagagtcccatgtgaaacaagaccatgagaaatacagcaagcctccaggtttgagacaaactgggactagaggggtcggcactcttcaccctcccgagccctgcccgtctcggccccatgcccccaccagtcagccccgggccacaggcagtgagcaggcacctgggagccgaggccctgtgaccaggccaaggagacgggcgctccagggtcccagccacctgtcccccccatggagctgaggccctggttgctatgggtggtagcagcaacaggaaccttggtcctgctagcagctgatgctcagggccagaaggtcttcaccaacacgtgggctgtgcgcatccctggaggcccagcggtggccaacagtgtggcacggaagcatgggttcctcaacctgggccagatcttcggggactattaccacttctggcatcgaggagtgacgaagcggtccctgtcgcctcaccgcccgcggcacagccggctgcagagggagcctcaagtacagtggctggaacagcaggtggcaaagcgacggactaaacgggacgtgtaccaggagcccacagaccccaagtttcctcagcagtggtacctgtctggtgtcactcagcgggacctgaatgtgaaggcggcctgggcgcagggctacacagggcacggcattgtggtctccattctggacgatggcatcgagaagaaccacccggacttggcaggcaattatgatcctggggccagttttgatgtcaatgaccaggaccctgacccccagcctcggtacacacagatgaatgacaacaggcacggcacacggtgtgcgggggaagtggctgcggtggccaacaacggtgtctgtggtgtaggtgtggcctacaacgcccgcattggaggggtgcgcatgctggatggcgaggtgacagatgcagtggaggcacgctcgctgggcctgaaccccaaccacatccacatctacagtgccagctggggccccgaggatgacggcaagacagtggatgggccagcccgcctcgccgaggaggccttcttccgtggggttagccagggccgaggggggctgggctccatctttgtctgggcctcggggaacgggggccgggaacatgacagctgcaactgcgacggctacaccaacagtatctacacgctgtccatcagcagcgccacgcagtttggcaacgtgccgtggtacagcgaggcctgctcgtccacactggccacgacctacagcagtggcaaccagaatgagaagcagatcgtgacgactgacttgcggcagaagtgcacggagtctcacacgggcacctcagcctctgcccccttagcagccggcatcattgctctcaccctggaggccaataagaacctcacatggcgggacatgcaacacctggtggtacagacctcgaagccagcccacctcaatgccaacgactgggccaccaatggtgtgggccggaaagtgagccactcatatggctacgggcttttggacgcaggcgccatggtggccctggcccagaattggaccacagtggccccccagcggaagtgcatcatcgacatcctcaccgagcccaaagacatcgggaaacggctcgaggtgcggaagaccgtgaccgcgtgcctgggcgagcccaaccacatcactcggctggagcacgctcaggcgcggctcaccctgtcctataatcgccgtggcgacctggccatccacctggtcagccccatgggcacccgctccaccctgctggcagccaggccacatgactactccgcagatgggtttaatgactgggccttcatgacaactcattcctgggatgaggatccctctggcgagtgggtcctagagattgaaaacaccagcgaagccaacaactatgggacgctgaccaagttcaccctcgtactctatggcaccgcccctgaggggctgcccgtacctccagaaagcagtggctgcaagaccctcacgtccagtcaggcctgtgtggtgtgcgaggaaggcttctccctgcaccagaagagctgtgtccagcactgccctccagggttcgccccccaagtcctcgatacgcactatagcaccgagaatgacgtggagaccatccgggccagcgtctgcgccccctgccacgcctcatgtgccacatgccaggggccggccctgacagactgcctcagctgccccagccacgcctccttggaccctgtggagcagacttgctcccggcaaagccagagcagccgagagtccccgccacagcagcagccacctcggctgcccccggaggtggaggcggggcaacggctgcgggcagggctgctgccctcacacctgcctgaggtggtggccggcctcagctgcgccttcatcgtgctggtcttcgtcactgtcttcctggtcctgcagctgcgctctggctttagttttcggggggtgaaggtgtacaccatggaccgtggcctcatctcctacaaggggctgccccctgaagcctggcaggaggagtgcccgtctgactcagaagaggacgagggccggggcgagaggaccgcctttatcaaagaccagagcgccctctgatgagcccactgcccaccccctcaagccaatcccctccttgggcactttttaattcaccaaagtatttttttatcttgggactgggtttggaccccagctgggaggcaagaggggtggagactgcttcccatcctaccctcgggcccacctggccacctgaggtgggcccaggaccagctggggcgtggggagggccgtaccccaccctcagcaccccttccatgtggagaaaggagtgaaacctttagggcagcttgccccggccccggccccagccagagttcctgcggagtgaagaggggcagcccttgcttgttgggattcctgacccaggccgcagctcttgcccttccctgtccctctaaagcaataatggtcccatccaggcagtcgggggctggcctaggagatatctgagggaggaggccacctctccaagggcttctgcaccctccaccctgtcccccagctctggtgagtcttggcggcagcagccatcataggaagggaccaaggcaaggcaggtgcctccaggtgtgcacgtggcatgtggcctgtggcctgtgtcccatgacccacccctgtgctccgtgcctccaccaccactggccaccaggctggcgcagccaaggccgaagctctggctgaaccctgtgctggtgtcctgaccaccctcccctctcttgcacccgcctctcccgtcagggcccaagtccctgttttctgagcccgggctgcctgggctgttggcactcacagacctggagcccctgggtgggtggtggggaggggcgctggcccagccggcctctctggcctcccacccgatgctgctttcccctgtggggatctcaggggctgtttgaggatatattttcactttgtgattatttcactttagatgctgatgatttgtttttgtatttttaatgggggtagcagctggactacccacgttctcacacccaccgtccgccctgctcctccctggctgccctggccctgaggtgtgggggctgcagcatgttgctgaggagtgaggaatagttgagccccaagtcctgaagaggcgggccagccaggcgggctcaaggaaagggggtcccagtgggaggggcaggctgacatctgtgtttcaagtggggctcgccatgccgggggttcataggtcactggctctccaagtgccagaggtgggcaggtggtggcactgagcccccccaacactgtgccctggtggagaaagcactgacctgtcatgcccccctcaaacctcctcttctgacgtgccttttgcacccctcccattaggacaatcagtcccctcccatctgggagtccccttttcttttctaccctagccattcctggtacccagccatctgcccaggggtgccccctcctctcccatccccctgccctcgtggccagcccggctggttttgtaagatgctgggttggtgcacagtgatttttttcttgtaatttaaacaggcccagcattgctggttctatttaatggacatgagataatgttagaggttttaaagtgattaaacgtgcagactatgcaaaccagg

SEQ ID NO: 135533 - DNA, 4191 bp, Homo sapiens
  Payload ID: 6501
  Gene Symbol: FURIN
  Gene Name: furin (paired basic amino acid cleaving enzyme)
  Uniprot ID: P09958
  ENST ID: ENST00000610579
  CDS Start-End: 227-2611
cggccgaggggcgcccgagccgccgcggcggtcgcctggaaaagtttccccgccagggctccccaggggtcggcactcttcaccctcccgagccctgcccgtctcggccccatgcccccaccagtcagccccgggccacaggcagtgagcaggcacctgggagccgaggccctgtgaccaggccaaggagacgggcgctccagggtcccagccacctgtcccccccatggagctgaggccctggttgctatgggtggtagcagcaacaggaaccttggtcctgctagcagctgatgctcagggccagaaggtcttcaccaacacgtgggctgtgcgcatccctggaggcccagcggtggccaacagtgtggcacggaagcatgggttcctcaacctgggccagatcttcggggactattaccacttctggcatcgaggagtgacgaagcggtccctgtcgcctcaccgcccgcggcacagccggctgcagagggagcctcaagtacagtggctggaacagcaggtggcaaagcgacggactaaacgggacgtgtaccaggagcccacagaccccaagtttcctcagcagtggtacctgtctggtgtcactcagcgggacctgaatgtgaaggcggcctgggcgcagggctacacagggcacggcattgtggtctccattctggacgatggcatcgagaagaaccacccggacttggcaggcaattatgatcctggggccagttttgatgtcaatgaccaggaccctgacccccagcctcggtacacacagatgaatgacaacaggcacggcacacggtgtgcgggggaagtggctgcggtggccaacaacggtgtctgtggtgtaggtgtggcctacaacgcccgcattggaggggtgcgcatgctggatggcgaggtgacagatgcagtggaggcacgctcgctgggcctgaaccccaaccacatccacatctacagtgccagctggggccccgaggatgacggcaagacagtggatgggccagcccgcctcgccgaggaggccttcttccgtggggttagccagggccgaggggggctgggctccatctttgtctgggcctcggggaacgggggccgggaacatgacagctgcaactgcgacggctacaccaacagtatctacacgctgtccatcagcagcgccacgcagtttggcaacgtgccgtggtacagcgaggcctgctcgtccacactggccacgacctacagcagtggcaaccagaatgagaagcagatcgtgacgactgacttgcggcagaagtgcacggagtctcacacgggcacctcagcctctgcccccttagcagccggcatcattgctctcaccctggaggccaataagaacctcacatggcgggacatgcaacacctggtggtacagacctcgaagccagcccacctcaatgccaacgactgggccaccaatggtgtgggccggaaagtgagccactcatatggctacgggcttttggacgcaggcgccatggtggccctggcccagaattggaccacagtggccccccagcggaagtgcatcatcgacatcctcaccgagcccaaagacatcgggaaacggctcgaggtgcggaagaccgtgaccgcgtgcctgggcgagcccaaccacatcactcggctggagcacgctcaggcgcggctcaccctgtcctataatcgccgtggcgacctggccatccacctggtcagccccatgggcacccgctccaccctgctggcagccaggccacatgactactccgcagatgggtttaatgactgggccttcatgacaactcattcctgggatgaggatccctctggcgagtgggtcctagagattgaaaacaccagcgaagccaacaactatgggacgctgaccaagttcaccctcgtactctatggcaccgcccctgaggggctgcccgtacctccagaaagcagtggctgcaagaccctcacgtccagtcaggcctgtgtggtgtgcgaggaaggcttctccctgcaccagaagagctgtgtccagcactgccctccagggttcgccccccaagtcctcgatacgcactatagcaccgagaatgacgtggagaccatccgggccagcgtctgcgccccctgccacgcctcatgtgccacatgccaggggccggccctgacagactgcctcagctgccccagccacgcctccttggaccctgtggagcagacttgctcccggcaaagccagagcagccgagagtccccgccacagcagcagccacctcggctgcccccggaggtggaggcggggcaacggctgcgggcagggctgctgccctcacacctgcctgaggtggtggccggcctcagctgcgccttcatcgtgctggtcttcgtcactgtcttcctggtcctgcagctgcgctctggctttagttttcggggggtgaaggtgtacaccatggaccgtggcctcatctcctacaaggggctgccccctgaagcctggcaggaggagtgcccgtctgactcagaagaggacgagggccggggcgagaggaccgcctttatcaaagaccagagcgccctctgatgagcccactgcccaccccctcaagccaatcccctccttgggcactttttaattcaccaaagtatttttttatcttgggactgggtttggaccccagctgggaggcaagaggggtggagactgcttcccatcctaccctcgggcccacctggccacctgaggtgggcccaggaccagctggggcgtggggagggccgtaccccaccctcagcaccccttccatgtggagaaaggagtgaaacctttagggcagcttgccccggccccggccccagccagagttcctgcggagtgaagaggggcagcccttgcttgttgggattcctgacccaggccgcagctcttgcccttccctgtccctctaaagcaataatggtcccatccaggcagtcgggggctggcctaggagatatctgagggaggaggccacctctccaagggcttctgcaccctccaccctgtcccccagctctggtgagtcttggcggcagcagccatcataggaagggaccaaggcaaggcaggtgcctccaggtgtgcacgtggcatgtggcctgtggcctgtgtcccatgacccacccctgtgctccgtgcctccaccaccactggccaccaggctggcgcagccaaggccgaagctctggctgaaccctgtgctggtgtcctgaccaccctcccctctcttgcacccgcctctcccgtcagggcccaagtccctgttttctgagcccgggctgcctgggctgttggcactcacagacctggagcccctgggtgggtggtggggaggggcgctggcccagccggcctctctggcctcccacccgatgctgctttcccctgtggggatctcaggggctgtttgaggatatattttcactttgtgattatttcactttagatgctgatgatttgtttttgtatttttaatgggggtagcagctggactacccacgttctcacacccaccgtccgccctgctcctccctggctgccctggccctgaggtgtgggggctgcagcatgttgctgaggagtgaggaatagttgagccccaagtcctgaagaggcgggccagccaggcgggctcaaggaaagggggtcccagtgggaggggcaggctgacatctgtgtttcaagtggggctcgccatgccgggggttcataggtcactggctctccaagtgccagaggtgggcaggtggtggcactgagcccccccaacactgtgccctggtggagaaagcactgacctgtcatgcccccctcaaacctcctcttctgacgtgccttttgcacccctcccattaggacaatcagtcccctcccatctgggagtccccttttcttttctaccctagccattcctggtacccagccatctgcccaggggtgccccctcctctcccatccccctgccctcgtggccagcccggctggttttgtaagatgctgggttggtgcacagtgatttttttcttgtaatttaaacaggcccagcattgctggttctatttaatggacatgagataatgttagaggttttaaagtgattaaacgtgcagactatgcaaaccagg

SEQ ID NO: 135534 - DNA, 650 bp, Homo sapiens
  Payload ID: 6502
  Gene Symbol: FRY
  Gene Name: furry homolog (Drosophila)
  ENST ID: ENST00000380217
  CDS Start-End: 20-607
catgcttgctgtgtagcaaatggaatctcttgcacaattggaactgtgtcagagattatataagctacacttccagctgctattgctttttcagtcctactgtaagctcatcggccaggtgcacgaagttagctccatgccagagctgctgaatatgtccagggaactgagtgacctaaagaaacacctgaaggaagccagtgcagtcattgcagctgaccctctctattcagacggcgcgtggtccgagcccaccttcacgtccactgaagcagccatccagtccatgctggagtgcctgaagaacaacgaactcggcaaagctttgcggcagatcagggagtgcagaagtctgtggcccaatgacatctttggaagcagttctgatgatgaggtccagacactactgaatatttatttccgtcaccaaactctgggacagacgggtacttatgccctggtggggtctaaccagagcctgaccgagatctgcaccaagctgatggagctgaacatggagatccgggacatgatccgcagggcccagagttaccgagtcctcactacttttcttccagactccagtgtttctggcactagtctctgacaggagcctcctgtccccactgggttccaaactggcagtgctg

SEQ ID NO: 135535 - DNA, 10688 bp, Homo sapiens
  Payload ID: 6502
  Gene Symbol: FRY
  Gene Name: furry homolog (Drosophila)
  ENST ID: ENST00000380250
  CDS Start-End: 497-9535
agggggcggcgctcccggcccatcccttagccccgcggcggccgtgtgggccggaggctgcctgcaccgcgtcagggaggccggcctagaaaccctccctcccagaagaaagccgatcccagttcaggtggggtcttcctcggttgcgtacctggctggagccgagctggtgggcggccggcagccggcgtttctggtgatgacagccccgaaatgaaagcagcgcggccgccgcctccgagggctgcagggagatcagcgtccagcaaataagaagcaagtcctggacccggaggaggaggagcggccgagcatctctctctgctccgccgtgtcctttagatgagcactcccggccggagccggaggtggatccgcagagctgcctctgggcgcctgaccccgcgctgacatcacaacctgtgacaggcgcatcacgcccggtacctgctcccggccgctgcccgtcctcccagcctctttgtatgccgcagacatggccagccagcaggattcgggcttctttgagatcagtatcaaatatttactgaaatcctggagtaatacttctcccgttggcaacggttacatcaagcctccggttccacctgcttctggcacgcacagggagaaagggccgccaaccatgctacccatcaatgtggacccagacagtaaaccaggagaatatgtcctcaaaagtttatttgtcaacttcaccactcaggctgaacgcaagattcgtatcattatggcagagcccctggaaaagccattgacaaaatctctgcaacgtggagaagacccccaatttgatcaggtcatcagctcaatgagctccctttctgagtactgcctgccttccattctacgtacattatttgactggtataaaaggcaaaatggcattgaggatgaatcacatgaatacagaccaagaacaagcaataaatcaaaaagcgatgaacaacagcgagattatttaatggaaagacgggacctcgccattgattttattttttctttagtattaatagaagttttgaaacagattccacttcatcctgtaatagacagtttaatacatgatgttattaacttggctttcaagcactttaaatacaaagaagggtaccttggtcccaacactggcaatatgcatattgtggcagacctgtatgcagaagtcattggagtgttggcacaagccaaattccctgctgtaaagaagaaatttatggcggagctaaaagaattacggcacaaagagcagaacccatatgtggttcaaagcattatcagcttaataatgggcatgaaattctttcgaattaagatgtatccagtggaggattttgaggcctctcttcagtttatgcaggaatgtgcacattacttcctcgaggtcaaagacaaagatatcaagcatgccttggctgggctttttgttgaaatacttgttccagttgctgctgctgttaaaaatgaagtaaatgttccctgccttagaaattttgtggaaagcctgtatgacaccacgctggaactttcttctcgaaagaagcattccttggccttgtaccccctggtgacctgtttgctctgtgtcagtcagaagcagctgttcctgaacaggtggcacattttcctcaacaactgcttgtccaaccttaaaaacaaagatcccaagatggctcgagttgcactggaatctctctacagattactttgggtttacatgattcgaattaaatgtgaaagcaacacagctactcagagccgacttataaccatcatcacaacacttttccccaaagggtcccgcggtgtggtaccaagggacatgcctctgaacatctttgtgaaaatcatccagttcattgcccaggaacgtttagattttgcaatgaaagaaatcattttcgattttctttgtgtgggaaaaccagcaaaagcattcagtctcaacccagagagaatgaacattggtttacgggcattcttggtcatagctgatagcttgcagcagaaagatggggaacctcccatgccggttacaggagccgttcttccttcaggaaacacgttaagagtaaagaaaacatatttgagtaaaacactaactgaagaggaagccaaaatgataggcatgtccttatattactctcaagtacgaaaagctgtagacaacattttaaggcaccttgataaagaagtaggaaggtgtatgatgctgactaatgtacagatgttaaacaaagaaccggaagacatgatcacgggtgagagaaagccaaaaatagatcttttcaggacctgtgttgctgctattcctcgactgcttcctgatgggatgtcaaaacttgaacttattgacttactggctaggctctctattcatatggatgatgaattgcgacatattgcacaaaattctcttcagggtttacttgttgacttctcagattggagggaagatgtactatttggctttaccaacttcctgctccgggaagtaaatgatatgcatcacacactccttgattcgtccctgaagttgctgctgcagctgctcacccagtggaaactagtcatccagacacaaggaaaagtctatgaacaagccaacaaaatcagaaattcagagctcatcgcaaatggctccagtcacagaattcagtcggaacgaggtccccactgcagtgtactccacgctgtagaaggttttgctctggttttactctgcagtttccaggtggccacacgcaaactgtccgttttaatactcaaggaaattcgagcgttgtttattgccctggggcagcctgaggatgacgacaggccgatgattgatgtcatggatcagctaagttcttccattctagaaagttttattcatgtagcagtttcggattcagcaacattaccactcacccacaatgtggatctgcagtggttggtggaatggaacgcagtcctggtcaatagccattatgatgtgaaaagcccttcccatgtctggatatttgcacagtctgtcaaagacccctgggtcctctgcctcttcagcttcctccggcaggagaacttacccaagcactgccccacagccctcagctatgcctggccttatgccttcactcggctccagtcggtgatgcctctggtggacccaaatagcccaattaatgccaagaaaaccagcactgccggcagcggagacaactatgttactttgtggagaaattacctaattctttgttttggagttgcaaaacccagtattatgagcccaggacacttaagagcttccactccagaaataatggcgaccacacctgatggtacagtgagctacgataacaaggccataggcaccccatcggtgggagttctgttaaagcagttggtgcctttgatgagactagagagcattgagatcacagagtccttagttttaggatttggaagaacaaattcccttgttttcagagaattggtagaagaacttcatccattaatgaaagaagctctggaaagaagaccagagaacaagaaacgccgagaacggcgagacttgttaaggctacaactacttcgaatttttgaacttttggctgatgctggtgtaataagtgacagcacaaatggagccctagagcgggatactttagccctgggagctttgttcttagaatatgtggacttgacccgcatgctcctagaagctgaaaatgacaaagaagttgaaattcttaaagatatccgggcacattttagtgcaatggtggccaacttgattcagtgtgttccagttcaccaccgaagatttctcttcccccagcaaagtctgaggcaccaccttttcatcttattcagccagtgggcaggacccttcagcattatgttcactcctctggatcgttacagtgacagaaatcatcagattacaagatatcagtattgtgcattaaaagcaatgtcagcagtactgtgctgtggccctgtctttgacaatgtgggcctttccccagatggctacctatataaatggcttgacaacattctggcttgtcaagatttacgagttcatcaacttggctgcgaagttgttgtcttgctactggaacttaatcctgaccaaataaatctttttaactgggcaattgaccgatgctacacaggttcctaccaacttgcatctggctgcttcaaagccatagcaactgtgtgtggaagcaggaactatcccttcgacatagtgacattgttaaaccttgttctattcaaggcctctgacaccaacagagagatttatgaaatctccatgcagctcatgcagatccttgaagcaaagctttttgtatactcaaagaaagtcgctgagcaaagaccgggaagtattctctatggaacacacggcccgctgccacccctctacagcgtgtcacttgccctcttgtcatgtgagctggccaggatgtaccctgagctcacactccccctcttctcaggtaagccagcgattccccacaacacaccccaacgggcgccagatcatgcttacctacctgctgccctggctgcacaacatcgagctggtggacagcaggctcctcctcccgggtcgagccccagcagcccagaggacgaagtcaaggaccgggaaggtgacgtgactgcttctcacgggctgagaggaaatggctggggctctccagaagccacgtcactggtcctgaacaacctcatgtacatgacggccaagtatggagatgaagttcctgggccagaaatggaaaatgcttggaatgctttagccaacaatgagaaatggagcaacaacctgaggatcaccttgcagttcctgattagcctctgtggggtcagcagcgacacagttctcctaccctatattaaaaaagtggcaatatacttgtgccgtaacaacaccattcaaaccatggaagagcttctctttgagctgcagcagacagagcccgtgaaccccatcgtccagcattgtgacaacccgcccttctaccgcttcacggccagtagcaaggcttccgcagcagcctcaggaaccacctctagcagcaatacagtggttgctggccaggaaaatttcccagatgctgaggagaacaagatattgaaagaatctgatgaaaggtttagtaatgtcatcagagcccacactcgcctcgagtcaagatacagcaatagctctggaggatcctacgatgaagataaaaatgatccaatttctccctacacgggctggttgctgactattacagagaccaagcagccgcagcccttaccgatgccttgtactggaggatgctgggcccccctggttgactatctcccggagaccatcactccccgggggccactccacaggtgcaatattgctgtaatttttatgactgaaatggtggtggatcacagtgtacgagaagactgggcgcttcatctaccattattacttcatgctgtcttcttaggtttagaccactaccggcctgaagtctttgaacacagcaaaaaactgcttcttcacctcttgattgccctctcttgcaacagcaatttccattccattgcttccgtgctcctgcagacccgagagatgggtgaagctaagactctaaccgtgcagccagcctaccaacctgaatatctctatacaggtggctttgacttcctgagagaggaccagtcatccccggtgcctgactcagggcttagttcaagctccacctcctctagcatcagtctgggaggcagcagtggaaacctcccacagatgacccaggaggtagaagatgtggacacagctgctgaaacagatgagaaggcaaacaagctcattgagtttctcacgaccagggcatttggtccactttggtgccatgaagacatcacacctaaaaatcaaaattcaaagagtgctgaacagctcactaattttctacgtcacgttgtatctgtatttaaagattccaaatcaggcttccatctggagcaccagttgagtgaagttgcattgcagacagccctcgcaagctcttcaaggcactatgctggtcggtccttccagatattccgggccctcaagcaacctctgtcagcacatgccttatctgaccttctctcaagattggtggaggtgataggagaacatggagatgagattcagggttatgtaatggaagcgctcctaaccttggaggcggctgtggataacttgtctgactgcttgaagaacagtgacctcctaactgtattgtcccgctcttcctcaccagatttaagctccagcagtaaactaacagcaagcagaaagagcacaggacaactaaacatgaacccgggaaccaccagcggcaacaccgcaactgccgaacggagccggcatcaacgaagcttctctgtgcccaagaagtttggtgtcatcgaccgatcctctgacccacctcgaagtgccacactggacagaattcaggcttgtacccaacaaggcctctcctcaaaaaccagaagctcatcctccttgaaggacagtctcacggacccatcccacataaaccatcccaccaacctgctggccaccatattctgggtcacagtggccttgatggagtctgattttgagtttgaatacttaatggccttaaggctgttgagcagactactggcacatatgccactcgataaggctgagaaccgagaaaagcttgagaaactccaggcacagctgaagtgggccgacttctccgggctgcagcagctgctgctgaaaggattcacatccctcaccaccacagacctgaccctgcagctcttcagtctgctgacaccagtgtccaaaatatccatggtggatgcatcccacgctattgggtttccactgaatgtcttgtgtctcctgcctcagctgattcagcattttgaaaatcccaatcagttctgtaaggatatagccgaaaggattgctcaggtttgtttagaagagaagaaccccaaactttcaaatcttgcacatgtcatgactctttataaaacgcacagctacacgagggactgtgccacgtgggtcaatgtggtctgtcgataccttcatgaagcatatgctgacattaccttgaatatggttacctacctggcagagctgctggagaagggcctccctagtgtgcagcagcccctgctccaggtgatctacagtcttctcagctacatggacctttctgtcgttcctgtcaaacagttcaatgtggaagttctgaagacaattgaaaaatatgtgcaaagtgttcactggagagaagctctgaatatcttgaagctggtagtttctcggtcagccagccttgttttaccttcataccagcacagtgacctctcaaaaatagaaatacatcgagtgtggactagtgcttccaaggaattacctgggaaaaccctggacttccacttcgatatttcggagactccaatcatcgggaggcggtatgatgagctgcagaattcttctgggcgtgatgggaagcccagggccatggccgtcacccggagcacatcttccacttcctcaggctccaactccaacgtccttgttccagtgagctggaaaaggccccagtattctcagaagagaacaaaagagaagttggtacatgtcctttctctgtgtggccaagaagtaggattgagcaaaaatccatcagtgattttttcatcgtgtggggatctggatctgcttgagcaccagacaagcttggtatcttctgaggacggtgcccgagagcaggagaacatggatgacacaaacagcgagcagcagtttagagtcttcagagacttcgacttcctagatgtggagctggaggatggagagggtgagagtatggacaatttcaactggggagtgcgcagacgttctctggacagcctggataagtgtgatatgcagattctggaggagcgccaactgtcaggaagcactcctagcctgaataaaatgcaccatgaggactccgatgaatcatccgaggaggaggacctcacagccagccagatcctggagcactcagacctaatcatgactctctccccctctgaagagacgaatcccatggagctgctcaccacagcctgtgactcgacccctgcagaacctcattcctttaacaccagaatgtccagctttgatgcttccttgcctgatatgaataatctgcagatttctgagggttcaaaggctgaagctgttcgtgaggaggaggacaccaccgtgcatgaggatgatctttctagttccatcaatgaactcccagcagcttttgaatgcagcgacagctttagcctggacatgactgagggggaagaaaaaggcaatcgggcactggaccagtttaccctggcgagctttggagaaggtgacaggggagtctctccccctccctcgcccttcttctcagccatccttgccgcctttcagcccgcagcctgtgacgatgccgaggaggcctggcgcagccacatcaaccagcttatgtgtgactcagatggctcctgtgctgtgtatacatttcatgtgttctcctccttgtttaagaatattcagaaaaggttctgcttcctaacctgtgatgcagccagttaccttggagataacctccggggaatcggatccaaatttgtcagctcttcccagatgctcacctcctgctctgaatgtcctacactttttgtggatgccgagactctcctttcatgtggacttctggacaagctcaagttcagtgtgttagaactgcaagaatatttggatacctacaacaacaggaaagaggccacactctcttggcttgcaaattgtaaggcaacatttgcagggggatcaagagatggagtaattacctgtcaaccaggggactccgaagaaaagcaattggaactgtgtcagagattatataagctacacttccagctgctattgctttttcagtcctactgtaagctcatcggccaggtgcacgaagttagctccatgccagagctgctgaatatgtccagggaactgagtgacctaaagaaacacctgaaggaagccagtgcagtcattgcagctgaccctctctattcagacggcgcgtggtccgagcccaccttcacgtccactgaagcagccatccagtccatgctggagtgcctgaagaacaacgaactcggcaaagctttgcggcagatcagggagtgcagaagtctgtggcccaatgacatctttggaagcagttctgatgatgaggtccagacactactgaatatttatttccgtcaccaaactctgggacagacgggtacttatgccctggtggggtctaaccagagcctgaccgagatctgcaccaagctgatggagctgaacatggagatccgggacatgatccgcagggcccagagttaccgagtcctcactacttttcttccagactccagtgtttctggcactagtctctgacaggagcctcctgtccccactgggttccaaactggcagtgctgccatgctggggcaacgtcattcagtgtcttctcggccttcaaaaggcttggacagactgttctccctcttgttacctgtagggctttttctaaagaggatggcagaacttccaacgtgtagcaatactataagaaccaaggtagcttagaacgtcctggacagactccactcatcatgctgtgtggcacaaatgtgttacatttgaccgagcatatgcaactcgctactgaagaagtgacttccgttgcataccaaagccgactacactgaacagtaccttcctttctagaaacaattttagattggcaaaagtgcaatgttttcttcactcaaaaaattttatattctcaaacatgtatattctttccctgtcttgttccattttcttttcttttttcttttttctttttcctttctttcgtgggctgagaaaggggcaggcaaaatgaagctggccactgaaaactgtaagatggtcaaaagctgacagcctgtgtatgtgaaaagggaattgtaaatggactgcaatgtaatgtacactgtaatttgaatacaattactgtatctaaaaggagctgctatgaagtacctttcttatgttgctaggctactgtttctgaaagccctggatctctttgcaccaaaaatggtccagatagactctttttaaggatcttggctgctttttactagaaggttgcttttatgagcatatttatactgctgaaggatgagtgttaattttaattaactttgccgttttgtagagaaaactattcacaagataaattccaagtcttttcacctgtcaggcatgcatattttaatatctgtttggatagtcagaagtagaatcataaaggtaaaatatgagttgttactttgtttcttcgatgtcatattttatgtgtaatatatatgtaaagggccattcttaagttctctccttaaacttaatgctgtcaagtgttagatgtgtgcatgtgaacttgttgcactgcagaaacatattcagagtttatctatgtaacttattcactctgtaaatacatttaaagtttttgtgatgtaagcttaattgatattctgttcagaactttctttagact

SEQ ID NO: 135536 - DNA, 691 bp, Homo sapiens
  Payload ID: 6502
  Gene Symbol: FRY
  Gene Name: furry homolog (Drosophila)
  ENST ID: ENST00000436046
  CDS Start-End: 240-691
tggtatgaacagtctgccctggacggaaggcctgttttagtttgtcttctactgtaggtctttagcacctgactaaaaatacacctggggccaaaaatataagggccctgcattgtggctgagacacttatggtggcagtgagcaacaggaccatggagcccatcattatgtgttttggctttggaacatggtctgtgtagctgttccagactgttagtttgggtttcttttcaggctcatggagattacaactgcttgttggagacgatcctgtgtgatcagcttcataaaagggcttgcttctcccgttggcaacggttacatcaagcctccggttccacctgcttctggcacgcacagggagaaagggccgccaaccatgctacccatcaatgtggacccagacagtaaaccaggagaatatgtcctcaaaagtttatttgtcaacttcaccactcaggctgaacgcaagattcgtatcattatggcagagcccctggaaaagccattgacaaaatctctgcaacgtggagaagacccccaatttgatcaggtcatcagctcaatgagctccctttctgagtactgcctgccttccattctacgtacattatttgactggtataaaaggcaaaatggcattgaggatgaatcacatgaatacagaccaagaacaagcaataaatcaaa

SEQ ID NO: 135537 - DNA, 711 bp, Homo sapiens
  Payload ID: 6502
  Gene Symbol: FRY
  Gene Name: furry homolog (Drosophila)
  ENST ID: ENST00000477712
  CDS Start-End: 1-399
gaacctcattcctttaacaccagaatgtccagctttgatgcttccttgcctgatatgaataatctgcagatttctgagggttcaaaggctgaagctgttcgtgaggaggaggacaccaccgtgcatgaggatgatctttctagttccatcaatgaactcccagcagcttttgaatgcagcgacagctttagcctggacatgactgagggggaagaaaaaggcaatcgggcactggaccagtttaccctggcgagcccgcagcctgtgacgatgccgaggaggcctggcgcagccacatcaaccagcttatgtgtgactcagatggctcctgtgctgtgtatacatttcatgtgttctcctccttgtttaagaatattcagaaaaggttctgcttcctaacctgtgatgcagccagttaccttggagataacctccggggaatcggatccaaatttgtcagctcttcccagatgctcacctcctgctctgaatgtcctacactttttgtggatgccgagactctcctttcatgtggacttctggacaagctcaagttcagtgtgttagaactgcaagaatatttggatacctacaacaacaggaaagaggccacactctcttggcttgcaaattgtaaggcaacatttgcagggggatcaagagatggagtaattacctgtcaaccaggggactccgaagaaaagcaattgg

SEQ ID NO: 135538 - DNA, 13200 bp, Homo sapiens
  Payload ID: 6502
  Gene Symbol: FRY
  Gene Name: furry homolog (Drosophila)
  Uniprot ID: Q5TBA9
  ENST ID: ENST00000542859
  CDS Start-End: 497-9538
agggggcggcgctcccggcccatcccttagccccgcggcggccgtgtgggccggaggctgcctgcaccgcgtcagggaggccggcctagaaaccctccctcccagaagaaagccgatcccagttcaggtggggtcttcctcggttgcgtacctggctggagccgagctggtgggcggccggcagccggcgtttctggtgatgacagccccgaaatgaaagcagcgcggccgccgcctccgagggctgcagggagatcagcgtccagcaaataagaagcaagtcctggacccggaggaggaggagcggccgagcatctctctctgctccgccgtgtcctttagatgagcactcccggccggagccggaggtggatccgcagagctgcctctgggcgcctgaccccgcgctgacatcacaacctgtgacaggcgcatcacgcccggtacctgctcccggccgctgcccgtcctcccagcctctttgtatgccgcagacatggccagccagcaggattcgggcttctttgagatcagtatcaaatatttactgaaatcctggagtaatacttctcccgttggcaacggttacatcaagcctccggttccacctgcttctggcacgcacagggagaaagggccgccaaccatgctacccatcaatgtggacccagacagtaaaccaggagaatatgtcctcaaaagtttatttgtcaacttcaccactcaggctgaacgcaagattcgtatcattatggcagagcccctggaaaagccattgacaaaatctctgcaacgtggagaagacccccaatttgatcaggtcatcagctcaatgagctccctttctgagtactgcctgccttccattctacgtacattatttgactggtataaaaggcaaaatggcattgaggatgaatcacatgaatacagaccaagaacaagcaataaatcaaaaagcgatgaacaacagcgagattatttaatggaaagacgggacctcgccattgattttattttttctttagtattaatagaagttttgaaacagattccacttcatcctgtaatagacagtttaatacatgatgttattaacttggctttcaagcactttaaatacaaagaagggtaccttggtcccaacactggcaatatgcatattgtggcagacctgtatgcagaagtcattggagtgttggcacaagccaaattccctgctgtaaagaagaaatttatggcggagctaaaagaattacggcacaaagagcagaacccatatgtggttcaaagcattatcagcttaataatgggcatgaaattctttcgaattaagatgtatccagtggaggattttgaggcctctcttcagtttatgcaggaatgtgcacattacttcctcgaggtcaaagacaaagatatcaagcatgccttggctgggctttttgttgaaatacttgttccagttgctgctgctgttaaaaatgaagtaaatgttccctgccttagaaattttgtggaaagcctgtatgacaccacgctggaactttcttctcgaaagaagcattccttggccttgtaccccctggtgacctgtttgctctgtgtcagtcagaagcagctgttcctgaacaggtggcacattttcctcaacaactgcttgtccaaccttaaaaacaaagatcccaagatggctcgagttgcactggaatctctctacagattactttgggtttacatgattcgaattaaatgtgaaagcaacacagctactcagagccgacttataaccatcatcacaacacttttccccaaagggtcccgcggtgtggtaccaagggacatgcctctgaacatctttgtgaaaatcatccagttcattgcccaggaacgtttagattttgcaatgaaagaaatcattttcgattttctttgtgtgggaaaaccagcaaaagcattcagtctcaacccagagagaatgaacattggtttacgggcattcttggtcatagctgatagcttgcagcagaaagatggggaacctcccatgccggttacaggagccgttcttccttcaggaaacacgttaagagtaaagaaaacatatttgagtaaaacactaactgaagaggaagccaaaatgataggcatgtccttatattactctcaagtacgaaaagctgtagacaacattttaaggcaccttgataaagaagtaggaaggtgtatgatgctgactaatgtacagatgttaaacaaagaaccggaagacatgatcacgggtgagagaaagccaaaaatagatcttttcaggacctgtgttgctgctattcctcgactgcttcctgatgggatgtcaaaacttgaacttattgacttactggctaggctctctattcatatggatgatgaattgcgacatattgcacaaaattctcttcagggtttacttgttgacttctcagattggagggaagatgtactatttggctttaccaacttcctgctccgggaagtaaatgatatgcatcacacactccttgattcgtccctgaagttgctgctgcagctgctcacccagtggaaactagtcatccagacacaaggaaaagtctatgaacaagccaacaaaatcagaaattcagagctcatcgcaaatggctccagtcacagaattcagtcggaacgaggtccccactgcagtgtactccacgctgtagaaggttttgctctggttttactctgcagtttccaggtggccacacgcaaactgtccgttttaatactcaaggaaattcgagcgttgtttattgccctggggcagcctgaggatgacgacaggccgatgattgatgtcatggatcagctaagttcttccattctagaaagttttattcatgtagcagtttcggattcagcaacattaccactcacccacaatgtggatctgcagtggttggtggaatggaacgcagtcctggtcaatagccattatgatgtgaaaagcccttcccatgtctggatatttgcacagtctgtcaaagacccctgggtcctctgcctcttcagcttcctccggcaggagaacttacccaagcactgccccacagccctcagctatgcctggccttatgccttcactcggctccagtcggtgatgcctctggtggacccaaatagcccaattaatgccaagaaaaccagcactgccggcagcggagacaactatgttactttgtggagaaattacctaattctttgttttggagttgcaaaacccagtattatgagcccaggacacttaagagcttccactccagaaataatggcgaccacacctgatggtacagtgagctacgataacaaggccataggcaccccatcggtgggagttctgttaaagcagttggtgcctttgatgagactagagagcattgagatcacagagtccttagttttaggatttggaagaacaaattcccttgttttcagagaattggtagaagaacttcatccattaatgaaagaagctctggaaagaagaccagagaacaagaaacgccgagaacggcgagacttgttaaggctacaactacttcgaatttttgaacttttggctgatgctggtgtaataagtgacagcacaaatggagccctagagcgggatactttagccctgggagctttgttcttagaatatgtggacttgacccgcatgctcctagaagctgaaaatgacaaagaagttgaaattcttaaagatatccgggcacattttagtgcaatggtggccaacttgattcagtgtgttccagttcaccaccgaagatttctcttcccccagcaaagtctgaggcaccaccttttcatcttattcagccagtgggcaggacccttcagcattatgttcactcctctggatcgttacagtgacagaaatcatcagattacaagatatcagtattgtgcattaaaagcaatgtcagcagtactgtgctgtggccctgtctttgacaatgtgggcctttccccagatggctacctatataaatggcttgacaacattctggcttgtcaagatttacgagttcatcaacttggctgcgaagttgttgtcttgctactggaacttaatcctgaccaaataaatctttttaactgggcaattgaccgatgctacacaggttcctaccaacttgcatctggctgcttcaaagccatagcaactgtgtgtggaagcaggaactatcccttcgacatagtgacattgttaaaccttgttctattcaaggcctctgacaccaacagagagatttatgaaatctccatgcagctcatgcagatccttgaagcaaagctttttgtatactcaaagaaagtcgctgagcaaagaccgggaagtattctctatggaacacacggcccgctgccacccctctacagcgtgtcacttgccctcttgtcatgtgagctggccaggatgtaccctgagctcacactccccctcttctcagaggtaagccagcgattccccacaacacaccccaacgggcgccagatcatgcttacctacctgctgccctggctgcacaacatcgagctggtggacagcaggctcctcctcccggggtcgagccccagcagcccagaggacgaagtcaaggaccgggaaggtgacgtgactgcttctcacgggctgagaggaaatggctggggctctccagaagccacgtcactggtcctgaacaacctcatgtacatgacggccaagtatggagatgaagttcctgggccagaaatggaaaatgcttggaatgctttagccaacaatgagaaatggagcaacaacctgaggatcaccttgcagttcctgattagcctctgtggggtcagcagcgacacagttctcctaccctatattaaaaaagtggcaatatacttgtgccgtaacaacaccattcaaaccatggaagagcttctctttgagctgcagcagacagagcccgtgaaccccatcgtccagcattgtgacaacccgcccttctaccgcttcacggccagtagcaaggcttccgcagcagcctcaggaaccacctctagcagcaatacagtggttgctggccaggaaaatttcccagatgctgaggagaacaagatattgaaagaatctgatgaaaggtttagtaatgtcatcagagcccacactcgcctcgagtcaagatacagcaatagctctggaggatcctacgatgaagataaaaatgatccaatttctccctacacgggctggttgctgactattacagagaccaagcagccgcagcccttaccgatgccttgtactggaggatgctgggcccccctggttgactatctcccggagaccatcactccccgggggccactccacaggtgcaatattgctgtaatttttatgactgaaatggtggtggatcacagtgtacgagaagactgggcgcttcatctaccattattacttcatgctgtcttcttaggtttagaccactaccggcctgaagtctttgaacacagcaaaaaactgcttcttcacctcttgattgccctctcttgcaacagcaatttccattccattgcttccgtgctcctgcagacccgagagatgggtgaagctaagactctaaccgtgcagccagcctaccaacctgaatatctctatacaggtggctttgacttcctgagagaggaccagtcatccccggtgcctgactcagggcttagttcaagctccacctcctctagcatcagtctgggaggcagcagtggaaacctcccacagatgacccaggaggtagaagatgtggacacagctgctgaaacagatgagaaggcaaacaagctcattgagtttctcacgaccagggcatttggtccactttggtgccatgaagacatcacacctaaaaatcaaaattcaaagagtgctgaacagctcactaattttctacgtcacgttgtatctgtatttaaagattccaaatcaggcttccatctggagcaccagttgagtgaagttgcattgcagacagccctcgcaagctcttcaaggcactatgctggtcggtccttccagatattccgggccctcaagcaacctctgtcagcacatgccttatctgaccttctctcaagattggtggaggtgataggagaacatggagatgagattcagggttatgtaatggaagcgctcctaaccttggaggcggctgtggataacttgtctgactgcttgaagaacagtgacctcctaactgtattgtcccgctcttcctcaccagatttaagctccagcagtaaactaacagcaagcagaaagagcacaggacaactaaacatgaacccgggaaccaccagcggcaacaccgcaactgccgaacggagccggcatcaacgaagcttctctgtgcccaagaagtttggtgtcatcgaccgatcctctgacccacctcgaagtgccacactggacagaattcaggcttgtacccaacaaggcctctcctcaaaaaccagaagctcatcctccttgaaggacagtctcacggacccatcccacataaaccatcccaccaacctgctggccaccatattctgggtcacagtggccttgatggagtctgattttgagtttgaatacttaatggccttaaggctgttgagcagactactggcacatatgccactcgataaggctgagaaccgagaaaagcttgagaaactccaggcacagctgaagtgggccgacttctccgggctgcagcagctgctgctgaaaggattcacatccctcaccaccacagacctgaccctgcagctcttcagtctgctgacaccagtgtccaaaatatccatggtggatgcatcccacgctattgggtttccactgaatgtcttgtgtctcctgcctcagctgattcagcattttgaaaatcccaatcagttctgtaaggatatagccgaaaggattgctcaggtttgtttagaagagaagaaccccaaactttcaaatcttgcacatgtcatgactctttataaaacgcacagctacacgagggactgtgccacgtgggtcaatgtggtctgtcgataccttcatgaagcatatgctgacattaccttgaatatggttacctacctggcagagctgctggagaagggcctccctagtgtgcagcagcccctgctccaggtgatctacagtcttctcagctacatggacctttctgtcgttcctgtcaaacagttcaatgtggaagttctgaagacaattgaaaaatatgtgcaaagtgttcactggagagaagctctgaatatcttgaagctggtagtttctcggtcagccagccttgttttaccttcataccagcacagtgacctctcaaaaatagaaatacatcgagtgtggactagtgcttccaaggaattacctgggaaaaccctggacttccacttcgatatttcggagactccaatcatcgggaggcggtatgatgagctgcagaattcttctgggcgtgatgggaagcccagggccatggccgtcacccggagcacatcttccacttcctcaggctccaactccaacgtccttgttccagtgagctggaaaaggccccagtattctcagaagagaacaaaagagaagttggtacatgtcctttctctgtgtggccaagaagtaggattgagcaaaaatccatcagtgattttttcatcgtgtggggatctggatctgcttgagcaccagacaagcttggtatcttctgaggacggtgcccgagagcaggagaacatggatgacacaaacagcgagcagcagtttagagtcttcagagacttcgacttcctagatgtggagctggaggatggagagggtgagagtatggacaatttcaactggggagtgcgcagacgttctctggacagcctggataagtgtgatatgcagattctggaggagcgccaactgtcaggaagcactcctagcctgaataaaatgcaccatgaggactccgatgaatcatccgaggaggaggacctcacagccagccagatcctggagcactcagacctaatcatgactctctccccctctgaagagacgaatcccatggagctgctcaccacagcctgtgactcgacccctgcagaacctcattcctttaacaccagaatgtccagctttgatgcttccttgcctgatatgaataatctgcagatttctgagggttcaaaggctgaagctgttcgtgaggaggaggacaccaccgtgcatgaggatgatctttctagttccatcaatgaactcccagcagcttttgaatgcagcgacagctttagcctggacatgactgagggggaagaaaaaggcaatcgggcactggaccagtttaccctggcgagctttggagaaggtgacaggggagtctctccccctccctcgcccttcttctcagccatccttgccgcctttcagcccgcagcctgtgacgatgccgaggaggcctggcgcagccacatcaaccagcttatgtgtgactcagatggctcctgtgctgtgtatacatttcatgtgttctcctccttgtttaagaatattcagaaaaggttctgcttcctaacctgtgatgcagccagttaccttggagataacctccggggaatcggatccaaatttgtcagctcttcccagatgctcacctcctgctctgaatgtcctacactttttgtggatgccgagactctcctttcatgtggacttctggacaagctcaagttcagtgtgttagaactgcaagaatatttggatacctacaacaacaggaaagaggccacactctcttggcttgcaaattgtaaggcaacatttgcagggggatcaagagatggagtaattacctgtcaaccaggggactccgaagaaaagcaattggaactgtgtcagagattatataagctacacttccagctgctattgctttttcagtcctactgtaagctcatcggccaggtgcacgaagttagctccatgccagagctgctgaatatgtccagggaactgagtgacctaaagaaacacctgaaggaagccagtgcagtcattgcagctgaccctctctattcagacggcgcgtggtccgagcccaccttcacgtccactgaagcagccatccagtccatgctggagtgcctgaagaacaacgaactcggcaaagctttgcggcagatcagggagtgcagaagtctgtggcccaatgacatctttggaagcagttctgatgatgaggtccagacactactgaatatttatttccgtcaccaaactctgggacagacgggtacttatgccctggtggggtctaaccagagcctgaccgagatctgcaccaagctgatggagctgaacatggagatccgggacatgatccgcagggcccagagttaccgagtcctcactacttttcttccagactccagtgtttctggcactagtctctgacaggagcctcctgtccccactgggttccaaactggcagtgctgccatgctggggcaacgtcattcagtgtcttctcggccttcaaaaggcttggacagactgttctccctcttgttacctgtagggctttttctaaagaggatggcagaacttccaacgtgtagcaatactataagaaccaaggtagcttagaacgtcctggacagactccactcatcatgctgtgtggcacaaatgtgttacatttgaccgagcatatgcaactcgctactgaagaagtgacttccgttgcataccaaagccgactacactgaacagtaccttcctttctagaaacaattttagattggcaaaagtgcaatgttttcttcactcaaaaaattttatattctcaaacatgtatattctttccctgtcttgttccattttcttttcttttttcttttttctttttcctttctttcgtgggctgagaaaggggcaggcaaaatgaagctggccactgaaaactgtaagatggtcaaaagctgacagcctgtgtatgtgaaaagggaattgtaaatggactgcaatgtaatgtacactgtaatttgaatacaattactgtatctaaaaggagctgctatgaagtacctttcttatgttgctaggctactgtttctgaaagccctggatctctttgcaccaaaaatggtccagatagactctttttaaggatcttggctgctttttactagaaggttgcttttatgagcatatttatactgctgaaggatgagtgttaattttaattaactttgccgttttgtagagaaaactattcacaagataaattccaagtcttttcacctgtcaggcatgcatattttaatatctgtttggatagtcagaagtagaatcataaaggtaaaatatgagttgttactttgtttcttcgatgtcatattttatgtgtaatatatatgtaaagggccattcttaagttctctccttaaacttaatgctgtcaagtgttagatgtgtgcatgtgaacttgttgcactgcagaaacatattcagagtttatctatgtaacttattcactctgtaaatacatttaaagtttttgtgatgtaagcttaattgatattctgttcagaactttctttagactaaaaaaaaaaaaaaagacaaaatacacgttgaccatggactttatttctggttaatgaaaatgtttgtcctgggcacacatgaagttttgcatgtgggttgccaaagtaataaccccaaggggcacccctcgcatgtatgatctgaatggcacccgtgggggtcatgccatgcatggccctgtgaagctggaggtaagtattatctctttggaagttggcatcaaaactgtgagcttcaaccaattctctgtaatcaaccaaagagaaaaatcagaaaaaagtgagagctctaattctccataacctataattaggttgtcatccttcaaatttggaagttaattctatagtgagcaggaaaaagtagtagagttgtaattctgtcaccaacacctatcccccaggaacacagggagaaacatgtaacaatctcatttatgccgtctttctactcatattttacatggaccaacaaatatagcttgctttactagcatatggctactgaatcattggcagtaatattctaggagtattctatagaagagagcctaacctaggattttttttaaatcctagtagttgctacagatgcaactactagattttaataattttctggactgctgaaaacatatttttctgatgatttatttttttcaacttgcctgaaagatgatttgctatgatttgtagaaacaactgaatcatgatctctctgaaaaatatcataaaataaaggtttctgtggctaaccacagtagacaactttcagagagttttgttgggagccacagtagaaagaacagattcgtcatgaactgagttttctaccatggcttcttacccagcagagaaccaccgtgatggtttactcttaaaaagggaaggaaaaaaaaaaaggatttcaacagtacattacaatccaagatattaacataggaagcagtggtctgtgtttttctcaattttatttttaaaaggagatgtattaatgtgaaaggtttcttctacttttcctctatctcttcacctcctctactttaagtggagatgggaaaaattgtgtaggatgcagccccacgccagcagagcccagcaataactttagatctaccagtcaaatcttgtcggctattgctctgtgcctctgttacagaagcattaatgttaattgccttccccagggatacaaagaagtagaagtaccaaaggaaagggtagatatttaacagatgcctcagtgataagaaagatgcctccttgtgtctcactgttttctagcactgaaacatgatacactttgtatccacctgcagaataaagcaatccagacaggcgctctgtaacttagacatcacttgattaaaattatagtctccaaatatagtgttttagaaaaggcactgcacatttttagaggcacgtgaatgtcattcccacctctaacccatctaacatcggtgagatgttaagaaaatgtgccgatgttactgtgaaataaagatgcctgtaattaattgtaggcatcacacacatgcgtgaacatccagagttaggtctcaaggctcttctggttctaagtcctaacaaacaatgatcttttcagtgaactgtagaattctggaaagaataagcgtacctccaggctgcttacatcaatagcttacacgtgcttcctgatgcctgccttaacaacaaaaaattcgtgtccataggtgagtattagggtatgttcattgtatctcaatgaaactagtttttaaagttttcaatgcatttgtttgagatcaattaatatttggatacctatcatgacccaggatatttctttgttcagcaaatatttattgcatgcccactctgggctaggcactgttttagaggacaccgcagctatcaaggcagatgtggtccctgttcccatgaggctcctacatttgagtggaggaagatgtacttgtctacgttgggtgatgattagtgccatgaagaacaaaacggatacagtgagtaatgtggacagggctatcttagctatcactctaataaggtgatatctgaggagagatctgaatgaagtgaggatacaatggatatccaaggaaaagagcattccagcaaaggaaaaaacacatgcagagaccctgaaggagaagcagggtcactttgtcaaagggacagcaaggaagccaatgaccgggtgaaatgagtgaagagagcgttcagagaggacagccaaaagctctgtgggccacggcaggactttgtcccttgctgagcaagatgggaagccactgaatgtttgcgggcagggtagtgacatgctgtgacttatgtttaaaaggattactccttcatagcgatgaagaaaagctctataacaaaagttccgttgtggtggttatacagcattgtgaatgtacttaatgccaatgaattgtgtactttaaaatggtaaattttatgttatatatgttttaccacaataaaaataatttttttaaa

SEQ ID NO: 135539 - DNA, 5119 bp, Homo sapiens
  Payload ID: 6503
  Gene Symbol: FUS
  Gene Name: FUS RNA binding protein
  Uniprot ID: P35637
  ENST ID: ENST00000254108
  CDS Start-End: 106-1686
acttaagcttcgacgcaggaggcggggctgctcagtcctccaggcgtcggtactcagcggtgttggaacttcgttgcttgcttgcctgtgcgcgcgtgcgcggacatggcctcaaacgattatacccaacaagcaacccaaagctatggggcctaccccacccagcccgggcagggctattcccagcagagcagtcagccctacggacagcagagttacagtggttatagccagtccacggacacttcaggctatggccagagcagctattcttcttatggccagagccagaacacaggctatggaactcagtcaactccccagggatatggctcgactggcggctatggcagtagccagagctcccaatcgtcttacgggcagcagtcctcctaccctggctatggccagcagccagctcccagcagcacctcgggaagttacggtagcagttctcagagcagcagctatgggcagccccagagtgggagctacagccagcagcctagctatggtggacagcagcaaagctatggacagcagcaaagctataatccccctcagggctatggacagcagaaccagtacaacagcagcagtggtggtggaggtggaggtggaggtggaggtaactatggccaagatcaatcctccatgagtagtggtggtggcagtggtggcggttatggcaatcaagaccagagtggtggaggtggcagcggtggctatggacagcaggaccgtggaggccgcggcaggggtggcagtggtggcggcggcggcggcggcggtggtggttacaaccgcagcagtggtggctatgaacccagaggtcgtggaggtggccgtggaggcagaggtggcatgggcggaagtgaccgtggtggcttcaataaatttggtggccctcgggaccaaggatcacgtcatgactccgaacaggataattcagacaacaacaccatctttgtgcaaggcctgggtgagaatgttacaattgagtctgtggctgattacttcaagcagattggtattattaagacaaacaagaaaacgggacagcccatgattaatttgtacacagacagggaaactggcaagctgaagggagaggcaacggtctcttttgatgacccaccttcagctaaagcagctattgactggtttgatggtaaagaattctccggaaatcctatcaaggtctcatttgctactcgccgggcagactttaatcggggtggtggcaatggtcgtggaggccgagggcgaggaggacccatgggccgtggaggctatggaggtggtggcagtggtggtggtggccgaggaggatttcccagtggaggtggtggcggtggaggacagcagcgagctggtgactggaagtgtcctaatcccacctgtgagaatatgaacttctcttggaggaatgaatgcaaccagtgtaaggcccctaaaccagatggcccaggagggggaccaggtggctctcacatggggggtaactacggggatgatcgtcgtggtggcagaggaggctatgatcgaggcggctaccggggccgcggcggggaccgtggaggcttccgagggggccggggtggtggggacagaggtggctttggccctggcaagatggattccaggggtgagcacagacaggatcgcagggagaggccgtattaattagcctggctccccaggttctggaacagctttttgtcctgtacccagtgttaccctcgttattttgtaaccttccaattcctgatcacccaagggtttttttgtgtcggactatgtaattgtaactatacctctggttcccattaaaagtgaccattttagttaaattttgttcctcttcccccttttcactttcctggaagatcgatgtcccgatcaggaaggtagagagttttcctgttcagattaccctgcccagcaggaactggaatacagtgttcggggagaaggccaaatgatatccttgagagcagagattaaacttttctgtcatggggaaagttggtgtataaatgagaaatgaagaacatgggatgtcatgagtgttggcctaaatttgcccagctatggggaatttttcctttaccacatttatttgcatactggtcttagtttatttgcagcagtttatccctttttaagaactctttgatcttttggcccttttaatggtgaggctcaaacaaactacatttaaatggggcagtattcagatttgaccatggtggagagcgcttagccactctgggtctttcacaggaaggagagtaactgagtgctgcaggagtttgtggagtggagtcaggatctaggaggtgagtgactcccttcctagctgccctggtgaacagcgcttgggtagatacctgctataaggagactggtctggctgggttactttcacatcctgcctgtactcagagggcttgaggtcattgacattatgagattttaggcttgatccctttttgattggagggtggaaggccctcctaagggaatgataagtgataagagggggaaggggttgcagccaatgagttaaaaccttagagcagtgctcctcagcctcttaccatgtggttgtaaacttgcacgtacctgccaaccagttatttagcatgctttttattttagttacacagagcgtaacattaacccaagagcagaaaggttttatttacagggttttcgaacttggtttgtaagacagctgccatcacaagcatagcttacaaatgtgctggggacccctaattgggaagtgctttcctctcaaatttttattttttatttttagagacagagtcttgctctgtcatccaggctggagtgcagtggcgtgatctcggctcactgtagcctctgcctcctgagtttaagcgattctcctgcctcaggagaatcccagcttctgagtagctgagactacaggcgtgggccaccatgcccacctagtttttgcatttttagtggaggtgtggtttcactgtgttggccaggctggtctcttaactcctgacctcaggtgatccacctgccttggcctcccaaagtgctggaattacaggcatgagccgctgcatctggccatcctctcaaattttcaagtgttccacaagtatgttctctactgaagagttgctgcatccttgaatcttgggtgatttgaggcacagaaactatgactttattttttgagatggagttttgctcttgttgcccaggctggagtgcaatggcacgtttttcggcttaccgcaactgccgcctcctgggttcaagcgatagctgggattacaggcatgcgccaccatgcccagctaatttatttgtatttttagtagagacggggtttctccatgttggtcaggctggtctcgaactcccgacctcaggtgatgtgcacacctcagcctcccaataaaccatgacttttaagaggaatagcaggtttacttcccctgccagcattggggtgctctctaagcaacagtaggcggagagtggtctggcgtattaaaaacaaaggatcgtcaagtgggccttcccaggcattgctttgacttagtacatgtagaggatgtggcagttctctccgtccctgccactgctggtttctttgttaaatgtttagttgaaatggcctgatacgatatttgagtagttcactgttggtgctttgcctagcaggattctaatcttgctttggttgtggtcccctgatgccctcctgttaggagtggaggaggtcgaagctccttgtaagatatgattactgggaccattagtgtcaagttcctgtgtccttcaaatggcatatgtgattggccttgaccttaaaaggaaatagggtcccaggtgactgtttagtgggtaggtccagtttggggggatcttccaggagaatggatagagacacctagcagcagagagaacattggtgcctctcaagccaacctcccacctcagcctcccaagtagctgggactacaggtgcttcctcgctaccacacctgggtaattttttttttaattacttttttttttttaagaaacagggtttcactgggttgcccaggctggtcttgaactggcctcaagtgacctgcctgcctcagcctcccaaagtgctgggatcacaggtgtgacccactgcgtttggccagaatactctattcttactgaatgattgaaatctgtcttgaagcattaggtgtcccatttttgtgagttggaattgggacaggctaagtaggaagtgaggagggtggggagagctgtgctgtaggtctgtttgtcccttccttgatgtagccttcagttagccctttcagcttttttccccatcttgtgccgggccttcctgggtttcagtacttggatgtagggctgcagttatgtcagtggtgggtagattgaccaggaattaaggtctagggtccagcccatgtgagacttgactcactgatctacctttaggcatgtcttccttccagtctcatcctttttaaattttttttttttttttgagacggtctcactctcacccaggctggattgcagtggtgtgatctcgaccaactgcaacctctgcctcccacccgcaagctatctgcccacctcagcctctggagtagctgggacgggactacaggcacctgccaccatgactggctaatttttttttgtattttttgtggagatggggtcttgccatgttgctcaggctggtctggtctcaaaactgctctgggctcaagtgattgtcccactttggcctcccagagtgctgggattaaggtgtgagatactgtgtccggctatgaaaattttatttttaattaacttgtatatatttatggggtacaatgtcctatttctgtacatgtacacattgtggaatcaaatcaggctaatatatccatcacttcatatcattagcatgaatgagaacatacaaagccactcttagaaaattttgaaatttatgttatttcagcccttttatgctggaggttgcaaatgttttgtgaataatcagaccaaaaataaaaacaaaaaatgattgacttcagtcattcagtaagaa

SEQ ID NO: 135540 - DNA, 1818 bp, Homo sapiens
  Payload ID: 6503
  Gene Symbol: FUS
  Gene Name: FUS RNA binding protein
  Uniprot ID: P35637
  ENST ID: ENST00000380244
  CDS Start-End: 77-1654
gctcagtcctccaggcgtcggtactcagcggtgttggaacttcgttgcttgcttgcctgtgcgcgcgtgcgcggacatggcctcaaacgattatacccaacaagcaacccaaagctatggggcctaccccacccagcccgggcagggctattcccagcagagcagtcagccctacggacagcagagttacagtggttatagccagtccacggacacttcaggctatggccagagcagctattcttcttatggccagagccagaacagctatggaactcagtcaactccccagggatatggctcgactggcggctatggcagtagccagagctcccaatcgtcttacgggcagcagtcctcctaccctggctatggccagcagccagctcccagcagcacctcgggaagttacggtagcagttctcagagcagcagctatgggcagccccagagtgggagctacagccagcagcctagctatggtggacagcagcaaagctatggacagcagcaaagctataatccccctcagggctatggacagcagaaccagtacaacagcagcagtggtggtggaggtggaggtggaggtggaggtaactatggccaagatcaatcctccatgagtagtggtggtggcagtggtggcggttatggcaatcaagaccagagtggtggaggtggcagcggtggctatggacagcaggaccgtggaggccgcggcaggggtggcagtggtggcggcggcggcggcggcggtggtggttacaaccgcagcagtggtggctatgaacccagaggtcgtggaggtggccgtggaggcagaggtggcatgggcggaagtgaccgtggtggcttcaataaatttggtggccctcgggaccaaggatcacgtcatgactccgaacaggataattcagacaacaacaccatctttgtgcaaggcctgggtgagaatgttacaattgagtctgtggctgattacttcaagcagattggtattattaagacaaacaagaaaacgggacagcccatgattaatttgtacacagacagggaaactggcaagctgaagggagaggcaacggtctcttttgatgacccaccttcagctaaagcagctattgactggtttgatggtaaagaattctccggaaatcctatcaaggtctcatttgctactcgccgggcagactttaatcggggtggtggcaatggtcgtggaggccgagggcgaggaggacccatgggccgtggaggctatggaggtggtggcagtggtggtggtggccgaggaggatttcccagtggaggtggtggcggtggaggacagcagcgagctggtgactggaagtgtcctaatcccacctgtgagaatatgaacttctcttggaggaatgaatgcaaccagtgtaaggcccctaaaccagatggcccaggagggggaccaggtggctctcacatggggggtaactacggggatgatcgtcgtggtggcagaggaggctatgatcgaggcggctaccggggccgcggcggggaccgtggaggcttccgagggggccggggtggtggggacagaggtggctttggccctggcaagatggattccaggggtgagcacagacaggatcgcagggagaggccgtattaattagcctggctccccaggttctggaacagctttttgtcctgtacccagtgttaccctcgttattttgtaaccttccaattcctgatcacccaagggtttttttgtgtcggactatgtaattgtaactatacctctggttcccattaaaagtgaccattttagtt

SEQ ID NO: 135541 - DNA, 1787 bp, Homo sapiens
  Payload ID: 6503
  Gene Symbol: FUS
  Gene Name: FUS RNA binding protein
  ENST ID: ENST00000566605
  CDS Start-End: 78-869
tgctcagtcctccaggcgtcggtactcagcggtgttggaacttcgttgcttgcttgcctgtgcgcgcgtgcgcggacatggcctcaaacgattatacccaacaagcaacccaaagctatggggcctaccccacccagcccgggcagggctattcccagcagagcagtcagccctacggacagcagagttacagtggttatagccagtccacggacacttcaggctatggccagagcagctattcttcttatggccagagccagaacacaggctatggaactcagtcaactccccagggatatggctcgactggcggctatggcagtagccagagctcccaatcgtcttacgggcagcagtcctcctaccctggctatggccagcagccagctcccagcagcacctcgggaagttacggtagcagttctcagagcagcagctatgggcagccccagagtgggagctacagccagcagcctagctatggtggacagcagcaaagctatggacagcagcaaagctataatccccctcagggctatggacagcagaaccagtacaacagcagcagtggtggtggaggtggaggtggaggtggaggtaactatggccaagatcaatcctccatgagtagtggtggtggcagtggtggcggttatggcaatcaagaccagagtggtggaggtggcagcggtggctatggacagcaggaccgtggaggccgcggcaggggtggcagtggtggcggcggcggcggcggcggtggtggttacaaccgcagcagtggtggctatgaacccagaggtcgtggaggtggccgtggaggcagaggtggcatggggccctcgggaccaaggatcacgtcatgactccgaacaggataattcagacaacaacaccatctttgtgcaaggcctgggtgagaatgttacaattgagtctgtggctgattacttcaagcagattggtattattaagacaaacaagaaaacgggacagcccatgattaatttgtacacagacagggaaactggcaagctgaagggagaggcaacggtctcttttgatgacccaccttcagctaaagcagctattgactggtttgatggtaaagaattctccggaaatcctatcaaggtctcatttgctactcgccgggcagactttaatcggggtggtggcaatggtcgtggaggccgagggcgaggaggacccatgggccgtggaggctatggaggtggtggcagtggtggtggtggccgaggaggatttcccagtggaggtggtggcggtggaggacagcagcgagctggtgactggaagtgtcctaatcccacctgtgagaatatgaacttctcttggaggaatgaatgcaaccagtgtaaggcccctaaaccagatggcccaggagggggaccaggtggctctcacatggggggtaactacggggatgatcgtcgtggtggcagaggaggctatgatcgaggcggctaccggggccgcggcggggaccgtggaggcttccgagggggccggggtggtggggacagaggtggctttggccctggcaagatggattccaggggtgagcacagacaggatcgcagggagaggccgtattaattagcctggctccccaggttctggaacagctttttgtcctgtacccagtgttaccctcgttattttgtaaccttccaattcctgatcacccaagggtttttttgtgtcggactatgtaattgtaactatacctctggttcccattaaaagtgaccattttagtt

SEQ ID NO: 135542 - DNA, 1785 bp, Homo sapiens
  Payload ID: 6503
  Gene Symbol: FUS
  Gene Name: FUS RNA binding protein
  ENST ID: ENST00000568685
  CDS Start-End: 65-1648
aggcgtcggtactcagcggtgttggaacttcgttgcttgcttgcctgtgcgcgcgtgcgcggacatggcctcaaacgattatacccaacaagcaacccaaagctatggggcctaccccacccagcccgggcagggctattcccagcagagcagtcagccctacggacagcagagttacagtggttatagccagtccacggacacttcaggctatggccagagcagctattcttcttatggccagagccagaacacaggctatggaactcagtcaactccccagggatatggctcgactggcggctatggcagtagccagagctcccaatcgtcttacgggcagcagtcctcctaccctggctatggccagcagccagctcccagcagcacctcgggaagttacggtagcagttctcagagcagcagctatgggcagccccagagtgggagctacagccagcagcctagctatggtggacagcagcaaagctatggacagcagcaaagctataatccccctcagggctatggacagcagaaccagtacaacagcagcagtggtggtggaggtggaggtggaggtggaggtaactatggccaagatcaatcctccatgagtagtggtggtggcagtggtggcggttatggcaatcaagaccagagtggtggaggtggcagcggtggctatggacagcaggaccgtggaggccgcggcaggggtggcagtggtggcggcggcggcggcggcggtggtggttacaaccgcagcagtggtggctatgaacccagaggtcgtggaggtggccgtggaggcagaggtggcatgggcggaagtgaccgtggtggcttcaataaatttggtggccctcgggaccaaggatcacgtcatgactccgcagaacaggataattcagacaacaacaccatctttgtgcaaggcctgggtgagaatgttacaattgagtctgtggctgattacttcaagcagattggtattattaagacaaacaagaaaacgggacagcccatgattaatttgtacacagacagggaaactggcaagctgaagggagaggcaacggtctcttttgatgacccaccttcagctaaagcagctattgactggtttgatggtaaagaattctccggaaatcctatcaaggtctcatttgctactcgccgggcagactttaatcggggtggtggcaatggtcgtggaggccgagggcgaggaggacccatgggccgtggaggctatggaggtggtggcagtggtggtggtggccgaggaggatttcccagtggaggtggtggcggtggaggacagcagcgagctggtgactggaagtgtcctaatcccacctgtgagaatatgaacttctcttggaggaatgaatgcaaccagtgtaaggcccctaaaccagatggcccaggagggggaccaggtggctctcacatggggggtaactacggggatgatcgtcgtggtggcagaggaggctatgatcgaggcggctaccggggccgcggcggggaccgtggaggcttccgagggggccggggtggtggggacagaggtggctttggccctggcaagatggattccaggggtgagcacagacaggatcgcagggagaggccgtattaattagcctggctccccaggttctggaacagctttttgtcctgtacccagtgttaccctcgttattttgtaaccttccaattcctgatcacccaagggtttttttgtgtcggactatgtaattgtaactatacctctgg

SEQ ID NO: 135543 - DNA, 1675 bp, Homo sapiens
  Payload ID: 6504
  Gene Symbol: FUZ
  Gene Name: fuzzy planar cell polarity protein
  Uniprot ID: Q9BT04
  ENST ID: ENST00000313777
  CDS Start-End: 165-1421
tgtttgagttgggtgaagaaggcgggaagttaatcctcttccaatcagctccccatctcgccctctggcggctccggaccacaggccgagttactctgattaccgccatgctccaagacccgcactgacagtccccacgtgagggaccgcggtgggagtcctaaatgggggaggaggggacgggcggcactgtgcatctgctgtgcctcgcggcctccagcggggtccccctattctgcaggagcagtcgcggcggcgcccccgcccgtcagcagctcccgttctctgtcatcggttccctcaatggagtccacatgtttgggcagaatctggaggtgcagctgagctctgcgaggaccgagaacacgactgtggtgtggaaaagcttccatgacagcatcaccctcattgttctgtcatctgaggtgggcatctctgagctgaggctggagagactactccaaatggtgtttggagccatggtccttcttgtgggacttgaagaactgaccaatatccgcaacgtggagagactgaagaaggacttgagggccagttattgcctcatcgacagcttcctgggggactcggagctcatcggggacctgacccagtgtgtggactgcgtgattcctccagaggggtccctcttgcaggaagccctctccgggttcgctgaggccgcgggcacgaccttcgtcagtctggtggtgtccggccgggtggtggcagcaacagagggttggtggcggctggggacgcccgaggccgtgctgctcccctggctggtggggtccctgccgccgcagaccgctcgcgactacccggtgtacctgccgcacgggagccccacggtcccacaccggctcctgaccctgactctgctgccgagcctggagctgtgtctactctgcgggccgagcccacccctcagccagttgtatccacagcttctggagcgctggtggcagccactgctggacccgttgcgggcctgtctgccgttgggaccccgggcgctgcccagtggcttcccccttcacacagacatcctcgggctgctgctcctccacctggaactgaagcgctgcctcttcaccgtggagcccttgggggataaagagccttcaccagaacagcgccggcgcctcctccgaaacttctataccctggtcacctccacgcacttcccaccagagccagggccaccagagaagacagaagatgaggtctaccaggcccagctgcccagagcttgctacctggtgttggggactgaggaaccaggcacaggagtgcgtctggtggccttgcagctggggcttcggcggctgctgctgctgctgtctccccagagtcccacccatgggctgcgaagcctggccacccacactctgcatgccctcaccccacttctttgactacctagcagtgggtgatggacacagacatggggctgttagcgtctctctgtttattcgctcacaataatacacagcccctggatggggagggggtaggaggggctacaacagggtggggtgggaggggaggagacatccacttccctggcccctctcccctctgtgcttgggggggaaagggagggagggggactccccctaaccccccagaatgtaaacagcagcagatgaacaaaaataaaaatacaaaa

SEQ ID NO: 135544 - DNA, 1632 bp, Homo sapiens
  Payload ID: 6504
  Gene Symbol: FUZ
  Gene Name: fuzzy planar cell polarity protein
  ENST ID: ENST00000377092
  CDS Start-End: 168-404
gtctgtttgagttgggtgaagaaggcgggaagttaatcctcttccaatcagctccccatctcgccctctggcggctccggaccacaggccgagttactctgattaccgccatgctccaagacccgcactgacagtccccacgtgagggaccgcggtgggagtcctaaatgggggaggaggggacgggcggcactgtgcatctgctgtgcctcgcggcctccagcggggtccccctattctgcaggagcagtcgcggcggcgcccccgcccgtcagcagctcccgttctctgtcatcggttccctcaatggagtccacatgtttgggcagaatctggaggtgcagctgagctctgcgaggaccgagaacacgactgtgcatcaccctcattgttctgtcatctgaggtgggcatctctgagctgaggctggagagactactccaaatggtgtttggagccatggtccttcttgtgggacttgaagaactgaccaatatccgcaacgtggagagactgaagaaggacttgagggccagttattgcctcatcgacagcttcctgggggactcggagctcatcggggacctgacccagtgtgtggactgcgtgattcctccagaggggtccctcttgcaggaagccctctccgggttcgctgaggccgcgggcacgaccttcgtcagtctggtggtgtccggccgggtggtggcagcaacagagggttggtggcggctggggacgcccgaggccgtgctgctcccctggctggtggggtccctgccgccgcagaccgctcgcgactacccggtgtacctgccgcacgggagccccacggtcccacaccggctcctgaccctgactctgctgccgagcctggagctgtgtctactctgcgggccgagcccacccctcagccagttgtatccacagcttctggagcgctggtggcagccactgctggacccgttgcgggcctgtctgccgttgggaccccgggcgctgcccagtggcttcccccttcacacagacatcctcgggctgctgctcctccacctggaactgaagcgctgcctcttcaccgtggagcccttgggggataaagagccttcaccagaacagcgccggcgcctcctccgaaacttctataccctggtcacctccacgcacttcccaccagagccagggccaccagagaagacagaagatgaggtctaccaggcccagctgcccagagcttgctacctggtgttggggactgaggaaccaggcacaggagtgcgtctggtggccttgcagctggggcttcggcggctgctgctgctgctgtctccccagagtcccacccatgggctgcgaagcctggccacccacactctgcatgccctcaccccacttctttgactacctagcagtgggtgatggacacagacatggggctgttagcgtctctctgtttattcgctcacaataatacacagcccctggatggggagggggtaggaggggctacaacagggtggggtgggaggggaggagacatccacttccctggcccctctcccctctgtgcttgggggggaaagggagggagggggactccccctaaccccccagaatgtaaacagcagcaga

SEQ ID NO: 135545 - DNA, 703 bp, Homo sapiens
  Payload ID: 6504
  Gene Symbol: FUZ
  Gene Name: fuzzy planar cell polarity protein
  ENST ID: ENST00000528043
  CDS Start-End: 157-417
gcgggaagttaatcctcttccaatcagctccccatctcgccctctggcggctccggaccacaggccgagttactctgattaccgccatgctccaagacccgcactgacagtccccacctcccgttctctgtcatcggttccctcaatggagtccacatgtttgggcagaatctggaggtgcagctgagctctgcgaggaccgagaacacgactgtggtgtggaaaagcttccatgacagcatcaccctcattgttctgtcatctgaggtgggcatctctgagctgaggctggagagactactccaaatggtgtttggagccatggtccttcttgtgggacttgaagaactgaccaatatccgcaacgtggagagactgaagaaggacttgagggctggtcccttcttcctctcctaggccagttattgcctcatcgacagcttcctgggggactcggagctcatcggggacctgacccagtgtgtggactgcgtgattcctccagaggggtccctcttgcaggaagccctctccgggttcgctgaggccgcgggcacgaccttcgtcagtctggtggtgtccggccgggtggtggcagcaacagagggttggtggcggctggggacgcccgaggccgtgctgctcccctggctggtggggtccctgccgccgcagaccgctcgcgactacccggtgtacctgc

SEQ ID NO: 135546 - DNA, 1483 bp, Homo sapiens
  Payload ID: 6504
  Gene Symbol: FUZ
  Gene Name: fuzzy planar cell polarity protein
  ENST ID: ENST00000525370
  CDS Start-End: 51-311
aagacccgcactgacagtccccacgtgagggaccgcggtgggagtcctaaatgggggaggaggggacgggcggcactgtgcatctgctgtgcctcgcggcctccagcggggtccccctattctgcaggagcagtcgcggcggcgcccccgcccgtcagcagctcccgttctctgtcatcggttccctcaatggagtccacatgtttgggcagaatctggaggtgcagctgagctctgcgaggaccgagaacacgactgtggtgtggaaaagcttccatgacaggtccttcttgtgggacttgaagaactgaccaatatccgcaacgtggagagactgaagaaggacttgagggccagttattgcctcatcgacagcttcctgggggactcggagctcatcggggacctgacccagtgtgtggactgcgtgattcctccagaggggtccctcttgcaggaagccctctccgggttcgctgaggccgcgggcacgaccttcgtcagtctggtggtgtccggccgggtggtggcagcaacagagggttggtggcggctggggacgcccgaggccgtgctgctcccctggctggtggggtccctgccgccgcagaccgctcgcgactacccggtgtacctgccgcacgggagccccacggtcccacaccggctcctgaccctgactctgctgccgagcctggagctgtgtctactctgcgggccgagcccacccctcagccagttgtatccacagcttctggagcgctggtggcagccactgctggacccgttgcgggcctgtctgccgttgggaccccgggcgctgcccagtggcttcccccttcacacagacatcctcgggctgctgctcctccacctggaactgaagcgctgcctcttcaccgtggagcccttgggggataaagcagagccttcaccagaacagcgccggcgcctcctccgaaacttctataccctggtcacctccacgcacttcccaccagagccagggccaccagagaagacagaagatgaggtctaccaggcccagctgcccagagcttgctacctggtgttggggactgaggaaccaggcacaggagtgcgtctggtggccttgcagctggggcttcggcggctgctgctgctgctgtctccccagagtcccacccatgggctgcgaagcctggccacccacactctgcatgccctcaccccacttctttgactacctagcagtgggtgatggacacagacatggggctgttagcgtctctctgtttattcgctcacaataatacacagcccctggatggggagggggtaggaggggctacaacagggtggggtgggaggggaggagacatccacttccctggcccctctcccctctgtgcttgggggggaaagggagggagggggactccccctaaccccccagaatgtaaacagcagcagatgaacaaaaataaaaatacaaaaggcc

SEQ ID NO: 135547 - DNA, 1524 bp, Homo sapiens
  Payload ID: 6504
  Gene Symbol: FUZ
  Gene Name: fuzzy planar cell polarity protein
  ENST ID: ENST00000533418
  CDS Start-End: 157-1263
gcgggaagttaatcctcttccaatcagctccccatctcgccctctggcggctccggaccacaggccgagttactctgattaccgccatgctccaagacccgcactgacagtccccacctcccgttctctgtcatcggttccctcaatggagtccacatgtttgggcagaatctggaggtgcagctgagctctgcgaggaccgagaacacgactgtggtgtggaaaagcttccatgacagcatcaccctcattgttctgtcatctgaggtgggcatctctgagctgaggctggagagactactccaaatggtgtttggagccatggtccttcttgtgggacttgaagaactgaccaatatccgcaacgtggagagactgaagaaggacttgagggccagttattgcctcatcgacagcttcctgggggactcggagctcatcggggacctgacccagtgtgtggactgcgtgattcctccagaggggtccctcttgcaggaagccctctccgggttcgctgaggccgcgggcacgaccttcgtcagtctggtggtgtccggccgggtggtggcagcaacagagggttggtggcggctggggacgcccgaggccgtgctgctcccctggctggtggggtccctgccgccgcagaccgctcgcgactacccggtgtacctgccgcacgggagccccacggtcccacaccggctcctgaccctgactctgctgccgagcctggagctgtgtctactctgcgggccgagcccacccctcagccagttgtatccacagcttctggagcgctggtggcagccactgctggacccgttgcgggcctgtctgccgttgggaccccgggcgctgcccagtggcttcccccttcacacagacatcctcgggctgctgctcctccacctggaactgaagcgctgcctcttcaccgtggagcccttgggggataaagagccttcaccagaacagcgccggcgcctcctccgaaacttctataccctggtcacctccacgcacttcccaccagagccagggccaccagagaagacagaagatgaggtctaccaggcccagctgcccagagcttgctacctggtgttggggactgaggaaccaggcacaggagtgcgtctggtggccttgcagctggggcttcggcggctgctgctgctgctgtctccccagagtcccacccatgggctgcgaagcctggccacccacactctgcatgccctcaccccacttctttgactacctagcagtgggtgatggacacagacatggggctgttagcgtctctctgtttattcgctcacaataatacacagcccctggatggggagggggtaggaggggctacaacagggtggggtgggaggggaggagacatccacttccctggcccctctcccctctgtgcttgggggggaaagggagggagggggactccccctaaccccccagaatgtaaacagcagcagatgaacaaaaataaaaatacaaaaggccgga

SEQ ID NO: 135548 - DNA, 679 bp, Homo sapiens
  Payload ID: 6504
  Gene Symbol: FUZ
  Gene Name: fuzzy planar cell polarity protein
  ENST ID: ENST00000529634
  CDS Start-End: 1-170
ggctgctgctcctccacctggaactgaagcgctgcctcttcaccgtggagcccttgggggataaagcagagccttcaccagaacagcgccggcgcctcctccgaaacttctataccctggtcacctccacgcacttcccaccagtgcctttacacgtaatgaaagaatgaaatcacttcatcctcacagagccagggccaccagagaagacagaagatgaggtctaccaggcccagctgcccagagcttgctacctggtgttggggactgaggaaccaggcacaggagtgcgtctggtggccttgcagctggggcttcggcggctgctgctgctgctgtctccccagagtcccacccatgggctgcgaagcctggccacccacactctgcatgccctcaccccacttctttgactacctagcagtgggtgatggacacagacatggggctgttagcgtctctctgtttattcgctcacaataatacacagcccctggatggggagggggtaggaggggctacaacagggtggggtgggaggggaggagacatccacttccctggcccctctcccctctgtgcttgggggggaaagggagggagggggactccccctaaccccccagaatgtaaacagcagcagatgaacaaaaataaaaatacaaaaggccggaggaaa

SEQ ID NO: 135549 - DNA, 482 bp, Homo sapiens
  Payload ID: 6504
  Gene Symbol: FUZ
  Gene Name: fuzzy planar cell polarity protein
  ENST ID: ENST00000526575
  CDS Start-End: 73-333
actctgattaccgccatgctccaagacccgcactgacagtccccacgtgagggaccgcggtgggagtcctaaatgggggaggaggggacgggcggcactgtgcatctgctgtgcctcgcggcctccagcggggtccccctattctgcaggagcagtcgcggcggcgcccccgcccgtcagcagctcccgttctctgtcatcggttccctcaatggagtccacatgtttgggcagaatctggaggtgcagctgagctctgcgaggaccgagaacacgactgtggtgtggaaaagcttccatgacaggtccttcttgtgggacttgaagaactgaccaatatccgcaacgtggagagactgaagaaggacttgagggctggtcccttcttcctctcctaggccagttattgcctcatcgacagcttcctgggggactcggagctcatcggggacctgacccagtgtgtggactgcgtgattcct

SEQ ID NO: 135550 - DNA, 1538 bp, Homo sapiens
  Payload ID: 6504
  Gene Symbol: FUZ
  Gene Name: fuzzy planar cell polarity protein
  ENST ID: ENST00000525130
  CDS Start-End: 85-345
acaggccgagttactctgattaccgccatgctccaagacccgcactgacagtccccacgtgagggaccgcggtgggagtcctaaatgggggaggaggggacgggcggcactgtgcatctgctgtgcctcgcggcctccagcggggtccccctattctgcaggagcagtcgcggcggcgcccccgcccgtcagcagctcccgttctctgtcatcggttccctcaatggagtccacatgtttgggcagaatctggaggtgcagctgagctctgcgaggaccgagaacacgactgtggtgtggaaaagcttccatgacaggtccttcttgtgggacttgaagaactgaccaatatccgcaacgtggagagactgaagaaggacttgagggccagttattgcctcatcgacagcttcctgggggactcggagctcatcggggacctgacccagtgtgtggactgcgtgattcctccagaggggtccctcttgcaggaagccctctccgggttcgctgaggccgcgggcacgaccttcgtcagtctggtggtgtccggccgggtggtggcagcaacagagggttggtggcggctggggacgcccgaggccgtgctgctcccctggctggtggggtccctgccgccgcagaccgctcgcgactacccggtgtacctgccgcacgggagccccacggtcccacaccggctcctgaccctgactctgctgccgagcctggagctgtgtctactctgcgggccgagcccacccctcagccagttgtatccacagcttctggagcgctggtggcagccactgctggacccgttgcgggcctgtctgccgttgggaccccgggcgctgcccagtggcttcccccttcacacagacatcctcgggctgctgctcctccacctggaactgaagcgctgcctcttcaccgtggagcccttgggggataaagagccttcaccagaacagcgccggcgcctcctccgaaacttctataccctggtcacctccacgcacttcccaccagagccagggccaccagagaagacagaagatgaggtctaccaggcccagctgcccagagcttgctacctggtgttggggactgaggaaccaggcacaggagtgcgtctggtggccttgcagctggggcttcggcggctgctgctgctgctgtctccccagagtcccacccatgggctgcgaagcctggccacccacactctgcatgccctcaccccacttctttgactacctagcagtgggtgatggacacagacatggggctgttagcgtctctctgtttattcgctcacaataatacacagcccctggatggggagggggtaggaggggctacaacagggtggggtgggaggggaggagacatccacttccctggcccctctcccctctgtgcttgggggggaaagggagggagggggactccccctaaccccccagaatgtaaacagcagcagatgaacaaaaataaaaatacaaaaggccggaggaaagtcccaggcatccccc

SEQ ID NO: 135551 - DNA, 1479 bp, Homo sapiens
  Payload ID: 6504
  Gene Symbol: FUZ
  Gene Name: fuzzy planar cell polarity protein
  Uniprot ID: Q9BT04
  ENST ID: ENST00000528094
  CDS Start-End: 70-1218
ctgattaccgccatgctccaagacccgcactgacagtccccacgtgagggaccgcggtgggagtcctaaatgggggaggaggggacgggcggcactgtgcatctgctgtgcctcgcggcctccagcggggtccccctattctgcaggagcagtcgcggcggcgcccccgcccgtcagcagctcccgttctctgtcatcggttccctcaatggagtccacatgtttgggcagaatctggaggtgcagctgagctctgcgaggaccgagaacacgactgtggtccttcttgtgggacttgaagaactgaccaatatccgcaacgtggagagactgaagaaggacttgagggccagttattgcctcatcgacagcttcctgggggactcggagctcatcggggacctgacccagtgtgtggactgcgtgattcctccagaggggtccctcttgcaggaagccctctccgggttcgctgaggccgcgggcacgaccttcgtcagtctggtggtgtccggccgggtggtggcagcaacagagggttggtggcggctggggacgcccgaggccgtgctgctcccctggctggtggggtccctgccgccgcagaccgctcgcgactacccggtgtacctgccgcacgggagccccacggtcccacaccggctcctgaccctgactctgctgccgagcctggagctgtgtctactctgcgggccgagcccacccctcagccagttgtatccacagcttctggagcgctggtggcagccactgctggacccgttgcgggcctgtctgccgttgggaccccgggcgctgcccagtggcttcccccttcacacagacatcctcgggctgctgctcctccacctggaactgaagcgctgcctcttcaccgtggagcccttgggggataaagagccttcaccagaacagcgccggcgcctcctccgaaacttctataccctggtcacctccacgcacttcccaccagagccagggccaccagagaagacagaagatgaggtctaccaggcccagctgcccagagcttgctacctggtgttggggactgaggaaccaggcacaggagtgcgtctggtggccttgcagctggggcttcggcggctgctgctgctgctgtctccccagagtcccacccatgggctgcgaagcctggccacccacactctgcatgccctcaccccacttctttgactacctagcagtgggtgatggacacagacatggggctgttagcgtctctctgtttattcgctcacaataatacacagcccctggatggggagggggtaggaggggctacaacagggtggggtgggaggggaggagacatccacttccctggcccctctcccctctgtgcttgggggggaaagggagggagggggactccccctaaccccccagaatgtaaacagcagcagatgaacaaaaataaaaatacaaaaggccgga

SEQ ID NO: 135552 - DNA, 679 bp, Homo sapiens
  Payload ID: 6504
  Gene Symbol: FUZ
  Gene Name: fuzzy planar cell polarity protein
  ENST ID: ENST00000527111
  CDS Start-End: 194-481
gggaggtgcctgaatagggtttgagggtctgtttgagttgggtgaagaaggcgggaagttaatcctcttccaatcagctccccatctcgccctctggcggctccggaccacaggccgagttactctgattaccgccatgctccaagacccgcactgacagtccccacgtgagggaccgcggtgggagtcctaaatgggggaggaggggacgggcggcactgtgcatctgctgtgcctcgcggcctccagcggggtccccctattctgcaggagcagtcgcggcggcgcccccgcccgtcagcagctcccgttctctgtcatcggttccctcaatggagtccacatgtttgggcagaatctggaggtgcagctgagctctgcgaggaccgagaacacgactgtggtgtggaaaagcttccatgacaggtccccaggagggaacgtgggacagggacagggcctgggtgatagtccctgttgaagatgaccccggaggccttccagctctctaaaagcagctgttaatttggctatgggatctttagcaagccagttaccctctttgatccctgatgttctctataagaaaggcagcatcaccctcattgttctgtcatctgaggtgggcatctctgagctgaggctggagagactactccaaatggtgtttggagccatg

SEQ ID NO: 135553 - DNA, 584 bp, Homo sapiens
  Payload ID: 6504
  Gene Symbol: FUZ
  Gene Name: fuzzy planar cell polarity protein
  ENST ID: ENST00000526435
  CDS Start-End: 179-415
agggtttgagggtctgtttgagttgggtgaagaaggcgggaagttaatcctcttccaatcagctccccatctcgccctctggcggctccggaccacaggccgagttactctgattaccgccatgctccaagacccgcactgacagtccccacgtgagggaccgcggtgggagtcctaaatgggggaggaggggacgggcggcactgtgcatctgctgtgcctcgcggcctccagcggggtccccctattctgcaggagcagtcgcggcggcgcccccgcccgtcagcagaatctggaggtgcagctgagctctgcgaggaccgagaacacgactgtggtgtggaaaagcttccatgacaggtccccaggagggaacgtgggacagggacagggcctgggtgatagtccctgttgaagatgaccccggaggccttccagctctctaaaagcagctgttaatttggctatgggatctttagcaagccagttaccctctttgatccctgatgttctctataagaaaggcagcatcaccctcattgttctgtcatctgaggtgggcatctctgagctgaggctggaga

SEQ ID NO: 135554 - DNA, 550 bp, Homo sapiens
  Payload ID: 6504
  Gene Symbol: FUZ
  Gene Name: fuzzy planar cell polarity protein
  ENST ID: ENST00000527585
  CDS Start-End: 181-318
atagggtttgagggtctgtttgagttgggtgaagaaggcgggaagttaatcctcttccaatcagctccccatctcgccctctggcggctccggaccacaggccgagttactctgattaccgccatgctccaagacccgcactgacagtccccacgtgagggaccgcggtgggagtcctaaatgggggaggaggggacgggcggcactgtgcatctgctgtgcctcgcggcctccagcggggtccccctattctgcaggagcagtcgcggcggcgcccccgcccgtcagcagcatcaccctcattgttctgtcatctgaggtgggcatctctgagctgaggctggagagactactccaaatggtgtttggagccatggtccttcttgtgggacttgaagaactgaccaatatccgcaacgtggagagactgaagaaggacttgagggccagttattgcctcatcgacagcttcctgggggactcggagctcatcggggacctgacccagtgtgtggactgcgtgattcctccagaggggtccctcttgcag

SEQ ID NO: 135555 - DNA, 584 bp, Homo sapiens
  Payload ID: 6504
  Gene Symbol: FUZ
  Gene Name: fuzzy planar cell polarity protein
  ENST ID: ENST00000525800
  CDS Start-End: 143-280
ctcttccaatcagctccccatctcgccctctggcggctccggaccacaggccgagttactctgattaccgccatgctccaagacccgcactgacagtccccacctcccgttctctgtcatcggttccctcaatggagtccacatgtttgggcagaatctggaggtgcagctgagctctgcgaggaccgagaacacgactgtggtgtggaaaagcttccatgacaggtccccaggagggaacgtgggacagggacagggcctgggtgatagtccctgttgaagatgaccccggaggccttccagctctctaaaagcagctgttaatttggctatgggatctttagcaagccagttaccctctttgatccctgatgttctctataagaaaggcagcatcaccctcattgttctgtcatctgaggtgggcatctctgagctgaggctggagagactactccaaatggtgtttggagccatggtccttcttgtgggacttgaagaactgaccaatatccgcaacgtggagagactgaagaaggacttgagggccagttattgcctcatcgacagcttcctgggggact

SEQ ID NO: 135556 - DNA, 572 bp, Homo sapiens
  Payload ID: 6504
  Gene Symbol: FUZ
  Gene Name: fuzzy planar cell polarity protein
  ENST ID: ENST00000529302
  CDS Start-End: 399-572
aaatacattccaggtggattaaaaattggttactaggcaacgatcgctggactcaaccaccctcgaaggttgtaggggagatggtgtttttctcgatttcgccccaaggagggtgctcggacttcgacgtgccgccatctttgagcagggcacagctgtttacagccttggaatggatatcaggctgaatggtggttgcttggcaacgccccgccacggtcgccatctttgactcccgttctctgtcatcggttccctcaatggagtccacatgtttgggcagaatctggaggtgcagctgagctctgcgaggaccgagaacacgactgtgcatcaccctcattgttctgtcatctgaggtgggcatctctgagctgaggctggagagactactccaaatggtgtttggagccatggtccttcttgtgggacttgaagaactgaccaatatccgcaacgtggagagactgaagaaggacttgagggccagttattgcctcatcgacagcttcctgggggactcggagctcatcggggacctgacccagtgtgtggactgcgtgattcctcca

SEQ ID NO: 135557 - DNA, 592 bp, Homo sapiens
  Payload ID: 6505
  Gene Symbol: FXYD1
  Gene Name: FXYD domain containing ion transport regulator 1
  Uniprot ID: O00168
  ENST ID: ENST00000351325
  CDS Start-End: 92-370
ctgggccagggggtccaaagtgctcagcccccggggcacagcaggacgtttgggggccttctttcagcaggggacagcccgattggggacaatggcgtctcttggccacatcttggttttctgtgtgggtctcctcaccatggccaaggcagaaagtccaaaggaacacgacccgttcacttacgactaccagtccctgcagatcggaggcctcgtcatcgccgggatcctcttcatcctgggcatcctcatcgtgctgagcagaagatgccggtgcaagttcaaccagcagcagaggactggggaacccgatgaagaggagggaactttccgcagctccatccgccgtctgtccacccgcaggcggtagaaacacctggagcgatggaatccggccaggactcccctggcacctgacatctcccacgctccacctgcgcgcccaccgccccctccgccgccccttccccagccctgcccccgcagactccccctgccgccaagacttccaataaaacgtgcgttcctctcgacagcactttgtcggtctcggtccctcagcgcgaaacgccagcgccactgggccccagca

SEQ ID NO: 135558 - DNA, 594 bp, Homo sapiens
  Payload ID: 6505
  Gene Symbol: FXYD1
  Gene Name: FXYD domain containing ion transport regulator 1
  Uniprot ID: O00168
  ENST ID: ENST00000455515
  CDS Start-End: 153-431
agggaggagacggggtgacctttcccacaggggcagcctgtggcgatgtggcagctgggcctcaccccggcagggctgtgcgtgaccccctgagtgggggaaggcaggctgttgccatggtggcctgagcgagcagaattcctccagggacaatggcgtctcttggccacatcttggttttctgtgtgggtctcctcaccatggccaaggcagaaagtccaaaggaacacgacccgttcacttacgactaccagtccctgcagatcggaggcctcgtcatcgccgggatcctcttcatcctgggcatcctcatcgtgctgagcagaagatgccggtgcaagttcaaccagcagcagaggactggggaacccgatgaagaggagggaactttccgcagctccatccgccgtctgtccacccgcaggcggtagaaacacctggagcgatggaatccggccaggactcccctggcacctgacatctcccacgctccacctgcgcgcccaccgccccctccgccgccccttccccagccctgcccccgcagactccccctgccgccaagacttccaataaaacgtgcgttcctctcga

SEQ ID NO: 135559 - DNA, 486 bp, Homo sapiens
  Payload ID: 6505
  Gene Symbol: FXYD1
  Gene Name: FXYD domain containing ion transport regulator 1
  Uniprot ID: O00168
  ENST ID: ENST00000588715
  CDS Start-End: 47-325
ctctgtgtttgtgtgaggcagcgcctcctctgccctgccagggacaatggcgtctcttggccacatcttggttttctgtgtgggtctcctcaccatggccaaggcagaaagtccaaaggaacacgacccgttcacttacgactaccagtccctgcagatcggaggcctcgtcatcgccgggatcctcttcatcctgggcatcctcatcgtgctgagcagaagatgccggtgcaagttcaaccagcagcagaggactggggaacccgatgaagaggagggaactttccgcagctccatccgccgtctgtccacccgcaggcggtagaaacacctggagcgatggaatccggccaggactcccctggcacctgacatctcccacgctccacctgcgcgcccaccgccccctccgccgccccttccccagccctgcccccgcagactccccctgccgccaagacttccaataaaacgtgcgttcctctc

SEQ ID NO: 135560 - DNA, 428 bp, Homo sapiens
  Payload ID: 6505
  Gene Symbol: FXYD1
  Gene Name: FXYD domain containing ion transport regulator 1
  Uniprot ID: O00168
  ENST ID: ENST00000589209
  CDS Start-End: 120-398
tgtgtagggctggttgcgtcactgcgtgggggcaccggaggcccagaggaggagtattggatgcctgacggtgtttacaccccacgtcctgctccaaccagcagtttggggagaggacaatggcgtctcttggccacatcttggttttctgtgtgggtctcctcaccatggccaaggcagaaagtccaaaggaacacgacccgttcacttacgactaccagtccctgcagatcggaggcctcgtcatcgccgggatcctcttcatcctgggcatcctcatcgtgctgagcagaagatgccggtgcaagttcaaccagcagcagaggactggggaacccgatgaagaggagggaactttccgcagctccatccgccgtctgtccacccgcaggcggtagaaacacctggagcgatggaatccggccagg

SEQ ID NO: 135561 - DNA, 645 bp, Homo sapiens
  Payload ID: 6505
  Gene Symbol: FXYD1
  Gene Name: FXYD domain containing ion transport regulator 1
  Uniprot ID: O00168
  ENST ID: ENST00000588081
  CDS Start-End: 59-337
ccctatgtgggagagcaagggcacacactgcctaatccgtggtgtcccccccaggacaatggcgtctcttggccacatcttggttttctgtgtgggtctcctcaccatggccaaggcagaaagtccaaaggaacacgacccgttcacttacgactaccagtccctgcagatcggaggcctcgtcatcgccgggatcctcttcatcctgggcatcctcatcgtgctgagcagaagatgccggtgcaagttcaaccagcagcagaggactggggaacccgatgaagaggagggaactttccgcagctccatccgccgtctgtccacccgcaggcggtagaaacacctggagcgatggaatccggccaggtgctgcagctctgacacggcggtgggagggaaggagggaggaaggaaaggcgggagagggagggggccaagtgccagagttgaagggcggcgaggggtggggctggacgtcccccctcgcctctcacccttttcaccctcacaggactcccctggcacctgacatctcccacgctccacctgcgcgcccaccgccccctccgccgccccttccccagccctgcccccgcagactccccctgccgccaagacttccaataaaacgtgcgttcctctcga

SEQ ID NO: 135562 - DNA, 512 bp, Homo sapiens
  Payload ID: 6505
  Gene Symbol: FXYD1
  Gene Name: FXYD domain containing ion transport regulator 1
  ENST ID: ENST00000589121
  CDS Start-End: 1-347
ttttctgtgtgggtctcctcaccatggccaaggcagaaagtccaaaggaacacgacccgttcacttacgactaccagtccctgcagatcggaggcctcgtcatcgccgggatcctcttcatcctgggcatcctcatcgtgctgaccccgcccctcgcgagggcgagctggagctacagcgccgcttggcgcccgccgggagggagcctcagcttctcctacctctccacgcccacaggcagaagatgccggtgcaagttcaaccagcagcagaggactggggaacccgatgaagaggagggaactttccgcagctccatccgccgtctgtccacccgcaggcggtagaaacacctggagcgatggaatccggccaggactcccctggcacctgacatctcccacgctccacctgcgcgcccaccgccccctccgccgccccttccccagccctgcccccgcagactccccctgccgccaagacttccaataaaacgtgcgttcctctcgaca

SEQ ID NO: 135563 - DNA, 619 bp, Homo sapiens
  Payload ID: 6505
  Gene Symbol: FXYD1
  Gene Name: FXYD domain containing ion transport regulator 1
  Uniprot ID: O00168
  ENST ID: ENST00000588607
  CDS Start-End: 192-470
gtgaggcagcgcctcctctgccctgccaggctggggatacccgtttctctagcttggagccaccaagatagaggacaaacacttctgtgattcagtccccagactgtctctgacttaatcccttgggttcaagccctatgtgggagagcaagggcacacactgcctaatccgtggtgtcccccccaggacaatggcgtctcttggccacatcttggttttctgtgtgggtctcctcaccatggccaaggcagaaagtccaaaggaacacgacccgttcacttacgactaccagtccctgcagatcggaggcctcgtcatcgccgggatcctcttcatcctgggcatcctcatcgtgctgagcagaagatgccggtgcaagttcaaccagcagcagaggactggggaacccgatgaagaggagggaactttccgcagctccatccgccgtctgtccacccgcaggcggtagaaacacctggagcgatggaatccggccaggactcccctggcacctgacatctcccacgctccacctgcgcgcccaccgccccctccgccgccccttccccagccctgcccccgcagactccccctgccgccaagacttccaataaaacg

SEQ ID NO: 135564 - DNA, 690 bp, Homo sapiens
  Payload ID: 6505
  Gene Symbol: FXYD1
  Gene Name: FXYD domain containing ion transport regulator 1
  Uniprot ID: O00168
  ENST ID: ENST00000612146
  CDS Start-End: 245-523
ggccaacccaagagggagggagtgtggttgaggcagtgggttctgcagggtgggatgtgggtgactcctccctgccctgctggtgcgtgtgcaccctggcagggtgtggagttgggacacacacgtgtgtagggctggttgcgtcactgcgtgggggcaccggaggcccagaggaggagtattggatgcctgacggtgtttacaccccacgtcctgctccaaccagcagtttggggagaggacaatggcgtctcttggccacatcttggttttctgtgtgggtctcctcaccatggccaaggcagaaagtccaaaggaacacgacccgttcacttacgactaccagtccctgcagatcggaggcctcgtcatcgccgggatcctcttcatcctgggcatcctcatcgtgctgagcagaagatgccggtgcaagttcaaccagcagcagaggactggggaacccgatgaagaggagggaactttccgcagctccatccgccgtctgtccacccgcaggcggtagaaacacctggagcgatggaatccggccaggactcccctggcacctgacatctcccacgctccacctgcgcgcccaccgccccctccgccgccccttccccagccctgcccccgcagactccccctgccgccaagacttccaataaaacgtgcgttcctctcgacagc

SEQ ID NO: 135565 - DNA, 513 bp, Homo sapiens
  Payload ID: 6506
  Gene Symbol: FXYD2
  Gene Name: FXYD domain containing ion transport regulator 2
  Uniprot ID: P54710
  ENST ID: ENST00000260287
  CDS Start-End: 80-274
gccactctccatccaggccccaggcaagcagcacctccctgctctcctgcactcctggacacaaccagcagctcctgccatggacaggtggtacctgggcggcagccccaagggggacgtggacccgttctactatgactatgagaccgttcgcaatgggggcctgatcttcgctggactggccttcatcgtggggctcctcatcctcctcagcagaagattccgctgtgggggcaataagaagcgcaggcaaatcaatgaagatgagccgtaacagcagcctcggcggtgccacccactgcactggggccagctgggaagccaagcatggccctgcctctggcgcctccccttcttccctgggctttagacctttgtccccgtcactgccagcgcttgggctgaaggaagctccagactcaatgtgacccccaggtggcatcgccaactcctgcctcgtgccacctcatgcttataataaagccggcgtcagagaccgctgcttccctcacc

SEQ ID NO: 135566 - DNA, 571 bp, Homo sapiens
  Payload ID: 6506
  Gene Symbol: FXYD2
  Gene Name: FXYD domain containing ion transport regulator 2
  Uniprot ID: P54710
  ENST ID: ENST00000292079
  CDS Start-End: 67-267
agacactctccaaaaagcagagacagcaggaagaggggagtggaggcagcccattcacctggggaaatgactgggttgtcgatggacggtggcggcagccccaagggggacgtggacccgttctactatgactatgagaccgttcgcaatgggggcctgatcttcgctggactggccttcatcgtggggctcctcatcctcctcagcagaagattccgctgtgggggcaataagaagcgcaggcaaatcaatgaagatgagccgtaacagcagcctcggcggtgccacccactgcactggggccagctgggaagccaagcatggccctgcctctggcgcctccccttcttccctgggctttagacctttgtccccgtcactgccagcgcttgggctgaaggaagctccagactcaatgtgacccccaggtggcatcgccaactcctgcctcgtgccacctcatgcttataataaagccggcgtcagagaccgctgcttccctcacctgcctgcctgtctccctcctctgtcaccaccagcctctccaagctcaagtacaaatacagccggg

SEQ ID NO: 135567 - DNA, 672 bp, Homo sapiens
  Payload ID: 6506
  Gene Symbol: FXYD2
  Gene Name: FXYD domain containing ion transport regulator 2
  Uniprot ID: P54710
  ENST ID: ENST00000528014
  CDS Start-End: 169-363
ccagccccgcagctgctccccatctctctgccaactgccagaacgacacaggaagctggggccggtgcctcagtgtgaagagggggagtgccactctccatccaggccccaggcaagcagcacctccctgctctcctgcactcctggacacaaccagcagctcctgccatggacaggtggtacctgggcggcagccccaagggggacgtggacccgttctactatgactatgagaccgttcgcaatgggggcctgatcttcgctggactggccttcatcgtggggctcctcatcctcctcagcagaagattccgctgtgggggcaataagaagcgcaggcaaatcaatgaagatgagccgtaacagcagcctcggcggtgccacccactgcactggggccagctgggaagccaagcatggccctgcctctggcgcctccccttcttccctgggctttagacctttgtccccgtcactgccagcgcttgggctgaaggaagctccagactcaatgtgacccccaggtggcatcgccaactcctgcctcgtgccacctcatgcttataataaagccggcgtcagagaccgctgcttccctcacctgcctgcctgtctccctcctctgtcaccaccagcctctccaagctcaagtacaaatacagccgggtctca

SEQ ID NO: 135568 - DNA, 562 bp, Homo sapiens
  Payload ID: 6506
  Gene Symbol: FXYD2
  Gene Name: FXYD domain containing ion transport regulator 2
  Uniprot ID: P54710
  ENST ID: ENST00000532119
  CDS Start-End: 56-250
caagcagcacctccctgctctcctgcactcctggacacaaccagcagctcctgccatggacaggtggtacctgggcggcagccccaagggggacgtggacccgttctactatgactatgagaccgttcgcaatgggggcctgatcttcgctggactggccttcatcgtggggctcctcatcctcctcagcagaagattccgctgtgggggcaataagaagcgcaggcaaatcaatgaagatgagccgtaacagcagtttccataccttccaccccactgctccccagagagaaatgtgacaatgagcttcagctctgtcgaatccggactacatggaacctctctgggttggcttctcaaccgatttcagagttgtgagctgagaaagaacagcaggagagaggccacagttattcaggggactcctgccttgctgggggcttccgcagcccctgaccaaccatcctggtgtcactgctgagacagcagcctgaacaagggcaatgggaccccagagactgcatctgtacaggcggagccccagggctttagaccctttgct

SEQ ID NO: 135569 - DNA, 1320 bp, Homo sapiens
  Payload ID: 6507
  Gene Symbol: FXYD3
  Gene Name: FXYD domain containing ion transport regulator 3
  Uniprot ID: Q14802
  ENST ID: ENST00000346446
  CDS Start-End: 113-454
aggtttgcttagggcgtggcagcttcggataaacgcaggactccgcctggcagcccgatttctcccggaacctctgctcagcctggtgaaccacacaggccagcgctctgacatgcagaaggtgaccctgggcctgcttgtgttcctggcaggctttcctgtcctggacgccaatgacctagaagataaaaacagtcctttctactatgactggcacagcctccaggttggcgggctcatctgcgctggggttctgtgcgccatgggcatcatcatcgtcatgagtgagtggaggagctcgggggagcaggcgggccggggctggggctcccctcccctgaccactcagctctccccaacaggtgcaaaatgcaaatgcaagtttggccagaagtccggtcaccatccaggggagactccacctctcatcaccccaggctcagcccaaagctgatgaggacagaccagctgaaattgggtggaggaccgttctctgtccccaggtcctgtctctgcacagaaacttgaactccaggatggaattcttcctcctctgctgggactcctttgcatggcagggcctcatctcacctctcgcaagagggtctctttgttcaattttttttaatctaaaatgattgtgcctctgcccaagcagcctggagacttcctatgtgtgcattggggtggggcttggggcaccatgagaaggttggcgtgccctggaggctgacacagaggctggcactgagcctgcttgttgggaaaagcccacaggcctgttcccttgtggcttgggacatggcacaggcccgccctctgcctcctcagccatgggaacctcatatgcaatttgggatttactagtagccaaaaggaatgaaagagagctctaaccagatggaacactggaacattccagtggaccctggaccattccaggaaaactgggacataggatcgtcccgctatgatggaagtgttcagacagtttataatagtaagcccctgtgaccctctcacttaccccgagacctcactttattacaagatctttccaaatacccaaatgtccctgcaagcccgttaaataattccctatgctacccttaataacatacaatgaccacatagtgtgagaacttccaacaagcctcaaagtcccttgagactccccaatacctaataaggcatgcgaaatgttctcatgaactaccccacaacacgcctaaaactcaaaacacccaaaaatatctcctccaatgtcctgaaacatgaacccaaaaagagacccacaataaactcgtgacttgtcccctc

SEQ ID NO: 135570 - DNA, 1404 bp, Homo sapiens
  Payload ID: 6507
  Gene Symbol: FXYD3
  Gene Name: FXYD domain containing ion transport regulator 3
  Uniprot ID: Q14802
  ENST ID: ENST00000344013
  CDS Start-End: 197-538
aggtttgcttagggcgtggcagcttcggataaacgcaggactccgcctggcagcccgatttctcccggaacctctgctcagcctggtgaaccacacaggcccgagtttcacccagtccccactccacggtgcagctgcggcttatctctcagcccagcgagatgccagccttcctgtcccgggccagcgctctgacatgcagaaggtgaccctgggcctgcttgtgttcctggcaggctttcctgtcctggacgccaatgacctagaagataaaaacagtcctttctactatgactggcacagcctccaggttggcgggctcatctgcgctggggttctgtgcgccatgggcatcatcatcgtcatgagtgagtggaggagctcgggggagcaggcgggccggggctggggctcccctcccctgaccactcagctctccccaacaggtgcaaaatgcaaatgcaagtttggccagaagtccggtcaccatccaggggagactccacctctcatcaccccaggctcagcccaaagctgatgaggacagaccagctgaaattgggtggaggaccgttctctgtccccaggtcctgtctctgcacagaaacttgaactccaggatggaattcttcctcctctgctgggactcctttgcatggcagggcctcatctcacctctcgcaagagggtctctttgttcaattttttttaatctaaaatgattgtgcctctgcccaagcagcctggagacttcctatgtgtgcattggggtggggcttggggcaccatgagaaggttggcgtgccctggaggctgacacagaggctggcactgagcctgcttgttgggaaaagcccacaggcctgttcccttgtggcttgggacatggcacaggcccgccctctgcctcctcagccatgggaacctcatatgcaatttgggatttactagtagccaaaaggaatgaaagagagctctaaccagatggaacactggaacattccagtggaccctggaccattccaggaaaactgggacataggatcgtcccgctatgatggaagtgttcagacagtttataatagtaagcccctgtgaccctctcacttaccccgagacctcactttattacaagatctttccaaatacccaaatgtccctgcaagcccgttaaataattccctatgctacccttaataacatacaatgaccacatagtgtgagaacttccaacaagcctcaaagtcccttgagactccccaatacctaataaggcatgcgaaatgttctcatgaactaccccacaacacgcctaaaactcaaaacacccaaaaatatctcctccaatgtcctgaaacatgaacccaaaaagagacccacaataaactcgtgacttgtcccctc

SEQ ID NO: 135571 - DNA, 1467 bp, Homo sapiens
  Payload ID: 6507
  Gene Symbol: FXYD3
  Gene Name: FXYD domain containing ion transport regulator 3
  Uniprot ID: Q14802
  ENST ID: ENST00000435734
  CDS Start-End: 260-601
gttctccacaactgccagcaatccttccaccaggcaaaacacatcatctaaggaaaagaagtgaggtttgcttagggcgtggcagcttcggataaacgcaggactccgcctggcagcccgatttctcccggaacctctgctcagcctggtgaaccacacaggcccgagtttcacccagtccccactccacggtgcagctgcggcttatctctcagcccagcgagatgccagccttcctgtcccgggccagcgctctgacatgcagaaggtgaccctgggcctgcttgtgttcctggcaggctttcctgtcctggacgccaatgacctagaagataaaaacagtcctttctactatgactggcacagcctccaggttggcgggctcatctgcgctggggttctgtgcgccatgggcatcatcatcgtcatgagtgagtggaggagctcgggggagcaggcgggccggggctggggctcccctcccctgaccactcagctctccccaacaggtgcaaaatgcaaatgcaagtttggccagaagtccggtcaccatccaggggagactccacctctcatcaccccaggctcagcccaaagctgatgaggacagaccagctgaaattgggtggaggaccgttctctgtccccaggtcctgtctctgcacagaaacttgaactccaggatggaattcttcctcctctgctgggactcctttgcatggcagggcctcatctcacctctcgcaagagggtctctttgttcaattttttttaatctaaaatgattgtgcctctgcccaagcagcctggagacttcctatgtgtgcattggggtggggcttggggcaccatgagaaggttggcgtgccctggaggctgacacagaggctggcactgagcctgcttgttgggaaaagcccacaggcctgttcccttgtggcttgggacatggcacaggcccgccctctgcctcctcagccatgggaacctcatatgcaatttgggatttactagtagccaaaaggaatgaaagagagctctaaccagatggaacactggaacattccagtggaccctggaccattccaggaaaactgggacataggatcgtcccgctatgatggaagtgttcagacagtttataatagtaagcccctgtgaccctctcacttaccccgagacctcactttattacaagatctttccaaatacccaaatgtccctgcaagcccgttaaataattccctatgctacccttaataacatacaatgaccacatagtgtgagaacttccaacaagcctcaaagtcccttgagactccccaatacctaataaggcatgcgaaatgttctcatgaactaccccacaacacgcctaaaactcaaaacacccaaaaatatctcctccaatgtcctgaaacatgaacccaaaaagagacccacaataaactcgtgacttgtcccctc

SEQ ID NO: 135572 - DNA, 780 bp, Homo sapiens
  Payload ID: 6507
  Gene Symbol: FXYD3
  Gene Name: FXYD domain containing ion transport regulator 3
  Uniprot ID: Q14802
  ENST ID: ENST00000604255
  CDS Start-End: 148-582
aggtttgcttagggcgtggcagcttcggataaacgcaggactccgcctggcagcccgatttctcccggaacctctgctcagcctggtgaaccacacagaggctggggcgaggaggataccatctgtcagtcttggctggatgacatcatgggaagggggtatagtggggccttgcaggccagaggtggcttggaggagcccctggaaagaggcttaagaggcccgagtttcacccagtccccactccacggtgcagctgcggcttatctctcagcccagcgagatgccagccttcctgtcccgggccagcgctctgacatgcagaaggtgaccctgggcctgcttgtgttcctggcaggctttcctgtcctggacgccaatgacctagaagataaaaacagtcctttctactatgactggcacagcctccaggttggcgggctcatctgcgctggggttctgtgcgccatgggcatcatcatcgtcatgagtgcaaaatgcaaatgcaagtttggccagaagtccggtcaccatccaggggagactccacctctcatcaccccaggctcagcccaaagctgatgaggacagaccagctgaaattgggtggaggaccgttctctgtccccaggtcctgtctctgcacagaaacttgaactccaggatggaattcttcctcctctgctgggactcctttgcatggcagggcctcatctcacctctcgcaagagggtctctttgttcaattttttttaatctaaaatgattgtgcctctgccc

SEQ ID NO: 135573 - DNA, 573 bp, Homo sapiens
  Payload ID: 6507
  Gene Symbol: FXYD3
  Gene Name: FXYD domain containing ion transport regulator 3
  Uniprot ID: Q14802
  ENST ID: ENST00000603449
  CDS Start-End: 57-242
gatttctcccggaacctctgctcagcctggtgaaccacacaggccagcgctctgacatgcagaaggtgaccctgggcctgcttgtgttcctggcaggctttcctgtcctggacgccaatgacctagaagataaaaacagtcctttctactatggtgagagcccgtgccccctttcccctccccacaaccccacatactgcttggtgccaagggttcccatacagggttggggcctgacgtgagcatcacaggacaaagatacgaagggactaggatggggttactgaatatgccacacagtggattaaaggaactagaggcagcaacctggcctttgggaaggttctattccagcaagatagacacacgcaggaggtgaggacagtttgcaagaagccattggttggttcagatcaactgctgggagaagtgttgacttgagaaaacttcctggaggtggtgagctattggatcaaaaccctcatctggcctccaggttccaatgacctgctccctactccccgctctgccctcacctctccacgctcctcattccttctgctccaagcctct

SEQ ID NO: 135574 - DNA, 742 bp, Homo sapiens
  Payload ID: 6507
  Gene Symbol: FXYD3
  Gene Name: FXYD domain containing ion transport regulator 3
  ENST ID: ENST00000603524
  CDS Start-End: 197-547
gggcaaggtggaggaagtgccagctctcgctatcaaaattataactaggccaggcgtggtggctcacacctgtaatcccagcactgagggaggccggggcccgagtttcacccagtccccactccacggtgcagctgcggcttatctctcagcccagcgagatgccagccttcctgtcccgggccagcgctctgacatgcagaaggtgaccctgggcctgcttgtgttcctggcaggctttcctgtcctggacgccaatgacctagaagataaaaacagtcctttctactatggtgctccatatatatttgtcaagagaatggggggacagatggagaggacacaggctggcactgaggtcccctccactttcctcctagactggcacagcctccaggttggcgggctcatctgcgctggggttctgtgcgccatgggcatcatcatcgtcatgagtgcaaaatgcaaatgcaagtttggccagaagtccggtcaccatccaggggagactccacctctcatcaccccaggctcagcccaaagctgatgaggacagaccagctgaaattgggtggaggaccgttctctgtccccaggtcctgtctctgcacagaaacttgaactccaggatggaattcttcctcctctgctgggactcctttgcatggcagggcctcatctcacctctcgcaagagggtctctttgttcaattttttttaatctaaaatgattgtgcctctg

SEQ ID NO: 135575 - DNA, 1322 bp, Homo sapiens
  Payload ID: 6507
  Gene Symbol: FXYD3
  Gene Name: FXYD domain containing ion transport regulator 3
  Uniprot ID: Q14802
  ENST ID: ENST00000604404
  CDS Start-End: 192-455
tggaaggggactttaagttctccacaactgccagcaatccttccaccaggcaaaacacatcatctaaggaaaagaagtgaggtttgcttagggcgtggcagcttcggataaacgcaggactccgcctggcagcccgatttctcccggaacctctgctcagcctggtgaaccacacaggccagcgctctgacatgcagaaggtgaccctgggcctgcttgtgttcctggcaggctttcctgtcctggacgccaatgacctagaagataaaaacagtcctttctactatgactggcacagcctccaggttggcgggctcatctgcgctggggttctgtgcgccatgggcatcatcatcgtcatgagtgcaaaatgcaaatgcaagtttggccagaagtccggtcaccatccaggggagactccacctctcatcaccccaggctcagcccaaagctgatgaggacagaccagctgaaattgggtggaggaccgttctctgtccccaggtcctgtctctgcacagaaacttgaactccaggatggaattcttcctcctctgctgggactcctttgcatggcagggcctcatctcacctctcgcaagagggtctctttgttcaattttttttaatctaaaatgattgtgcctctgcccaagcagcctggagacttcctatgtgtgcattggggtggggcttggggcaccatgagaaggttggcgtgccctggaggctgacacagaggctggcactgagcctgcttgttgggaaaagcccacaggcctgttcccttgtggcttgggacatggcacaggcccgccctctgcctcctcagccatgggaacctcatatgcaatttgggatttactagtagccaaaaggaatgaaagagagctctaaccagatggaacactggaacattccagtggaccctggaccattccaggaaaactgggacataggatcgtcccgctatgatggaagtgttcagacagtttataatagtaagcccctgtgaccctctcacttaccccgagacctcactttattacaagatctttccaaatacccaaatgtccctgcaagcccgttaaataattccctatgctacccttaataacatacaatgaccacatagtgtgagaacttccaacaagcctcaaagtcccttgagactccccaatacctaataaggcatgcgaaatgttctcatgaactaccccacaacacgcctaaaactcaaaacacccaaaaatatctcctccaatgtcctgaaacatgaacccaaaaagagacccacaataaactcgtgacttgtcccctca

SEQ ID NO: 135576 - DNA, 590 bp, Homo sapiens
  Payload ID: 6507
  Gene Symbol: FXYD3
  Gene Name: FXYD domain containing ion transport regulator 3
  ENST ID: ENST00000605550
  CDS Start-End: 56-268
atttctcccggaacctctgctcagcctggtgaaccacacaggccagcgctctgacatgcagaaggtgaccctgggcctgcttgtgttcctggcaggctttcctgtcctggacgccaatgacctagaagataaaaacagtcctttctactatgactggcacagcctccaggttggcgggctcatctgcgctggggttctgtgcgccatgggcatcatcatcgtcatgagtgcaaaatgcaaatgcaagtttggccagaagtccgggtaagatactgttccggcatgcccgcctcaggctgactggacgcttttcagggtgaaagggctaactctcccagcaggagaggcctcggggctctgccctttagagttcctgccgctaagatttccaggtttattgtttctagctggtaatccccagggggccccaaatcctgaaatgctttggcccctgggattgcacaaccccccaaatggaaaggcagccaggaagacatgtctgggcaggctaagaaccctctatccggagggagagggcaaatgggggcggacaccaatctcaccacttttgtctccttagtcaccatcca

SEQ ID NO: 135577 - DNA, 548 bp, Homo sapiens
  Payload ID: 6507
  Gene Symbol: FXYD3
  Gene Name: FXYD domain containing ion transport regulator 3
  Uniprot ID: Q14802
  ENST ID: ENST00000604621
  CDS Start-End: 85-348
cttatgctgagcaggtctacctgggaaagagaaagtgtttgctgtcaccaggaactctgctgggcctagggccagcgctctgacatgcagaaggtgaccctgggcctgcttgtgttcctggcaggctttcctgtcctggacgccaatgacctagaagataaaaacagtcctttctactatgactggcacagcctccaggttggcgggctcatctgcgctggggttctgtgcgccatgggcatcatcatcgtcatgagtgcaaaatgcaaatgcaagtttggccagaagtccggtcaccatccaggggagactccacctctcatcaccccaggctcagcccaaagctgatgaggacagaccagctgaaattgggtggaggaccgttctctgtccccaggtcctgtctctgcacagaaacttgaactccaggatggaattcttcctcctctgctgggactcctttgcatggcagggcctcatctcacctctcgcaagagggtctctttgttcaattttttttaatctaaaatgattgtgcctctgcccaa

SEQ ID NO: 135578 - DNA, 633 bp, Homo sapiens
  Payload ID: 6507
  Gene Symbol: FXYD3
  Gene Name: FXYD domain containing ion transport regulator 3
  Uniprot ID: Q14802
  ENST ID: ENST00000605677
  CDS Start-End: 15-305
gccagcgctctgacatgcagaaggtgaccctgggcctgcttgtgttcctggcaggctttcctgtcctggacgccaatgacctagaagataaaaacagtcctttctactatgactggcacagcctccaggttggcgggctcatctgcgctggggttctgtgcgccatgggcatcatcatcgtcatgagtgagtggaggagctcgggggagcaggcgggccggggctggggctcccctcccctgaccactcagctctccccaacaggtgcaaaatgcaaatgcaagtttggccagaagtccgggtaagatactgttccggcatgcccgcctcaggctgactggacgcttttcagggtgaaagggctaactctcccagcaggagaggcctcggggctctgccctttagagttcctgccgctaagatttccaggtttattgtttctagctggtaatccccagggggccccaaatcctgaaatgctttggcccctgggattgcacaaccccccaaatggaaaggcagccaggaagacatgtctgggcaggctaagaaccctctatccggagggagagggcaaatgggggcggacaccaatctcaccacttttgtctccttagtcaccatccaggggag

SEQ ID NO: 135579 - DNA, 758 bp, Homo sapiens
  Payload ID: 6507
  Gene Symbol: FXYD3
  Gene Name: FXYD domain containing ion transport regulator 3
  Uniprot ID: Q14802
  ENST ID: ENST00000603181
  CDS Start-End: 295-558
tctaaggaaaagaagtgaggtcggaacaccaacgcatcatctcactgcatggccctggaggctctgccgtttaaagaccccagaaccttccccattcaaggtttgcttagggcgtggcagcttcggataaacgcaggactccgcctggcagcccgatttctcccggaacctctgctcagcctggtgaaccacacaggcccgagtttcacccagtccccactccacggtgcagctgcggcttatctctcagcccagcgagatgccagccttcctgtcccgggccagcgctctgacatgcagaaggtgaccctgggcctgcttgtgttcctggcaggctttcctgtcctggacgccaatgacctagaagataaaaacagtcctttctactatgactggcacagcctccaggttggcgggctcatctgcgctggggttctgtgcgccatgggcatcatcatcgtcatgagtgcaaaatgcaaatgcaagtttggccagaagtccggtcaccatccaggggagactccacctctcatcaccccaggctcagcccaaagctgatgaggacagaccagctgaaattgggtggaggaccgttctctgtccccaggtcctgtctctgcacagaaacttgaactccaggatggaattcttcctcctctgctgggactcctttgcatggcagggcctcatctcacctctcgcaagagggtctctttgttcaattttttttaatctaaaatgattgtgcctctgcccaa

SEQ ID NO: 135580 - DNA, 837 bp, Homo sapiens
  Payload ID: 6507
  Gene Symbol: FXYD3
  Gene Name: FXYD domain containing ion transport regulator 3
  Uniprot ID: Q14802
  ENST ID: ENST00000605552
  CDS Start-End: 139-324
tttctcccggaacctctgctcagcctggtgaaccacacaggcccgagtttcacccagtccccactccacggtgcagctgcggcttatctctcagcccagcgagatgccagccttcctgtcccgggccagcgctctgacatgcagaaggtgaccctgggcctgcttgtgttcctggcaggctttcctgtcctggacgccaatgacctagaagataaaaacagtcctttctactatggtgagagcccgtgccccctttcccctccccacaaccccacatactgcttggtgccaagggttcccatacagggttggggcctgacgtgagcatcacaggacaaagatacgaagggactaggatggggttactgaatatgccacacagtggattaaaggaactagaggcagcaacctggcctttgggaaggttctattccagcaagatagacacacgcaggaggtgaggacagtttgcaagaagccattggttggttcagatcaactgctgggagaagtgttgacttgagaaaacttcctggaggtggtgagctattggatcaaaaccctcatctggcctccaggttccaatgacctgctccctactccccgctctgccctcacctctccacgctcctcattccttctgctccaagcctctcagacacagcagacatactgccagcctcagacctctgcacctgctggttcctctgcctggaacacttccttccacagaaccacatggctccctcccttccctctgctcaaatgcagccccctgagaggccttccctgacaactccctctaaaagagctgccatctgactttttttttgtttt

SEQ ID NO: 135581 - DNA, 564 bp, Homo sapiens
  Payload ID: 6507
  Gene Symbol: FXYD3
  Gene Name: FXYD domain containing ion transport regulator 3
  ENST ID: ENST00000604804
  CDS Start-End: 56-406
atttctcccggaacctctgctcagcctggtgaaccacacaggccagcgctctgacatgcagaaggtgaccctgggcctgcttgtgttcctggcaggctttcctgtcctggacgccaatgacctagaagataaaaacagtcctttctactatggtgctccatatatatttgtcaagagaatggggggacagatggagaggacacaggctggcactgaggtcccctccactttcctcctagactggcacagcctccaggttggcgggctcatctgcgctggggttctgtgcgccatgggcatcatcatcgtcatgagtgcaaaatgcaaatgcaagtttggccagaagtccggtcaccatccaggggagactccacctctcatcaccccaggctcagcccaaagctgatgaggacagaccagctgaaattgggtggaggaccgttctctgtccccaggtcctgtctctgcacagaaacttgaactccaggatggaattcttcctcctctgctgggactcctttgcatggcagggcctcatctcacctctcgcaagagggtctcttt

SEQ ID NO: 135582 - DNA, 770 bp, Homo sapiens
  Payload ID: 6508
  Gene Symbol: FXYD4
  Gene Name: FXYD domain containing ion transport regulator 4
  Uniprot ID: P59646
  ENST ID: ENST00000476166
  CDS Start-End: 335-604
agatccgttctctgcgctgccagctcaggtgagccctcgccaaggtgacctcgcaggacactggtgaaggagcagtgaggaacctgcagagtcacacagttggccaccaccatctctagatgggaagacagaaagtagttactttcccaagatctccccacaagcaagtgtatccttggggtttgtacacctactttcaccatggggctctgcctgcccccgcccctgcctcctctcgctgaccaattgagctgtgagcctggagcagatccgtgggctgcagacccccgccccagtgcctctccccctgcagccctgcccctcgaactgtgacatggagagagtgaccctggcccttctcctactggcaggcctgactgccttggaagccaatgacccatttgccaataaagacgatcccttctactatgactggaaaaacctgcagctgagcggactgatctgcggagggctcctggccattgctgggatcgcggcagttctgagtggcaaatgcaaatgcaagagcagccagaagcagcacagtcctgtacctgagaaggccatcccactcatcactccaggctctgccactacttgctgagcacaggactggcctccagggatggcctgaagcctaacactggcccccagcacctcctcccctgggaggccttatcctcaaggaaggacttctctccaagggcaggctgttaggcccctttctgatcaggaggcttctttatgaattaaactcgccccaccacccc

SEQ ID NO: 135583 - DNA, 778 bp, Homo sapiens
  Payload ID: 6508
  Gene Symbol: FXYD4
  Gene Name: FXYD domain containing ion transport regulator 4
  Uniprot ID: P59646
  ENST ID: ENST00000616495
  CDS Start-End: 340-609
atccgttctctgcgctgccagctcaggtgagccctcgccaaggtgacctcgcaggcacagttttgagctcttagcttgtgcttactcaatccacacaactcccccaggccaccaccatctctagatgggaagacagaaagtagttactttcccaagatctccccacaagcaagtgtatccttggggtttgtacacctactttcaccatggggctctgcctgcccccgcccctgcctcctctcgctgaccaattgagctgtgagcctggagcagatccgtgggctgcagacccccgccccagtgcctctccccctgcagccctgcccctcgaactgtgacatggagagagtgaccctggcccttctcctactggcaggcctgactgccttggaagccaatgacccatttgccaataaagacgatcccttctactatgactggaaaaacctgcagctgagcggactgatctgcggagggctcctggccattgctgggatcgcggcagttctgagtggcaaatgcaaatgcaagagcagccagaagcagcacagtcctgtacctgagaaggccatcccactcatcactccaggctctgccactacttgctgagcacaggactggcctccagggatggcctgaagcctaacactggcccccagcacctcctcccctgggaggccttatcctcaaggaaggacttctctccaagggcaggctgttaggcccctttctgatcaggaggcttctttatgaattaaactcgccccaccaccccctc

SEQ ID NO: 135584 - DNA, 1580 bp, Homo sapiens
  Payload ID: 6509
  Gene Symbol: FXYD5
  Gene Name: FXYD domain containing ion transport regulator 5
  Uniprot ID: Q96DB9
  ENST ID: ENST00000342879
  CDS Start-End: 779-1315
tccacgaggctgccggcttaggacccccagctccgacgtaagtccctctcgtgcgccacctccatccgctgcccctctgcccacgggccgggctcaggtgggtaggggtttgaccccttccgctcctctccgccccccatccacgcccacatctctctgcctcctctcctgggctacagtgggccgctctgcctcgctcccgcccgcctgcctcagtctccccagctctctgccacccccctcggaccagtgcctcttaggtctctccagcgcgccatccctgcaaggcggcccctgacaccaactcactttttcctctgagcgcgggaggcgttactcactcttcctccttcccctcctcgccgactcccgggctctgggcccctgggggagggaagaggcctcctatctactcctctgccccagtcccctccttgcgtcagtcccagtgagggataagcgcctggcggaaggcgcagggaggtgtttctctgcttcaggagtgcccgccggcccttgcagctgctggaagacccatttatctcatgcttcttgttttctttggggacctgcaggggaaggaagcagggtgacggtttggtatccccacctaagaccctcccctttcccctgaggccagccgtcagcccctggcagggggtcttggaagccagaggtttttgctcagggcagggaaagggctgcaggatccccgggggctgccggaggtcggtctcactgacatcatggctgaccccagcatcgcctggtcccacagatgtcgccctctggtcgcctgtgtcttctcaccatcgttggcctgattctccccaccagaggacagacgttgaaagataccacgtccagttcttcagcagactcaactatcatggacattcaggtcccgacacgagccccagatgcagtctacacagaactccagcccacctctccaaccccaacctggcctgctgatgaaacaccacaaccccagacccagacccagcaactggaaggaacggatgggcctctagtgacagatccagagacacacaagagcaccaaagcagctcatcccactgatgacaccacgacgctctctgagagaccatccccaagcacagacgtccagacagacccccagaccctcaagccatctggttttcatgaggatgaccccttcttctatgatgaacacaccctccggaaacgggggctgttggtcgcagctgtgctgttcatcacaggcatcatcatcctcaccagtggcaagtgcaggcagctgtcccggttatgccggaatcgttgcaggtgagtccatcagaaacaggagctgacaacctgctgggcacccgaagaccaagccccctgccagctcaccgtgcccagcctcctgcatcccctcgaagagcctggccagagagggaagacacagatgatgaagctggagccagggctgccggtccgagtctcctacctcccccaaccctgcccgcccctgaaggctacctggcgccttgggggctgtccctcaagttatctcctctgctaagacaaaaagtaaagcactgtggtctttg

SEQ ID NO: 135585 - DNA, 632 bp, Homo sapiens
  Payload ID: 6509
  Gene Symbol: FXYD5
  Gene Name: FXYD domain containing ion transport regulator 5
  Uniprot ID: Q96DB9
  ENST ID: ENST00000392217
  CDS Start-End: 43-366
tgcacaccagctgtgtagatgtgggagaggggtttcttccagatgcagactctcagtaatatcccttgtttctgcctccatggctcactcctgccctccactgatctggccactctctcagctcatcccactgatgacaccacgacgctctctgagagaccatccccaagcacagacgtccagacagacccccagaccctcaagccatctggttttcatgaggatgaccccttcttctatgatgaacacaccctccggaaacgggggctgttggtcgcagctgtgctgttcatcacaggcatcatcatcctcaccagtggcaagtgcaggcagctgtcccggttatgccggaatcgttgcaggtgagtccatcagaaacaggagctgacaacctgctgggcacccgaagaccaagccccctgccagctcaccgtgcccagcctcctgcatcccctcgaagagcctggccagagagggaagacacagatgatgaagctggagccagggctgccggtccgagtctcctacctcccccaaccctgcccgcccctgaaggctacctggcgccttgggggctgtccctcaagttatctcctctgctaagacaaaaagtaaagcactgtggtctttgc

SEQ ID NO: 135586 - DNA, 763 bp, Homo sapiens
  Payload ID: 6509
  Gene Symbol: FXYD5
  Gene Name: FXYD domain containing ion transport regulator 5
  ENST ID: ENST00000392218
  CDS Start-End: 81-371
acaccctccgcctggacgcagcagccaccgccgcgtccctctctccacgaggctgccggcttaggacccccagctccgacatgtcgccctctggtcgcctgtgtcttctcaccatcgttggcctgattctccccaccagaggacagacgttgaaagataccacgtccagttcttcagcagactcaactatcatggacattcaggtcccgacacgagccccagatgcagtctacacagaactccagcccacctctccaaccccaacctggcctgctgatggcgcctatatcacagcttatggagtcacacacttcttgatgaacatgttggctgtttccagctttttctgtctacacacagcaccacaatgagcaactttgtcccttcctccttgagcaaacgcacttggaatatgtactgactatgtgctggtcatggttctaaatattttgcgtatgttaactcattcaaccttcacgcaaaccctaagaggcagaaattaccattgtccccattttacagacaaggaaacagaggctgtgagtaactggttcaaggtctcacaacaagtcagggacgcagctggaatcgaagtccaggaatctggcaccagagcctgtgcttttatccaagacaatacagggcaaaggacatgcatgcttaatgttttaaaatttgccctcctgccgcccaggcacagtggctcatgcctgtcatcccagcacttttggaggctgaggcgggtggatcgcttgagcccagg

SEQ ID NO: 135587 - DNA, 872 bp, Homo sapiens
  Payload ID: 6509
  Gene Symbol: FXYD5
  Gene Name: FXYD domain containing ion transport regulator 5
  Uniprot ID: Q96DB9
  ENST ID: ENST00000392219
  CDS Start-End: 68-604
ggacgcagcagccaccgccgcgtccctctctccacgaggctgccggcttaggacccccagctccgacatgtcgccctctggtcgcctgtgtcttctcaccatcgttggcctgattctccccaccagaggacagacgttgaaagataccacgtccagttcttcagcagactcaactatcatggacattcaggtcccgacacgagccccagatgcagtctacacagaactccagcccacctctccaaccccaacctggcctgctgatgaaacaccacaaccccagacccagacccagcaactggaaggaacggatgggcctctagtgacagatccagagacacacaagagcaccaaagcagctcatcccactgatgacaccacgacgctctctgagagaccatccccaagcacagacgtccagacagacccccagaccctcaagccatctggttttcatgaggatgaccccttcttctatgatgaacacaccctccggaaacgggggctgttggtcgcagctgtgctgttcatcacaggcatcatcatcctcaccagtggcaagtgcaggcagctgtcccggttatgccggaatcgttgcaggtgagtccatcagaaacaggagctgacaacctgctgggcacccgaagaccaagccccctgccagctcaccgtgcccagcctcctgcatcccctcgaagagcctggccagagagggaagacacagatgatgaagctggagccagggctgccggtccgagtctcctacctcccccaaccctgcccgcccctgaaggctacctggcgccttgggggctgtccctcaagttatctcctctgctaagacaaaaagtaaagcactgtggtctttgccc

SEQ ID NO: 135588 - DNA, 892 bp, Homo sapiens
  Payload ID: 6509
  Gene Symbol: FXYD5
  Gene Name: FXYD domain containing ion transport regulator 5
  Uniprot ID: Q96DB9
  ENST ID: ENST00000423817
  CDS Start-End: 92-628
tgggctacagtgggccgctctgcctcgctcccgcccgcctgcctcagtctccccagctctctgccacccccctcggaccagtgcctcttagatgtcgccctctggtcgcctgtgtcttctcaccatcgttggcctgattctccccaccagaggacagacgttgaaagataccacgtccagttcttcagcagactcaactatcatggacattcaggtcccgacacgagccccagatgcagtctacacagaactccagcccacctctccaaccccaacctggcctgctgatgaaacaccacaaccccagacccagacccagcaactggaaggaacggatgggcctctagtgacagatccagagacacacaagagcaccaaagcagctcatcccactgatgacaccacgacgctctctgagagaccatccccaagcacagacgtccagacagacccccagaccctcaagccatctggttttcatgaggatgaccccttcttctatgatgaacacaccctccggaaacgggggctgttggtcgcagctgtgctgttcatcacaggcatcatcatcctcaccagtggcaagtgcaggcagctgtcccggttatgccggaatcgttgcaggtgagtccatcagaaacaggagctgacaacctgctgggcacccgaagaccaagccccctgccagctcaccgtgcccagcctcctgcatcccctcgaagagcctggccagagagggaagacacagatgatgaagctggagccagggctgccggtccgagtctcctacctcccccaaccctgcccgcccctgaaggctacctggcgccttgggggctgtccctcaagttatctcctctgctaagacaaaaagtaaagcactgtggtcttt

SEQ ID NO: 135589 - DNA, 898 bp, Homo sapiens
  Payload ID: 6509
  Gene Symbol: FXYD5
  Gene Name: FXYD domain containing ion transport regulator 5
  Uniprot ID: Q96DB9
  ENST ID: ENST00000541435
  CDS Start-End: 118-654
gccaccgccgcgtccctctctccacgaggctgccggcttaggacccccagctccgacgtaagtccctctcgtgcgccacctccatccgctgcccctctgcccacgggccgggctcagatgtcgccctctggtcgcctgtgtcttctcaccatcgttggcctgattctccccaccagaggacagacgttgaaagataccacgtccagttcttcagcagactcaactatcatggacattcaggtcccgacacgagccccagatgcagtctacacagaactccagcccacctctccaaccccaacctggcctgctgatgaaacaccacaaccccagacccagacccagcaactggaaggaacggatgggcctctagtgacagatccagagacacacaagagcaccaaagcagctcatcccactgatgacaccacgacgctctctgagagaccatccccaagcacagacgtccagacagacccccagaccctcaagccatctggttttcatgaggatgaccccttcttctatgatgaacacaccctccggaaacgggggctgttggtcgcagctgtgctgttcatcacaggcatcatcatcctcaccagtggcaagtgcaggcagctgtcccggttatgccggaatcgttgcaggtgagtccatcagaaacaggagctgacaacctgctgggcacccgaagaccaagccccctgccagctcaccgtgcccagcctcctgcatcccctcgaagagcctggccagagagggaagacacagatgatgaagctggagccagggctgccggtccgagtctcctacctcccccaaccctgcccgcccctgaaggctacctggcgccttgggggctgtccctcaagttatctcctctgctaagacaaaa

SEQ ID NO: 135590 - DNA, 1003 bp, Homo sapiens
  Payload ID: 6509
  Gene Symbol: FXYD5
  Gene Name: FXYD domain containing ion transport regulator 5
  ENST ID: ENST00000543307
  CDS Start-End: 81-665
acaccctccgcctggacgcagcagccaccgccgcgtccctctctccacgaggctgccggcttaggacccccagctccgacatgtcgccctctggtcgcctgtgtcttctcaccatcgttggcctgattctccccaccagaggacagacgttgaaagataccacgtccagttcttcagcagactcaactatcatggacattcaggtcccgacacgagccccagatgcagtctacacagaactccagcccacctctccaaccccaacctggcctgctgatgaaacaccacaaccccagacccagacccagcaactggaaggaacggatgggcctctagtgacagatccagagacacacaagagcaccaaagcagctcatcccactgatgacaccacgacgctctctgagagaccatccccaagcacagacgtccagacagacccccagaccctcaagccatctggttttcatgaggatgaccccttcttctatgatgaacacaccctccggaaacgggggctgttggtcgcagctgtgctgttcatcacaggcatcatcatcctcaccagtgagaactggggttgggtgggaaggacaccaagaccaggagggggacttatgacggagggctgggttctcaaaggtccctgggcaattttgttttaaatgaggtatctattagctgcatatacatacaaaccaccacagaattcagtggtttaaaataatgaccatttattgagctctcaataccacagtttggaaacataggctgggctcagctgggtgattcttctggtctcaactggatttactcttgcatctgagttcagttgtgggtcagcaggaaactttgtttctggggtgccttggctctttgccacatcatcttatccttcactaagctagcctgggcttgttcgcatggtggtggcagggatctaagatagagtgaatgcatgcaggctcagaactggccattatcacttctgcctcattccata

SEQ ID NO: 135591 - DNA, 883 bp, Homo sapiens
  Payload ID: 6509
  Gene Symbol: FXYD5
  Gene Name: FXYD domain containing ion transport regulator 5
  ENST ID: ENST00000592290
  CDS Start-End: 64-435
gcagcagccaccgccgcgtccctctctccacgaggctgccggcttaggacccccagctccgacatgtcgccctctggtcgcctgtgtcttctcaccatcgttggcctgattctccccaccagaggacagacgttgaaagataccacgtccagttcttcagcagactcaactatcatggacattcaggtcccgacacgagccccaggtgaggaaagggacacatctatcaagatcctgtcattgcaaataacaacagcaacaaaaatcccaaacttggaccaaacaagggaatttatggatttatgtaacgaaaaagtccagatgcagtctacacagaactccagcccacctctccaaccccaacctggcctgctgatgaaacaccacaaccccagacccagacccagcaactggaaggaacggatgggcctctagtgacagatccagagacacacaagagcaccaaagcagctcatcccactgatgacaccacgacgctctctgagagaccatccccaagcacagacgtccagacagacccccagaccctcaagccatctggttttcatgaggatgaccccttcttctatgatgaacacaccctccggaaacgggggctgttggtcgcagctgtgctgttcatcacaggcatcatcatcctcaccagtggcaagtgcaggcagctgtcccggttatgccggaatcgttgcaggtgagtccatcagaaacaggagctgacaacctgctgggcacccgaagaccaagccccctgccagctcaccgtgcccagcctcctgcatcccctcgaagagcctggccagagagggaagacacagatgatgaagctggagccagggctgccggtccgagtctcctacctccc

SEQ ID NO: 135592 - DNA, 862 bp, Homo sapiens
  Payload ID: 6509
  Gene Symbol: FXYD5
  Gene Name: FXYD domain containing ion transport regulator 5
  Uniprot ID: Q96DB9
  ENST ID: ENST00000590686
  CDS Start-End: 76-612
gccaccgccgcgtccctctctccacgaggctgccggcttaggacccccagctccgaccatcgcctggtcccacagatgtcgccctctggtcgcctgtgtcttctcaccatcgttggcctgattctccccaccagaggacagacgttgaaagataccacgtccagttcttcagcagactcaactatcatggacattcaggtcccgacacgagccccagatgcagtctacacagaactccagcccacctctccaaccccaacctggcctgctgatgaaacaccacaaccccagacccagacccagcaactggaaggaacggatgggcctctagtgacagatccagagacacacaagagcaccaaagcagctcatcccactgatgacaccacgacgctctctgagagaccatccccaagcacagacgtccagacagacccccagaccctcaagccatctggttttcatgaggatgaccccttcttctatgatgaacacaccctccggaaacgggggctgttggtcgcagctgtgctgttcatcacaggcatcatcatcctcaccagtggcaagtgcaggcagctgtcccggttatgccggaatcgttgcaggtgagtccatcagaaacaggagctgacaacctgctgggcacccgaagaccaagccccctgccagctcaccgtgcccagcctcctgcatcccctcgaagagcctggccagagagggaagacacagatgatgaagctggagccagggctgccggtccgagtctcctacctcccccaaccctgcccgcccctgaaggctacctggcgccttgggggctgtccctcaagttatctcctctgctaagacaaaaagtaaa

SEQ ID NO: 135593 - DNA, 927 bp, Homo sapiens
  Payload ID: 6509
  Gene Symbol: FXYD5
  Gene Name: FXYD domain containing ion transport regulator 5
  ENST ID: ENST00000588699
  CDS Start-End: 24-608
ggcttaggacccccagctccgacatgtcgccctctggtcgcctgtgtcttctcaccatcgttggcctgattctccccaccagaggacagacgttgaaagataccacgtccagttcttcagcagactcaactatcatggacattcaggtcccgacacgagccccagatgcagtctacacagaactccagcccacctctccaaccccaacctggcctgctgatgaaacaccacaaccccagacccagacccagcaactggaaggaacggatgggcctctagtgacagatccagagacacacaagagcaccaaagcagctcatcccactgatgacaccacgacgctctctgagagaccatccccaagcacagacgtccagacagacccccagaccctcaagccatctggttttcatgaggatgaccccttcttctatgatgaacacaccctccggaaacgggggctgttggtcgcagctgtgctgttcatcacaggcatcatcatcctcaccagtgagaactggggttgggtgggaaggacaccaagaccaggagggggacttatgacggagggctgggttctcaaaggtccctgggcaattttgttttaaatgaggtggcaagtgcaggcagctgtcccggttatgccggaatcgttgcaggtgagtccatcagaaacaggagctgacaacctgctgggcacccgaagaccaagccccctgccagctcaccgtgcccagcctcctgcatcccctcgaagagcctggccagagagggaagacacagatgatgaagctggagccagggctgccggtccgagtctcctacctcccccaaccctgcccgcccctgaaggctacctggcgccttgggggctgtccctcaagttatctcctctgctaagacaaaaagtaaagcactgtggtcttt

SEQ ID NO: 135594 - DNA, 729 bp, Homo sapiens
  Payload ID: 6509
  Gene Symbol: FXYD5
  Gene Name: FXYD domain containing ion transport regulator 5
  ENST ID: ENST00000496493
  CDS Start-End: 44-247
cctctctccacgaggctgccggcttaggacccccagctccgacatgtcgccctctggtcgcctgtgtcttctcaccatcgttggcctgattctccccaccagaggttggaacagactgtgggggcggagacaggagcagggagcccaagaaggaggctgctgggatgtccaggctggagggtacagaggcaggaccaggatgggggcagtggagttatccagcactgaccacatggacagacgttgaaagataccacgtccagttcttcagcagactcaactatcatggacattcaggtcccgacacgagccccagatgcagtctacacagaactccagcccacctctccaaccccaacctggcctgctgatgaaacaccacaaccccagacccagacccagcaactggaaggaacggatgggcctctagtgacagatccagagacacacaagagcaccaaagcagctcatcccactgatgacaccacgacgctctctgagagaccatccccaagcacagacgtccagacagacccccagaccctcaagccatctggttttcatgaggatgaccccttcttctatgatgaacacaccctccggaaacgggggctgttggtcgcagctgtgctgttcatcacaggcatcatcatcctcaccagtggcaagtgcaggcagctgtcccggttatgccggaatcgttgcaggtgagtccatcagaaacaggag

SEQ ID NO: 135595 - DNA, 1929 bp, Homo sapiens
  Payload ID: 6510
  Gene Symbol: FXYD6
  Gene Name: FXYD domain containing ion transport regulator 6
  Uniprot ID: Q9H0Q3
  ENST ID: ENST00000260282
  CDS Start-End: 321-608
agccagcccgactcctaggaggaggggaggcgggaaagcagctcaagcctcacccaccgccctgcccccagccccgccactcccaggctcctcgggactcggcgggtcctcctgggagtctcggaggggaccggctgtgcagagaacttcagccaaagcatctgagacgggaagcagaaaaaggagggacagtttggagaagaaaaacgcagctgtgtgtttgggccttgacgtggctgtggatgcagtcgttctgacccctggtggccgagaggtgaagtgcagtggcggctgcttgctcaaggccggaggaagacgccatggagttggtgctggtcttcctctgcagcctgctggcccccatggtcctggccagtgcagctgaaaaggagaaggaaatggacccttttcattatgattaccagaccctgaggattgggggactggtgttcgctgtggtcctcttctcggttgggatcctccttatcctaagtcgcaggtgcaagtgcagtttcaatcagaagccccgggccccaggagatgaggaagcccaggtggagaacctcatcaccgccaatgcaacagagccccagaaagcagagaactgaagtgcagccatcaggtggaagcctctggaacctgaggcggctgcttgaacctttggatgcaaatgtcgatgcttaagaaaaccggccacttcagcaacagccctttccccaggagaagccaagaacttgtgtgtcccccaccctatcccctctaacaccattcctccacctgatgatgcaactaacacttgcctccccactgcagcctgcggtcctgcccacctcccgtgatgtgtgtgtgtgtgtgtgtgtgtgtgactgtgtgtgtttgctaactgtggtctttgtggctacttgtttgtggatggtattgtgtttgttagtgaactgtggactcgctttcccaggcaggggctgagccacatggccatctgctcctccctgcccccgtggccctccatcaccttctgctcctaggaggctgcttgttgcccgagaccagccccctcccctgatttagggatgcgtagggtaagagcacgggcagtggtcttcagtcgtcttgggacctgggaaggtttgcagcactttgtcatcattcttcatggactcctttcactcctttaacaaaaaccttgcttccttatcccacctgatcccagtctgaaggtctcttagcaactggagatacaaagcaaggagctggtgagcccagcgttgacgtcaggcaggctatgcccttccgtggttaatttcttcccaggggcttccacgaggagtccccatctgccccgccccttcacagagcgcccggggattccaggcccagggcttctactctgcccctggggaatgtgtcccctgcatatcttctcagcaataactccatgggctctgggaccctaccccttccaaccttccctgcttctgagacttcaatctacagcccagctcatccagatgcagactacagtccctgcaattgggtctctggcaggcaatagttgaaggactcctgttccgttggggccagcacaccgggatggatggagggagagcagaggcctttgcttctctgcctacgtccccttagatgggcagcagaggcaactcccgcatcctttgctctgcctgtcagtggtcagagcggtgagcgaggtgggttggagactcagcaggctccgtgcagcccttgggaacagtgagaggttgaaggtcataacgagagtgggaactcaacccagatcccgcccctcctgtcctctgtgttcccgcggaaaccaaccaaaccgtgcgctgtgacccattgctgttctctgtatcgtgatctatcctcaacaacaacagaaaaaaggaataaaatatcctttgtttcctagtg

SEQ ID NO: 135596 - DNA, 1033 bp, Homo sapiens
  Payload ID: 6510
  Gene Symbol: FXYD6
  Gene Name: FXYD domain containing ion transport regulator 6
  Uniprot ID: Q9H0Q3
  ENST ID: ENST00000524656
  CDS Start-End: 298-585
agtctcctcctcgactcctctctggaacattgctggctgggcggggcgggcaatcatttcaagttaggtgatttaacaataattgatgcttaattgtttatttgatgggcatttaaaatgcaaattgagggaactggttgcattttccactgatggatctgtggcctctggtcgacccaaagcacttgttttaaaaggcagctttaaaagcccttgatggttgtttgtttgctctgaggctctgaaccagagaagcccagctcctgttacagattcatcaaatgccggaaagacgccatggagttggtgctggtcttcctctgcagcctgctggcccccatggtcctggccagtgcagctgaaaaggagaaggaaatggacccttttcattatgattaccagaccctgaggattgggggactggtgttcgctgtggtcctcttctcggttgggatcctccttatcctaagtcgcaggtgcaagtgcagtttcaatcagaagccccgggccccaggagatgaggaagcccaggtggagaacctcatcaccgccaatgcaacagagccccagaaagcagagaactgaagtgcagccatcaggtggaagcctctggaacctgaggcggctgcttgaacctttggatgcaaatgtcgatgcttaagaaaaccggccacttcagcaacagccctttccccaggagaagccaagaacttgtgtgtcccccaccctatcccctctaacaccattcctccacctgatgatgcaactaacacttgcctccccactgcagcctgcggtcctgcccacctcccgtgatgtgtgtgtgtgtgtgtgtgtgtgtgactgtgtgtgtttgctaactgtggtctttgtggctacttgtttgtggatggtattgtgtttgttagtgaactgtggactcgctttcccaggcaggggctgagccacatggccatctgctcctccctgcccccgtggccctccatcaccttctgctcctaggaggctgcttgttgcccgagaccagccccct

SEQ ID NO: 135597 - DNA, 1799 bp, Homo sapiens
  Payload ID: 6510
  Gene Symbol: FXYD6
  Gene Name: FXYD domain containing ion transport regulator 6
  Uniprot ID: Q9H0Q3
  ENST ID: ENST00000527717
  CDS Start-End: 194-481
atgctccaagtcgcgtcacaggcagggttgccgagccaggatttatttacatcttcacattcaaagttcgtcatcatgaattttgactcttggggactgggctgaggacggggtggtactgctcctggcagggccagaggtggatggggcttgaaaagggggttcaaggcagcagatctatggttcagacgccatggagttggtgctggtcttcctctgcagcctgctggcccccatggtcctggccagtgcagctgaaaaggagaaggaaatggacccttttcattatgattaccagaccctgaggattgggggactggtgttcgctgtggtcctcttctcggttgggatcctccttatcctaagtcgcaggtgcaagtgcagtttcaatcagaagccccgggccccaggagatgaggaagcccaggtggagaacctcatcaccgccaatgcaacagagccccagaaagcagagaactgaagtgcagccatcaggtggaagcctctggaacctgaggcggctgcttgaacctttggatgcaaatgtcgatgcttaagaaaaccggccacttcagcaacagccctttccccaggagaagccaagaacttgtgtgtcccccaccctatcccctctaacaccattcctccacctgatgatgcaactaacacttgcctccccactgcagcctgcggtcctgcccacctcccgtgatgtgtgtgtgtgtgtgtgtgtgtgtgactgtgtgtgtttgctaactgtggtctttgtggctacttgtttgtggatggtattgtgtttgttagtgaactgtggactcgctttcccaggcaggggctgagccacatggccatctgctcctccctgcccccgtggccctccatcaccttctgctcctaggaggctgcttgttgcccgagaccagccccctcccctgatttagggatgcgtagggtaagagcacgggcagtggtcttcagtcgtcttgggacctgggaaggtttgcagcactttgtcatcattcttcatggactcctttcactcctttaacaaaaaccttgcttccttatcccacctgatcccagtctgaaggtctcttagcaactggagatacaaagcaaggagctggtgagcccagcgttgacgtcaggcaggctatgcccttccgtggttaatttcttcccaggggcttccacgaggagtccccatctgccccgccccttcacagagcgcccggggattccaggcccagggcttctactctgcccctggggaatgtgtcccctgcatatcttctcagcaataactccatgggctctgggaccctaccccttccaaccttccctgcttctgagacttcaatctacagcccagctcatccagatgcagactacagtccctgcaattgggtctctggcaggcaatagttgaaggactcctgttccgttggggccagcacaccgggatggatggagggagagcagaggcctttgcttctctgcctacgtccccttagatgggcagcagaggcaactcccgcatcctttgctctgcctgtcagtggtcagagcggtgagcgaggtgggttggagactcagcaggctccgtgcagcccttgggaacagtgagaggttgaaggtcataacgagagtgggaactcaacccagatcccgcccctcctgtcctctgtgttcccgcggaaaccaaccaaaccgtgcgctgtgacccattgctgttctctgtatcgtgatctatcctcaacaacaacagaaaaaaggaataaaatatcctttgtttccta

SEQ ID NO: 135598 - DNA, 571 bp, Homo sapiens
  Payload ID: 6510
  Gene Symbol: FXYD6
  Gene Name: FXYD domain containing ion transport regulator 6
  ENST ID: ENST00000524841
  CDS Start-End: 138-410
acattcaaagttcgtcatcatgaattttgactcttggggactgggctgaggacggggtggtactgctcctggcagggccagaggtggatggggcttgaaaagggggttcaaggcagcagatctatggttcagacgccatggagttggtgctggtcttcctctgcagcctgctggcccccatggtcctggccagtgcagctgaaaaggagaaggaaatggacccttttcattatgattaccagaccctgaggattgggggactggtgttcgctgtggtcctcttctcggttgggatcctccttatcctaagtcgcaggtgcaagtgcagtttcaatcagaagccccgggccccaggagatgaggaagcccaggtggagaacctcatcaccgccaatggtaactgtccgtgaccacctgcccaggtggaaaagagggaacagagagacccctctgtggctcaggaagggactgttgccagcaacagagccccagaaagcagagaactgaagtgcagccatcaggtggaagcctctggaacctgaggcggctgcttgaacctttggatgcaaat

SEQ ID NO: 135599 - DNA, 2171 bp, Homo sapiens
  Payload ID: 6510
  Gene Symbol: FXYD6
  Gene Name: FXYD domain containing ion transport regulator 6
  Uniprot ID: Q9H0Q3
  ENST ID: ENST00000526014
  CDS Start-End: 597-884
aattaccaaggctcccaattaacgtgggctgctgtgtctggtgctgggttattttctcctatttttccgttcctcggggtttactattgcagagagacaccaggtctgtcattgtgcctgtcttgctcccttcccaccctaaccagagggaaaccgaaaagcaacagctgatggcaaatccgctccggcgcttgcacgcctcctcggcggcagtctcctgttgcttctcggagcttgactgccctttggaaaaatctctccgcccctcgagaggagagaggagcagaggacgcgcgcgagcacagagcgggaggacggacagggagaggaggagagggggtctgcgcgcggccgctacccagaagccagcggacggcagcacggagtgggctgtccccgagcccagccccgagcgagccccccccccgcccccgcaggacgcgcctcccagccagcccgactcctaggaggaggggaggcgggaaagcagctcaagcctcacccaccgccctgcccccagccccgccactcccaggctcctcgggactcggcgggtcctcctgggagtctcggaggggaccggctgtgcagacgccatggagttggtgctggtcttcctctgcagcctgctggcccccatggtcctggccagtgcagctgaaaaggagaaggaaatggacccttttcattatgattaccagaccctgaggattgggggactggtgttcgctgtggtcctcttctcggttgggatcctccttatcctaagtcgcaggtgcaagtgcagtttcaatcagaagccccgggccccaggagatgaggaagcccaggtggagaacctcatcaccgccaatgcaacagagccccagaaagcagagaactgaagtgcagccatcaggtggaagcctctggaacctgaggcggctgcttgaacctttggatgcaaatgtcgatgcttaagaaaaccggccacttcagcaacagccctttccccaggagaagccaagaacttgtgtgtcccccaccctatcccctctaacaccattcctccacctgatgatgcaactaacacttgcctccccactgcagcctgcggtcctgcccacctcccgtgatgtgtgtgtgtgtgtgtgtgtgtgtgactgtgtgtgtttgctaactgtggtctttgtggctacttgtttgtggatggtattgtgtttgttagtgaactgtggactcgctttcccaggcaggggctgagccacatggccatctgctcctccctgcccccgtggccctccatcaccttctgctcctaggaggctgcttgttgcccgagaccagccccctcccctgatttagggatgcgtagggtaagagcacgggcagtggtcttcagtcgtcttgggacctgggaaggtttgcagcactttgtcatcattcttcatggactcctttcactcctttaacaaaaaccttgcttccttatcccacctgatcccagtctgaaggtctcttagcaactggagatacaaagcaaggagctggtgagcccagcgttgacgtcaggcaggctatgcccttccgtggttaatttcttcccaggggcttccacgaggagtccccatctgccccgccccttcacagagcgcccggggattccaggcccagggcttctactctgcccctggggaatgtgtcccctgcatatcttctcagcaataactccatgggctctgggaccctaccccttccaaccttccctgcttctgagacttcaatctacagcccagctcatccagatgcagactacagtccctgcaattgggtctctggcaggcaatagttgaaggactcctgttccgttggggccagcacaccgggatggatggagggagagcagaggcctttgcttctctgcctacgtccccttagatgggcagcagaggcaactcccgcatcctttgctctgcctgtcagtggtcagagcggtgagcgaggtgggttggagactcagcaggctccgtgcagcccttgggaacagtgagaggttgaaggtcataacgagagtgggaactcaacccagatcccgcccctcctgtcctctgtgttcccgcggaaaccaaccaaaccgtgcgctgtgacccattgctgttctctgtatcgtgatctatcctcaacaacaacag

SEQ ID NO: 135600 - DNA, 708 bp, Homo sapiens
  Payload ID: 6510
  Gene Symbol: FXYD6
  Gene Name: FXYD domain containing ion transport regulator 6
  ENST ID: ENST00000529335
  CDS Start-End: 134-469
ctaggaggaggggaggcgggaaagcagctcaagcctcacccaccgccctgcccccagccccgccactcccaggctcctcgggactcggcgggtcctcctgggagtctcggaggggaccggctgtgcagacgccatggagttggtgctggtcttcctctgcagcctgctggcccccatggtcctggccagtgctgaaaaggagaaggaaatggacccttttcattatgattaccagaccctgaggattgggggactggtgttcgctgtggtcctcttctcggttgggatcctccttatcctaagtcgcaggtgcaagtgcagtttcaatcagaagccccgggccccaggagatgaggaagcccagcaacagagccccagaaagcagagaactgaagtgcagccatcaggtggaagcctctggaacctgaggcggctgcttgaacctttggatgcaaatgtcgatgcttaagaaaaccggccacttcagcaacagccctttccccaggagaagccaagaacttgtgtgtcccccaccctatcccctctaacaccattcctccacctgatgatgcaactaacacttgcctccccactgcagcctgcggtcctgcccacctcccgtgatgtgtgtgtgtgtgtgtgtgtgtgtgactgtgtgtgtttgctaactgtggtctttgtggctacttgtttgtggatggtattgtg

SEQ ID NO: 135601 - DNA, 2132 bp, Homo sapiens
  Payload ID: 6510
  Gene Symbol: FXYD6
  Gene Name: FXYD domain containing ion transport regulator 6
  Uniprot ID: Q9H0Q3
  ENST ID: ENST00000539526
  CDS Start-End: 522-809
aaccgaaaagcaacagctgatggcaaatccgctccggcgcttgcacgcctcctcggcggcagtctcctgttgcttctcggagcttgactgccctttggaaaaatctctccgcccctcgagaggagagaggagcagaggacgcgcgcgagcacagagcgggaggacggacagggagaggaggagagggggtctgcgcgcggccgctacccagaagccagcggacggcagcacggagtgggctgtccccgagcccagccccgagcgagccccccccccgcccccgcaggacgcgcctcccagccagcccgactcctaggaggaggggaggcgggaaagcagctcaagcctcacccaccgccctgcccccagccccgccactcccaggctcctcgggactcggcgggtcctcctgggagtctcggaggggaccggctgtgcagagaacttcagccaaagcatctgagacgggaagcagaaaaaggagggacagtttggagaagaaaaacgcagctgtgtacgccatggagttggtgctggtcttcctctgcagcctgctggcccccatggtcctggccagtgcagctgaaaaggagaaggaaatggacccttttcattatgattaccagaccctgaggattgggggactggtgttcgctgtggtcctcttctcggttgggatcctccttatcctaagtcgcaggtgcaagtgcagtttcaatcagaagccccgggccccaggagatgaggaagcccaggtggagaacctcatcaccgccaatgcaacagagccccagaaagcagagaactgaagtgcagccatcaggtggaagcctctggaacctgaggcggctgcttgaacctttggatgcaaatgtcgatgcttaagaaaaccggccacttcagcaacagccctttccccaggagaagccaagaacttgtgtgtcccccaccctatcccctctaacaccattcctccacctgatgatgcaactaacacttgcctccccactgcagcctgcggtcctgcccacctcccgtgatgtgtgtgtgtgtgtgtgtgtgtgtgactgtgtgtgtttgctaactgtggtctttgtggctacttgtttgtggatggtattgtgtttgttagtgaactgtggactcgctttcccaggcaggggctgagccacatggccatctgctcctccctgcccccgtggccctccatcaccttctgctcctaggaggctgcttgttgcccgagaccagccccctcccctgatttagggatgcgtagggtaagagcacgggcagtggtcttcagtcgtcttgggacctgggaaggtttgcagcactttgtcatcattcttcatggactcctttcactcctttaacaaaaaccttgcttccttatcccacctgatcccagtctgaaggtctcttagcaactggagatacaaagcaaggagctggtgagcccagcgttgacgtcaggcaggctatgcccttccgtggttaatttcttcccaggggcttccacgaggagtccccatctgccccgccccttcacagagcgcccggggattccaggcccagggcttctactctgcccctggggaatgtgtcccctgcatatcttctcagcaataactccatgggctctgggaccctaccccttccaaccttccctgcttctgagacttcaatctacagcccagctcatccagatgcagactacagtccctgcaattgggtctctggcaggcaatagttgaaggactcctgttccgttggggccagcacaccgggatggatggagggagagcagaggcctttgcttctctgcctacgtccccttagatgggcagcagaggcaactcccgcatcctttgctctgcctgtcagtggtcagagcggtgagcgaggtgggttggagactcagcaggctccgtgcagcccttgggaacagtgagaggttgaaggtcataacgagagtgggaactcaacccagatcccgcccctcctgtcctctgtgttcccgcggaaaccaaccaaaccgtgcgctgtgacccattgctgttctctgtatcgtgatctatcctcaacaacaacagaaaaaaggaataaaatatcctttgtttcctagtggc

SEQ ID NO: 135602 - DNA, 579 bp, Homo sapiens
  Payload ID: 6510
  Gene Symbol: FXYD6
  Gene Name: FXYD domain containing ion transport regulator 6
  Uniprot ID: Q9H0Q3
  ENST ID: ENST00000530956
  CDS Start-End: 201-488
aagcctcacccaccgccctgcccccagccccgccactcccaggctcctcgggactcggcgggtcctcctgggagtctcggaggggaccggctgtgcaggtttgggccttgacgtggctgtggatgcagtcgttctgacccctggtggccgagaggtgaagtgcagtggcggctgcttgctcaaggccggaggaagacgccatggagttggtgctggtcttcctctgcagcctgctggcccccatggtcctggccagtgcagctgaaaaggagaaggaaatggacccttttcattatgattaccagaccctgaggattgggggactggtgttcgctgtggtcctcttctcggttgggatcctccttatcctaagtcgcaggtgcaagtgcagtttcaatcagaagccccgggccccaggagatgaggaagcccaggtggagaacctcatcaccgccaatgcaacagagccccagaaagcagagaactgaagtgcagccatcaggtggaagcctctggaacctgaggcggctgcttgaacctttggatgcaaatgtcgatgcttaagaaaaccggccactt

SEQ ID NO: 135603 - DNA, 669 bp, Homo sapiens
  Payload ID: 6510
  Gene Symbol: FXYD6
  Gene Name: FXYD domain containing ion transport regulator 6
  ENST ID: ENST00000584394
  CDS Start-End: 79-351
agccccgccactcccaggctcctcgggactcggcgggtcctcctgggagtctcggaggggaccggctgtgcagacgccatggagttggtgctggtcttcctctgcagcctgctggcccccatggtcctggccagtgcagctgaaaaggagaaggaaatggacccttttcattatgattaccagaccctgaggattgggggactggtgttcgctgtggtcctcttctcggttgggatcctccttatcctaagtcgcaggtgcaagtgcagtttcaatcagaagccccgcaacagagccccagaaagcagagaactgaagtgcagccatcaggtggaagcctctggaacctgaggcggctgcttgaacctttggatgcaaatgtcgatgcttaagaaaaccggccacttcagcaacagccctttccccaggagaagccaagaacttgtgtgtcccccaccctatcccctctaacaccattcctccacctgatgatgcaactaacacttgcctccccactgcagcctgcggtcctgcccacctcccgtgatgtgtgtgtgtgtgtgtgtgtgtgtgactgtgtgtgtttgctaactgtggtctttgtggctacttgtttgtggatggtattgtgtttgttagtgaactgtggactcgctttcccaggcaggg

SEQ ID NO: 135604 - DNA, 566 bp, Homo sapiens
  Payload ID: 6510
  Gene Symbol: FXYD6
  Gene Name: FXYD domain containing ion transport regulator 6
  ENST ID: ENST00000584230
  CDS Start-End: 137-409
ctcctgggagtctcggaggggaccggctgtgcaggtttgggccttgacgtggctgtggatgcagtcgttctgacccctggtggccgagaggtgaagtgcagtggcggctgcttgctcaaggccggaggaagacgccatggagttggtgctggtcttcctctgcagcctgctggcccccatggtcctggccagtgcagctgaaaaggagaaggaaatggacccttttcattatgattaccagaccctgaggattgggggactggtgttcgctgtggtcctcttctcggttgggatcctccttatcctaagtcgcaggtgcaagtgcagtttcaatcagaagccccgggccccaggagatgaggaagcccaggtggagaacctcatcaccgccaatggtaactgtccgtgaccacctgcccaggtggaaaagagggaacagagagacccctctgtggctcaggaagggactgttgccaggtgcatggccagccagacatgctcccgcagtgccaggagagtgggtctccagggcctctgcagcattgccccctcactccaccaaacag

SEQ ID NO: 135605 - DNA, 712 bp, Homo sapiens
  Payload ID: 6511
  Gene Symbol: FXYD7
  Gene Name: FXYD domain containing ion transport regulator 7
  Uniprot ID: P58549
  ENST ID: ENST00000270310
  CDS Start-End: 85-327
ccccacatcggtccgtcctgcttccagctgctgcagcgcgccttcgccgccaaagcatccagcagccccctgctccggcccagcatggcgaccccgacccagacccccacaaaggctcctgaggaacctgacccattttactatgactacaacacggtgcagactgtgggcatgactctggcaaccatcttgttcctgctgggtatcctcatcgtcatcagcaagaaggtgaagtgcaggaaggcggactccaggtctgagagcccaacctgcaaatcctgtaagtctgagcttccctcttcagcccctggtggcggcggcgtgtaacaccttcccgaggaaactccgctgccgaccctgcctgagcgcgggagcctgaggaccgggtggaggcggtggggacccagccgcgcgccgggagcgctccccggaatgagccgccccacccaccccaaggctggagccgctgcaccctgctgtccctctccaggccttggcaatgacgatcccccaaagagcccgtctgcaccccagacccagggcctcaggcctccagctcctgggatccgggagtccatcccggcccagcacccccagcatccccgtgtatggcccccctgcacctccttgtctcatccccgaagatccgtccccctggcccctcagtgtccatgtcttgagcttaataaatgtgcatttggttttttcctct

SEQ ID NO: 135606 - DNA, 636 bp, Homo sapiens
  Payload ID: 6511
  Gene Symbol: FXYD7
  Gene Name: FXYD domain containing ion transport regulator 7
  ENST ID: ENST00000588265
  CDS Start-End: 56-409
gctgcagcgcgccttcgccgccaaagcatccagcagccccctgctccggcccagcatggcgaccccgacccagacccccacaaaggctcctgaggaacctgacccattttactatgactacaacacggtgcagactgtgggcatgactctggcaaccatcttgttcctgctgggtatcctcatcgtcatcagtaagtgcgacccattcctgggctgcctcagcctccgcttcctctgctggctttcatccatatcctacccgctatgtcctgtcttcttgttctgtctctctctcccaacaggcaagaaggtgaagtgcaggaaggcggactccaggtctgagagcccaacctgcaaatcctgtaagtctgagcttccctcttcagcccctggtggcggcggcgtgtaacaccttcccgaggaaactccgctgccgaccctgcctgagcgcgggagcctgaggaccgggtggaggcggtggggacccagccgcgcgccgggagcgctccccggaatgagccgccccacccaccccaaggctggagccgctgcaccctgctgtccctctccaggccttggcaatgacgatcccccaaagagcccgtctgcaccccagacccagggcctcaggcctcc

SEQ ID NO: 135607 - DNA, 456 bp, Homo sapiens
  Payload ID: 6511
  Gene Symbol: FXYD7
  Gene Name: FXYD domain containing ion transport regulator 7
  ENST ID: ENST00000586063
  CDS Start-End: 85-318
ccccacatcggtccgtcctgcttccagctgctgcagcgcgccttcgccgccaaagcatccagcagccccctgctccggcccagcatggcgaccccgacccagacccccacaaaggctcctgaggaacctgacccattttactatgactacaacacggtgcagactgtgggcatgactctggcaaccatcttgttcctgctgggtatcctcatcgtcatcagcaagaaggtgaagtgcaggaaggcggactccagcccaacctgcaaatcctgtaagtctgagcttccctcttcagcccctggtggcggcggcgtgtaacaccttcccgaggaaactccgctgccgaccctgcctgagcgcgggagcctgaggaccgggtggaggcggtggggacccagccgcgcgccgggagcgctccccggaatgagccgccccacccaccccaaggctggagcc

SEQ ID NO: 135608 - DNA, 670 bp, Homo sapiens
  Payload ID: 6512
  Gene Symbol: FXYD6-FXYD2
  Gene Name: FXYD6-FXYD2 readthrough
  ENST ID: ENST00000532984
  CDS Start-End: 82-420
cccagccccgccactcccaggctcctcgggactcggcgggtcctcctgggagtctcggaggggaccggctgtgcagacgccatggagttggtgctggtcttcctctgcagcctgctggcccccatggtcctggccagtgcagctgaaaaggagaaggaaatggacccttttcattatgattaccagaccctgaggattgggggactggtgttcgctgtggtcctcttctcggttgggatcctccttatcctaaggccccaggagatgaggaagcccaggtggagaacctcatcaccgccaatgcaacagagccccagaaagcagagaactgaagtgcagccatcaggtggaaggcggcagccccaagggggacgtggacccgttctactatggcagaagattccgctgtgggggcaataagaagcgcaggcaaatcaatgaagatgagccgtaacagcagcctcggcggtgccacccactgcactggggccagctgggaagccaagcatggccctgcctctggcgcctccccttcttccctgggctttagacctttgtccccgtcactgccagcgcttgggctgaaggaagctccagactcaatgtgacccccaggtggcatcgccaactcctgcctcgtgccacctcatgcttataataaagccggcgt

SEQ ID NO: 135609 - DNA, 634 bp, Homo sapiens
  Payload ID: 6512
  Gene Symbol: FXYD6-FXYD2
  Gene Name: FXYD6-FXYD2 readthrough
  ENST ID: ENST00000614497
  CDS Start-End: 43-477
gtcctcctgggagtctcggaggggaccggctgtgcagacgccatggagttggtgctggtcttcctctgcagcctgctggcccccatggtcctggccagtgcagctgaaaaggagaaggaaatggacccttttcattatgattaccagaccctgaggattgggggactggtgttcgctgtggtcctcttctcggttgggatcctccttatcctaagtcgcaggtgcaagtgcagtttcaatcagaagccccgcaacagagccccagaaagcagagaactgaagtgcagccatcaggtggaaggcggcagccccaagggggacgtggacccgttctactatgactatgagaccgttcgcaatgggggcctgatcttcgctggactggccttcatcgtggggctcctcatcctcctcagcagaagattccgctgtgggggcaataagaagcgcaggcaaatcaatgaagatgagccgtaacagcagcctcggcggtgccacccactgcactggggccagctgggaagccaagcatggccctgcctctggcgcctccccttcttccctgggctttagacctttgtccccgtcactgccagcgcttgggctgaaggaagctccagactcaatgtgaccc

SEQ ID NO: 135610 - DNA, 4750 bp, Homo sapiens
  Payload ID: 6513
  Gene Symbol: FYB
  Gene Name: FYN binding protein
  Uniprot ID: O15117
  ENST ID: ENST00000351578
  CDS Start-End: 192-2543
accactgaccgggacaaaaccctgccaggcatcagaaagctccgcagttcttgagttccacatgcagagcagatgcgacagctagaagtgagtagggcccagaccctggcccaggaagatccactaaaggaggccatccttccgccttcttctgcaggagtcaggatggaaaggcagatgtaaagtccctcatggcgaaatataacacggggggcaacccgacagaggatgtctcagtcaatagccgacccttcagagtcacagggccaaactcatcttcaggaatacaagcaagaaagaacttattcaacaaccaaggaaatgccagccctcctgcaggacccagcaatgtacctaagtttgggtccccaaagccacctgtggcagtcaaaccttcttctgaggaaaagcctgacaaggaacccaagcccccgtttctaaagcccactggagcaggccaaagattcggaacaccagccagcttgaccaccagagaccccgaggcgaaagtgggatttctgaaacctgtaggccccaagcccatcaacttgcccaaagaagattccaaacctacatttccctggcctcctggaaacaagccatctcttcacagtgtaaaccaagaccatgacttaaagccactaggcccgaaatctgggcctactcctccaacctcagaaaatgaacagaagcaagcgtttcccaaattgactggggttaaagggaaatttatgtcagcatcacaagatcttgaacccaagcccctcttccccaaacccgcctttggccagaagccgcccctaagtaccgagaactcccatgaagacgaaagccccatgaagaatgtgtcttcatcaaaagggtccccagctcccctgggagtcaggtccaaaagcggccctttaaaaccagcaagggaagactcagaaaataaagaccatgcaggggagatttcaagtttgccctttcctggagtggttttgaaacctgctgcgagcaggggaggcccaggtctctccaaaaatggtgaagaaaaaaaggaagataggaagatagatgctgctaagaacaccttccagagcaaaataaatcaggaagagttggcctcagggactcctcctgccaggttccctaaggccccttctaagctgacagtgggggggccatggggccaaagtcaggaaaaggaaaagggagacaagaattcagccaccccgaaacagaagccattgcctcccttgtttaccttgggtccacctccaccaaaacccaacagaccaccaaatgttgacctgacgaaattccacaaaacctcttctggaaacagtactagcaaaggccagacgtcttactcaacaacttccctgccaccacctccaccatcccatccggccagccaaccaccattgccagcatctcacccatcacaaccaccagtcccaagcctacctcccagaaacattaaacctccgtttgacctaaaaagccctgtcaatgaagacaatcaagatggtgtcacgcactctgatggtgctggaaatctagatgaggaacaagacagtgaaggagaaacatatgaagacatagaagcatccaaagaaagagagaagaaaagggaaaaggaagaaaagaagaggttagagctggagaaaaaggaacagaaagagaaagaaaagaaagaacaagaaataaagaagaaatttaaactaacaggccctattcaagtcatccatcttgcaaaagcttgttgtgatgtcaaaggaggaaagaatgaactgagcttcaagcaaggagagcaaattgaaatcatccgcatcacagacaacccagaaggaaaatggttgggcagaacagcaaggggttcatatggctatattaaaacaactgctgtagagattgactatgattctttgaaactgaaaaaagactctcttggtgccccttcaagacctattgaagatgaccaagaagtatatgatgatgttgcagagcaggatgatattagcagccacagtcagagtggaagtggagggatattccctccaccaccagatgatgacatttatgatgggattgaagaggaagatgctgatgatggtttccctgctcctcctaaacaattggacatgggagatgaagtttacgatgatgtggatacctctgatttccctgtttcatcagcagagatgagtcaaggaactaatgttggaaaagctaagacagaagaaaaggaccttaagaagctaaaaaagcaggaaaaagaagaaaaagacttcaggaaaaaatttaaatatgatggtgaaattagagtcctatattcaactaaagttacaacttccataacttctaaaaagtggggaaccagagatctacaggtaaaacctggtgaatctctagaagttatacaaaccacagatgacacaaaagttctctgcagaaatgaagaagggaaatatggttatgtccttcggagttacctagcggacaatgatggagagatctatgatgatattgctgatggctgcatctatgacaatgactagcactcaactttggtcattctgctgtgttcattaggtgccaatgtgaagtctggattttaattggcatgttattgggtatcaagaaaattaatgcacaaaaccacttattatcatttgttatgaaatcccaattatctttacaaagtgtttaaagtttgaacatagaaaataatctctctgcttaattgttaactcagaagactacattagtgagatgtaagaattattaaatattccatttccgctttggctacaattatgaagaagttgaaggtacttcttttagaccaccagtaaataatcctccttcaaaaaataaaaataaaagaaaaaggaaaatcattcaggaagaaatgacctgtctaaaaaaacctaaggaagaataataatataagaaaggaaatttaaaaacattccacaagaagaaaaattattgtttatacttctacttatggttatatcttatattctctattcaagtgacctgtcttttaaaaaggcagtgctgtcttacctcttgctagtgggttaaatgttttcaaaaattatagcagtagtagaagttttgtataaaatttgtccttatttgttaattgtatataaatgttaattatttgatacgaatgttatgcatttagtatgcacattgaagtctaaactgtagaagagtctaaaacaagttctctttttgcagattcacatactaatggtttaattctgtgctctgtttaaagtactattataactagagtagatctgaatgaggataaccctaaaatcatgaggaatggaagaatggaccttgaaactacctaggcttttatgcatggcacctctttataatgaagacactttttaaagtttttgtttttgtttcaattaccgctagatttttttttctctttttttaaaatccattttactggaaagttggccagcagagggagtagaaattattaaaattctagtgtttggattgggcccttctctaacagtacatactcattcccaaagcaatccaaaaacaaaatgtgaaccatttgggtttcaaatgttaagaacactaaatagcatgatttaaaaaatgaaaaatgctaacacccaagaaaagaagatattaagtgctttttaacaactcctagagtacaaaatgagtacatcataatgctggctcttctactaatgaaccatcgagtgatattgaataaattatttatcttctcagtttccttatctgtaaattacaatattagactaagtaagtttttccaactcttcactaccaattaccttaggcttttataatgctccgcctacttcagtcccatgtttcagaagcttttgtctattttttaaactcattgattaaataatgattaatgcattctccacattttaatattgcaaaggcccattggagtttctgaagtggctccacagaattgaaataatttcaaataactgtaaaggaactgaaaatcttcacagagatgaagtggggtttccattaggtgctttgaaatttgataacaaatcatcaacttccactggtcaatatatagattttgggtgtctgaggccccaagattagatgccactaatctccaaagattccctccaattatgaaatattttaatgtctacttttagagagcactagccagtatatgaccatgtgattaatttcttttcacactagataaaattacctggttcaaaagtggtttttgtttattaaatttggtaataaatatatataatacacagacaggatagtttttatgctgaagtttttggccagctttagtttgaggactccttgataagcttgctaaactttcagagtgccctgagacacttccagccatccctcctcctgccttcattggggcagacttgcattgcagtctgacagtaattttttttctgattgagaattatgtaaattcagtacaatgtcagtttttaaaagtcaaagttagatcaagagaatatttcagagttttggtttacacatcaagaaacagacacacatacctaggaaagatttacacaatagataatcatcttaatgtgaaagatatttgaagtattaattttaatatattaaatatgatttctgttatagtcttctgtatggaattttgtcacttaagatgagctgcaaataaataataccttcaatggataaccttgcctcctacttc

SEQ ID NO: 135611 - DNA, 594 bp, Homo sapiens
  Payload ID: 6513
  Gene Symbol: FYB
  Gene Name: FYN binding protein
  ENST ID: ENST00000504542
  CDS Start-End: 590-594
gcagttcttgagttccacatgcagagcagatgcgacagctagaagtgagtagggcccagaccctggcccaggaagatccactaaaggaggccatccttccgccttcttctgcaggagtcagggggcgtgtaaaggtgatttgttcgccaagaaaagcacttttagtaaagcacagatgttaatctagatcatggaaaagtgccacacactagatttagcacataagcaaggagtctctagaacactcagaagaaaatgaatgaatccatgaatgaatggacaagtgagagcccagagcagctgaagccatgaagtgctttggaaagagaagcgtgcctgggaaaagagagtggctgagtgctaagagcagggtgaacaccatggaaaacttgaaattgaaaacatcacaattttaatgagaaaaagcgcaacccaaagtgaagagcaccattataacaaaggcgatgcaaaccagtaatgcagaatcctattgctctataaaaatttgaattgcttgaatctattacaaatttttgccagtgtgcttcctgcctcaaggatggatggaaaggcagatgtaaagtccctcatggc

SEQ ID NO: 135612 - DNA, 688 bp, Homo sapiens
  Payload ID: 6513
  Gene Symbol: FYB
  Gene Name: FYN binding protein
  ENST ID: ENST00000506557
  CDS Start-End: 502-688
atcagaaagctccgcagttcttgagttccacatgcagagcagatgcgacagctagaagtgagtagggcccagaccctggcccaggaagatccactaaaggaggccatccttccgccttcttctgcaggagtcagggggcgtgtaaaggtgatttgttcgccaagaaaagcacttttagtaaagcacagatgttaatctagatcatggaaaagtgccacacactagatttagcacataagcaaggagtctctagaacactcagaagaaaatgaatgaatccatgaatgaatggacaagtgagagcccagagcagctgaagccatgaagtgctttggaaagagaagcgtgcctgggaaaagagagtggctgagtgctaagagcagggtgaacaccatggaaaacttgaaattgaaaacatcacaattttaatgagaaaaagcgcaacccaaagtgaagagcaccattataacaaaggatggaaaggcagatgtaaagtccctcatggcgaaatataacacggggggcaacccgacagaggatgtctcagtcaatagccgacccttcagagtcacagggccaaactcatcttcaggaatacaagcaagaaagaacttattcaacaaccaaggaaatgccagccctcctgcaggacccagcaatgtacctaagtttgggtccccaaagccac

SEQ ID NO: 135613 - DNA, 589 bp, Homo sapiens
  Payload ID: 6513
  Gene Symbol: FYB
  Gene Name: FYN binding protein
  ENST ID: ENST00000509072
  CDS Start-End: 523-589
gcagttcttgagttccacatgcagagcagatgcgacagctagaagtgagtagggcccagaccctggcccaggaagatccactaaaggaggccatccttccgccttcttctgcaggagtcagggggcgtgtaaaggtgatttgttcgccaagaaaagcacttttagtaaagcacagatgttaatctagatcatggaaaagtgccacacactagatttagcacataagcaaggagtctctagaacactcagaagaaaatgaatgaatccatgaatgaatggacaagtgagagcccagagcagctgaagccatgaagtgctttggaaagagaagcgtgcctgggaaaagagagtggctgagtgctaagagcagggtgaacaccatggaaaacttgaaattgaaaacatcacaattttaatgagaaaaagcgcaacccaaagtgaagagcaccattataacaaaggtcatgcaggctgagtgaattatcctaaacaaatgatggaaaggcagatgtaaagtccctcatggcgaaatataacacggggggcaacccgacagaggatgtctcagtcaatagccgacccttcagag

SEQ ID NO: 135614 - DNA, 583 bp, Homo sapiens
  Payload ID: 6513
  Gene Symbol: FYB
  Gene Name: FYN binding protein
  ENST ID: ENST00000512138
  CDS Start-End: 240-583
gcacattcactatccaagctgcaccatcttcggggtcattgtgtgccaggcatatcaactcttttcaataaaaatgtttttctagccacttcccagcactcgcagcatgaagctcacaccagaagtttccagagatcaccccagaggtgataagatctcgcccgcccttccgtcccaggatagtgtgattgcgggaccatggaatttacaaggatggaaaggcagatgtaaagtccctcatggcgaaatataacacggggggcaacccgacagaggatgtctcagtcaatagccgacccttcagagtcacagggccaaactcatcttcaggaatacaagcaagaaagaacttattcaacaaccaaggaaatgccagccctcctgcaggacccagcaatgtacctaagtttgggtccccaaagccacctgtggcagtcaaaccttcttctgaggaaaagcctgacaaggaacccaagcccccgtttctaaagcccactggagcaggccaaagattcggaacaccagccagcttgaccaccagagaccccgaggcgaaagtgggatttctgaaacctgtaggccc

SEQ ID NO: 135615 - DNA, 2747 bp, Homo sapiens
  Payload ID: 6513
  Gene Symbol: FYB
  Gene Name: FYN binding protein
  Uniprot ID: O15117
  ENST ID: ENST00000512982
  CDS Start-End: 87-2606
gcatagctaacttgcacattcactatccaagctgcaccatcttcggggtcattgtgtgccaggcatatcaactcttttcaataaaaatggatggaaaggcagatgtaaagtccctcatggcgaaatataacacggggggcaacccgacagaggatgtctcagtcaatagccgacccttcagagtcacagggccaaactcatcttcaggaatacaagcaagaaagaacttattcaacaaccaaggaaatgccagccctcctgcaggacccagcaatgtacctaagtttgggtccccaaagccacctgtggcagtcaaaccttcttctgaggaaaagcctgacaaggaacccaagcccccgtttctaaagcccactggagcaggccaaagattcggaacaccagccagcttgaccaccagagaccccgaggcgaaagtgggatttctgaaacctgtaggccccaagcccatcaacttgcccaaagaagattccaaacctacatttccctggcctcctggaaacaagccatctcttcacagtgtaaaccaagaccatgacttaaagccactaggcccgaaatctgggcctactcctccaacctcagaaaatgaacagaagcaagcgtttcccaaattgactggggttaaagggaaatttatgtcagcatcacaagatcttgaacccaagcccctcttccccaaacccgcctttggccagaagccgcccctaagtaccgagaactcccatgaagacgaaagccccatgaagaatgtgtcttcatcaaaagggtccccagctcccctgggagtcaggtccaaaagcggccctttaaaaccagcaagggaagactcagaaaataaagaccatgcaggggagatttcaagtttgccctttcctggagtggttttgaaacctgctgcgagcaggggaggcccaggtctctccaaaaatggtgaagaaaaaaaggaagataggaagatagatgctgctaagaacaccttccagagcaaaataaatcaggaagagttggcctcagggactcctcctgccaggttccctaaggccccttctaagctgacagtgggggggccatggggccaaagtcaggaaaaggaaaagggagacaagaattcagccaccccgaaacagaagccattgcctcccttgtttaccttgggtccacctccaccaaaacccaacagaccaccaaatgttgacctgacgaaattccacaaaacctcttctggaaacagtactagcaaaggccagacgtcttactcaacaacttccctgccaccacctccaccatcccatccggccagccaaccaccattgccagcatctcacccatcacaaccaccagtcccaagcctacctcccagaaacattaaacctccgtttgacctaaaaagccctgtcaatgaagacaatcaagatggtgtcacgcactctgatggtgctggaaatctagatgaggaacaagacagtgaaggagaaacatatgaagacatagaagcatccaaagaaagagagaagaaaagggaaaaggaagaaaagaagaggttagagctggagaaaaaggaacagaaagagaaagaaaagaaagaacaagaaataaagaagaaatttaaactaacaggccctattcaagtcatccatcttgcaaaagcttgttgtgatgtcaaaggaggaaagaatgaactgagcttcaagcaaggagagcaaattgaaatcatccgcatcacagacaacccagaaggaaaatggttgggcagaacagcaaggggttcatatggctatattaaaacaactgctgtagagattgactatgattctttgaaactgaaaaaagactctcttggtgccccttcaagacctattgaagatgaccaagaagtatatgatgatgttgcagagcaggatgatattagcagccacagtcagagtggaagtggagggatattccctccaccaccagatgatgacatttatgatgggattgaagaggaagatgctgatgatggctccacactacaggttcaagagaagagtaatacgtggtcctgggggattttgaagatgttaaagggaaaagatgacagaaagaaaagtatacgagagaaacctaaagtctctgactcagacaataatgaaggttcatctttccctgctcctcctaaacaattggacatgggagatgaagtttacgatgatgtggatacctctgatttccctgtttcatcagcagagatgagtcaaggaactaatgttggaaaagctaagacagaagaaaaggaccttaagaagctaaaaaagcaggaaaaagaagaaaaagacttcaggaaaaaatttaaatatgatggtgaaattagagtcctatattcaactaaagttacaacttccataacttctaaaaagtggggaaccagagatctacaggtaaaacctggtgaatctctagaagttatacaaaccacagatgacacaaaagttctctgcagaaatgaagaagggaaatatggttatgtccttcggagttacctagcggacaatgatggagagatctatgatgatattgctgatggctgcatctatgacaatgactagcactcaactttggtcattctgctgtgttcattaggtgccaatgtgaagtctggattttaattggcatgttattgggtatcaagaaaattaatgcacaaaaccacttattatcatttgttatgaaatcccaattatctttac

SEQ ID NO: 135616 - DNA, 2578 bp, Homo sapiens
  Payload ID: 6513
  Gene Symbol: FYB
  Gene Name: FYN binding protein
  Uniprot ID: O15117
  ENST ID: ENST00000515010
  CDS Start-End: 68-2419
cttttgtctctcagctattttttgttccctatgtttgtaggatggaaaggcagatgtaaagtccctcatggcgaaatataacacggggggcaacccgacagaggatgtctcagtcaatagccgacccttcagagtcacagggccaaactcatcttcaggaatacaagcaagaaagaacttattcaacaaccaaggaaatgccagccctcctgcaggacccagcaatgtacctaagtttgggtccccaaagccacctgtggcagtcaaaccttcttctgaggaaaagcctgacaaggaacccaagcccccgtttctaaagcccactggagcaggccaaagattcggaacaccagccagcttgaccaccagagaccccgaggcgaaagtgggatttctgaaacctgtaggccccaagcccatcaacttgcccaaagaagattccaaacctacatttccctggcctcctggaaacaagccatctcttcacagtgtaaaccaagaccatgacttaaagccactaggcccgaaatctgggcctactcctccaacctcagaaaatgaacagaagcaagcgtttcccaaattgactggggttaaagggaaatttatgtcagcatcacaagatcttgaacccaagcccctcttccccaaacccgcctttggccagaagccgcccctaagtaccgagaactcccatgaagacgaaagccccatgaagaatgtgtcttcatcaaaagggtccccagctcccctgggagtcaggtccaaaagcggccctttaaaaccagcaagggaagactcagaaaataaagaccatgcaggggagatttcaagtttgccctttcctggagtggttttgaaacctgctgcgagcaggggaggcccaggtctctccaaaaatggtgaagaaaaaaaggaagataggaagatagatgctgctaagaacaccttccagagcaaaataaatcaggaagagttggcctcagggactcctcctgccaggttccctaaggccccttctaagctgacagtgggggggccatggggccaaagtcaggaaaaggaaaagggagacaagaattcagccaccccgaaacagaagccattgcctcccttgtttaccttgggtccacctccaccaaaacccaacagaccaccaaatgttgacctgacgaaattccacaaaacctcttctggaaacagtactagcaaaggccagacgtcttactcaacaacttccctgccaccacctccaccatcccatccggccagccaaccaccattgccagcatctcacccatcacaaccaccagtcccaagcctacctcccagaaacattaaacctccgtttgacctaaaaagccctgtcaatgaagacaatcaagatggtgtcacgcactctgatggtgctggaaatctagatgaggaacaagacagtgaaggagaaacatatgaagacatagaagcatccaaagaaagagagaagaaaagggaaaaggaagaaaagaagaggttagagctggagaaaaaggaacagaaagagaaagaaaagaaagaacaagaaataaagaagaaatttaaactaacaggccctattcaagtcatccatcttgcaaaagcttgttgtgatgtcaaaggaggaaagaatgaactgagcttcaagcaaggagagcaaattgaaatcatccgcatcacagacaacccagaaggaaaatggttgggcagaacagcaaggggttcatatggctatattaaaacaactgctgtagagattgactatgattctttgaaactgaaaaaagactctcttggtgccccttcaagacctattgaagatgaccaagaagtatatgatgatgttgcagagcaggatgatattagcagccacagtcagagtggaagtggagggatattccctccaccaccagatgatgacatttatgatgggattgaagaggaagatgctgatgatggtttccctgctcctcctaaacaattggacatgggagatgaagtttacgatgatgtggatacctctgatttccctgtttcatcagcagagatgagtcaaggaactaatgttggaaaagctaagacagaagaaaaggaccttaagaagctaaaaaagcaggaaaaagaagaaaaagacttcaggaaaaaatttaaatatgatggtgaaattagagtcctatattcaactaaagttacaacttccataacttctaaaaagtggggaaccagagatctacaggtaaaacctggtgaatctctagaagttatacaaaccacagatgacacaaaagttctctgcagaaatgaagaagggaaatatggttatgtccttcggagttacctagcggacaatgatggagagatctatgatgatattgctgatggctgcatctatgacaatgactagcactcaactttggtcattctgctgtgttcattaggtgccaatgtgaagtctggattttaattggcatgttattgggtatcaagaaaattaatgcacaaaaccacttattatcatttgttatgaaatcccaattatctttacaaagtgtttaaagtttga

SEQ ID NO: 135617 - DNA, 676 bp, Homo sapiens
  Payload ID: 6513
  Gene Symbol: FYB
  Gene Name: FYN binding protein
  ENST ID: ENST00000510188
  CDS Start-End: 154-676
aatacaattagagaaccataaagggcaaacatattaaaagagcttaattttgtagtgtggcctgcaggcttccagaaaaaaacaggagatcagtgagctagcagcagagaagccttcctggaaaaggatggaaaggcagatgtaaagtccctcatggcgaaatataacacggggggcaacccgacagaggatgtctcagtcaatagccgacccttcagagtcacagggccaaactcatcttcaggaatacaagcaagaaagaacttattcaacaaccaaggaaatgccagccctcctgcaggacccagcaatgtacctaagtttgggtccccaaagccacctgtggcagtcaaaccttcttctgaggaaaagcctgacaaggaacccaagcccccgtttctaaagcccactggagcaggccaaagattcggaacaccagccagcttgaccaccagagaccccgaggcgaaagtgggatttctgaaacctgtaggccccaagcccatcaacttgcccaaagaagattccaaacctacatttccctggcctcctggaaacaagccatctcttcacagtgtaaaccaagaccatgacttaaagccactaggcccgaaatctgggcctactcctccaacctcagaaaatgaacagaagcaagcgtttcccaaattgactg

SEQ ID NO: 135618 - DNA, 2789 bp, Homo sapiens
  Payload ID: 6513
  Gene Symbol: FYB
  Gene Name: FYN binding protein
  Uniprot ID: O15117
  ENST ID: ENST00000505428
  CDS Start-End: 159-2648
agaaagctccgcagttcttgagttccacatgcagagcagatgcgacagctagaagtgagtagggcccagaccctggcccaggaagatccactaaaggaggccatccttccgccttcttctgcaggagtcaggatggaaaggcagatgtaaagtccctcatggcgaaatataacacggggggcaacccgacagaggatgtctcagtcaatagccgacccttcagagtcacagggccaaactcatcttcaggaatacaagcaagaaagaacttattcaacaaccaaggaaatgccagccctcctgcaggacccagcaatgtacctaagtttgggtccccaaagccacctgtggcagtcaaaccttcttctgaggaaaagcctgacaaggaacccaagcccccgtttctaaagcccactggagcaggccaaagattcggaacaccagccagcttgaccaccagagaccccgaggcgaaagtgggatttctgaaacctgtaggccccaagcccatcaacttgcccaaagaagattccaaacctacatttccctggcctcctggaaacaagccatctcttcacagtgtaaaccaagaccatgacttaaagccactaggcccgaaatctgggcctactcctccaacctcagaaaatgaacagaagcaagcgtttcccaaattgactggggttaaagggaaatttatgtcagcatcacaagatcttgaacccaagcccctcttccccaaacccgcctttggccagaagccgcccctaagtaccgagaactcccatgaagacgaaagccccatgaagaatgtgtcttcatcaaaagggtccccagctcccctgggagtcaggtccaaaagcggccctttaaaaccagcaagggaagactcagaaaataaagaccatgcaggggagatttcaagtttgccctttcctggagtggttttgaaacctgctgcgagcaggggaggcccaggtctctccaaaaatggtgaagaaaaaaaggaagataggaagatagatgctgctaagaacaccttccagagcaaaataaatcaggaagagttggcctcagggactcctcctgccaggttccctaaggccccttctaagctgacagtgggggggccatggggccaaagtcaggaaaaggaaaagggagacaagaattcagccaccccgaaacagaagccattgcctcccttgtttaccttgggtccacctccaccaaaacccaacagaccaccaaatgttgacctgacgaaattccacaaaacctcttctggaaacagtactagcaaaggccagacgtcttactcaacaacttccctgccaccacctccaccatcccatccggccagccaaccaccattgccagcatctcacccatcacaaccaccagtcccaagcctacctcccagaaacattaaacctccgtttgacctaaaaagccctgtcaatgaagacaatcaagatggtgtcacgcactctgatggtgctggaaatctagatgaggaacaagacagtgaaggagaaacatatgaagacatagaagcatccaaagaaagagagaagaaaagggaaaaggaagaaaagaagaggttagagctggagaaaaaggaacagaaagagaaagaaaagaaagaacaagaaataaagaagaaatttaaactaacaggccctattcaagtcatccatcttgcaaaagcttgttgtgatgtcaaaggaggaaagaatgaactgagcttcaagcaaggagagcaaattgaaatcatccgcatcacagacaacccagaaggaaaatggttgggcagaacagcaaggggttcatatggctatattaaaacaactgctgtagagattgactatgattctttgaaactgaaaaaagactctcttggtgccccttcaagacctattgaagatgaccaagaagtatatgatgatgttgcagagcaggatgatattagcagccacagtcagagtggaagtggagggatattccctccaccaccagatgatgacatttatgatgggattgaagaggaagatgctgatgatggctccacactacaggttcaagagaagagtaatacgtggtcctgggggattttgaagatgttaaagggaaaagatgacagaaagaaaagtatacgagagaaacctaaagtctctgactcagacaataatgaaggttcatctttccctgctcctcctaaacaattggacatgggagatgaagtttacgatgatgtggatacctctgatttccctgtttcatcagcagagatgagtcaaggaactaatgttggaaaagctaagacagaagaaaaggaccttaagaagctaaaaaagcaggaaaaagaagaaaaagacttcaggaaaaaatttaaatatgatggtgaaattagagtcctatattcaactaaagttacaacttccataacttctaaaaagtggggaaccagagatctacaggtaaaacctggtgaatctctagaagttatacaaaccacagatgacacaaaagttctctgcagaaatgaagaagggaaatatggttatgtccttcggagttacctagcggacaatgatggagagatctatgatgatattgctgatggctgcatctatgacaatgactagcactcaactttggtcattctgctgtgttcattaggtgccaatgtgaagtctggattttaattggcatgttattgggtatcaagaaaattaatgcacaaaaccacttattatcatttgttatgaaatcccaattatctttac

SEQ ID NO: 135619 - DNA, 2009 bp, Homo sapiens
  Payload ID: 6514
  Gene Symbol: FYN
  Gene Name: FYN proto-oncogene, Src family tyrosine kinase
  Uniprot ID: P06241
  ENST ID: ENST00000229471
  CDS Start-End: 104-1552
aaatgatcaagtgttgggtataagccaaggagctgagagagggggagaccagcgcaggtctgaggagctgagaagggaggcttacgtgaagggaatttagataatgggctgtgtgcaatgtaaggataaagaagcaacaaaactgacggaggagagggacggcagcctgaaccagagctctgggtaccgctatggcacagaccccacccctcagcactaccccagcttcggtgtgacctccatccccaactacaacaacttccacgcagccgggggccaaggactcaccgtctttggaggtgtgaactcttcgtctcatacggggaccttgcgtacgagaggaggaacaggagtgacactctttgtggccctttatgactatgaagcacggacagaagatgacctgagttttcacaaaggagaaaaatttcaaatattgaacagctcggaaggagattggtgggaagcccgctccttgacaactggagagacaggttacattcccagcaattatgtggctccagttgactctatccaggcagaagagtggtactttggaaaacttggccgaaaagatgctgagcgacagctattgtcctttggaaacccaagaggtacctttcttatccgcgagagtgaaaccaccaaaggtgcctattcactttctatccgtgattgggatgatatgaaaggagaccatgtcaaacattataaaattcgcaaacttgacaatggtggatactacattaccacccgggcccagtttgaaacacttcagcagcttgtacaacattactcaggtacctggaatggaaacacaaaagtagccataaagactcttaaaccaggcacaatgtcccccgaatcattccttgaggaagcgcagatcatgaagaagctgaagcacgacaagctggtccagctctatgcagtggtgtctgaggagcccatctacatcgtcaccgagtatatgaacaaaggaagtttactggatttcttaaaagatggagaaggaagagctctgaaattaccaaatcttgtggacatggcagcacaggtggctgcaggaatggcttacatcgagcgcatgaattatatccatagagatctgcgatcagcaaacattctagtggggaatggactcatatgcaagattgctgacttcggattggcccgattgatagaagacaatgagtacacagcaagacaaggtgcaaagttccccatcaagtggacggcccccgaggcagccctgtacgggaggttcacaatcaagtctgacgtgtggtcttttggaatcttactcacagagctggtcaccaaaggaagagtgccatacccaggcatgaacaaccgggaggtgctggagcaggtggagcgaggctacaggatgccctgcccgcaggactgccccatctctctgcatgagctcatgatccactgctggaaaaaggaccctgaagaacgccccacttttgagtacttgcagagcttcctggaagactactttaccgcgacagagccccagtaccaacctggtgaaaacctgtaaggcccgggtctgcggagagaggccttgtcccagaggctgccccacccctccccattagctttcaattccgtagccagctgctccccagcagcggaaccgcccaggatcagattgcatgtgactctgaagctgacgaacttccatggccctcattaatgacacttgtccccaaatccgaacctcctctgtgaagcattcgagacagaaccttgttatttctcagactttggaaaatgcattgtatcgatgttatgtaaaaggccaaacctctgttcagtgtaaatagttactccagtgccaacaatcctagtgctttccttttttaaaaatgcaaatcctatgtgattttaactctgtcttcacctgattcaactaaaaaaaaaaaagtattattttccaaaagtggcctctttgtctaaaacaataaaattttttttcatgttttaacaaaaaccaa

SEQ ID NO: 135620 - DNA, 3628 bp, Homo sapiens
  Payload ID: 6514
  Gene Symbol: FYN
  Gene Name: FYN proto-oncogene, Src family tyrosine kinase
  Uniprot ID: P06241
  ENST ID: ENST00000354650
  CDS Start-End: 608-2221
agagcatcagcaagagtagcagcgagcagccgcgctggtggcggcggcgcgtcgttgcagttgcgccatctgtcaggagcggagccggcgaggagggggctgccgcgggcgaggaggaggggtcgccgcgagccgaaggccttcgagacccgcccgccgcccggcggcgagagtagaggcgaggttgttgtgcgagcggcgcgtcctctcccgcccgggcgcgccgcgcttctcccagcgcaccgaggaccgcccgggcgcacacaaagccgccgcccgcgccgcaccgcccggcggccgccgcccgcgccagggagggattcggccgccgggccggggacaccccggcgccgccccctcggtgctctcggaaggcccaccggctcccgggcccgccggggaccccccggagccgcctcggccgcgccggaggagggcggggagaggaccatgtgagtgggctccggagcctcagcgccgcgcagtttttttgaagaagcaggatgctgatctaaacgtggaaaaagaccagtcctgcctctgttgtagaagacatgtggtgtatataaagtttgtgatcgttggcggacattttggaatttagataatgggctgtgtgcaatgtaaggataaagaagcaacaaaactgacggaggagagggacggcagcctgaaccagagctctgggtaccgctatggcacagaccccacccctcagcactaccccagcttcggtgtgacctccatccccaactacaacaacttccacgcagccgggggccaaggactcaccgtctttggaggtgtgaactcttcgtctcatacggggaccttgcgtacgagaggaggaacaggagtgacactctttgtggccctttatgactatgaagcacggacagaagatgacctgagttttcacaaaggagaaaaatttcaaatattgaacagctcggaaggagattggtgggaagcccgctccttgacaactggagagacaggttacattcccagcaattatgtggctccagttgactctatccaggcagaagagtggtactttggaaaacttggccgaaaagatgctgagcgacagctattgtcctttggaaacccaagaggtacctttcttatccgcgagagtgaaaccaccaaaggtgcctattcactttctatccgtgattgggatgatatgaaaggagaccatgtcaaacattataaaattcgcaaacttgacaatggtggatactacattaccacccgggcccagtttgaaacacttcagcagcttgtacaacattactcagagagagctgcaggtctctgctgccgcctagtagttccctgtcacaaagggatgccaaggcttaccgatctgtctgtcaaaaccaaagatgtctgggaaatccctcgagaatccctgcagttgatcaagagactgggaaatgggcagtttggggaagtatggatgggtacctggaatggaaacacaaaagtagccataaagactcttaaaccaggcacaatgtcccccgaatcattccttgaggaagcgcagatcatgaagaagctgaagcacgacaagctggtccagctctatgcagtggtgtctgaggagcccatctacatcgtcaccgagtatatgaacaaaggaagtttactggatttcttaaaagatggagaaggaagagctctgaaattaccaaatcttgtggacatggcagcacaggtggctgcaggaatggcttacatcgagcgcatgaattatatccatagagatctgcgatcagcaaacattctagtggggaatggactcatatgcaagattgctgacttcggattggcccgattgatagaagacaatgagtacacagcaagacaaggtgcaaagttccccatcaagtggacggcccccgaggcagccctgtacgggaggttcacaatcaagtctgacgtgtggtcttttggaatcttactcacagagctggtcaccaaaggaagagtgccatacccaggcatgaacaaccgggaggtgctggagcaggtggagcgaggctacaggatgccctgcccgcaggactgccccatctctctgcatgagctcatgatccactgctggaaaaaggaccctgaagaacgccccacttttgagtacttgcagagcttcctggaagactactttaccgcgacagagccccagtaccaacctggtgaaaacctgtaaggcccgggtctgcggagagaggccttgtcccagaggctgccccacccctccccattagctttcaattccgtagccagctgctccccagcagcggaaccgcccaggatcagattgcatgtgactctgaagctgacgaacttccatggccctcattaatgacacttgtccccaaatccgaacctcctctgtgaagcattcgagacagaaccttgttatttctcagactttggaaaatgcattgtatcgatgttatgtaaaaggccaaacctctgttcagtgtaaatagttactccagtgccaacaatcctagtgctttccttttttaaaaatgcaaatcctatgtgattttaactctgtcttcacctgattcaactaaaaaaaaaaaagtattattttccaaaagtggcctctttgtctaaaacaataaaattttttttcatgttttaacaaaaaccaatcaggacaggtgtttgtttttgttttcttttttataaatatgaatatatataatatatatgtccctgtacatatacaatgtgggtgctaatgtggagactgtggccggcctgagccaccaagctgcgggacccagagggaggattttactgcaagtcagcatcaaagcaccggtgttattctgaaaacaccagtggcctcatttttggcttttgcaaagcatgaattttttcatttggattgcactttcctggttcatgactgtacctgtaggtggttgttactttgactcttttcaggaaccaccccccaagctgaatttacaagttctgttagcactatttgcttcaacttactgcgatttgttctcaaaacttaaaaataagcaagcaaatggctgatactaccaagagaactggaagatggataccacacaaacttcttgtataaaaatatgaatgctgaaatgtttcagacatttttaatttaataaacctgtaaccacatttaagtgatctaaaacccatagcattgtagtcatggcaacccgctaaactttctcatgcaactaaaatttctgggggaaatgagggtgggggttgtacatttcccattgtaaaataagtgttttaaatgtcctgtactgctaacgaatgactttctatatgtccaggagttctccagtggaataactatgcactactttacatttcatggggatgcacaaaaacaaaaaagtattacatttttagttgctgtttgtaccaaccttaaattacatatgtttaacaacaacaaatcaaaaatcctatttctattgagtttttaatactgactagcaactctgaagtcttaattccttttttgttatgatttatttgtgagtttacatttttaaattgtttaactttcttaatttagtaattaaaaagagagcattttacatttgaa

SEQ ID NO: 135621 - DNA, 2416 bp, Homo sapiens
  Payload ID: 6514
  Gene Symbol: FYN
  Gene Name: FYN proto-oncogene, Src family tyrosine kinase
  Uniprot ID: P06241
  ENST ID: ENST00000368667
  CDS Start-End: 346-1959
aagagaacaaaagtgtctgagaaagccagagtgtgaccacgcggtttctatgctccaagggatttatttcagtggtaggtggagcagctctgtggagcacatggctaatgataatggattgactgaccagaagcaggagaggacctagcagaagccggaggtcaagctgccccaagactgggggacagcctgggtgaagactctggacctcatgaccatgtatattccagagggggatctaaagagccccagaaattcacaaaggaccagtcctgcctctgttgtagaagacatgtggtgtatataaagtttgtgatcgttggcggacattttggaatttagataatgggctgtgtgcaatgtaaggataaagaagcaacaaaactgacggaggagagggacggcagcctgaaccagagctctgggtaccgctatggcacagaccccacccctcagcactaccccagcttcggtgtgacctccatccccaactacaacaacttccacgcagccgggggccaaggactcaccgtctttggaggtgtgaactcttcgtctcatacggggaccttgcgtacgagaggaggaacaggagtgacactctttgtggccctttatgactatgaagcacggacagaagatgacctgagttttcacaaaggagaaaaatttcaaatattgaacagctcggaaggagattggtgggaagcccgctccttgacaactggagagacaggttacattcccagcaattatgtggctccagttgactctatccaggcagaagagtggtactttggaaaacttggccgaaaagatgctgagcgacagctattgtcctttggaaacccaagaggtacctttcttatccgcgagagtgaaaccaccaaaggtgcctattcactttctatccgtgattgggatgatatgaaaggagaccatgtcaaacattataaaattcgcaaacttgacaatggtggatactacattaccacccgggcccagtttgaaacacttcagcagcttgtacaacattactcagagagagctgcaggtctctgctgccgcctagtagttccctgtcacaaagggatgccaaggcttaccgatctgtctgtcaaaaccaaagatgtctgggaaatccctcgagaatccctgcagttgatcaagagactgggaaatgggcagtttggggaagtatggatgggtacctggaatggaaacacaaaagtagccataaagactcttaaaccaggcacaatgtcccccgaatcattccttgaggaagcgcagatcatgaagaagctgaagcacgacaagctggtccagctctatgcagtggtgtctgaggagcccatctacatcgtcaccgagtatatgaacaaaggaagtttactggatttcttaaaagatggagaaggaagagctctgaaattaccaaatcttgtggacatggcagcacaggtggctgcaggaatggcttacatcgagcgcatgaattatatccatagagatctgcgatcagcaaacattctagtggggaatggactcatatgcaagattgctgacttcggattggcccgattgatagaagacaatgagtacacagcaagacaaggtgcaaagttccccatcaagtggacggcccccgaggcagccctgtacgggaggttcacaatcaagtctgacgtgtggtcttttggaatcttactcacagagctggtcaccaaaggaagagtgccatacccaggcatgaacaaccgggaggtgctggagcaggtggagcgaggctacaggatgccctgcccgcaggactgccccatctctctgcatgagctcatgatccactgctggaaaaaggaccctgaagaacgccccacttttgagtacttgcagagcttcctggaagactactttaccgcgacagagccccagtaccaacctggtgaaaacctgtaaggcccgggtctgcggagagaggccttgtcccagaggctgccccacccctccccattagctttcaattccgtagccagctgctccccagcagcggaaccgcccaggatcagattgcatgtgactctgaagctgacgaacttccatggccctcattaatgacacttgtccccaaatccgaacctcctctgtgaagcattcgagacagaaccttgttatttctcagactttggaaaatgcattgtatcgatgttatgtaaaaggccaaacctctgttcagtgtaaatagttactccagtgccaacaatcctagtgctttccttttttaaaaatgcaaatcctatgtgattttaactctgtcttcacctgattcaactaaaaaaaaaaaagtattattttccaaaagtggcctctttgtctaaaacaataaaattttttttcatgttttaacaaaaaccaa

SEQ ID NO: 135622 - DNA, 2573 bp, Homo sapiens
  Payload ID: 6514
  Gene Symbol: FYN
  Gene Name: FYN proto-oncogene, Src family tyrosine kinase
  Uniprot ID: P06241
  ENST ID: ENST00000368678
  CDS Start-End: 516-2120
cgagcagccgcgctggtggcggcggcgcgtcgttgcagttgcgccatctgtcaggagcggagccggcgaggagggggctgccgcgggcgaggaggaggggtcgccgcgagccgaaggccttcgagacccgcccgccgcccggcggcgagagtagaggcgaggttgttgtgcgagcggcgcgtcctctcccgcccgggcgcgccgcgcttctcccagcgcaccgaggaccgcccgggcgcacacaaagccgccgcccgcgccgcaccgcccggcggccgccgcccgcgccagggagggattcggccgccgggccggggacaccccggcgccgccccctcggtgctctcggaaggcccaccggctcccgggcccgccggggaccccccggagccgcctcggccgcgccggaggagggcggggagaggaccatgtgagtgggctccggagcctcagcgccgcgcagtttttttgaagaagcaggatgctgatctaaacgtggaaaaagaatttagataatgggctgtgtgcaatgtaaggataaagaagcaacaaaactgacggaggagagggacggcagcctgaaccagagctctgggtaccgctatggcacagaccccacccctcagcactaccccagcttcggtgtgacctccatccccaactacaacaacttccacgcagccgggggccaaggactcaccgtctttggaggtgtgaactcttcgtctcatacggggaccttgcgtacgagaggaggaacaggagtgacactctttgtggccctttatgactatgaagcacggacagaagatgacctgagttttcacaaaggagaaaaatttcaaatattgaacagctcggaaggagattggtgggaagcccgctccttgacaactggagagacaggttacattcccagcaattatgtggctccagttgactctatccaggcagaagagtggtactttggaaaacttggccgaaaagatgctgagcgacagctattgtcctttggaaacccaagaggtacctttcttatccgcgagagtgaaaccaccaaaggtgcctattcactttctatccgtgattgggatgatatgaaaggagaccatgtcaaacattataaaattcgcaaacttgacaatggtggatactacattaccacccgggcccagtttgaaacacttcagcagcttgtacaacattactcagagaaagctgatggtttgtgttttaacttaactgtgattgcatcgagttgtaccccacaaacttctggattggctaaagatgcttgggaagttgcacgtcgttcgttgtgtctggagaagaagctgggtcaggggtgtttcgctgaagtgtggcttggtacctggaatggaaacacaaaagtagccataaagactcttaaaccaggcacaatgtcccccgaatcattccttgaggaagcgcagatcatgaagaagctgaagcacgacaagctggtccagctctatgcagtggtgtctgaggagcccatctacatcgtcaccgagtatatgaacaaaggaagtttactggatttcttaaaagatggagaaggaagagctctgaaattaccaaatcttgtggacatggcagcacaggtggctgcaggaatggcttacatcgagcgcatgaattatatccatagagatctgcgatcagcaaacattctagtggggaatggactcatatgcaagattgctgacttcggattggcccgattgatagaagacaatgagtacacagcaagacaaggtgcaaagttccccatcaagtggacggcccccgaggcagccctgtacgggaggttcacaatcaagtctgacgtgtggtcttttggaatcttactcacagagctggtcaccaaaggaagagtgccatacccaggcatgaacaaccgggaggtgctggagcaggtggagcgaggctacaggatgccctgcccgcaggactgccccatctctctgcatgagctcatgatccactgctggaaaaaggaccctgaagaacgccccacttttgagtacttgcagagcttcctggaagactactttaccgcgacagagccccagtaccaacctggtgaaaacctgtaaggcccgggtctgcggagagaggccttgtcccagaggctgccccacccctccccattagctttcaattccgtagccagctgctccccagcagcggaaccgcccaggatcagattgcatgtgactctgaagctgacgaacttccatggccctcattaatgacacttgtccccaaatccgaacctcctctgtgaagcattcgagacagaaccttgttatttctcagactttggaaaatgcattgtatcgatgttatgtaaaaggccaaacctctgttcagtgtaaatagttactccagtgccaacaatcctagtgctttccttttttaaaaatgcaaatcctatgtgattttaactctgtcttcacctgattcaactaaaaaaaaaaaagtattattttccaaaagtggcctctttgtctaaaacaataaaattttttttcatgttttaacaaaaa

SEQ ID NO: 135623 - DNA, 3234 bp, Homo sapiens
  Payload ID: 6514
  Gene Symbol: FYN
  Gene Name: FYN proto-oncogene, Src family tyrosine kinase
  Uniprot ID: P06241
  ENST ID: ENST00000368682
  CDS Start-End: 223-1827
cccgggcccgccggggaccccccggagccgcctcggccgcgccggaggagggcggggagaggaccatgtgagtgggctccggagcctcagcgccgcgcagtttttttgaagaagcaggatgctgatctaaacgtggaaaaagaccagtcctgcctctgttgtagaagacatgtggtgtatataaagtttgtgatcgttggcggacattttggaatttagataatgggctgtgtgcaatgtaaggataaagaagcaacaaaactgacggaggagagggacggcagcctgaaccagagctctgggtaccgctatggcacagaccccacccctcagcactaccccagcttcggtgtgacctccatccccaactacaacaacttccacgcagccgggggccaaggactcaccgtctttggaggtgtgaactcttcgtctcatacggggaccttgcgtacgagaggaggaacaggagtgacactctttgtggccctttatgactatgaagcacggacagaagatgacctgagttttcacaaaggagaaaaatttcaaatattgaacagctcggaaggagattggtgggaagcccgctccttgacaactggagagacaggttacattcccagcaattatgtggctccagttgactctatccaggcagaagagtggtactttggaaaacttggccgaaaagatgctgagcgacagctattgtcctttggaaacccaagaggtacctttcttatccgcgagagtgaaaccaccaaaggtgcctattcactttctatccgtgattgggatgatatgaaaggagaccatgtcaaacattataaaattcgcaaacttgacaatggtggatactacattaccacccgggcccagtttgaaacacttcagcagcttgtacaacattactcagagaaagctgatggtttgtgttttaacttaactgtgattgcatcgagttgtaccccacaaacttctggattggctaaagatgcttgggaagttgcacgtcgttcgttgtgtctggagaagaagctgggtcaggggtgtttcgctgaagtgtggcttggtacctggaatggaaacacaaaagtagccataaagactcttaaaccaggcacaatgtcccccgaatcattccttgaggaagcgcagatcatgaagaagctgaagcacgacaagctggtccagctctatgcagtggtgtctgaggagcccatctacatcgtcaccgagtatatgaacaaaggaagtttactggatttcttaaaagatggagaaggaagagctctgaaattaccaaatcttgtggacatggcagcacaggtggctgcaggaatggcttacatcgagcgcatgaattatatccatagagatctgcgatcagcaaacattctagtggggaatggactcatatgcaagattgctgacttcggattggcccgattgatagaagacaatgagtacacagcaagacaaggtgcaaagttccccatcaagtggacggcccccgaggcagccctgtacgggaggttcacaatcaagtctgacgtgtggtcttttggaatcttactcacagagctggtcaccaaaggaagagtgccatacccaggcatgaacaaccgggaggtgctggagcaggtggagcgaggctacaggatgccctgcccgcaggactgccccatctctctgcatgagctcatgatccactgctggaaaaaggaccctgaagaacgccccacttttgagtacttgcagagcttcctggaagactactttaccgcgacagagccccagtaccaacctggtgaaaacctgtaaggcccgggtctgcggagagaggccttgtcccagaggctgccccacccctccccattagctttcaattccgtagccagctgctccccagcagcggaaccgcccaggatcagattgcatgtgactctgaagctgacgaacttccatggccctcattaatgacacttgtccccaaatccgaacctcctctgtgaagcattcgagacagaaccttgttatttctcagactttggaaaatgcattgtatcgatgttatgtaaaaggccaaacctctgttcagtgtaaatagttactccagtgccaacaatcctagtgctttccttttttaaaaatgcaaatcctatgtgattttaactctgtcttcacctgattcaactaaaaaaaaaaaagtattattttccaaaagtggcctctttgtctaaaacaataaaattttttttcatgttttaacaaaaaccaatcaggacaggtgtttgtttttgttttcttttttataaatatgaatatatataatatatatgtccctgtacatatacaatgtgggtgctaatgtggagactgtggccggcctgagccaccaagctgcgggacccagagggaggattttactgcaagtcagcatcaaagcaccggtgttattctgaaaacaccagtggcctcatttttggcttttgcaaagcatgaattttttcatttggattgcactttcctggttcatgactgtacctgtaggtggttgttactttgactcttttcaggaaccaccccccaagctgaatttacaagttctgttagcactatttgcttcaacttactgcgatttgttctcaaaacttaaaaataagcaagcaaatggctgatactaccaagagaactggaagatggataccacacaaacttcttgtataaaaatatgaatgctgaaatgtttcagacatttttaatttaataaacctgtaaccacatttaagtgatctaaaacccatagcattgtagtcatggcaacccgctaaactttctcatgcaactaaaatttctgggggaaatgagggtgggggttgtacatttcccattgtaaaataagtgttttaaatgtcctgtactgctaacgaatgactttctatatgtccaggagttctccagtggaataactatgcactactttacatttcatggggatgcacaaaaacaaaaaagtattacatttttagttgctgtttgtaccaaccttaaattacatatgtttaacaacaacaaatcaaaaatcctatttctattgagtttttaatactgactagcaactctgaagtcttaattccttttttgttatgatttatttgtgagtttacatttttaaattgtttaactttcttaatttagtaattaaaaagagagcattttacatttgaa

SEQ ID NO: 135624 - DNA, 989 bp, Homo sapiens
  Payload ID: 6514
  Gene Symbol: FYN
  Gene Name: FYN proto-oncogene, Src family tyrosine kinase
  ENST ID: ENST00000462856
  CDS Start-End: 293-989
gtataagccaaggagctgagagagggggagaccagcgcaggtctgaggagctgagaagggaggcttacgtgaagggtaagactcgcatgggcctggccggtggacaagatgtgggaactgcatggacagttatgtggaggtgcattccatcctggctggagagtgtgtgaggggcagtgggagattggtggaaaagatataggccactggtgtggaaggctgggaagccacgcttcagatcggagaaagttgctaatcagagaagcggcgttctggaggtggaatttagataatgggctgtgtgcaatgtaaggataaagaagcaacaaaactgacggaggagagggacggcagcctgaaccagagctctgggtaccgctatggcacagaccccacccctcagcactaccccagcttcggtgtgacctccatccccaactacaacaacttccacgcagccgggggccaaggactcaccgtctttggaggtgtgaactcttcgtctcatacggggaccttgcgtacgagaggaggaacaggagtgacactctttgtggccctttatgactatgaagcacggacagaagatgacctgagttttcacaaaggagaaaaatttcaaatattgaacagctcggaaggagattggtgggaagcccgctccttgacaactggagagacaggttacattcccagcaattatgtggctccagttgactctatccaggcagaagagtggtactttggaaaacttggccgaaaagatgctgagcgacagctattgtcctttggaaacccaagaggtacctttcttatccgcgagagtgaaaccaccaaaggtgcctattcactttctatccgtgattgggatgatatgaaaggagaccatgtcaaacattataaaattcgcaaacttgacaatggtggatactacattaccacccgggcccagtttgaaacacttcagcagcttgtacaacattactcag

SEQ ID NO: 135625 - DNA, 609 bp, Homo sapiens
  Payload ID: 6514
  Gene Symbol: FYN
  Gene Name: FYN proto-oncogene, Src family tyrosine kinase
  ENST ID: ENST00000521062
  CDS Start-End: 301-609
atcatctgatagccataggatgtcatccaaacttgtgtcatggtcctgtaatgttcccgggtttgtggagtgaagaaaataacacttgggtatttggaatttattcttaagctgtttttgtcagggatggatgagtttctcattcttgagttgaaatgaaacttttaaatattcttaataactgtcttatcgccagaccctctgcatgagacaccaagggaccagtcctgcctctgttgtagaagacatgtggtgtatataaagtttgtgatcgttggcggacattttggaatttagataatgggctgtgtgcaatgtaaggataaagaagcaacaaaactgacggaggagagggacggcagcctgaaccagagctctgggtaccgctatggcacagaccccacccctcagcactaccccagcttcggtgtgacctccatccccaactacaacaacttccacgcagccgggggccaaggactcaccgtctttggaggtgtgaactcttcgtctcatacggggaccttgcgtacgagaggaggaacaggagtgacactctttgtggccctttatgactatgaagcacggacagaagatgacctgagtttt

SEQ ID NO: 135626 - DNA, 597 bp, Homo sapiens
  Payload ID: 6514
  Gene Symbol: FYN
  Gene Name: FYN proto-oncogene, Src family tyrosine kinase
  ENST ID: ENST00000523570
  CDS Start-End: 250-597
atttttcttatcagtaaagtggtccctttcacaggaccaagtaaaattactcgcttttaaattgaaaaacacaaaccaaatacattttgtttttgtttttgttttctgacttgggtcttgaattaaaatggaaaaagggctgttggccaccagtctaaagaatgccaggaccagtcctgcctctgttgtagaagacatgtggtgtatataaagtttgtgatcgttggcggacattttggaatttagataatgggctgtgtgcaatgtaaggataaagaagcaacaaaactgacggaggagagggacggcagcctgaaccagagctctgggtaccgctatggcacagaccccacccctcagcactaccccagcttcggtgtgacctccatccccaactacaacaacttccacgcagccgggggccaaggactcaccgtctttggaggtgtgaactcttcgtctcatacggggaccttgcgtacgagaggaggaacaggagtgacactctttgtggccctttatgactatgaagcacggacagaagatgacctgagttttcacaaaggagaaaaatttcaaatattgaacagctcggaa

SEQ ID NO: 135627 - DNA, 541 bp, Homo sapiens
  Payload ID: 6514
  Gene Symbol: FYN
  Gene Name: FYN proto-oncogene, Src family tyrosine kinase
  ENST ID: ENST00000524310
  CDS Start-End: 107-541
acataataaagcctagaaaagaaaggaccagtcctgcctctgttgtagaagacatgtggtgtatataaagtttgtgatcgttggcggacattttggaatttagataatgggctgtgtgcaatgtaaggataaagaagcaacaaaactgacggaggagagggacggcagcctgaaccagagctctgggtaccgctatggcacagaccccacccctcagcactaccccagcttcggtgtgacctccatccccaactacaacaacttccacgcagccgggggccaaggactcaccgtctttggaggtgtgaactcttcgtctcatacggggaccttgcgtacgagaggaggaacaggagtgacactctttgtggccctttatgactatgaagcacggacagaagatgacctgagttttcacaaaggagaaaaatttcaaatattgaacagctcggaaggagattggtgggaagcccgctccttgacaactggagagacaggttacattcccagcaattatgtggctccagttgactctatccag

SEQ ID NO: 135628 - DNA, 1012 bp, Homo sapiens
  Payload ID: 6514
  Gene Symbol: FYN
  Gene Name: FYN proto-oncogene, Src family tyrosine kinase
  ENST ID: ENST00000518295
  CDS Start-End: 554-1012
agtagaggcgaggttgttgtgcgagcggcgcgtcctctcccgcccgggcgcgccgcgcttctcccagcgcaccgaggaccgcccgggcgcacacaaagccgccgcccgcgccgcaccgcccggcggccgccgcccgcgccagggagggattcggccgccgggccggggacaccccggcgccgccccctcggtgctctcggaaggcccaccggctcccgggcccgccggggaccccccggagccgcctcggccgcgccggaggagggcggggagaggaccatgtgagtgggctccggagcctcagcgccgcgcagtttttttgaagaagcaggatgctgatctaaacgtggaaaaagaccagtcctgcctctgttgtagaagacatgtggtgtatataaagtttgtgatcgttggcggacattttgacagggtctcactctgtcacccaggctgacacgatcatggctcactacaatctctgccttcctgcctcaagggttcttccttgagcacctcagcctcccaagtagctgggaccacaggaatttagataatgggctgtgtgcaatgtaaggataaagaagcaacaaaactgacggaggagagggacggcagcctgaaccagagctctgggtaccgctatggcacagaccccacccctcagcactaccccagcttcggtgtgacctccatccccaactacaacaacttccacgcagccgggggccaaggactcaccgtctttggaggtgtgaactcttcgtctcatacggggaccttgcgtacgagaggaggaacaggagtgacactctttgtggccctttatgactatgaagcacggacagaagatgacctgagttttcacaaaggagaaaaatttcaaatattgaacagctcggaaggagattggtgggaagcccgctccttgacaactggagagacaggttacattcccagcaattatgtggctccagttgactctatccaggcagaagagtggtactttggaaaa

SEQ ID NO: 135629 - DNA, 712 bp, Homo sapiens
  Payload ID: 6514
  Gene Symbol: FYN
  Gene Name: FYN proto-oncogene, Src family tyrosine kinase
  ENST ID: ENST00000484067
  CDS Start-End: 393-712
gcccgccgcccggcggcgagagtagaggcgaggaccgcccgggcgcacacaaagccgccgcccgcgccgcaccgcccggcggccgccgcccgcgccagggagggattcggccgccgggccggggacaccccggcgccgccccctcggtgctctcggaaggcccaccggctcccgggcccgccggggaccccccggagccgcctcggccgcgccggaggagggcggggagaggaccatgtgagtgggctccggagcctcagcgccgcgcagtttttttgaagaagcaggatgctgatctaaacgtggaaaaagaccagtcctgcctctgttgtagaagacatgtggtgtatataaagtttgtgatcgttggcggacattttggaatttagataatgggctgtgtgcaatgtaaggataaagaagcaacaaaactgacggaggagagggacggcagcctgaaccagagctctgggtaccgctatggcacagaccccacccctcagcactaccccagcttcggtgtgacctccatccccaactacaacaacttccacgcagccgggggccaaggactcaccgtctttggaggtgtgaactcttcgtctcatacggggaccttgcgtacgagaggaggaacaggagtgacactctttgtggccctttatgactatgaagcacggacagaagatgacctgagttttcacaaaggaga

SEQ ID NO: 135630 - DNA, 864 bp, Homo sapiens
  Payload ID: 6514
  Gene Symbol: FYN
  Gene Name: FYN proto-oncogene, Src family tyrosine kinase
  ENST ID: ENST00000520518
  CDS Start-End: 306-864
cctcggccgcgccggaggagggcggggagaggaccatgtgagtgggctccggagcctcagcgccgcgcagtttttttgaagaagcaggatgctgatctaaacgtggaaaaagaccagtcctgcctctgttgtagaagacatgtggtgtatataaagtttgtgatcgttggcggacattttgggtctcactctgtcacccaggctgacacgatcatggctcactacaatctctgccttcctgcctcaagggttcttccttgagcacctcagcctcccaagtagctgggaccacaggaatttagataatgggctgtgtgcaatgtaaggataaagaagcaacaaaactgacggaggagagggacggcagcctgaaccagagctctgggtaccgctatggcacagaccccacccctcagcactaccccagcttcggtgtgacctccatccccaactacaacaacttccacgcagccgggggccaaggactcaccgtctttggaggtgtgaactcttcgtctcatacggggaccttgcgtacgagaggaggaacaggagtgacactctttgtggccctttatgactatgaagcacggacagaagatgacctgagttttcacaaaggagaaaaatttcaaatattgaacagctcggaaggagattggtgggaagcccgctccttgacaactggagagacaggttacattcccagcaattatgtggctccagttgactctatccaggcagaagagtggtactttggaaaacttggccgaaaagatgctgagcgacagctattgtcctttggaaacccaagaggtacctttcttatccgcgagagtgaaaccaccaaaggtgcctattcac

SEQ ID NO: 135631 - DNA, 825 bp, Homo sapiens
  Payload ID: 6514
  Gene Symbol: FYN
  Gene Name: FYN proto-oncogene, Src family tyrosine kinase
  ENST ID: ENST00000462598
  CDS Start-End: 616-825
agatctcctcccctcccagagggtccaagagaacaaaagtgtctgagaaagccagagtgtgaccacgcggtttctatgctccaagggatttatttcagtggtaggtggagcagctctgtggagcacatggctaatgataatggattgactgaccagaagcaggagaggacctagcagaagccggaggtcaagctgccccaagactgggggacagcctgggtgaagactctggacctcatgaccatgtatattccagagggggatctaaagagccccagaaattcacaaaggaccagtcctgcctctgttgtagaagacatgtggtgtatataaagtttgtgatcgttggcggacattttggaaagcaaatgagaatgagcgactgtaacccttgcctgttgttcataagcatgtacaccaggatctgtgtgatccttttcctgaagataaacagcatactgctcaaggaaggaaaacaacgcatagcaacaaatttcctgttttttaaagaaagatccaacttggtttagaaattatgctggcttgctttctatgtttctaatagagaataaggagaaacttgcttctcatttgccgacatgaggaatttagataatgggctgtgtgcaatgtaaggataaagaagcaacaaaactgacggaggagagggacggcagcctgaaccagagctctgggtaccgctatggcacagaccccacccctcagcactaccccagcttcggtgtgacctccatccccaactacaacaacttccacgcagccgggggccaaggactcaccgtctttggaggagtgacactcttt

SEQ ID NO: 135632 - DNA, 571 bp, Homo sapiens
  Payload ID: 6514
  Gene Symbol: FYN
  Gene Name: FYN proto-oncogene, Src family tyrosine kinase
  ENST ID: ENST00000518630
  CDS Start-End: 218-571
attccagggttaagaaatggatgggtcactgagatctagcacccagttgtcctgggcttctgcttacggggttattgagatgatagaaggcccagtttttttgaagaagcaggatgctgatctaaacgtggaaaaagaccagtcctgcctctgttgtagaagacatgtggtgtatataaagtttgtgatcgttggcggacattttggaatttagataatgggctgtgtgcaatgtaaggataaagaagcaacaaaactgacggaggagagggacggcagcctgaaccagagctctgggtaccgctatggcacagaccccacccctcagcactaccccagcttcggtgtgacctccatccccaactacaacaacttccacgcagccgggggccaaggactcaccgtctttggaggtgtgaactcttcgtctcatacggggaccttgcgtacgagaggaggaacaggagtgacactctttgtggccctttatgactatgaagcacggacagaagatgacctgagttttcacaaaggagaaaaatttcaaatattgaacagctcggaaggagat

SEQ ID NO: 135633 - DNA, 610 bp, Homo sapiens
  Payload ID: 6514
  Gene Symbol: FYN
  Gene Name: FYN proto-oncogene, Src family tyrosine kinase
  ENST ID: ENST00000517419
  CDS Start-End: 85-610
acagcggagagaataatcgaatgaaaactgaagctttctgctttattccttttctccttctcctttcagtcaggaatttagataatgggctgtgtgcaatgtaaggataaagaagcaacaaaactgacggaggagagggacggcagcctgaaccagagctctgggtaccgctatggcacagaccccacccctcagcactaccccagcttcggtgtgacctccatccccaactacaacaacttccacgcagccgggggccaaggactcaccgtctttggaggtgtgaactcttcgtctcatacggggaccttgcgtacgagaggaggaacaggagtgacactctttgtggccctttatgactatgaagcacggacagaagatgacctgagttttcacaaaggagaaaaatttcaaatattgaacagctcggaaggagattggtgggaagcccgctccttgacaactggagagacaggttacattcccagcaattatgtggctccagttgactctatccaggcagaagagtggtactttggaaaacttggccgaaaagatgctgagcgacagctattgtcctttggaaacccaagaggtacctttcttatcc

SEQ ID NO: 135634 - DNA, 569 bp, Homo sapiens
  Payload ID: 6514
  Gene Symbol: FYN
  Gene Name: FYN proto-oncogene, Src family tyrosine kinase
  ENST ID: ENST00000523574
  CDS Start-End: 151-569
aaaatgtgtcatctcatcctggggactgcccttggccactgctgaatctgttttgaaacctctttgcaggaccagtcctgcctctgttgtagaagacatgtggtgtatataaagtttgtgatcgttggcggacattttggaatttagataatgggctgtgtgcaatgtaaggataaagaagcaacaaaactgacggaggagagggacggcagcctgaaccagagctctgggtaccgctatggcacagaccccacccctcagcactaccccagcttcggtgtgacctccatccccaactacaacaacttccacgcagccgggggccaaggactcaccgtctttggaggtgtgaactcttcgtctcatacggggaccttgcgtacgagaggaggaacaggagtgacactctttgtggccctttatgactatgaagcacggacagaagatgacctgagttttcacaaaggagaaaaatttcaaatattgaacagctcggaaggagattggtgggaagcccgctccttgacaactggagagacaggttacattcccagcaattatgtggctcc

SEQ ID NO: 135635 - DNA, 1012 bp, Homo sapiens
  Payload ID: 6514
  Gene Symbol: FYN
  Gene Name: FYN proto-oncogene, Src family tyrosine kinase
  ENST ID: ENST00000523238
  CDS Start-End: 555-1012
agagtagcagcgagcagccgcgctggtggcggcggcgcgtcgttgcagttgcgccatctgtcaggagcggagccggcgaggagggggctgccgcgggcgaggaggaggggtcgccgcgagccgaaggccttcgagacccgcccgccgcccggcggcgagagtagaggcgaggttgttgtgcgagcggcgcgtcctctcccgcccgggcgcgccgcgcttctcccagcgcaccgaggaccgcccgggcgcacacaaagccgccgcccgcgccgcaccgcccggcggccgccgcccgcgccagggagggattcggccgccgggccggggacaccccggcgccgccccctcggtgctctcggaaggcccaccggctcccgggcccgccggggaccccccggagccgcctcggccgcgccggaggagggcggggagaggaccatgtgagtgggctccggagcctcagcgccgcgcaggaccagtcctgcctctgttgtagaagacatgtggtgtatataaagtttgtgatcgttggcggacattttggaatttagataatgggctgtgtgcaatgtaaggataaagaagcaacaaaactgacggaggagagggacggcagcctgaaccagagctctgggtaccgctatggcacagaccccacccctcagcactaccccagcttcggtgtgacctccatccccaactacaacaacttccacgcagccgggggccaaggactcaccgtctttggaggtgtgaactcttcgtctcatacggggaccttgcgtacgagaggaggaacaggagtgacactctttgtggccctttatgactatgaagcacggacagaagatgacctgagttttcacaaaggagaaaaatttcaaatattgaacagctcggaaggagattggtgggaagcccgctccttgacaactggagagacaggttacattcccagcaattatgtggctccagttgactctatccaggcagaagagtggtactttggaaa

SEQ ID NO: 135636 - DNA, 518 bp, Homo sapiens
  Payload ID: 6514
  Gene Symbol: FYN
  Gene Name: FYN proto-oncogene, Src family tyrosine kinase
  ENST ID: ENST00000487824
  CDS Start-End: 325-518
caggatgctgatctaaacgtggaaaaaagtgaacataagtcaagacagcagtgaggcactctggcgctgggacacagtgagaaattaagatttgctagtgctggttccagggcggcctgaactcttgtacttcagctcatgtcatgctgggacagatctgaaggaagatccatctccctcgggtttcttgatacttctgtgccttctgtctggcaagggcgtcagagccacgggaacttagaggaccagtcctgcctctgttgtagaagacatgtggtgtatataaagtttgtgatcgttggcggacattttggaatttagataatgggctgtgtgcaatgtaaggataaagaagcaacaaaactgacggaggagagggacggcagcctgaaccagagctctgggtaccgctatggcacagaccccacccctcagcactaccccagcttcggtgtgacctccatccccaactacaacaacttccacgcagccgggggccaaggactcaccgtctttgg

SEQ ID NO: 135637 - DNA, 3023 bp, Homo sapiens
  Payload ID: 6514
  Gene Symbol: FYN
  Gene Name: FYN proto-oncogene, Src family tyrosine kinase
  Uniprot ID: P06241
  ENST ID: ENST00000538466
  CDS Start-End: 12-1616
gaatttagataatgggctgtgtgcaatgtaaggataaagaagcaacaaaactgacggaggagagggacggcagcctgaaccagagctctgggtaccgctatggcacagaccccacccctcagcactaccccagcttcggtgtgacctccatccccaactacaacaacttccacgcagccgggggccaaggactcaccgtctttggaggtgtgaactcttcgtctcatacggggaccttgcgtacgagaggaggaacaggagtgacactctttgtggccctttatgactatgaagcacggacagaagatgacctgagttttcacaaaggagaaaaatttcaaatattgaacagctcggaaggagattggtgggaagcccgctccttgacaactggagagacaggttacattcccagcaattatgtggctccagttgactctatccaggcagaagagtggtactttggaaaacttggccgaaaagatgctgagcgacagctattgtcctttggaaacccaagaggtacctttcttatccgcgagagtgaaaccaccaaaggtgcctattcactttctatccgtgattgggatgatatgaaaggagaccatgtcaaacattataaaattcgcaaacttgacaatggtggatactacattaccacccgggcccagtttgaaacacttcagcagcttgtacaacattactcagagaaagctgatggtttgtgttttaacttaactgtgattgcatcgagttgtaccccacaaacttctggattggctaaagatgcttgggaagttgcacgtcgttcgttgtgtctggagaagaagctgggtcaggggtgtttcgctgaagtgtggcttggtacctggaatggaaacacaaaagtagccataaagactcttaaaccaggcacaatgtcccccgaatcattccttgaggaagcgcagatcatgaagaagctgaagcacgacaagctggtccagctctatgcagtggtgtctgaggagcccatctacatcgtcaccgagtatatgaacaaaggaagtttactggatttcttaaaagatggagaaggaagagctctgaaattaccaaatcttgtggacatggcagcacaggtggctgcaggaatggcttacatcgagcgcatgaattatatccatagagatctgcgatcagcaaacattctagtggggaatggactcatatgcaagattgctgacttcggattggcccgattgatagaagacaatgagtacacagcaagacaaggtgcaaagttccccatcaagtggacggcccccgaggcagccctgtacgggaggttcacaatcaagtctgacgtgtggtcttttggaatcttactcacagagctggtcaccaaaggaagagtgccatacccaggcatgaacaaccgggaggtgctggagcaggtggagcgaggctacaggatgccctgcccgcaggactgccccatctctctgcatgagctcatgatccactgctggaaaaaggaccctgaagaacgccccacttttgagtacttgcagagcttcctggaagactactttaccgcgacagagccccagtaccaacctggtgaaaacctgtaaggcccgggtctgcggagagaggccttgtcccagaggctgccccacccctccccattagctttcaattccgtagccagctgctccccagcagcggaaccgcccaggatcagattgcatgtgactctgaagctgacgaacttccatggccctcattaatgacacttgtccccaaatccgaacctcctctgtgaagcattcgagacagaaccttgttatttctcagactttggaaaatgcattgtatcgatgttatgtaaaaggccaaacctctgttcagtgtaaatagttactccagtgccaacaatcctagtgctttccttttttaaaaatgcaaatcctatgtgattttaactctgtcttcacctgattcaactaaaaaaaaaaaagtattattttccaaaagtggcctctttgtctaaaacaataaaattttttttcatgttttaacaaaaaccaatcaggacaggtgtttgtttttgttttcttttttataaatatgaatatatataatatatatgtccctgtacatatacaatgtgggtgctaatgtggagactgtggccggcctgagccaccaagctgcgggacccagagggaggattttactgcaagtcagcatcaaagcaccggtgttattctgaaaacaccagtggcctcatttttggcttttgcaaagcatgaattttttcatttggattgcactttcctggttcatgactgtacctgtaggtggttgttactttgactcttttcaggaaccaccccccaagctgaatttacaagttctgttagcactatttgcttcaacttactgcgatttgttctcaaaacttaaaaataagcaagcaaatggctgatactaccaagagaactggaagatggataccacacaaacttcttgtataaaaatatgaatgctgaaatgtttcagacatttttaatttaataaacctgtaaccacatttaagtgatctaaaacccatagcattgtagtcatggcaacccgctaaactttctcatgcaactaaaatttctgggggaaatgagggtgggggttgtacatttcccattgtaaaataagtgttttaaatgtcctgtactgctaacgaatgactttctatatgtccaggagttctccagtggaataactatgcactactttacatttcatggggatgcacaaaaacaaaaaagtattacatttttagttgctgtttgtaccaaccttaaattacatatgtttaacaacaacaaatcaaaaatcctatttctattgagtttttaatactgactagcaactctgaagtcttaattccttttttgttatgatttatttgtgagtttacatttttaaattgtttaactttcttaatttagtaattaaaaagagagcattttacatttgaa

SEQ ID NO: 135638 - DNA, 13230 bp, Homo sapiens
  Payload ID: 6515
  Gene Symbol: FRK
  Gene Name: fyn-related Src family tyrosine kinase
  Uniprot ID: P42685
  ENST ID: ENST00000606080
  CDS Start-End: 448-1965
cctggcgaaagcaagacgtggaggttttaccaggggttagtagcttcctcttgctaactttttattgggacaaaaggcaagatggcaccattctgttctcagatatttgtctaaataaagcccttttaattttattttatttttgttgtgggattcttaagcagataagaagaaaagacaccttcctagtgagcagctgcccagctcctgctcagttttgcctcggggtagcacctccagccacagaaagcaagccggtaagtctctccaggtaggacttgctgcaacccagctgctggactgatctgaaacgggactttgcatactctccgaagtatggtgagttggtgctgacttcaaagttgcctggtgaaggaagataaggtggatcgcagagactaaggggagagggagaagccctgctcctcttctccccaccaaggcacaatgagcaacatctgtcagaggctctgggagtacctagaaccctatctcccctgtttgtccacggaggcagacaagtcaaccgtgattgaaaatccaggggccctttgctctccccagtcacagaggcatggccactactttgtggctttgtttgattaccaggctcggactgctgaggacttgagcttccgagcaggtgacaaacttcaagttctggacactttgcatgagggctggtggtttgccagacacttggagaaaagacgagatggctccagtcagcaactacaaggctatattccttctaactacgtggctgaggacagaagcctacaggcagagccgtggttctttggagcaatcggaagatcagatgcagagaaacaactattatattcagaaaacaagaccggttcctttctaatcagagaaagtgaaagccaaaaaggagaattctctctttcagttttagatggagcagttgtaaaacactacagaattaaaagactggatgaagggggattttttctcacgcgaagaagaatcttttcaacactgaacgaatttgtgagccactacaccaagacaagtgacggcctgtgtgtcaagctggggaaaccatgcttaaagatccaggtcccagctccatttgatttgtcgtataaaaccgtggaccaatgggagatagaccgcaactccatacagcttctgaagcgattgggatctggtcagtttggcgaagtatgggaaggtctgtggaacaataccactccagtagcagtgaaaacattaaaaccaggttcaatggatccaaatgacttcctgagggaggcacagataatgaagaacctaagacatccaaagcttatccagctttatgctgtttgcactttagaagatccaatttatattattacagagttgatgagacatggaagtctgcaagaatatctccaaaatgacactggatcaaaaatccatctgactcaacaggtagacatggcggcacaggttgcctctggaatggcctatctggagtctcggaactacattcacagagatctggctgccagaaatgtcctcgttggtgaacataatatctacaaagtagcagattttggacttgccagagtttttaaggtagataatgaagacatctatgaatctagacacgaaataaagctgccggtgaagtggactgcgcccgaagccattcgtagtaataaattcagcattaagtccgatgtatggtcatttggaatccttctttatgaaatcattacttatggcaaaatgccttacagtggtatgacaggtgcccaggtaatccagatgttggctcaaaactatagacttccgcaaccatccaactgtccacagcaattttacaacatcatgttggagtgctggaatgcagagcctaaggaacgacctacatttgagacactgcgttggaaacttgaagactattttgaaacagactcttcatattcagatgcaaataacttcataagatgaacactggagaagaatatcaaataataaagtagcaaaacaaattcaaataatccattccaaaatacaatgttatcaaccaactgcacaatcagtttatcctgacatattcaagtgataggataaagttggccatgtattatgaaaaagattatttgtgcattttattgactgggcaacactgcaggacagtcaaggtgatatataatttcctcactgcctggtaaaattaagcacactaaaccaagttatttttctttttaagagatacttacatttccatttattgtttgaaatgtcgatcaagagaatcaacagatgatagtccaatttttactcagtgactgttgtagcattttcctgtttactgattagagtggttattcattattcctcagattgctgaatcccatcaggctgttattatgaaggaatttgattgctttgctgcacagcaggacctgtgctttgagatttttttttctcttttaaaatatcctgtaactacaatgatggtaaagccatgttaaatgacttgattgtacttggagtaattgcacatttttttctatgcataaaaaaatgatgcagctgttgagaaaacgaagtctttttcattttgcagaaggaaatgatggaatttttctgtacttcagtatgtgtcaactgagagtcatatacattagttttaatctcttaatattgagaatcaggttgcaaaacggatgagttattatctatggaaatgtgagaaatgtctaatagcccataaagtctgagaaataggtatcaaaatagtttaggaaaatgagaggagaacagtaggattgctgtggcctagacttctgagtaattaataaagaaaaagaagtaccctttggcctacagatcagagttttatttattttttattttttactttttattatagtttaagttctggggtgcatgtgcagaatgtgcagttttgttacataggtgtacaagtgccatggtggtttgctgcacccatcaacccgtcgtctacattaggcatttctcctagtgctgttcctcccctagccctccatcccctgacaggccccagtatgtgatgttcccctccttgtgtccatatgttctcattgttcagctcccacttatgagtgagaacatgctgtgtttggttttttgttcttgtgttagtttgttaagaatgatggtttccagctttatccatgtccctgtgaaggacatgaactcatccttttttatggctgcatagtattccatagtgtctatgtgccacattttctttatccagtctatcgttgatgggcatttgggttggttccaagtctttgctattgtgaatagtgccacaataaacatgcatgtgtctttatagcagaatgatttataagcctttaggtacatacccagtaatgggatcgctgagtcaaatggtatttctagttctagatccttgaggaattgctacactgtcctccacaatggttgaactaatttatactcccaccaacagagtaaaagtgtaaatgtgttcctatttctccacatcctctttggcatccaaaacagcatcctgttgtttcctgactttttaatgatcaccattctaactggtgtgagatggtatctcattgtggttttgatttggatttctctaatgatcagatgatgagctttttttcatatgtctgttggctgcataaatatcttcttttgaaatgtgtctgttcaaatccttcgcccactttttgatggggttgtttgtttttttcttttaaatttgtttatgttccttgtagattcttggtattagccctttgtcagatggatagcttgcaaaaattttctcccattctgtaggttgcctgttcactctgatgatagtttcttttgctgtctagaagctctttagtttaattagatcccatttctcaatttgggcttttgttgccattggtttttgtgttttagtcatgatgtcttttccaatgcctatgtcctgaatggtgttgcctaggttttcttctagggtttttatggttttaggtcttacatttaagtctttaatccatcttgagttaatttttgtataggtgtaaggaaggggtccagtttcagttttctgcatatggctagctagttttcccaacaccatttattaaatagggaatcctttccccattggttgtttttgtaaggtttgtcaaagatcagatggttgtagatgtgtggtgttatttctgaggcctctgttctgttctgttggtctagatatctgttttggtaccactaccatgctgttttgtttactgtagccttgtagtatagtttgaagtcaggtagcatgatgcctataactttgttctttttgcttagaattgtcttggctatgcgggctcttttttgattccatatgaagtttaaagtagttttttccaattctgtgaagaaagtcaatggtagtttgatggggatagcactgaatatataaattgccttgggcaatatggccattttcacgatattgattcttcctatccatgagcatggaatgtttttccatttatttgtgtcctctcttatttccttgagcagtggtttgtagttctccttgaagaggtcctttgcatcccttgtaagttgtaatcctagatatttcattctctttgtagcaattgtgaatgggagttcactcatgatttggctctctgtttgttattggtgtataggaatgtgtgtgatttttgcacattgattttgtatcctgagactttgctgaagttgcttatcagcttaaggagattttgggctgagatggtggggttccctatatatacaattcatatcatctgcaaacagagacaattttacttcctgttttcctatttgaataccctttatttctttctcttgcctgattgccctggccagaactttcaatactattttgaacaggagtggtgagagggggcatccttgtcttgtgccagctttcaaagggaatgcttccaggtttacccattcagtatgatattggctgtggttttgtcttaaatctgtcattttttttgagctacgttccatcaatacctagtttattgagagtttttagtatgaaggggtgttgaattttatcaaattttctgcatctattgagatcatcatgtggtttttgtcattggttctgtttatgtgatggattgtgtttattgatttgcgtatgttgaaccagccttgtgtctcagggatgaagccaacttgatcgtggtggataagctttttgatgtgctgctgcactcagtttgccagtattttattgaggatttttgcatggatgttcgtcagggatactggcctgaaattttctctctttttttttttttgttgtgtctctgccaggttttggtttcaggatgatgctggcctcataaaatgagttagggaggagtccctcttttcctattgtttggaatagtttcagaaagaatagtactagctttgtacctctttgtacctctggtagaattcggctgtgaatctatctggtcctggactttttttggttggtaggctattaattactgcctcaatttcagaacttgttattggtctatttagggattcatcttcttcctggtttagacttgggagggtgtatgtttgcaggaatttacccatttcttctagattttctagtttatttgcttagaggtatttatagtaatctctgatggtattttgtatttctgtgggatcagtggtgatctccgctttatcattttttattgtgtctatttgattctgctctcttttcttctttattagtctggctagcattctattttgttgatcttttcaaaaaatcagatcctggattcattgattttttgaaaggtttttcatgtctctatcaccttcagttctgttctgatcttagttatttcttgtcttctgctagcttttgaatttgtttgctcttgcttctctagtacttttaattgtgatattagggtatagattttagttctttcctgattcctcttgtgggcagttggtgctataaatttccctctacacactgctttaaatgtgtcccagagattctggtatgttgtgtttttgttctcattggtttcaatgaacaactttatttctaccttaattttattatttacccagtagtcattcaggagcaggttgttcagtttccaagtagttgttaggttttctgtcagttttaatcctgagttctaatttgattgcactgtggtcttagagactgtttgttatgacttccgttcttttgcatttgctgaggagtgttttacttccaattatgtgatcacttttagaataagtgcgatgaggtgctgagaagaatgtatattctgttgatttggggtagagaattctgtagatgtctgttaggtccacttggtccagagctgagttcaagttctgaatatctttgttaattttctgtctcatttatctgtctaatattgacagcaggctgttaaaatttcccactattattgtgtgggagtctaagtctctttgtagttctctaagaacttgctttatgaatctgggtgcttctgtattgggtgtatatatatttaggatagttagctattcttgttgcattgatctgtttaccattatgtaatgcccttctttgtctcttttgatctttgttgatttaaagtctgttttatcagagactaggattgcaacccctgctttttttttctgctttccgtttgcttcgtaaatattcctccatccctttatcttgagcctgtgtgtctctttgcatgtgagatgggtctcctgaatacagcacactgatgggtcttgagtctttatccaatttgccattctgtcttttacttggggcattcagcctgtttacatttaaggttagtattgttatgtgtgaatttgattctgtcatatgatgctagctggttattttgcccgaaagttgatgcaggttcttcgtatcctcgatgatctttacaatttggtatgtttttgcagtggctggtattgattgttcctctctatgtttagtgcttccttcaggagctcttttagggcaggcctggtggtaacaaaatctctcagcatttgcttgtctgtaaaggattttatttctccttcgcttatgaaactgagtttggttggatatgaaattctgggttgaaaattcttttctttaagaatgttgaatattggcccctactctattctggcttgtaaggtgtctgcagagagatcctctgttagtctgatgggcttccctttgtggctaacctgacctttctctctggctgcccttaacattttttccttcatttcaaccttggtgaatatgacgattatatgtcttggggttgctctgctcgaggagtatctttgtggcgttctctgtatttccttaatttgaatgttgacctgtcttgctaggttggggatgttctcctggataatatcctgaggagtgttttccaacttggttccattctccccgtcactttcaggtacaccaatcaaacgtagacttggtgttttcacataatcccatatttcttggaggctttgttagttccttttcactcttttttctctaatcttgtcttctcctttatttcattaagttgatcttcaatctttgatatcctttcttgtgctttatcgacttggctattgataattgtgtatgcttcatgaagttctcatgctgtatttttcagctccatcaggtcatttatgtgcttctctatacttgttattctagttagcaattcctctaatctttttacagtgttcttaacttccttgcattgggttagaacatgctcctttagcttggaggagtttgttattacccaccttctgaggcctacttctatccatccgtcaaactcattctccatccagttttattcccttgctggcaaggagttgtgatcctttggaggagaagaggcattctgtttttttgaattttcagctgttttgcgctggtttctcctcatcttcctggatttatctacttttggtctttgatcctgctgatgttcggatggggtctctgagtggacatactattcctttctgtttgttagttttccttctaagagttagtgccctctgctgcaggtctgctggagtttgctggaggtccactccagatgctgtttgccttggtgtcacgagtggaggctgcagaacagcaaagattgctgcctgttctttcctctggaagcttcgtcccagaggggcacccactggatgccagccagagctctcctgtatgaggtgtctgttggcccctactgggagatatctcccaatcaggataaacgagggtcagggacccacttgaggaggcagtctgactcttaccagagctcgagcactgtgctgggaaatccactactctcttcagagctgtccggcagagatatttaagtctgctgaagctgctcccatatccaccccttcccacaggtgctctgtcccagggagatggggttttatctattagtccctgactgccttttttttagagttgccctgcccagagaggaggaatctagagaggcagtctggccagagtggccttgctgagctgaggtggtgggctctacccaattcgaactcccaggcagctttgtttagactgtgagggtaaaatgcctactcaagcttcagcaatggcagacggccctcctccctccaagctcgagtgtcccaggtcgacctcagactgctgtgcttgcaatgaggatttcaagccagtgaatcttagcttgctgggctccgtgggggtgggacccgccaagctagaccacttggctccctggcttcagccccccttccaggggagtgaatggttctgccttgctggcattccaggcaccactggggtatggaaaataaaactcctgcagctagttcagtgtctgcccaaatggctgcccagttttgtgcttgacacccagggccccagtggcgtaggcaccggagggaatctcctggtctgcaggtttcaaagaccatgggaaaagtgcagtatctgggctggagtgcaccgttcctcaggtacagtccctcatggcttcccttgggtagaggaggtagttccctgaccccttgtgcttcctgggtgaggtgacaccccaccctgtttcagctggccctccatgggctgcacccactgtccaaccagtcccactgatatgaactgggtacctcagttggaaatgcagaaatcacccgccttctgcgttgatctcactgggagctgcagaccagagctgttcctatttggccatcttgccagcaatcagaccagagttttaaatggactacaaaataggtcaaactctatttcagaactagaggctaggaataatgtccaaacttggttatgaaagtttttttttttttttggtctggtaggataagagggtttttactcatcttaagtttgaattaaactttgtaacaaagttattgtttttttaaacaatgcatgtatcaaattatctgtctcattagataactaggtagacttttccaagatggtttcaaaatcaaatatatattcaaagatcttccagtgtaaagcaataggaatgaaacaagccatgagaaagcagaatattttgagtatattctcatgcctttctttaaaggagaagcgcctatctaaacagttacagaaacccaaattcaaagtagattaaacaagaagtaaatttgtaaactcttttaactgggagacaggaagtagggagggctccaggcacaatatcattagcagttcaatgtgaacgaagacccatgtcctttccaagcctccctctgccatcagcattgccctccttcccagggtcacagatggctatcaatggcaaaactggggttccgcgttctcttctcctcatctggcaagagaaaatgggaaatctctatcccaagcttggattaaaaattattttcatttttgtgttccagcaaacttgggtcctatgcccagccatggaccaaaaataggcttaatgtgaatgttatgtgctgattggattaaaataagttctgactctgaatctgggaatgtggtcaccttcctcagagacaagttgagaggttggcttatctgaataaaagcagagaatatgagatgctggagaggtgttcattaaggagaacattccctgaggtgaattaacggttagaattatctatctctgtatttatctatccacccatctatcatcatcatcacctcatctccctcctttctctctctctaaatatatacatgcgggtatgttgagtgtgtatatatttatttttttgtgtgtttatatggtgtgtgtgtgtgtgtattccaggcagatgtgtgcatatatacccaaactttcctgatgaccttgaaattaaatgggtcatgtgaagctaaagattatagaaccccttgattcctttataaacagtatttctaagataagatcaacactaatctttcaaattagttgactgtgtatagaacaacttgtttatttaaagtcatctagtctaatgcaatcaaggagtaaattataaataaccagttagcataaatggaaagaaaatagttccttttctttgaattcatttcatgtttaatttttcttgcgcacatatagaaatgaatagaaatattcccatttcaatatgcaaattcagccactatatagtttgtttctttttggtagctaataataataaatttttaagtaagatctgattttgaaatatgaaaagaagtttatcctttcctgttttaataccacctgatacccgtttaacttactgtgtttgattcttggggacatttatgttcaaggttctgtcaaagcaatctattattcttgtttttacctgatggatcatggagaaaaataatggattcagttatgagaaacagtaatagatttttttaactgccataaatttctctccctgtattaaataaaaggatcaggaaaagataagttgaattttcctacaatgagccagctcttcttaaatttacctcccataaattgtagcaaagcacttttcatataatgttttatttatgtaattcagttatttggagatggtggtgagggatgtgagtacatcatttcatgttgtatttcaaatctcttttgacagaaaccctaagaatttgcaataaagaaaattcaatgttccattaagtttttctttttctttttttttaaaaagagggtaaggaaggaaataagggaatagatttaagttacctaaggtcaaaagaggcacagggtagactctgaatagttgtggaacctgaatattttgtcatcaaaaacaaagttaaagtcagagtgaccaggaatctgcaaactggctgtgggaatgggttgacttaaaagacagacaaagaactagcctgtggggtaacatcaggctaggctcaccctcagcttctacccacaatatctgtatgatgaccatgtggatctaatgaaccaggaggggcccaaactcttccgactctgtggaggcctaaaggaaactgttgccattggaaggatgccataccactacccagctggagcttcctgaaggaagcagagcccagctggtgttccatggtttgttaagcatatgccatacctacaatcacttttttcatggtctggttgagcatatgatttctgaaccaaatagcctttctggtattgtgtcattggtgactcattatgattctttaaaaagacacattatgtgagctagaatggtgatgatttgggtaccttattcaaattgcatcatcatttaattcaagagaaaggccattcttaaagtaaaagtaaatgaggtttgtacacctgggtattggaattgccagtgggctgatctgacaatgtttgattcttgttttttctggaattattatgtagaagattcagtctataatcttcaacatgatgcaaatattcagtgtcataggatcaaaaaaatgctggaaagtatctaaaaatcttttaaattcatatcttaattttcagtgttatcctcttactgcctacattcccccactaaactcttagatttttctctgcttttgttaagaaagtgatgttagtaggcctctcaagttatttatgaaatttagaaatatactggagaacaaagtagtatataaaccctgaatttcaaaagccttaacaagtttagcttcaatctacattcagatgacactatctacagagatgttataagattaaattacaagaaaagagatgcccaattatttccatttactcttcttgcctaggtagttaatttatctattattcatttgaagcaacagacgtcaatgtaacatctttttcattttcatggagaataatcagcttttccagaaaagggtgctatatctcaaacacacctcaagtgtccagttggaagtattaccatgcagaggattcaagtcatattacctaataaccagaagttgtatgttgggaaaaagtggttaaaagcaactaaaactgccctgtttggaagaaactaaatattgctttataatgattttctgatattttagaatagaggcttcaattatactatttgtgaaaaagaaaactgcttggtattaaccaagttacatttaatttttatggtccacaaaatttcagagtagaaatatatcatagcttttaatcaattttcaaaatctatatttaattattgattcaaaaaataagaaataaaatcaattagccagatttgtatactttaaagctaccacagtgagatttttctcttaaaaacatgcatgtttttatattgtattctttaatatttatattgtacagttacatgtgacacatattacatatgactaatttatatgtagcaacagggattaaagaagacctcttttaattgtaccacttgttataatgctattatttacccagattcaaatgtaactacttacaatttttaaacatttttatttctgtattctttaaaatattaaggcaatggtttttcttgaaattatattttgccctatgtattctatttttattcacactggatttattatgataattatatcaaagtgattatttttaccctgacttttaaaagtcaactgtttcagaagtcaagttgattgtggatctaaaatataaattcaatgtgttcatagca

SEQ ID NO: 135639 - DNA, 8504 bp, Homo sapiens
  Payload ID: 6516
  Gene Symbol: FYCO1
  Gene Name: FYVE and coiled-coil domain containing 1
  Uniprot ID: Q9BQS8
  ENST ID: ENST00000296137
  CDS Start-End: 207-4643
gtgtgcgcgtcatggccgtcagcaccgcgttcccgtcctcttccgcttggccccagaaagtttcggttctgcccggcggtggacccacgagcgcgtgccaccatggagtctgaccactgctgagcagacagccaccgagggccgaaattctgagccttcctctggacccaggcaggagacatacagacaagaaaggcaaactcaccatggcctccaccaatgcagagagccagctccagagaatcatccgagacttgcaagatgctgtgacagaactaagcaaagaatttcaggaagcaggggaacccatcacggatgacagcaccagcttgcataaattttcttataaacttgagtatctcctgcaatttgatcagaaagagaaggccaccctcctgggcaacaagaaggactactgggattacttctgtgcctgcctggccaaggtgaaaggagccaatgatgggatccgctttgtcaagtctatctcagagctccgaacatccttggggaaaggaagagcatttattcgctactccttggtgcaccagaggttggcagacaccttacagcagtgcttcatgaacaccaaagtgaccagtgactggtactatgcaagaagcccctttctgcagccaaagctgagctcggacattgtgggccaactctatgagctgactgaggttcagtttgacctggcgtcgaggggctttgacttggatgctgcctggccaacatttgccaggaggacgctgaccactggctcttctgcttacctgtggaaaccccctagccgcagctccagcatgagcagcttggtgagcagctacctgcagactcaagagatggtgtccaactttgacctgaacagccccctaaacaacgaggcattggagggctttgatgagatgcgactagagctggaccagttggaggtgcgggagaagcagctacgggagcgcatgcagcagctggacagagagaaccaggagctgagggcagctgtcagccagcaaggggagcaactgcagacagagagggagagggggcgcactgcagcggaggacaacgttcgcctcacttgcttggtagctgagctccagaagcagtgggaggtcacccaggccacccagaacactgtgaaggagctgcagacatgcctgcagggcctggagctaggagcagcagagaaggaggaggactaccacacagccctgcggcggctggagtccatgctgcagcccttggcacaggagcttgaggccacacgggactcactggacaagaaaaaccagcatttagccagcttcccaggctggctagccatggctcagcagaaggcagatacggcatcagacacaaagggccggcaagaacctattcccagtgatgcggcccaggagatgcaggagctaggggagaagcttcaagccctagaaagggagagaaccaaggtcgaggaggtcaacagacagcagagtgcccaactggaacagctggtcaaggagcttcagctgaaagaggatgcccgggccagcctggagcgcctggtgaaggagatggccccactccaggaggagttgtctgggaagggacaggaggcagaccagctctggcgacggctgcaggagttgctggcccacacgagctcctgggaggaggagctagcagagttgaggcgggagaaaaaacagcaacaggaggagaaggagctgctggagcaggaggtcaggtctctgacccggcagctgcagttcctggagacccagctggcacaggtgagccaacatgtgagtgacctggaggagcagaagaagcagctcattcaggacaaagaccacctcagccagcaggtgggtatgctcgagcggcttgctgggccgcctggcccagaactgccagtggcaggtgagaagaatgaggccctggtccctgtgaactccagtctgcaagaggcctgggggaagccagaggaggagcagaggggcctgcaggaggcacagttagacgataccaaggtgcaagagggcagccaggaggaagagctccggcaggccaacagggagctggagaaggagctacagaatgtggtcgggcgtaaccagctcctggagggcaagctgcaagccctgcaggccgattaccaggctttgcagcagcgggaatcagccatccagggctccttggcctccctggaggccgagcaggccagcatccggcacttgggtgaccagatggaggcgagcttgctggctgtaaggaaggccaaggaggccatgaaagcccagatggcagagaaggaggccattctacagagcaaggagggcgagtgtcagcagctgcgggaggaggtggagcagtgccagcaactggcagaagcccggcacagagagcttagggctctcgagagccagtgccagcagcagacccagctgattgaggtcctcacagcagagaaaggccaacagggagttggcccacccactgacaatgaagcccgtgagctggctgcccagctagccctgtctcaggcgcagctggaagtccatcagggggaggtccaacggctgcaggctcaggtggtggacctccaggccaagatgcgggcagccctggatgaccaggacaaggtgcagagccagctaagcatggctgaggccgtcctgagggagcacaaaacccttgtgcagcagctgaaggagcagaatgaagcccttaacagagcccatgtccaggagctgctgcaatgctcggagcgtgaaggggcactgcaggaggagagggccgatgaggcccagcagagggaggaggagctgcgggccctgcaggaggagctgtcccaggccaaatgcagctccgaggaagcacagctggagcacgctgagctgcaagagcagctgcaccgggccaacacagacacagctgagctgggcatccaggtttgcgcactgaccgtggaaaaggagcgagtggaggaggcactggcctgtgctgtccaggagctccaggacgccaaagaggcagcctcaagggagcgagagggcctggagcgccaagtagctgggctgcagcaagagaaggagagcttgcaggagaagctgaaggcggccaaggcagcagccggctcactgcctggcctgcaggcccagctcgcccaggcagagcagcgggcccagagcctccaagaggctgcacaccaggagctcaacaccctcaagttccagctgagtgctgaaatcatggactaccagagcagacttaagaatgctggtgaagagtgcaagagcctcaggggccagcttgaggagcaaggccggcagctgcaggctgctgaggaagctgtggagaagctgaaggccacccaagcagacatgggagagaagctgagctgcactagcaaccatcttgcagagtgccaggcggccatgctgaggaaggacaaggagggggctgccctgcgtgaagacctagaaaggacccagaaggaactcgaaaaagccacaacaaaaatccaagagtattacaacaaactctgccaggaggtgacaaatcgtgagaggaatgaccagaagatgcttgctgacctggatgacctcaacagaaccaagaagtatctcgaggagcggctgatagagctgctcagggacaaggatgctctctggcagaagtcagatgccctggaattccagcagaagctcagtgctgaggagagatggctcggagacacagaggcaaaccactgcctcgactgtaagcgggagttcagctggatggtgcggcggcaccactgcaggatatgtggccgcatcttctgttactactgctgcaacaactacgtcctgagcaagcacggtggcaaaaaggagcgctgctgccgagcctgtttccagaagctcagtgaaggccctggctcccctgatagcagtggctcaggcactagccagggagagcccagccctgcactgtcaccagcctcacctgggccccaggccacaggaggccaaggagcaaatacagactacaggccaccggacgacgctgtgtttgatatcatcacagatgaggaattgtgccagatacaggagtccggctcctctttgcctgaaacacccactgaaactgattctctcgacccaaatgcggctgaacaggatactacatcaacctcgctaacgcctgaggacactgaagacatgcccgtggggcaggattcggaaatctgcctgctgaagtctggagaactgatgatcaaagtacccctcacagtggatgagatcgccagcttcggggagggtagcagggagctgtttgtgaggtccagcacctacagcctgatccccatcactgtggccgaggcaggcctcaccatcagctgggtcttctcctctgaccccaagagcatctccttcagtgtggtcttccaggaggccgaggacacaccgctggatcagtgtaaggtcctcattcccacgacccgatgcaactcccacaaggagaacatccagggccagctcaaggttcgcacacccggcatctacatgctcatcttcgacaataccttctcaaggtttgtctctaaaaaggtattttatcacttgacggttgatcggcctgtgatctacgatggaagtgatttcctgtagcttcagcacctcagtaacttcacttcatccacaggaaacactgctcttcctcacctgtcacataaagcatttttttaaaaagtcagctgctccaaaatcatcaactcagcccctgggctgcccctcagaggcggtgtctggggaggactttgtgctcagcactctgcaccggccactcttagcccccgaggcgttgaagggctcaggcaatgtttccattaagtagagactcagctgttgtcacacccaaagggatgctctgccaaaggtttaaacacccaggagaccatcagcctctcctgggagcacagttggctacaggcctcttgtggagagtttcacgggcaggggtgattccaacttctgcctgtggagagattttctgccctgccccaccagggccctgcatgttggagactgagctgggtgcactggccatgccctgtgaatcctcaggctgtgacgccctcaggtactcctgggaaaaggaggtacacagccatcatgcgagtcggtgccaggggaccccccggagatcctgaccagctcctccagtcatgctcttgtccctcactgccccagtaagctggaggctgctccagaactcagcagtgttggaggggcctctaagctgcactctctttctggcccttttgtctgggtgattctgtcctcaaataaagcccttcactcagccagacctctccacagctcaaagcattgccctaagaatcagaagtaaagataatccaagagcaaaacccactgtacttggggcctgcaatggctgtgtgtacactacatctaatgcccaaatgccagccagtgtggatgttgtgaccacagagcaggattgtgcattggctttagagctactcctcagctgatggcccacttttgtttatataaataagagcttctgccccacctgcagacatgtttactaatgatcatagccaggattagaaccactttcaaacattggggccttcttaacaaaagtctttgataacttaagaaccaaagtaacagagtaaacagaggcatgatggatccctgggccccactcccctcctgacaggttccccaacagcccatttgcccacttcccactgctcagcccacaccagacctccaggagacatccccccttgaggcagagagatcctgttccctattcccagacaagaattatttaatcttccctgttctctgtggtccttttcttccccaacaacagatagctcaccttggacagctcttcgtcccttgttcatggaaccagctgcctgcagtcaggccccaggttcttccatgggtgaacagagcatctgacaaaaggtcccagtttggccaggggtgagggagagagcaccagacaggctatccgagaatctgagagctgggcccggcagttcctccagctacccttgtgacctaagtccagtcacacatttcccaaagtttctctttgtcataaccctggtctggctggttttgagggcttgagaatgggtcagggactccaggccaagtccaacagagaccccaaacccaccacacaccagcagccacaacctcaccaccaacaaagaggacttttgtggggccacaagtaagaggtcatttctggaatggactcagacctttaaacaggagagttgagcacttccagtcagtttttaagcaaggcatggggaacagggaatagaacctttcaaagaggttgcccagagaaaagctgggcctcttgcattcggcttccttggagcagcctcttctggcagaaagccatcaggtgctcaatcatcttctcctggccaaggctctgaccatgcttagtactggaatagaggtggccaggcccccagcgactcttcttggcctgatgtttgtcctcacaggcatgccacgtggcctgagatgattcagaacaaatcatgctaactttgaatccatccagccacttgcaaatgataatcagaagtcagcttgttcactgttagaaagaaactaacaaaagagaacccagagcaatctagaatctttgagtgcttggctttccaaggatactgcggagactctggccaagctgatgaccttctgaagtgtcactggcaccatatgcaacaagaaccaccattcactgagtagctaatgggtttggggcctgggacattccatctgaggtccttcctgaacatgtcactccacagcagaggaccggttgcagcttacccagaaccactcctccaggagagctggatgttttgcgtgcaacaccttgagcactgactgctattgttcaaaaaaagcctttgctgcattcggaggactgccccgtgccctgaggtgacttcctaactatgtggtttcattagcgaatttattttttgtgctgggtggacatttgtattttgttaggttgctgtttaagctcaagtttgctgtgctctctgcagctacaaaacatcttggcatatttaagagtggcttttataaatagctttattctgatattaatcagattcccaactttactgagaattaaggactggggtactttaaagaaatgcaaatagcaattgaagaaccactgctgcaggtggtagccctggctagactgaattacactagaaatcagccagaaggaagcgtccttgggatcccagatcactctttttttttttttttaaaaggggcagccccttgatggctcatctctctgaataacagttacgtcttcatatcgataccagatgccttcttcatcatgccactgaagccactcaccaccttcaagaacatgccaacctctgtcagattcacttacccacaaacaaggaggcacgtttggcacaaagtgttgtcctccaggtccaagtggactctacagagtgcttgacctcaacacactggattccaggtggactggaccaagagcaggcaaagacacgggaactgaaaaactccacagggtttggagaatagaaatgaaaagccacgtcatataactcaagaataaatggtgttttggaaattttaaaattatcatcgaaggtggtgaaactatttcaggcccaaatgaaaggaaatcgccagttggggatgaaatcacagagcctgtgttttatgatatggttggatgtccactgatgaaattttaaaggagtttcagttttaaaagtgcgcatgattctacatatgagaattctttaggccaagaaactgtccttggctcagaggtgttgggaattaaagcagagagaagccattcgtgatgcttagaaccaaggatggtcatgtacacaaagaccatcgagacggccattcttgtttacaaaacacttaccaagaaagcactttgtaggggaactttagtaagttcttctcatttcattatgtttcttccaaggaaacaggagagactgaattaataattctctctttcctcttaagcacttttaaaataataaagtacatcttgaaatttggggaggcatctctgatttaaaaaaagaaaaaggctgcttgatgtatgttatgcagagacactctgcctctggtggctgcagagcaatacccaagcctcatttggaaggctcaacatttggaattgcactttaattgattaatcctcaattcatgtggccttacgggatggtgggtctgggaccccaattcattcttatctgccaaagaattatctagaagcacatcaaataccagcaccccacctgctcaatgggggtggaaaacttttgtatccctaagcatattattttatagtgtctgccatgccatgtggaaatactttatttttaacctcaggatttaaataaagtaaacactatgacattt

SEQ ID NO: 135640 - DNA, 4317 bp, Homo sapiens
  Payload ID: 6516
  Gene Symbol: FYCO1
  Gene Name: FYVE and coiled-coil domain containing 1
  ENST ID: ENST00000433878
  CDS Start-End: 1-803
tgagcaagcacggtggcaaaaaggagcgctgctgccgagcctgtttccagaagctcagtgaaggccctggctcccctgatagcagtggctcaggcactagccagggagagcccagccctgcactgtcaccagcctcacctgggccccaggccacaggaggccaaggagcaaatacagactacaggccaccggacgacgctgtgtttgatatcatcacagatgaggaattgtgccagatacaggagtccggctcctctttgcctgaaacacccactgaaactgattctctcgacccaaatgcggctgaacaggatactacatcaacctcgctaacgcctgaggacactgaagacatgcccgtggggcaggattcggaaatctgcctgctgaagtctggagaactgatgatcaaagtacccctcacagtggatgagatcgccagcttcggggagggtagcagggagctgtttgtgaggtccagcacctacagcctgatccccatcactgtggccgaggcaggcctcaccatcagctgggtcttctcctctgaccccaagagcatctccttcagtgtggtcttccaggaggccgaggacacaccgctggatcagtgtaaggtcctcattcccacgacccgatgcaactcccacaaggagaacatccagggccagctcaaggttcgcacacccggcatctacatgctcatcttcgacaataccttctcaaggtttgtctctaaaaaggtattttatcacttgacggttgatcggcctgtgatctacgatggaagtgatttcctgtagcttcagcacctcagtaacttcacttcatccacaggaaacactgctcttcctcacctgtcacataaagcatttttttaaaaagtcagctgctccaaaatcatcaactcagcccctgggctgcccctcagaggcggtgtctggggaggactttgtgctcagcactctgcaccggccactcttagcccccgaggcgttgaagggctcaggcaatgtttccattaagtagagactcagctgttgtcacacccaaagggatgctctgccaaaggtttaaacacccaggagaccatcagcctctcctgggagcacagttggctacaggcctcttgtggagagtttcacgggcaggggtgattccaacttctgcctgtggagagattttctgccctgccccaccagggccctgcatgttggagactgagctgggtgcactggccatgccctgtgaatcctcaggctgtgacgccctcaggtactcctgggaaaaggaggtacacagccatcatgcgagtcggtgccaggggaccccccggagatcctgaccagctcctccagtcatgctcttgtccctcactgccccagtaagctggaggctgctccagaactcagcagtgttggaggggcctctaagctgcactctctttctggcccttttgtctgggtgattctgtcctcaaataaagcccttcactcagccagacctctccacagctcaaagcattgccctaagaatcagaagtaaagataatccaagagcaaaacccactgtacttggggcctgcaatggctgtgtgtacactacatctaatgcccaaatgccagccagtgtggatgttgtgaccacagagcaggattgtgcattggctttagagctactcctcagctgatggcccacttttgtttatataaataagagcttctgccccacctgcagacatgtttactaatgatcatagccaggattagaaccactttcaaacattggggccttcttaacaaaagtctttgataacttaagaaccaaagtaacagagtaaacagaggcatgatggatccctgggccccactcccctcctgacaggttccccaacagcccatttgcccacttcccactgctcagcccacaccagacctccaggagacatccccccttgaggcagagagatcctgttccctattcccagacaagaattatttaatcttccctgttctctgtggtccttttcttccccaacaacagatagctcaccttggacagctcttcgtcccttgttcatggaaccagctgcctgcagtcaggccccaggttcttccatgggtgaacagagcatctgacaaaaggtcccagtttggccaggggtgagggagagagcaccagacaggctatccgagaatctgagagctgggcccggcagttcctccagctacccttgtgacctaagtccagtcacacatttcccaaagtttctctttgtcataaccctggtctggctggttttgagggcttgagaatgggtcagggactccaggccaagtccaacagagaccccaaacccaccacacaccagcagccacaacctcaccaccaacaaagaggacttttgtggggccacaagtaagaggtcatttctggaatggactcagacctttaaacaggagagttgagcacttccagtcagtttttaagcaaggcatggggaacagggaatagaacctttcaaagaggttgcccagagaaaagctgggcctcttgcattcggcttccttggagcagcctcttctggcagaaagccatcaggtgctcaatcatcttctcctggccaaggctctgaccatgcttagtactggaatagaggtggccaggcccccagcgactcttcttggcctgatgtttgtcctcacaggcatgccacgtggcctgagatgattcagaacaaatcatgctaactttgaatccatccagccacttgcaaatgataatcagaagtcagcttgttcactgttagaaagaaactaacaaaagagaacccagagcaatctagaatctttgagtgcttggctttccaaggatactgcggagactctggccaagctgatgaccttctgaagtgtcactggcaccatatgcaacaagaaccaccattcactgagtagctaatgggtttggggcctgggacattccatctgaggtccttcctgaacatgtcactccacagcagaggaccggttgcagcttacccagaaccactcctccaggagagctggatgttttgcgtgcaacaccttgagcactgactgctattgttcaaaaaaagcctttgctgcattcggaggactgccccgtgccctgaggggcagccccttgatggctcatctctctgaataacagttacgtcttcatatcgataccagatgccttcttcatcatgccactgaagccactcaccaccttcaagaacatgccaacctctgtcagattcacttacccacaaacaaggaggcacgtttggcacaaagtgttgtcctccaggtccaagtggactctacagagtgcttgacctcaacacactggattccaggtggactggaccaagagcaggcaaagacacgggaactgaaaaactccacagggtttggagaatagaaatgaaaagccacgtcatataactcaagaataaatggtgttttggaaattttaaaattatcatcgaaggtggtgaaactatttcaggcccaaatgaaaggaaatcgccagttggggatgaaatcacagagcctgtgttttatgatatggttggatgtccactgatgaaattttaaaggagtttcagttttaaaagtgcgcatgattctacatatgagaattctttaggccaagaaactgtccttggctcagaggtgttgggaattaaagcagagagaagccattcgtgatgcttagaaccaaggatggtcatgtacacaaagaccatcgagacggccattcttgtttacaaaacacttaccaagaaagcactttgtaggggaactttagtaagttcttctcatttcattatgtttcttccaaggaaacaggagagactgaattaataattctctctttcctcttaagcacttttaaaataataaagtacatcttgaaatttggggaggcatctctgatttaaaaaaagaaaaaggctgcttgatgtatgttatgcagagacactctgcctctggtggctgcagagcaatacccaagcctcatttggaaggctcaacatttggaattgcactttaattgattaatcctcaattcatgtggccttacgggatggtgggtctgggaccccaattcattcttatctgccaaagaattatctagaagcacatcaaataccagcaccccacctgctcaatgggggtggaaaacttttgtatccctaagcatattattttatagtgtctgccatgccatgtggaaatactttatttttaacctcaggatttaaataaagtaaacactatgacattt

SEQ ID NO: 135641 - DNA, 1072 bp, Homo sapiens
  Payload ID: 6516
  Gene Symbol: FYCO1
  Gene Name: FYVE and coiled-coil domain containing 1
  ENST ID: ENST00000438446
  CDS Start-End: 443-892
atagtgtgtcatcctcacagcctgggcttgttttgttcccaggatatgtggccgcatcttctgttactactgctgcaacaactacgtcctgagcaagcacggtggcaaaaaggagcgctgctgccgagcctgtttccagaagctcagtgaaggccctggctcccctgatagcagtggctcaggcactagccagggagagcccagccctgcactgtcaccagcctcacctgggccccaggccacaggaggccaaggagcaaatacagactacaggccaccggacgacgctgtgtttgatatcatcacagatgaggaattgtgccagatacaggagtccggctcctctttgcctgaaacacccactgaaactgattctctcgacccaaatgcggctgaacaggatactacatcaacctcgctaacgcctgaggacactgaagacatgcccgtggggcaggattcggaaatctgcctgctgaagtctggagaactgatgatcaaagtacccctcacagtggatgagatcgccagcttcggggagggtagcagggagctgtttgtgaggtccagcacctacagcctgatccccatcactgtggccgaggcaggcctcaccatcagctgggtcttctcctctgaccccaagagcatctccttcagtgtggtcttccaggaggccgaggacacaccgctggatcagtgtaaggtcctcattcccacgacccgatgcaactcccacaaggagaacatccagggccagctcaaggttcgcacacccggcatctacatgctcatcttcgacaataccttctcaaggtttgtctctaaaaaggtattttatcacttgacggttgatcggcctgtgatctacgatggaagtgatttcctgtagcttcagcacctcagtaacttcacttcatccacaggaaacactgctcttcctcacctgtcacataaagcatttttttaaaaagtcagctgctccaaaatcatcaactcagcccctgggctgcccctcagaggcggtgtctggggaggactttgtgctcagcactctgcaccggccactctt

SEQ ID NO: 135642 - DNA, 8578 bp, Homo sapiens
  Payload ID: 6516
  Gene Symbol: FYCO1
  Gene Name: FYVE and coiled-coil domain containing 1
  Uniprot ID: Q9BQS8
  ENST ID: ENST00000535325
  CDS Start-End: 216-4712
accctcttggtgtgcgcgtcatggccgtcagcaccgcgttcccgtcctcttccgcttggccccagaaagtttcggttctgcccggcggtggacccacgagcgcgtgccaccatggagtctgaccactgctgagcagacagccaccgagggccgaaattctgagccttcctctggacccaggcaggagacatacagacaagaaaggcaaactcaccatggcctccaccaatgcagagagccagctccagagaatcatccgagacttgcaagatgctgtgacagaactaagcaaagaatttcaggaagcaggggaacccatcacggatgacagcaccagcttgcataaattttcttataaacttgagtatctcctgcaatttgatcagaaagagaaggccaccctcctgggcaacaagaaggactactgggattacttctgtgcctgcctggccaaggtgaaaggagccaatgatgggatccgctttgtcaagtctatctcagagctccgaacatccttggggaaaggaagagcatttattcgctactccttggtgcaccagaggttggcagacaccttacagcagtgcttcatgaacaccaaagtgaccagtgactggtactatgcaagaagcccctttctgcagccaaagctgagctcggacattgtgggccaactctatgagctgactgaggttcagtttgacctggcgtcgaggggctttgacttggatgctgcctggccaacatttgccaggaggacgctgaccactggctcttctgcttacctgtggaaaccccctagccgcagctccagcatgagcagcttggtgagcagctacctgcagactcaagagatggtgtccaactttgacctgaacagccccctaaacaacgaggcattggagggctttgatgagatgcgactagagctggaccagttggaggtgcgggagaagcagctacgggagcgcatgcagcagctggacagagagaaccaggagctgagggcagctgtcagccagcaaggggagcaactgcagacagagagggagagggggcgcactgcagcggaggacaacgttcgcctcacttgcttggtagctgagctccagaagcagtgggaggtcacccaggccacccagaacactgtgaaggagctgcagacatgcctgcagggcctggagctaggagcagcagagaaggaggaggactaccacacagccctgcggcggctggagtccatgctgcagcccttggcacaggagcttgaggccacacgggactcactggacaagaaaaaccagcatttagccagcttcccaggctggctagccatggctcagcagaaggcagatacggcatcagacacaaagggccggcaagaacctattcccagtgatgcggcccaggagatgcaggagctaggggagaagcttcaagccctagaaagggagagaaccaaggtcgaggaggtcaacagacagcagagtgcccaactggaacagctggtcaaggagcttcagctgaaagaggatgcccgggccagcctggagcgcctggtgaaggagatggccccactccaggaggagttgtctgggaagggacaggaggcagaccagctctggcgacggctgcaggagttgctggcccacacgagctcctgggaggaggagctagcagagttgaggcgggagaaaaaacagcaacaggaggagaaggagctgctggagcaggaggtcaggtctctgacccggcagctgcagttcctggagacccagctggcacaggtgagccaacatgtgagtgacctggaggagcagaagaagcagctcattcaggacaaagaccacctcagccagcaggtgggtatgctcgagcggcttgctgggccgcctggcccagaactgccagtggcaggtgagaagaatgaggccctggtccctgtgaactccagtctgcaagaggcctgggggaagccagaggaggagcagaggggcctgcaggaggcacagttagacgataccaaggtgcaagagggcagccaggaggaagagctccggcaggccaacagggagctggagaaggagctacagaatgtggtcgggcgtaaccagctcctggagggcaagctgcaagccctgcaggccgattaccaggctttgcagcagcgggaatcagccatccagggctccttggcctccctggaggccgagcaggccagcatccggcacttgggtgaccagatggaggcgagcttgctggctgtaaggaaggccaaggaggccatgaaagcccagatggcagagaaggaggccattctacagagcaaggagggcgagtgtcagcagctgcgggaggaggtggagcagtgccagcaactggcagaagcccggcacagagagcttagggctctcgagagccagtgccagcagcagacccagctgattgaggtcctcacagcagagaaaggccaacagggagttggcccacccactgacaatgaagcccgtgagctggctgcccagctagccctgtctcaggcgcagctggaagtccatcagggggaggtccaacggctgcaggctcaggtggtggacctccaggccaagatgcgggcagccctggatgaccaggacaaggtgcagagccagctaagcatggctgaggccgtcctgagggagcacaaaacccttgtgcagcagctgaaggagcagaatgaagcccttaacagagcccatgtccaggagctgctgcaatgctcggagcgtgaaggggcactgcaggaggagagggccgatgaggcccagcagagggaggaggagctgcgggccctgcaggaggagctgtcccaggccaaatgcagctccgaggaagcacagctggagcacgctgagctgcaagagcagctgcaccgggccaacacagacacagctgagctgggcatccaggtttgcgcactgaccgtggaaaaggagcgagtggaggaggcactggcctgtgctgtccaggagctccaggacgccaaagaggcagcctcaagggagcgagagggcctggagcgccaagtagctgggctgcagcaagagaaggagagcttgcaggagaagctgaaggcggccaaggcagcagccggctcactgcctggcctgcaggcccagctcgcccaggcagagcagcgggcccagagcctccaagaggctgcacaccaggagctcaacaccctcaagttccagctgagtgctgaaatcatggactaccagagcagacttaagaatgctggtgaagagtgcaagagcctcaggggccagcttgaggagcaaggccggcagctgcaggctgctgaggaagctgtggagaagctgaaggccacccaagcagacatgggagagaagctgagctgcactagcaaccatcttgcagagtgccaggcggccatgctgaggaaggacaaggagggggctgccctgcgtgaagacctagaaaggacccagaaggaactcgaaaaagccacaacaaaaatccaagagtattacaacaaactctgccaggaggtgacaaatcgtgagaggaatgaccagaagatgcttgctgacctggatgacctcaacagaaccaagaagtatctcgaggagcggctgatagagctgctcagggacaaggatgctctctggcagaagtcagatgccctggaattccagcagaagctcagtgctgaggagagatggctcggagacacagaggcaaaccactgcctcgactgtaagcgggagttcagctggatggtgcggcggcaccactgcaggatatgtggccgcatcttctgttactactgctgcaacaactacgtcctgagcaagcacggtggcaaaaaggagcgctgctgccgagcctgtttccagaagctcagtgaaggccctggctcccctgatagcagtggctcaggcactagccagggagagcccagccctgcactgtcaccagcctcacctgggccccaggccacaggaggccaaggagcaaatacagactacaggccaccggacgacgctgtgtttgatatcatcacagatgaggaattgtgccagatacaggagtccggctcctctttgcctgaaacacccactgaaactgattctctcgacccaaatgcggctgaacaggcgtctgtcggggccagcaagggtctgggaaacctgctctgtgaatcatctgcttgcagggatactacatcaacctcgctaacgcctgaggacactgaagacatgcccgtggggcaggattcggaaatctgcctgctgaagtctggagaactgatgatcaaagtacccctcacagtggatgagatcgccagcttcggggagggtagcagggagctgtttgtgaggtccagcacctacagcctgatccccatcactgtggccgaggcaggcctcaccatcagctgggtcttctcctctgaccccaagagcatctccttcagtgtggtcttccaggaggccgaggacacaccgctggatcagtgtaaggtcctcattcccacgacccgatgcaactcccacaaggagaacatccagggccagctcaaggttcgcacacccggcatctacatgctcatcttcgacaataccttctcaaggtttgtctctaaaaaggtattttatcacttgacggttgatcggcctgtgatctacgatggaagtgatttcctgtagcttcagcacctcagtaacttcacttcatccacaggaaacactgctcttcctcacctgtcacataaagcatttttttaaaaagtcagctgctccaaaatcatcaactcagcccctgggctgcccctcagaggcggtgtctggggaggactttgtgctcagcactctgcaccggccactcttagcccccgaggcgttgaagggctcaggcaatgtttccattaagtagagactcagctgttgtcacacccaaagggatgctctgccaaaggtttaaacacccaggagaccatcagcctctcctgggagcacagttggctacaggcctcttgtggagagtttcacgggcaggggtgattccaacttctgcctgtggagagattttctgccctgccccaccagggccctgcatgttggagactgagctgggtgcactggccatgccctgtgaatcctcaggctgtgacgccctcaggtactcctgggaaaaggaggtacacagccatcatgcgagtcggtgccaggggaccccccggagatcctgaccagctcctccagtcatgctcttgtccctcactgccccagtaagctggaggctgctccagaactcagcagtgttggaggggcctctaagctgcactctctttctggcccttttgtctgggtgattctgtcctcaaataaagcccttcactcagccagacctctccacagctcaaagcattgccctaagaatcagaagtaaagataatccaagagcaaaacccactgtacttggggcctgcaatggctgtgtgtacactacatctaatgcccaaatgccagccagtgtggatgttgtgaccacagagcaggattgtgcattggctttagagctactcctcagctgatggcccacttttgtttatataaataagagcttctgccccacctgcagacatgtttactaatgatcatagccaggattagaaccactttcaaacattggggccttcttaacaaaagtctttgataacttaagaaccaaagtaacagagtaaacagaggcatgatggatccctgggccccactcccctcctgacaggttccccaacagcccatttgcccacttcccactgctcagcccacaccagacctccaggagacatccccccttgaggcagagagatcctgttccctattcccagacaagaattatttaatcttccctgttctctgtggtccttttcttccccaacaacagatagctcaccttggacagctcttcgtcccttgttcatggaaccagctgcctgcagtcaggccccaggttcttccatgggtgaacagagcatctgacaaaaggtcccagtttggccaggggtgagggagagagcaccagacaggctatccgagaatctgagagctgggcccggcagttcctccagctacccttgtgacctaagtccagtcacacatttcccaaagtttctctttgtcataaccctggtctggctggttttgagggcttgagaatgggtcagggactccaggccaagtccaacagagaccccaaacccaccacacaccagcagccacaacctcaccaccaacaaagaggacttttgtggggccacaagtaagaggtcatttctggaatggactcagacctttaaacaggagagttgagcacttccagtcagtttttaagcaaggcatggggaacagggaatagaacctttcaaagaggttgcccagagaaaagctgggcctcttgcattcggcttccttggagcagcctcttctggcagaaagccatcaggtgctcaatcatcttctcctggccaaggctctgaccatgcttagtactggaatagaggtggccaggcccccagcgactcttcttggcctgatgtttgtcctcacaggcatgccacgtggcctgagatgattcagaacaaatcatgctaactttgaatccatccagccacttgcaaatgataatcagaagtcagcttgttcactgttagaaagaaactaacaaaagagaacccagagcaatctagaatctttgagtgcttggctttccaaggatactgcggagactctggccaagctgatgaccttctgaagtgtcactggcaccatatgcaacaagaaccaccattcactgagtagctaatgggtttggggcctgggacattccatctgaggtccttcctgaacatgtcactccacagcagaggaccggttgcagcttacccagaaccactcctccaggagagctggatgttttgcgtgcaacaccttgagcactgactgctattgttcaaaaaaagcctttgctgcattcggaggactgccccgtgccctgaggtgacttcctaactatgtggtttcattagcgaatttattttttgtgctgggtggacatttgtattttgttaggttgctgtttaagctcaagtttgctgtgctctctgcagctacaaaacatcttggcatatttaagagtggcttttataaatagctttattctgatattaatcagattcccaactttactgagaattaaggactggggtactttaaagaaatgcaaatagcaattgaagaaccactgctgcaggtggtagccctggctagactgaattacactagaaatcagccagaaggaagcgtccttgggatcccagatcactctttttttttttttttaaaaggggcagccccttgatggctcatctctctgaataacagttacgtcttcatatcgataccagatgccttcttcatcatgccactgaagccactcaccaccttcaagaacatgccaacctctgtcagattcacttacccacaaacaaggaggcacgtttggcacaaagtgttgtcctccaggtccaagtggactctacagagtgcttgacctcaacacactggattccaggtggactggaccaagagcaggcaaagacacgggaactgaaaaactccacagggtttggagaatagaaatgaaaagccacgtcatataactcaagaataaatggtgttttggaaattttaaaattatcatcgaaggtggtgaaactatttcaggcccaaatgaaaggaaatcgccagttggggatgaaatcacagagcctgtgttttatgatatggttggatgtccactgatgaaattttaaaggagtttcagttttaaaagtgcgcatgattctacatatgagaattctttaggccaagaaactgtccttggctcagaggtgttgggaattaaagcagagagaagccattcgtgatgcttagaaccaaggatggtcatgtacacaaagaccatcgagacggccattcttgtttacaaaacacttaccaagaaagcactttgtaggggaactttagtaagttcttctcatttcattatgtttcttccaaggaaacaggagagactgaattaataattctctctttcctcttaagcacttttaaaataataaagtacatcttgaaatttggggaggcatctctgatttaaaaaaagaaaaaggctgcttgatgtatgttatgcagagacactctgcctctggtggctgcagagcaatacccaagcctcatttggaaggctcaacatttggaattgcactttaattgattaatcctcaattcatgtggccttacgggatggtgggtctgggaccccaattcattcttatctgccaaagaattatctagaagcacatcaaataccagcaccccacctgctcaatgggggtggaaaacttttgtatccctaagcatattattttatagtgtctgccatgccatgtggaaatactttatttttaacctcaggatttaaataaagtaaacactatgacatttagaca

SEQ ID NO: 135643 - DNA, 4275 bp, Homo sapiens
  Payload ID: 6517
  Gene Symbol: FGD1
  Gene Name: FYVE, RhoGEF and PH domain containing 1
  Uniprot ID: P98174
  ENST ID: ENST00000375135
  CDS Start-End: 735-3620
cagggctccttcccgcccgccgccgccgagacccaggctgaagctggggaggacggtggagcccggcccaggccgttctcctgcccccgcggctggagcatcgtctgggactactggctgaaggcgagccccgcagcccaagcgcagcgcacacgcgcgcccccggccaccgccgttctctcttccctcccctcctctcccctcccctctcctccgcccccggcctcggctgcggcgggaggaagaacgcttcccaaccagccaggagagcccagatctattcccattcggggagaaagaagagaccccgcacttggatccgaccgacttctcgccccggggccacggaagtggctcgccgtccaccggagagtccccgccgagcgtagccctccaaccctcgcccaaccgcagccgcatagacagcgctccccagcgggcccccggccccgccgagcccactccccgcgcggggccggggccggggccggcgatgcctggcacggcagcggcggtggccgcggctgctgctgctgctactgccaccgctgccacggctgctggcccgggcccgggctgggggcttgagtctctgcagtggggctgagcccgcagtcccgccccccgatcctgaggccgctgctccgccgggcgccgggcctcctccgcccgcgcctccgccccaggagctggagccaagcggggagctcgggccccgcgcccaggcccggaccatgcatggccaccgagccccggggggcgccgggccttcggagcccgaacacccggccacgaacccgccgggcgccgctccgccggcctgtgccgactcggaccctggagcctcggaacccggactgctggcgcgcaggggctcaggttcggctcttggcggcccactggatccccagtttgtcggaccctcggacaccagcctgggcgctgctccaggccaccgggtcttgccctgcggtcccagtccacagcaccaccgggccctgcgcttctcttaccacctggagggctcgcagcctcggcctgggctgcaccagggaaaccggatcctggttaaaagtttgtcccttgaccctggccaaagcctagagcctcatccagaaggtccccagcggcttcgctcagacccaggtcccccgactgaaacccctagccagcgtccttcaccactgaagcgggcaccgggcccgaagccacaggtgcccccaaagcccagctacctgcagatgccccggatgccccccccactggagcccatcccccctccaccatcacgcccactgcctgccgacccccgagtggccaagggcctggctcccagggcagaggccagccccagttctgcagcagtatcctcactgattgagaagtttgaaagagagcctgtgattgtcgcctcggatagaccagtccctggccccagcccaggtcccccagagccagtcatgttgccacagccaacctcgcagccaccagtgccccagctccccgagggtgaggcctcccgctgcctgtttctgctggctcctgggccccgggacggtgagaaggtgcccaaccgggacagcggcattgatagcatcagctcgccatccaacagcgaggagacctgcttcgtcagtgatgacgggccccccagccacagcctctgccctgggccccctgccctggctagtgtgcctgttgccttggccgacccccaccggcctggctcccaagaggttgacagtgacctggaggaggaggacgacgaggaggaggaggaagagaaggacagagaaatcccagtgcccctgatggagagacaggagtctgtggagttgactgtgcagcaaaaggtgtttcacattgccaatgagctcctgcaaactgagaaggcctacgtttccaggctccatctcctggatcaggtgttctgtgcccggctgctggaagaagctcggaaccgcagttccttcccggccgacgttgtccacggcatcttctctaacatctgctccatctattgcttccaccagcagttcctgctgcctgagctagagaagcgcatggaggaatgggaccgctatccacgcattggagacatcctgcagaaactggcccccttcctcaagatgtatggtgagtatgtgaagaactttgaccgggccgtggagctggtcaacacctggacagagcgctccacccagtttaaagtcatcatccatgaggtgcagaaggaggaagcctgtggcaacctgacattgcagcaccacatgctggagcctgtgcagcgcatcccccgctatgagcttcttctcaaggactatctgttaaagctgccccatggctccccggacagcaaggatgcccaaaagtctctggagctgatcgccacagcagcagagcactcgaatgctgccatccgcaaaatggagcgaatgcataagctgctgaaggtatatgagctgttagggggcgaggaggacattgtcagccccaccaaagagctcataaaagaaggccacatccttaagctgtcagcaaagaatgggaccactcaagaccgatacctcatactattcaacgaccgcctcctttactgcgtgcccaggctgcggctccttggccagaagtttagcgtgcgggcacgcattgatgtagatggcatggagctaaaggagagctccaacctcaatctgcctcgaaccttcctggtgtcaggaaagcagcgctccctcgagctccaggccaggactgaggaggagaagaaagactgggtccaggccatcaactccaccctcctgaagcatgaacagacgctggagactttcaaactgttgaactcaacaaacagggaagatgaagacaccccacccaactctccaaacgtggatcttgggaagcgggcacctacgcccatccgggaaaaggaagtcaccatgtgcatgcgctgccaggagcccttcaattctatcaccaaacgcaggcaccactgcaaggcctgcgggcatgtggtttgtgggaagtgctccgagttccgggcccgcctcgtctatgacaacaaccgctccaaccgtgtgtgcactgattgctatgtggccttgcacggggtgcctgggagcagtccagcctgcagccagcatacaccccagcgccggaggtccatcctggagaaacaggcctcagtggctgcagagaacagcgtcatctgcagcttcctgcactacatggagaagggtggcaaaggatggcacaaggcatggttcgtggtccctgaaaatgaacccttggtgctgtatatctacggagcccctcaggatgtgaaagcccagcgcagcctgcccctcattggcttcgaggtgggaccgcccgaggcaggggagcggcctgacagaaggcatgtcttcaagatcacccagagccacctcagctggtacttcagccctgagacagaggaactacagcgacgctggatggctgtgcttggccgggcgggccgaggggacacgttctgcccggggcccacactgtctgaggacagggagatggaggaggcaccggtggctgctttaggagccactgctgaaccccccgaatccccccagacccgagacaagacctagagggtttgggacaaactgggagcccccaccccacactctagttgcccatgtctgattgggggctctagccccttccctcccagctcagtcaatacttgaactcccatcacgggcactttcaatcccgaatgctgggtcttgggttttttaattcatcttttcacaaaacgtgggcttttaaaaaatatattcctacagtgatgtcaatttttattaatccctgtccccagggagggtgggagccgttgccagtcctacctgaattaggtcgtttttctccctcatccctcaataccctaccacagatcctgcctccacccagttccccacaaagcaccagaggtaggagacctggattcaagtgccagctctgccactgaccctggggccccgacccagccctgcctcctcagccagtgtcttcacacgtacaactccacgtggggtggcaactagacctctcctgcctctcccatggcttacagcttctacccggccccaaggctacccagtattttatcgtccagacccatggcagggccagcgggcaggacagggaaacaggggggaggacaatggatactcagttttttgtgtttttttgtgtgtttttttttttttaagaaaaatacagtttatttcaggcttacagtaa

SEQ ID NO: 135644 - DNA, 3046 bp, Homo sapiens
  Payload ID: 6518
  Gene Symbol: FGD2
  Gene Name: FYVE, RhoGEF and PH domain containing 2
  Uniprot ID: Q7Z6J4
  ENST ID: ENST00000274963
  CDS Start-End: 172-2139
ctttcttcactctgaagccaagagccgaccttctgagccctcaagaaagatcagaacagattcatgggtgatttagcctatctgtcccaggccagcgtggctgagtgtgctggctggaggcctctctctctgcttcgagggtagctgagatccaccccggaaaccggcaggatgaagggggcaagtgaggagaagctggcatctgtgtccaacctggtcactgtgtttgagaatagcaggaccccagaagcagcacccagaggccagaggctagaggacgtgcatcaccgccctgagtgcaggcctcccgagtccccaggaccacgggagaagacgaatgtcggggaggccgtggggtctgagcccaggacagtcagcaggaggtacctgaactccctgaagaacaagctgtccagcgaagcctggaggaaatcttgccagcctgtgaccctctcaggatcggggacgcaggagccagagaagaagatcgtccaggagctgctggagacagagcaggcctatgtggcgcgcctccacctgctagaccaggtgtttttccaggagctgctgaagacagcccgcagcagcaaggccttcccagaggatgtggtcagggtcatcttctccaacatctcctccatctatcagttccattctcagttcttcctcccagagctgcagcggcgcctggacgactggacagctaacccccgcatcggtgacgtgatccagaagctggcccccttcctgaagatgtacagtgagtatgtcaagaactttgagcgagcggctgagctgctggccacctggaccgacaagtctccactcttccaggaggttctcactcgcatccagagcagcgaggcttcgggcagcctgaccctgcagcaccacatgctggaaccagtgcagagaattccacgttacgagctgctgctcaaggagtacatccagaagctgccagcccaggccccagaccaggccgatgcccagaaagccctggacatgatcttctcagctgcccagcactccaatgcagccatcactgagatggagcggctgcaggacctgtgggaggtgtaccagcgcctgggcctcgaggacgacatagtagacccctctaacaccctgctccgtgagggcccggtcctcaagatctccttccgccgcaacgaccccatggagcgctaccttttcttgttcaacaacatgctgctctactgtgtgcccagggtgatccaggtgggcgcccagttccaggtgaggacccgcatcgatgtggccgggatgaaggtgcgggagctgatggatgctgagtttccccactccttcctggtgtccgggaagcagcgcaccctggagctgcaagcccggtcccaggaggaaatgatttcctggatgcaggccttccaagcagccattgaccaaatcgagaagcggaatgaaaccttcaaggctgcggcccaggggcctgagggagacatccaggagcaggagctgcagtctgaggagctgggcctccgggcaccgcagtgggtccgggacaagatggtgaccatgtgcatgcgctgccaggagcccttcaacgctctgacgcgccgtcgccaccactgccgggcctgcggctatgtggtgtgtgccaggtgctccgactaccgggccgaactgaaatacgacgacaacaggcccaaccgagtctgcctccactgctacgcattcctcactggaaatgtgctgcctgaggccaaggaggacaagaggcggggcatcctggagaaagggtcctcagccacgcctgaccagagcctgatgtgcagcttcctgcagctcatcggggacaagtggggcaagagcggcccccggggctggtgtgtgatccctcgggatgaccccctcgtgctctatgtctatgctgcccctcaggacatgagggctcacacctccatccccctgctgggctaccaggtgactgttgggccccagggggaccctcgggtcttccagctacagcagtcaggccagctctacaccttcaaggccgagacggaggagctgaagggccgctgggtgaaggccatggagcgggcggccagtggctggagccccagctggcccaacgatggggacctgtccgactgagccactgccagccgctctcctgcccacctctccccaccctgaacccagctcctgccacagactgaccctgtggcctcagtgacccactgccccaagtggtgctttcagagaattgattcagccatctgcgcccaggccacgtgtcccgatctgggattagaaaatatgggtccattcctttctagaaaggggacaaccaagtgtctcagtttgccttgcggggagggggctcctgggccatgggacttccagtgctaaaactgggaaagccccaggtaaccccggactggtggtcaccatagtatggtttttcatttgtatctcctggggagcttttaaagagtactggtgaaaaacacatagtaaattaattttaaaaatgtaaaaaacaatgcctgtactgaagtaccaccaccgatttaaatgggctgagttgggggaggcatggggtctttttttttttttttttgagacagagtcttactctgtttcccaggctggagtgcacaaacatggctcactacagcctcgctctcccgggctccagtgatcctcccgcctcagcctcccaagtagctgggattataggtgtgtgccactgtgccaagctaatttttttattttttgtagagatgggatttcaccatgttactcaggctggtctcaaactcccagcctcaagcgatgctcccacctccacctcccaaagtgctgggattacaggcgtgagccaccatacctggcgcatgcatattttttaagagtacccactggagtctaatatatagcctgggttacctgggatgaagaataaagagagcaaactaccacaaccaatggttgagcccctgtcaagtgccagtcatgatagtagtaataataataataaacatctattggaccaggc

SEQ ID NO: 135645 - DNA, 2197 bp, Homo sapiens
  Payload ID: 6518
  Gene Symbol: FGD2
  Gene Name: FYVE, RhoGEF and PH domain containing 2
  ENST ID: ENST00000373535
  CDS Start-End: 164-472
actctgaagccaagagccgaccttctgagccctcaagaaagatcagaacagattcatgggtgatttagcctatctgtcccaggccagcgtggctgagtgtgctggctggaggcctctctctctgcttcgagggtagctgagatccaccccggaaaccggcaggatgaagggggcaagtgaggagaagctggcatctgtgtccaacctggtcactgtgtttgagaatagcaggaccccagaagcagcacccagaggccagaggctagaggacgtgcatcaccgccctgagtgcaggcctcccgagtccccaggaccacgggagaagacgaatgtcggggaggccgtggggtctgagcccaggacagtcagcaggaggtacctgaactccctgaagaacaagctgtccagcgaagcctggaggaaatcttgccagcctgtgaccctctcaggatcggggacgcaggacagctaacccccgcatcggtgacgtgatccagaagctggcccccttcctgaagatgtacagtgagtatgtcaagaactttgagcgagcggctgagctgctggccacctggaccgacaagtctccactcttccaggaggttctcactcgcatccagagcagcgaggcttcgggcagcctgaccctgcagcaccacatgctggaaccagtgcagagaattccacgttacgagctgctgctcaaggagtacatccagaagctgccagcccaggccccagaccaggccgatgcccagaaagccctggacatgatcttctcagctgcccagcactccaatgcagccatcactgagatggagcggctgcaggacctgtgggaggtgtaccagcgcctgggcctcgaggacgacatagtagacccctctaacaccctgctccgtgagggcccggtcctcaagatctccttccgccgcaacgaccccatggagcgctaccttttcttgggtgatccaggtgggcgcccagttccaggtgaggacccgcatcgatgtggccgggatgaaggtgcgggagctgatggatgctgagtttccccactccttcctggtgtccgggaagcagcgcaccctggagctgcaagcccggtcccaggaggaaatgatttcctggatgcaggccttccaagcagccattgaccaaatcgagaagcggaatgaaaccttcaaggctgcggcccaggggcctgagggagacatccaggagcaggagctgcagtctgaggagctgggcctccgggcaccgcagtgggtccgggacaagatggtgaccatgtgcatgcgctgccaggagcccttcaacgctctgacgcgccgtcgccaccactgccgggcctgcggctatgtggtgtgtgccaggtgctccgactaccgggccgaactgaaatacgacgacaacaggcccaaccgagtctgcctccactgctacgcattcctcactggaaatgtgctgcctgaggccaaggaggacaagaggcggggcatcctggagaaagggtcctcagccacgcctgaccagagcctgatgtgcagcttcctgcagctcatcggggacaagtggggcaagagcggcccccggggctggtgtgtgatccctcgggatgaccccctcgtgctctatgtctatgctgcccctcaggacatgagggctcacacctccatccccctgctgggctaccaggtgactgttgggccccagggggaccctcgggtcttccagctacagcagtcaggccagctctacaccttcaaggccgagacggaggagctgaagggccgctgggtgaaggccatggagcgggcggccagtggctggagccccagctggcccaacgatggggacctgtccgactgagccactgccagccgctctcctgcccacctctccccaccctgaacccagctcctgccacagactgaccctgtggcctcagtgacccactgccccaagtggtgctttcagagaattgattcagccatctgcgcccaggccacgtgtcccgatctgggattagaaaatatgggtccattcctttctagaaaggggacaaccaagtgtctcagtttgccttgcggggagggggctcctgggccatgggacttccagtgctaaaactgggaaagccccaggtaaccccggactggtggtcaccatagtatggtttttcatttgtatctcc

SEQ ID NO: 135646 - DNA, 541 bp, Homo sapiens
  Payload ID: 6518
  Gene Symbol: FGD2
  Gene Name: FYVE, RhoGEF and PH domain containing 2
  ENST ID: ENST00000497659
  CDS Start-End: 164-478
actctgaagccaagagccgaccttctgagccctcaagaaagatcagaacagattcatgggtgatttagcctatctgtcccaggccagcgtggctgagtgtgctggctggaggcctctctctctgcttcgagggtagctgagatccaccccggaaaccggcaggatgaagggggcaagtgaggagaagctggcatctgtgtccaacctggtcactgtgtttgagaatagcaggaccccagaagcagcacccagaggccagaggctagaggacgtgcatcaccgccctgagtgcaggcctcccgagtccccaggaccacgggagaagacgaatgtcggggaggccgtggggtctgagcccaggacagtcagcaggaggtacctgaactccctgaagaacaagctgtccagcgaagcctggaggaaatcttgccagcctgtgaccctctcaggatcggggacgcaggtgcctgagggctgaggagccagagaagaagatcgtccaggagctgctggagacagagcaggcctatgtggcgcgcct

SEQ ID NO: 135647 - DNA, 3303 bp, Homo sapiens
  Payload ID: 6519
  Gene Symbol: FGD3
  Gene Name: FYVE, RhoGEF and PH domain containing 3
  Uniprot ID: Q5JSP0
  ENST ID: ENST00000337352
  CDS Start-End: 483-2660
gagcactcaggagactgtgtgtggtgggggtgctccaccatagagctggtcggcatccacagccaccaggacgctgccagagcccaggcctgcgccacgccctgcccagaggcacacctgcctgctcaaggcaaccagggcaggctcaaggcagccagggccagctcactgtgtgcctgtcactgtgtgaagcctgcttcttctttatttcgcttagcaagtgaggcaggagcatgtaaagctgctggcagaggaatatctaatttacctcctaaatggctctactttgaacctgctgggcaaggaagagattttcaaggaaaccatctaccgtgtgcaagctcctgccggccaaccccagaccccagcacggagccaggcgcctgtgcccgccgaccctcagcatcctcctcagaaaggctggtggcatcaggaagcccctggccagcctccacctgagcccagtgagctcagctttaaggatggagtcaggcagggggtcctcaacccctccaggacccattgctgccctagggatgccagacactgggcctggcagttcctccctagggaagcttcaggcgctccctgttgggcccagagcccactgtggggaccctgtcagcctggctgcagcaggggacggctctccagacataggccccacgggagagctgagtggtagcttaaagatccccaaccgggacagcgggatcgacagtccctcctccagtgtggctggagagaactttccctgcgaggagggcttggaggctggcccaagccccactgtactgggggcgcacgcagagatggccctggacagccaggtcccgaaggtcaccccccaggaggaggcggacagcgacgtgggtgaggaacctgactctgagaacaccccccagaaggctgacaaggatgccggcctggcccagcactctggcccccagaagcttctccacattgcccaggagctcctgcacaccgaggagacctatgtgaagcggctgcacctgctggaccaggttttctgcaccaggctgacggatgcggggatccctccagaagtcatcatgggcatattctctaacatctcctccatccaccgcttccacgggcagttcctgctgccggagctgaagacgcggatcacggaggagtgggacacaaacccacggctcggggacatcctgcagaagctggccccattcctgaagatgtacggcgagtatgtcaagaactttgaccgagccgtagggctggtgagcacgtggacccagcgctccccactgtttaaagacgtcgtccacagcatccagaagcaggaggtatgcgggaacctgacgctgcagcaccacatgctggagcccgtgcagagggtcccccggtacgagctgctgctcaaggactatctgaagaggctcccgcaggacgccccagaccggaaggatgcggagaggtccttggagctcatctccacagccgccaaccactccaatgctgccattcggaaagtggagaaaatgcacaagctcttggaggtgtacgagcagctgggtggggaagaagacattgtcaacccggccaatgaactgatcaaggagggccaaatccagaaactgtcagccaagaacggcaccccccaggaccgccacctcttcctgttcaacagcatgatcctttactgtgtgcccaagctgcggctcatgggccagaagttcagcgtccgggagaagatggacatctcaggcctccaggtgcaggatatcgtcaagccaaacacagcacatacattcatcataacaggaagaaaaaggtccctggagctgcagacgcggacagaggaagagaagaaagaatggattcagatcatccaggccaccatcgagaagcacaaacagaacagcgaaaccttcaaggcttttggtggcgccttcagccaggatgaggaccccagcctctctccagacatgcctatcacgagcaccagccctgtggagcctgtggtgaccaccgaaggcagttcgggtgcagcagggctcgagcccagaaaactatcctctaagaccagacgtgacaaggagaagcagagctgtaagagctgtggtgagaccttcaactccatcaccaagaggaggcatcactgcaagctgtgtggggcggtcatctgtgggaagtgctccgagttcaaggccgagaacagccggcagagccgtgtctgcagagattgtttcctgacacagccagtggcccctgagagcacagagaagacacccactgcagacccccagcccagcctgctctgcggccccctgcggctgtcagagagcggtgagacctggagcgaggtgtgggccgccatccccatgtcagatccccaggtgctgcacctgcagggaggcagccaggacggccggctgccccgcaccatccctctccccagctgcaaactgagtgtgccggaccctgaggagaggctggactcggggcatgtgtggaagctgcagtgggccaagcagtcctggtacctgagcgcctcctccgcagagctgcagcagcagtggctggaaaccctaagcactgctgcccatggggacacggcccaggacagcccgggggccctgcagcttcaggtccctatgggcgcagctgctccgtgagctgagtctcccactgccctgcacaccaccacattggacctgtgctgtcctgggaggtggtgttggaggccccatgaagagcgccctggactgctgagggtgggccaacagcccagagctcaggacacttggctttggggggaaggaaactgaggcccagagaggggcaaccactggccaagggtcacccagcaagttttggctaagagcctggcctccagccccagcagtgtggcccagagcaggggccgactgccaaagtaaccatcatccatatgggccgtgtggtgatgctggcccggaaggcagaaagaggcagcatgggcactgccagggacagccacatcctgctggtctgcagcgtggtccaccccgcctctgcccagcctgtctacaccgtgtgagctgaatcgtgacttgcttcccacctcctttctctgtcctctcctgaggttctgcctgcagcccccaggaggtgggcctgccccatcctagctggactcatggttcctaaataaccacgctcagaagctctgctaggacttaccccagccactgagtggcaggcgcatgagatttgtggctgttcctgatgctagtggcacacagtgcttatctgcataaataaacactggccaccagc

SEQ ID NO: 135648 - DNA, 3321 bp, Homo sapiens
  Payload ID: 6519
  Gene Symbol: FGD3
  Gene Name: FYVE, RhoGEF and PH domain containing 3
  Uniprot ID: Q5JSP0
  ENST ID: ENST00000375482
  CDS Start-End: 497-2674
tgcctgtgggtgccgcggaccttcggggcgggccagggaggcgggaccgctcctcagaaccccaggggcttcagtcctgggctgattggcgcgggaagcacagcccggccctccaggtccccaaggagaccccagcctcctgctgcccactgtgagcgacctccccggggctcctctggaagcggctccggcaagtatcgagtttgcctgtgcggagctgggggagcctccggctttcctgtttgctttgttaattattttcgtccccagaggaaggcgtacctcctaaatggctctactttgaacctgctgggcaaggaagagattttcaaggaaaccatctaccgtgtgcaagctcctgccggccaaccccagaccccagcacggagccaggcgcctgtgcccgccgaccctcagcatcctcctcagaaaggctggtggcatcaggaagcccctggccagcctccacctgagcccagtgagctcagctttaaggatggagtcaggcagggggtcctcaacccctccaggacccattgctgccctagggatgccagacactgggcctggcagttcctccctagggaagcttcaggcgctccctgttgggcccagagcccactgtggggaccctgtcagcctggctgcagcaggggacggctctccagacataggccccacgggagagctgagtggtagcttaaagatccccaaccgggacagcgggatcgacagtccctcctccagtgtggctggagagaactttccctgcgaggagggcttggaggctggcccaagccccactgtactgggggcgcacgcagagatggccctggacagccaggtcccgaaggtcaccccccaggaggaggcggacagcgacgtgggtgaggaacctgactctgagaacaccccccagaaggctgacaaggatgccggcctggcccagcactctggcccccagaagcttctccacattgcccaggagctcctgcacaccgaggagacctatgtgaagcggctgcacctgctggaccaggttttctgcaccaggctgacggatgcggggatccctccagaagtcatcatgggcatattctctaacatctcctccatccaccgcttccacgggcagttcctgctgccggagctgaagacgcggatcacggaggagtgggacacaaacccacggctcggggacatcctgcagaagctggccccattcctgaagatgtacggcgagtatgtcaagaactttgaccgagccgtagggctggtgagcacgtggacccagcgctccccactgtttaaagacgtcgtccacagcatccagaagcaggaggtatgcgggaacctgacgctgcagcaccacatgctggagcccgtgcagagggtcccccggtacgagctgctgctcaaggactatctgaagaggctcccgcaggacgccccagaccggaaggatgcggagaggtccttggagctcatctccacagccgccaaccactccaatgctgccattcggaaagtggagaaaatgcacaagctcttggaggtgtacgagcagctgggtggggaagaagacattgtcaacccggccaatgaactgatcaaggagggccaaatccagaaactgtcagccaagaacggcaccccccaggaccgccacctcttcctgttcaacagcatgatcctttactgtgtgcccaagctgcggctcatgggccagaagttcagcgtccgggagaagatggacatctcaggcctccaggtgcaggatatcgtcaagccaaacacagcacatacattcatcataacaggaagaaaaaggtccctggagctgcagacgcggacagaggaagagaagaaagaatggattcagatcatccaggccaccatcgagaagcacaaacagaacagcgaaaccttcaaggcttttggtggcgccttcagccaggatgaggaccccagcctctctccagacatgcctatcacgagcaccagccctgtggagcctgtggtgaccaccgaaggcagttcgggtgcagcagggctcgagcccagaaaactatcctctaagaccagacgtgacaaggagaagcagagctgtaagagctgtggtgagaccttcaactccatcaccaagaggaggcatcactgcaagctgtgtggggcggtcatctgtgggaagtgctccgagttcaaggccgagaacagccggcagagccgtgtctgcagagattgtttcctgacacagccagtggcccctgagagcacagagaagacacccactgcagacccccagcccagcctgctctgcggccccctgcggctgtcagagagcggtgagacctggagcgaggtgtgggccgccatccccatgtcagatccccaggtgctgcacctgcagggaggcagccaggacggccggctgccccgcaccatccctctccccagctgcaaactgagtgtgccggaccctgaggagaggctggactcggggcatgtgtggaagctgcagtgggccaagcagtcctggtacctgagcgcctcctccgcagagctgcagcagcagtggctggaaaccctaagcactgctgcccatggggacacggcccaggacagcccgggggccctgcagcttcaggtccctatgggcgcagctgctccgtgagctgagtctcccactgccctgcacaccaccacattggacctgtgctgtcctgggaggtggtgttggaggccccatgaagagcgccctggactgctgagggtgggccaacagcccagagctcaggacacttggctttggggggaaggaaactgaggcccagagaggggcaaccactggccaagggtcacccagcaagttttggctaagagcctggcctccagccccagcagtgtggcccagagcaggggccgactgccaaagtaaccatcatccatatgggccgtgtggtgatgctggcccggaaggcagaaagaggcagcatgggcactgccagggacagccacatcctgctggtctgcagcgtggtccaccccgcctctgcccagcctgtctacaccgtgtgagctgaatcgtgacttgcttcccacctcctttctctgtcctctcctgaggttctgcctgcagcccccaggaggtgggcctgccccatcctagctggactcatggttcctaaataaccacgctcagaagctctgctaggacttaccccagccactgagtggcaggcgcatgagatttgtggctgttcctgatgctagtggcacacagtgcttatctgcataaataaacactggccaccagcagtg

SEQ ID NO: 135649 - DNA, 3432 bp, Homo sapiens
  Payload ID: 6519
  Gene Symbol: FGD3
  Gene Name: FYVE, RhoGEF and PH domain containing 3
  Uniprot ID: Q5JSP0
  ENST ID: ENST00000416701
  CDS Start-End: 611-2785
attccctgctgggcccctcctccctgaagatctacacagcagatctactcacaaaagtccacccagcagaagcaggaggatggtggttgtgggtcctctgtgagcagccctgttaacctttaaaccagcacggccgccgcagctgtgagcctagcacctgatcagtggagagctgtggattgcatgtttgtttgccattgcccccgccaccctgcaagttgcaccttctagaatcagcaagccaagctcctctcacccagcgtaatgatgcggaaatgcaaatgcaccatcatgttgtgacccatattgcgaaaattagaaaaaaggaagttgtgtttcgctattgcacgaagttcagcccagaggagaaactcgctcgccttcagaagacagtacctcctaaatggctctactttgaacctgctgggcaaggaagagattttcaaggaaaccatctaccgtgtgcaagctcctgccggccaaccccagaccccagcacggagccaggcgcctgtgcccgccgaccctcagcatcctcctcagaaaggctggtggcatcaggaagcccctggccagcctccacctgagcccagtgagctcagctttaaggatggagtcaggcagggggtcctcaacccctccaggacccattgctgccctagggatgccagacactgggcctggcagttcctccctagggaagcttcaggcgctccctgttgggcccagagcccactgtggggaccctgtcagcctggctgcagcaggggacggctctccagacataggccccacgggagagctgagtggtagcttaaagatccccaaccgggacagcgggatcgacagtccctcctccagtgtggctggagagaactttccctgcgaggagggcttggaggctggcccaagccccactgtactgggggcgcacgcagagatggccctggacagccaggtcccgaaggtcaccccccaggaggaggcggacagcgacgtgggtgaggaacctgactctgagaacaccccccagaaggctgacaaggatgccggcctggcccagcactctggcccccagaagcttctccacattgcccaggagctcctgcacaccgaggagacctatgtgaagcggctgcacctgctggaccaggttttctgcaccaggctgacggatgcggggatccctccagaagtcatcatgggcatattctctaacatctcctccatccaccgcttccacgggcagttcctgctgccggagctgaagacgcggatcacggaggagtgggacacaaacccacggctcggggacatcctgcagaagctggccccattcctgaagatgtacggcgagtatgtcaagaactttgaccgagccgtagggctggtgagcacgtggacccagcgctccccactgtttaaagacgtcgtccacagcatccagaagcaggaggtatgcgggaacctgacgctgcagcaccacatgctggagcccgtgcagagggtcccccggtacgagctgctgctcaaggactatctgaagaggctcccgcaggacgccccagaccggaaggatgcggagaggtccttggagctcatctccacagccgccaaccactccaatgctgccattcggaaagtggagaaaatgcacaagctcttggaggtgtacgagcagctgggtggggaagaagacattgtcaacccggccaatgaactgatcaaggagggccaaatccagaaactgtcagccaagaacggcaccccccaggaccgccacctcttcctgttcaacagcatgatcctttactgtgtgcccaagctgcggctcatgggccagaagttcagcgtccgggagaagatggacatctcaggcctccaggtgcaggatatcgtcaagccaaacacagcacatacattcatcataacaggaagaaaaaggtccctggagctgcagacgcggacagaggaagagaagaaagaatggattcagatcatccaggccaccatcgagaagcacaaacagaacagcgaaaccttcaaggcttttggtggcgccttcagccaggatgaggaccccagcctctctccagacatgcctatcacgagcaccagccctgtggagcctgtggtgaccaccgaaggcagttcgggtgcagcagggctcgagcccagaaaactatcctctaagaccagacgtgacaaggagaagcagagctgtaagagctgtggtgagaccttcaactccatcaccaagaggaggcatcactgcaagctgtgtggggcggtcatctgtgggaagtgctccgagttcaaggccgagaacagccggcagagccgtgtctgcagagattgtttcctgacacagccagtggcccctgagagcacagagacacccactgcagacccccagcccagcctgctctgcggccccctgcggctgtcagagagcggtgagacctggagcgaggtgtgggccgccatccccatgtcagatccccaggtgctgcacctgcagggaggcagccaggacggccggctgccccgcaccatccctctccccagctgcaaactgagtgtgccggaccctgaggagaggctggactcggggcatgtgtggaagctgcagtgggccaagcagtcctggtacctgagcgcctcctccgcagagctgcagcagcagtggctggaaaccctaagcactgctgcccatggggacacggcccaggacagcccgggggccctgcagcttcaggtccctatgggcgcagctgctccgtgagctgagtctcccactgccctgcacaccaccacattggacctgtgctgtcctgggaggtggtgttggaggccccatgaagagcgccctggactgctgagggtgggccaacagcccagagctcaggacacttggctttggggggaaggaaactgaggcccagagaggggcaaccactggccaagggtcacccagcaagttttggctaagagcctggcctccagccccagcagtgtggcccagagcaggggccgactgccaaagtaaccatcatccatatgggccgtgtggtgatgctggcccggaaggcagaaagaggcagcatgggcactgccagggacagccacatcctgctggtctgcagcgtggtccaccccgcctctgcccagcctgtctacaccgtgtgagctgaatcgtgacttgcttcccacctcctttctctgtcctctcctgaggttctgcctgcagcccccaggaggtgggcctgccccatcctagctggactcatggttcctaaataaccacgctcagaagctctgctaggacttaccccagccactgagtggcaggcgcatgagatttgtggctgttcctgatgctagtggcacacagtgcttatctgcataaataaacactggccaccagcagtg

SEQ ID NO: 135650 - DNA, 4697 bp, Homo sapiens
  Payload ID: 6519
  Gene Symbol: FGD3
  Gene Name: FYVE, RhoGEF and PH domain containing 3
  Uniprot ID: Q5JSP0
  ENST ID: ENST00000467786
  CDS Start-End: 206-2110
ggctctactttgaacctgctgggcaaggaagagattttcaaggaaaccatctaccgtgtgcaagctcctgccggccaaccccagaccccagcacggagccaggcgcctgtgcccgccgaccctcagcatcctcctcagaaaggctggtggcatcaggaagcccctggccagcctccacctgagcccagtgagctcagctttaaggatggagtcaggcagggggtcctcaacccctccaggacccattgctgccctagggatgccagacactgggcctggcagttcctccctagggaagcttcaggcgctccctgttgggcccagagcccactgtggggaccctgtcagcctggctgcagcaggggacggctctccagacataggccccacgggagagctgagtggtagcttaaagatccccaaccgggacagcgggatcgacagtccctcctccagtgtggctggagagaactttccctgcgaggagggcttggaggctggcccaagccccactgtactgggggcgcacgcagagatggccctggacagccaggtcccgaaggtcaccccccaggaggaggcggacagcgacgtgggtgaggaacctgactctgagaacaccccccagaaggctgacaaggatgccggcctggcccagcactctggcccccagaagcttctccacattgcccaggagctcctgcacaccgaggagacctatgtgaagcggctgcacctgctggaccaggttttctgcaccaggctgacggatgcggggatccctccagaagtcatcatgggcatattctctaacatctcctccatccaccgcttccacgggcagttcctgctgccggagctgaagacgcggatcacggaggagtgggacacaaacccacggctcggggacatcctgcagaagctggccccattcctgaagatgtacggcgagtatgtcaagaactttgaccgagccgtagggctggtgagcacgtggacccagcgctccccactgtttaaagacgtcgtccacagcatccagaagcaggaggtatgcgggaacctgacgctgcagcaccacatgctggagcccgtgcagagggtcccccggtacgagctgctgctcaaggactatctgaagaggctcccgcaggacgccccagaccggaaggatgcggagaggtccttggagctcatctccacagccgccaaccactccaatgctgccattcggaaagtggagaaaatgcacaagctcttggaggtgtacgagcagctgggtggggaagaagacattgtcaacccggccaatgaactgatcaaggagggccaaatccagaaactgtcagccaagaacggcaccccccaggaccgccacctcttcctgttcaacagcatgatcctttactgtgtgcccaagctgcggctcatgggccagaagttcagcgtccgggagaagatggacatctcaggcctccaggtgcaggatatcgtcaagccaaacacagcacatacattcatcataacaggaagaaaaaggtccctggagctgcagacgcggacagaggaagagaagaaagaatggattcagatcatccaggccaccatcgagaagcacaaacagaacagcgaaaccttcaaggcttttggtggcgccttcagccaggatgaggaccccagcctctctccagacatgcctatcacgagcaccagccctgtggagcctgtggtgaccaccgaaggcagttcgggtgcagcagggctcgagcccagaaaactatcctctaagaccagacgtgacaaggagaagcagagctgtaagagctgtggtgagaccttcaactccatcaccaagaggaggcatcactgcaagctgtgtggggcggtcatctgtgggaagtgctccgagttcaaggccgagaacagccggcagagccgtgtctgcagagattgtttcctgacacagccagtggcccctgagagcacagaggtgggtgctcccagctcctgctcccctcctggtggcgcggcagagcctccagacacctgctcctgtgccccagcagctccagctgcctctgctttcggagtgtccctgggaccaggatagatgtgggtgtgtctcagtggggcccccaggctgggaacacactcggaagatcccgtgtgtgcacgctggcttctcgggaccagccagggccaaggcttgggaaccatttgcatccaggagttagatgggaacaagtgtcactcctggtcacctggttggagggcatggattgaagctgccctcaagtccaggccttgaggcccacctgaggggagatactgcccttctctctgcctgcctcacctccagctgtcagagggtgagcagggccctggaggcaggcaccccctcctcctcctccccgtccccttctcctcctcctccccgtccccttctcctcctcctccccgtccccttctcctcttcctctccctccttcctctccctccgcctcgctgtctttctccttctcctctccctcctcctcctgctccttctcctccccgtaccctttttctactcttccctctccttctcctcctcctttctctccctcctcctccccctccccttctcctcctctctttctcttcctcttttcctcctccactcctctttctgagagtagctgctgctttccctgacttccttcctcaagaatacagtctattctggggggttgcaggacagctgaaaaagaaaacgtgagtttccagaaaagcacatcgccctttctctccactcgacacagcctgcggtttgcagtgccagctgcacgttggagtctcctgggaagcttctagtgttgatctccctcctagaggctcagtgaggtgatcggggggtcagtgtgttttcagagtcccagctgctctgacttacagctgtggttggagccctgacctaggtccttggtctaagaagtcaaggatgtaagtctattaggactgagtgttgaatggtcttgatggtgaagaaggaccttgcactgcctaccgagctccctcatgcctgcaatttaaataccgaggtgtgttctgagagccccaggtccttggggcacgggcctccagggccctgtaaggtggactctggcctcgaaggggggcccaggtctgaggggtccagctctggcagggggtgtctaagccacgtccaaatggtggacagtagctccaacagtgacatgacagagggagggcctgtgtgtgtggtgtgtgtgtgtgtgctgtgtgtgcacgcacgtgcatgtatatggtgtgtgtagaactgacacgcttgaagtccctgtcccgtgacccaccctcaggtacttgctgttgggttttcctatgattttgatgtgtcctgacccagcatatggatgccctccccttggagggcccagcctgcaaaccccatctgataccacacatgcctatgtcctgcaggcttctagtgacccttgcaagccgggtgaggctggtcccagtctctgtgcagatcttggccatgtctccacagccagctccccccaagcagtggccctggccctaccccagcctcctcagaacaggggtgaccactgcaggggagactgcccctaacctgtgtctttgtgtccccagaagacacccactgcagacccccagcccagcctgctctgcggccccctgcggctgtcagagagcggtgagacctggagcgaggtgtgggccgccatccccatgtcagatccccaggtgctgcacctgcagggaggcagccaggacggccggctgccccgcaccatccctctccccagctgcaaactgagtgtgccggaccctgaggagaggctggactcggggcatgtgtggaagctgcagtgggccaagcagtcctggtacctgagcgcctcctccgcagagctgcagcagcagtggctggaaaccctaagcactgctgcccatggggacacggcccaggacagcccgggggccctgcagcttcaggtccctatgggcgcagctgctccgtgagctgagtctcccactgccctgcacaccaccacattggacctgtgctgtcctgggaggtggtgttggaggccccatgaagagcgccctggactgctgagggtgggccaacagcccagagctcaggacacttggctttggggggaaggaaactgaggcccagagaggggcaaccactggccaagggtcacccagcaagttttggctaagagcctggcctccagccccagcagtgtggcccagagcaggggccgactgccaaagtaaccatcatccatatgggccgtgtggtgatgctggcccggaaggcagaaagaggcagcatgggcactgccagggacagccacatcctgctggtctgcagcgtggtccaccccgcctctgcccagcctgtctacaccgtgtgagctgaatcgtgacttgcttcccacctcctttctctgtcctctcctgaggttctgcctgcagcccccaggaggtgggcctgccccatcctagctggactcatggttcctaaataaccacgctcagaagctctgctaggacttaccccagccactgagtggcaggcgcatgagatttgtggctgttcctgatgctagtggcacacagtgcttatctgcataaataaacactggccaccagcagtg

SEQ ID NO: 135651 - DNA, 2691 bp, Homo sapiens
  Payload ID: 6520
  Gene Symbol: FGD4
  Gene Name: FYVE, RhoGEF and PH domain containing 4
  ENST ID: ENST00000395740
  CDS Start-End: 415-1122
ctgggctgggaagtggggaaagcaggggagcctgtgctgggtgagattatctgcaatggaccgggttaatgggaggcttgctttggctcgctggaagaacaaatgaagggagttttacttcaaccatttgtgacttctggccaagaggaataaattcagcttttataaggcagcagtacctgtccaaagatcgctttagttccaccttgctccacaagcagcacaaccacactggttggtgagaatgtatctgaagaagaggctcagggaataaatgggaacaggccagcaaaacactcagctgcaagtccaaagccacaagtgcctccaaagccattacacctgcagaattcaccttcgtccaatatacaccaaacccccaggcataaagctttacctagtgcaaaaccaaggatggaggaaattaaacctgcctctgcttcttgtgtctcaaaagaaaaacccagtaaggtatcagatctcatcagtcgctttgaaggaggcagctcattatcaaattatagtgatttgaagaaagagtctgctgtgaacctaaatgctcctagaaccccaggaaggcatggattgacaaccacacctcaacaaaaactcctctcccagcacttgccacagaggcagggaaatgatacagataagactcagggtgcacagacttgtgtggccaacggtgtaatggcagcacaaaaccagatggaatgtgaggaggagaaagctgccactcttagctcagatacttctattcaagcttctgaacccttgcttgatacgcacatagtgaatggagaaagagatgaaactgccacagctcctgcatcacccacaacagacagctgtgatggaaatgcttctgacagtagctacaggactccaggcataggcccagtgctccccctagaagaaagaggggcagaaacagaaaccaaggtacaagagagggaaaatggggaaagccctctggaactggagcagctggaccagcaccatgagatgaaggagactaatgagcaaaaacttcacaaaatagccaatgaacttttgcttactgaaagagcttatgtcaaccgacttgacctcttagatcagaaaatagagtggaggtgaatttagaaaattaacaaccatctggacattatgaaggaatagacctccttctgcctacatgtaacagaatggcaattaagaggtattttattgcaaactgttggaagaagcaaaccgaggctcgtttccagcagagatggtgaataaaatcttttctaatatttcatcaataaatgccttccatagtaaattcctcttgccagagctggagaaacgaatgcaagaatgggaaactactcctagaattggagacatccttcagaaattggcaccattccttaagatgtatggagaatatgtgaaaggatttgataatgcaatggaattggttaaaaacatgacagaacgtattccccagttcaaatcagtggttgaagaaattcagaaacagaaaatctgtgggagcttaactttgcagcatcacatgctagaacctgttcagcggattccccggtatgagatgctccttaaggactatctaaggaaattgcctcctgattccctggactggaatgatgctaaaaaatcacttgaaattatatctacagcagcaagccattctaatagtgcaataaggaaaatggagaacctaaagaaactcttagagatttatgaaatgttgggagaagaagaagacattgtaaacccttcaaatgaactaataaaagaaggacagatcctcaaactagctgctcggaacacttcagcacaagaacgctaccttttcttattcaacaacatgttgctgtactgtgtgcccaaattcagcttggtaggctctaaattcacagttcgaaccagggttggcattgatggaatgaaaattgtagagactcaaaatgaagaatatccacatactttccaggtgtctgggaaagagagaacactggaactgcaggccagttctgcgcaagacaaagaagaatggatcaaggcccttcaagaaaccatcgatgcttttcatcaaaggcatgaaaccttcagaaatgcaattgcaaaggataatgacattcactcagaggtttctactgctgagctagggaaaagagccccaagatggatccgagataatgaagtgacaatgtgtatgaaatgtaaagaacctttcaatgcactgacacgaaggaggcatcattgtcgagcatgtggatatgtggtttgttggaaatgctccgactacaaagctcaacttgaatatgatggtggtaaattgagcaaagtttgtaaagactgttatcaaatcataagtggattcacagacagtgaagaaaagaaaagaaaaggaattttagagattgaatcagcagaagtatctggaaacagtgtggtgtgcagctttcttcagtatatggagaagtcaaaaccttggcagaaagcttggtgtgtgatccccaagcaagaccctcttgtgctgtacatgtatggtgccccccaggtatctaaaccacatctgtctgaagggacagatgcccttgggggcaaggggaagcgagtggacagcggactcaaaatctgtagaacaagagttcaggcagtttcactgtttcattaaaattgaaaaataatgag

SEQ ID NO: 135652 - DNA, 8242 bp, Homo sapiens
  Payload ID: 6520
  Gene Symbol: FGD4
  Gene Name: FYVE, RhoGEF and PH domain containing 4
  Uniprot ID: Q96M96
  ENST ID: ENST00000427716
  CDS Start-End: 425-2725
attatccttgctgggctgggaagtggggaaagcaggggagcctgtgctgggtgagattatctgcaatggaccgggttaatgggaggcttgctttggctcgctggaagaacaaatgaagggagttttacttcaaccatttgtgacttctggccaagaggaataaattcagcttttataaggcagcagtacctgtccaaagatcgctttagttccaccttgctccacaagcagcacaaccacactggttggtgagaatgtatctgaagaagaggctcagggaataaatgggaacaggccagcaaaacactcagctgcaagtccaaagccacaagtgcctccaaagccattacacctgcagaattcaccttcgtccaatatacaccaaacccccaggcataaagctttacctagtgcaaaaccaaggatggaggaaattaaacctgcctctgcttcttgtgtctcaaaagaaaaacccagtaaggtatcagatctcatcagtcgctttgaaggaggcagctcattatcaaattatagtgatttgaagaaagagtctgctgtgaacctaaatgctcctagaaccccaggaaggcatggattgacaaccacacctcaacaaaaactcctctcccagcacttgccacagaggcagggaaatgatacagataagactcagggtgcacagacttgtgtggccaacggtgtaatggcagcacaaaaccagatggaatgtgaggaggagaaagctgccactcttagctcagatacttctattcaagcttctgaacccttgcttgatacgcacatagtgaatggagaaagagatgaaactgccacagctcctgcatcacccacaacagacagctgtgatggaaatgcttctgacagtagctacaggactccaggcataggcccagtgctccccctagaagaaagaggggcagaaacagaaaccaaggtacaagagagggaaaatggggaaagccctctggaactggagcagctggaccagcaccatgagatgaaggagactaatgagcaaaaacttcacaaaatagccaatgaacttttgcttactgaaagagcttatgtcaaccgacttgacctcttagatcaggtattttattgcaaactgttggaagaagcaaaccgaggctcgtttccagcagagatggtgaataaaatcttttctaatatttcatcaataaatgccttccatagtaaattcctcttgccagagctggagaaacgaatgcaagaatgggaaactactcctagaattggagacatccttcagaaattggcaccattccttaagatgtatggagaatatgtgaaaggatttgataatgcaatggaattggttaaaaacatgacagaacgtattccccagttcaaatcagtggttgaagaaattcagaaacagaaaatctgtgggagcttaactttgcagcatcacatgctagaacctgttcagcggattccccggtatgagatgctccttaaggactatctaaggaaattgcctcctgattccctggactggaatgatgctaaaaaatcacttgaaattatatctacagcagcaagccattctaatagtgcaataaggaaaatggagaacctaaagaaactcttagagatttatgaaatgttgggagaagaagaagacattgtaaacccttcaaatgaactaataaaagaaggacagatcctcaaactagctgctcggaacacttcagcacaagaacgctaccttttcttattcaacaacatgttgctgtactgtgtgcccaaattcagcttggtaggctctaaattcacagttcgaaccagggttggcattgatggaatgaaaattgtagagactcaaaatgaagaatatccacatactttccaggtgtctgggaaagagagaacactggaactgcaggccagttctgcgcaagacaaagaagaatggatcaaggcccttcaagaaaccatcgatgcttttcatcaaaggcatgaaaccttcagaaatgcaattgcaaaggataatgacattcactcagaggtttctactgctgagctagggaaaagagccccaagatggatccgagataatgaagtgacaatgtgtatgaaatgtaaagaacctttcaatgcactgacacgaaggaggcatcattgtcgagcatgtggatatgtggtttgttggaaatgctccgactacaaagctcaacttgaatatgatggtggtaaattgagcaaagtttgtaaagactgttatcaaatcataagtggattcacagacagtgaagaaaagaaaagaaaaggaattttagagattgaatcagcagaagtatctggaaacagtgtggtgtgcagctttcttcagtatatggagaagtcaaaaccttggcagaaagcttggtgtgtgatccccaagcaagaccctcttgtgctgtacatgtatggtgccccccaggacgtcagagcccaggccaccattccacttctgggctatgtggtggatgaaatgccaaggagcgcagacctgccacacagtttcaaactgacccagtctaagtccgtgcacagctttgctgcagacagtgaggaactgaagcagaagtggctgaaagtcatccttttagctgtcacaggtgagacaccaggtggtccaaatgagcatccagccaccttggatgatcatcctgaacctaagaaaaaatcagaatgctgaactcctccaggaccagccatggtgtggaggtctcaggacttacagctcaagacattcccagctcttcttacacatctgctagcactttatgttgaaaaatataggcccataaatgcatcttttgaggactattttcctatgtttatgtactcttagtgaaattagtgtgcagagtcattctaccgataaagttttgaaataatgtgaaaactggagcattttttgagctattccttgaatatgtgcttttttgtcttgaagaaatggtgtatcaattgattctgtcaccgtcaggttagaatgagcacttccatttaagaaatcctttcatgtcttcttctctttcacatgtaggacctggaacagtttgaaagatatacctccatgttgccaaaatagatccatggtgaaaaatacagggacagttgaggctattgtattaacttatttaatttagtttataaatctctagctgcataaatgatgtctgttcttttaaaacaaaagaaaaaggacaaattgttggtgttcagatttccgatttataaagaaaagataacttgtttttgtagaaatactcctaagaatgtcttaagtatatagcaattatgtatatatagtattaaatatatatattatacatgcttttaggttcacattcatctctaatttattttttaaatataaagcatggtttatcgtggaattgagcaatgttctaaactgaagaaatgttttggtgatttatgttttgctgattggcatttgagggtattgatatttttataataagcggtaatttatgtggcatgggatatatttgtgaattccaacagtacttttaaagtaccattttttgtttctgtgcctatttaaaacagtgcctctcttagaaggtgctattaatataagatgagggttcagttaatgcttcagtcttgattattctaagattaaagtgcattttggtcactgggacagtcaaagtcatacaggttattttaccgtttacaatcctataattattgcagtagttaacatcagcatgtacaaacattttcaccaaaacccaaactttatgagacacctgaccttttacagaactaggatatgtggaaaccacatttatcgtaatgtttttcttttccgtaagataatcgagcatggttaaataaggtctctatataatgaacacttaagataactgtatgggccttttcctttgtcggaatgaaacaaaatccacatgtgataacctatgtttggggtgggggctggtcacatgattccttgtcatgaaggctgctcttcactcttttgtacttgtgattaaaatctcacactaagtttactatttaacttaatcctttttctcaaattaaacctttttttatactgtcataccccaaacattgtcactttttaatgtaccagtctgctagaaatctacaagaatgatcccactatctttagtatgtaaggattacaccttagatatagaatagaatttgagactgccacacatttattcaggccttgttactttaagaaatatcttattttttccaccccaaaggagcaagtgaaccaattattgctgacataataggttcccttcctccataaaaggattatcagccatgatcattaacattaaaccaaatagatggagccaaaaagagataaaagtagcttcttaggccctattaaatcagggaaagactagaagaaaatttacattgcttctcttttttaatggccagcggggtatgtgtgtgatgtatactcagagtggttttttggaaaattaaactgtagctatagatgatgctttggttttcttaatctcaagaaaagagaagcaatggaaatacagaatgattaactggggaagaggacttttgtaagtgtgactagaacaatggtaatgtatgggccaatgggaagatttataagtcagattatttttgaaaactatttttaaaagcaagaagactacactttccctaccaaaacagaagtaacatggacacacttaagttttggctcaataaatatcaatgttatttaacttagatcattgaaagaatactcatgtaaagataatgtttattatcatgctcttaacagtcattatctttaattttttaaatgagaagcattaatactagaagagaatttctggttatccggtcaccatattcactttccaccccacattcttcagctaaacgcaaagagaagcagtgaaacagccttacccgcttctctcttattaaagaatcactgatgtttttactcaatgaaaggtaaagtaatacccttagccatttattaaacaattcaaccaagagacctcaaagtgtgattgatgataagaataatcaatgccttttcccttccaacatacttgagcagtcatgacaacctaaaaatatcattggttgctttcccattaaaaccaacgttccctgtgggtcttaattctttattttcactcatttggtgctttccaagtcatcttttctttaaagtgcccttcctccaaactttaaaaagtacttccttgacaaaatttctattcattataaaacatttcaatattttaagcttaaattttgcttttgctgaaagcctaccatttggcgtgttaagtatgaaatatagtgcagacttttatcttggttttaagtggggctcaataaaaaacaccagccacttttgtaataatggcatcacagtgtcatcatgtatgcaagcaataaaactctttagggtatggttttatactgaaaatttaatatgaaggccccttcccacaagaatatagataattattaactttctagatgtgatacggtaattcgaattgcagagtataaggaagggaaatgggaaggggcatcattccttggattttaaataactatcaagaacatttttactttaacaaagaaaatggatagaaaaagcacattttgttttccctgaagtttaatttgacatcaggtttgtgtacttatcttcactaggtgacttaacttaccccaatttttttaaaaattattaaactttttacagaaactaaccttttaaatgtaccctttccccatatatatatacgcacacgtttggattttttttttttaagaacacttgttctagttataaatatataaagaaaacgataaagtttgtggtactgcagggttgttaaagattctttgatgccttctaaaaacttttgtcaaaaatacttttgagttcacaattctgttttacttttccttgtccttactttttggaaacagggtggttgcttttatttgttttctggttatattcaaagccttaagttcttaatctgagcatattgtctgtgataaatttctgatgatctttctggactagatacaacctgagtagcaagcaccaaccggagcaagtaaacttctagggaacaagcgtcttgggttttataggtatctttgctataatgcagaatagattaatgaagatttcctatatcatatgatatttgtgttagtgggtctaagattaagcacatgatatttataagctaaaattaactcaaaagtcaagaatgtcttaatgttttcattcttaaattttgtattctccaagaatgtattagtatatgaactgtggccaaccagttcctattcttcagactgtattgacatctgtagtggatcatgttgcttcttcattcttaccaattttattagaatcaaacttcttgttatttgcatactattatctactatagattctcagctttagaaaatgactatgatacataaagaccactaggtcaacttaaaaaaccctttctgtgaatttatacatgtatgtatatatgtaaaaacactgttgatttgcaattctgtctttccatagaaatgaactttttctatcgaaattgtttaacttaaatattttaacataaattatttacatggatctttatgtataattcatccttatatataccccttaatcacgtagtcatgagaagataactttgctttctttacagaaagggcagagaggaataagataagaaactgaaacaagcaagaatgaagagagatgtgggggagagactgctggtctccagaccacagcaatgtgttttaagataagatgaaatattttaactgcagaagggatataaaatctatgtaattacatgctgatgggatccattgcacccaggtttttgaccttggcctgtaaatgctagactatgatatcttgttattctttttctcctttgggcttttaaaaaataatttcattctcagatcattttctgtactgtttactgaggcaaaaaaaaaaaaaatctgaagtcaatcatggtcttctactttctggactgagcatttggcagaatgcagtatcttttcctgtattttgacatgaaatagcacatggcttctacaagatagttttaacttgttggggtcaccgggagttatatgatggtcaaccccttttcccaaaattcattgtggtagttttagtggaaaacgtaaatcaagaaatctcatatcatactttaataaataaataccaaatacatagtgacatataggtttgggaagaaactagtctgtggggaccattataagagaatcacattatatattacacagtatatggatattggaatgtatcacttgtggggggttctcttcattagcaaaacagtcatgtctgtctgtatataagacttttttttttttaaccaaactagcatttcattttgtgagtgacaattgacattttaaaataagcataggccgggcatagtggctcatgcctgtaatcccagcccttgggaggccgaggtgggcagatcacttcaggtcaggagtttgagaccagcctggccaacatggtgaaaccctgtctctactaaataaaaataaaacaaaataagtgtatctgggccaggcacggtagcccatgcctgtaatcccagcactttgggaggccgaggagttcgagaccagcctggccaacatggcaaaaccctgtctctacaaaaattagccaggtgtggtggcacatgcctgtaatcccagctactcgggaggttgaggcaggagaattgcttgaacccgggagacagaggttgcagtgagccgagattgcaccactgcactccggcctgggtgacagagcaagacttcgactcaaaaaataaaataagcgtatctggatttttcttttgaattcttgactgataagtttgagaatgtatgtttttggaattttacagttgactcaagtgtgaaagtatacacaagtaatttttcttttctagctatgtgaatgtaaaatacttgcagataatgtatatattgtgtaatatatgtatatttggtcataaaagcagataattggaaacattgtaaaattaagcactttaattcctattaaatattaaacatttgtatcttgtaaataaacacatccttaaattaa

SEQ ID NO: 135653 - DNA, 2924 bp, Homo sapiens
  Payload ID: 6520
  Gene Symbol: FGD4
  Gene Name: FYVE, RhoGEF and PH domain containing 4
  ENST ID: ENST00000531134
  CDS Start-End: 163-2718
agttagttctttatcatgttgaacactagatgtgtatgtgtctagtgtctaaatacagaatgcctatagtttctaccaacaaattatggatccaaatccttgctccagaagcaggaaataggttaatcagaagattgctggatgttatgaaaagaatcttttatggggggctgcagcagtacctgtccaaagatcgctttagttccaccttgctccacaagcagcacaaccacactggttggtgagaatgtatctgaagaagaggctcagggaataaatgggaacaggccagcaaaacactcagctgcaagtccaaagccacaagtgcctccaaagccattacacctgcagaattcaccttcgtccaatatacaccaaacccccaggcataaagctttacctagtgcaaaaccaaggatggaggaaattaaacctgcctctgcttcttgtgtctcaaaagaaaaacccagtaaggtatcagatctcatcagtcgctttgaaggaggcagctcattatcaaattatagtgatttgaagaaagagtctgctgtgaacctaaatgctcctagaaccccaggaaggcatggattgacaaccacacctcaacaaaaactcctctcccagcacttgccacagaggcagggaaatgatacagataagactcagggtgcacagacttgtgtggccaacggtgtaatggcagcacaaaaccagatggaatgtgaggaggagaaagctgccactcttagctcagatacttctattcaagcttctgaacccttgcttgatacgcacatagtgaatggagaaagagatgaaactgccacagctcctgcatcacccacaacagacagctgtgatggaaatgcttctgacagtagctacaggactccaggcataggcccagtgctccccctagaagaaagaggggcagaaacagaaaccaaggtacaagagagggaaaatggggaaagccctctggaactggagcagctggaccagcaccatgagatgaaggagactaatgagcaaaaacttcacaaaatagccaatgaacttttgcttactgaaagagcttatgtcaaccgacttgacctcttagatcaggtattttattgcaaactgttggaagaagcaaaccgaggctcgtttccagcagagatggtgaataaaatcttttctaatatttcatcaataaatgccttccatagtaaattcctcttgccagagctggagaaacgaatgcaagaatgggaaactactcctagaattggagacatccttcagaaattggcaccattccttaagatgtatggagaatatgtgaaaggatttgataatgcaatggaattggttaaaaacatgacagaacgtattccccagttcaaatcagtggttgaagaaattcagaaacagaaaatctgtgggagcttaactttgcagcatcacatgctagaacctgttcagcggattccccggtatgagatgctccttaaggactatctaaggaaattgcctcctgattccctggactggaatgatgctaaaaaatcacttgaaattatatctacagcagcaagccattctaatagtgcaataaggaaaatggagaacctaaagaaactcttagagatttatgaaatgttgggagaagaagaagacattgtaaacccttcaaatgaactaataaaagaaggacagatcctcaaactagctgctcggaacacttcagcacaagaacgctaccttttcttattcaacaacatgttgctgtactgtgtgcccaaattcagcttggtaggctctaaattcacagttcgaaccagggttggcattgatggaatgaaaattgtagagactcaaaatgaagaatatccacatactttccaggtgtctgggaaagagagaacactggaactgcaggccagttctgcgcaagacaaagaagaatggatcaaggcccttcaagaaaccatcgatgcttttcatcaaaggcatgaaaccttcagaaatgcaattgcaaaggataatgacattcactcagaggtttctactgctgagctagggaaaagagccccaagatggatccgagataatgaagtgacaatgtgtatgaaatgtaaagaacctttcaatgcactgacacgaaggaggcatcattgtcgagcatgtggatatgtggtttgttggaaatgctccgactacaaagctcaacttgaatatgatggtggtaaattgagcaaagtttgtaaagactgttatcaaatcataagtggattcacagacagtgaagaaaagaaaagaaaaggaattttagagattgaatcagcagaagtatctggaaacagtgtggtgtgcagctttcttcagtatatggagaagtcaaaaccttggcagaaagcttggtgtgtgatccccaagcaagaccctcttgtgctgtacatgtatggtgccccccaggacgtcagagcccaggccaccattccacttctgggctatgtggtggatgaaatgccaaggagcgcagacctgccacacagtttcaaactgacccagtctaagtccgtgcacagctttgctgcagacagtgaggaactgaagcagaagtggctgaaagtcatccttttagctgtcacaggtgagacaccaggtggtccaaatgagcatccagccaccttggatgatcatcctgaacctaagaaaaaatcagaatgctgaactcctccaggaccagccatggtgtggaggtctcaggacttacagctcaagacattcccagctcttcttacacatctgctagcactttatgttgaaaaatataggcccataaatgcatcttttgaggactattttcctatgtttatgtactcttagtgaaattagtgtgcagagtcattctaccgataaagttttgaaataatgtg

SEQ ID NO: 135654 - DNA, 2925 bp, Homo sapiens
  Payload ID: 6520
  Gene Symbol: FGD4
  Gene Name: FYVE, RhoGEF and PH domain containing 4
  ENST ID: ENST00000525053
  CDS Start-End: 85-2721
agtgcattggtctgagctcctggcagatcctgtgtaatcttcagcctccctgaagctttacagccaggagtgagattttatcacatgaactttaaaagagtaaagccaaatatctttttattaaaccagagtagattaattatcagtatatgtgaaatcatgtccactgatcaaggcagcagtacctgtccaaagatcgctttagttccaccttgctccacaagcagcacaaccacactggttggtgagaatgtatctgaagaagaggctcagggaataaatgggaacaggccagcaaaacactcagctgcaagtccaaagccacaagtgcctccaaagccattacacctgcagaattcaccttcgtccaatatacaccaaacccccaggcataaagctttacctagtgcaaaaccaaggatggaggaaattaaacctgcctctgcttcttgtgtctcaaaagaaaaacccagtaaggtatcagatctcatcagtcgctttgaaggaggcagctcattatcaaattatagtgatttgaagaaagagtctgctgtgaacctaaatgctcctagaaccccaggaaggcatggattgacaaccacacctcaacaaaaactcctctcccagcacttgccacagaggcagggaaatgatacagataagactcagggtgcacagacttgtgtggccaacggtgtaatggcagcacaaaaccagatggaatgtgaggaggagaaagctgccactcttagctcagatacttctattcaagcttctgaacccttgcttgatacgcacatagtgaatggagaaagagatgaaactgccacagctcctgcatcacccacaacagacagctgtgatggaaatgcttctgacagtagctacaggactccaggcataggcccagtgctccccctagaagaaagaggggcagaaacagaaaccaaggtacaagagagggaaaatggggaaagccctctggaactggagcagctggaccagcaccatgagatgaaggagactaatgagcaaaaacttcacaaaatagccaatgaacttttgcttactgaaagagcttatgtcaaccgacttgacctcttagatcaggtattttattgcaaactgttggaagaagcaaaccgaggctcgtttccagcagagatggtgaataaaatcttttctaatatttcatcaataaatgccttccatagtaaattcctcttgccagagctggagaaacgaatgcaagaatgggaaactactcctagaattggagacatccttcagaaattggcaccattccttaagatgtatggagaatatgtgaaaggatttgataatgcaatggaattggttaaaaacatgacagaacgtattccccagttcaaatcagtggttgaagaaattcagaaacagaaaatctgtgggagcttaactttgcagcatcacatgctagaacctgttcagcggattccccggtatgagatgctccttaaggactatctaaggaaattgcctcctgattccctggactggaatgatgctaaaaaatcacttgaaattatatctacagcagcaagccattctaatagtgcaataaggaaaatggagaacctaaagaaactcttagagatttatgaaatgttgggagaagaagaagacattgtaaacccttcaaatgaactaataaaagaaggacagatcctcaaactagctgctcggaacacttcagcacaagaacgctaccttttcttattcaacaacatgttgctgtactgtgtgcccaaattcagcttggtaggctctaaattcacagttcgaaccagggttggcattgatggaatgaaaattgtagagactcaaaatgaagaatatccacatactttccaggtgtctgggaaagagagaacactggaactgcaggccagttctgcgcaagacaaagaagaatggatcaaggcccttcaagaaaccatcgatgcttttcatcaaaggcatgaaaccttcagaaatgcaattgcaaaggataatgacattcactcagaggtttctactgctgagctagggaaaagagccccaagatggatccgagataatgaagtgacaatgtgtatgaaatgtaaagaacctttcaatgcactgacacgaaggaggcatcattgtcgagcatgtggatatgtggtttgttggaaatgctccgactacaaagctcaacttgaatatgatggtggtaaattgagcaaagtttgtaaagactgttatcaaatcataagtggattcacagacagtgaagaaaagaaaagaaaaggaattttagagattgaatcagcagaagtatctggaaacagtgtggtgtgcagctttcttcagtatatggagaagtcaaaaccttggcagaaagcttggtgtgtgatccccaagcaagaccctcttgtgctgtacatgtatggtgccccccaggacgtcagagcccaggccaccattccacttctgggctatgtggtggatgaaatgccaaggagcgcagacctgccacacagtttcaaactgacccagtctaagtccgtgcacagctttgctgcagacagtgaggaactgaagcagaagtggctgaaagtcatccttttagctgtcacaggtgagacaccaggtggtccaaatgagcatccagccaccttggatgatcatcctgaacctaagaaaaaatcagaatgctgaactcctccaggaccagccatggtgtggaggtctcaggacttacagctcaagacattcccagctcttcttacacatctgctagcactttatgttgaaaaatataggcccataaatgcatcttttgaggactattttcctatgtttatgtactcttagtgaaattagtgtgcagagtcattctaccgataaagttttgaaataatg

SEQ ID NO: 135655 - DNA, 2349 bp, Homo sapiens
  Payload ID: 6520
  Gene Symbol: FGD4
  Gene Name: FYVE, RhoGEF and PH domain containing 4
  ENST ID: ENST00000494977
  CDS Start-End: 1-197
gggcagaaacagaaaccaaggtacaagagagggaaaatggggaaagccctctggaactggagcagctggaccagcaccatgagatgaaggagactaatgagcaaaaacttcacaaaatagccaatgaacttttgcttactgaaagagcttatgtcaaccgacttgacctcttagatcagaaaatagagtggaggtgaatttagaaaattaacaaccatctggacattatgaaggaatagacctccttctgcctacatgtaacagaatggcaattaagaggtattttattgcaaactgttggaagaagcaaaccgaggctcgtttccagcagagatggtgaataaaatcttttctaatatttcatcaataaatgccttccatagtaaattcctcttgccagagctggagaaacgaatgcaagaatgggaaactactcctagaattggagacatccttcagaaattggcaccattccttaagatgtatggagaatatgtgaaaggatttgataatgcaatggaattggttaaaaacatgacagaacgtattccccagttcaaatcagtggttgaagaaattcagaaacagaaaatctgtgggagcttaactttgcagcatcacatgctagaacctgttcagcggattccccggtatgagatgctccttaaggactatctaaggaaattgcctcctgattccctggactggaatgatgctaaaaaatcacttgaaattatatctacagcagcaagccattctaatagtgcaataaggaaaatggagaacctaaagaaactcttagagatttatgaaatgttgggagaagaagaagacattgtaaacccttcaaatgaactaataaaagaaggacagatcctcaaactagctgctcggaacacttcagcacaagaacgctaccttttcttattcaacaacatgttgctgtactgtgtgcccaaattcagcttggtaggctctaaattcacagttcgaaccagggttggcattgatggaatgaaaattgtagagactcaaaatgaagaatatccacatactttccaggtgtctgggaaagagagaacactggaactgcaggccagttctgcgcaagacaaagaagaatggatcaagagacgaggttttgccatgctgcccaggctgatctcgaactcctgagctcaagcgatctgcctgcctcggtctcccaaagtgctgggattacaggcccttcaagaaaccatcgatgcttttcatcaaaggcatgaaaccttcagaaatgcaattgcaaaggataatgacattcactcagaggtttctactgctgagctagggaaaagagccccaagatggatccgagataatgaagtgacaatgtgtatgaaatgtaaagaacctttcaatgcactgacacgaaggaggcatcattgtcgagcatgtggatatgtggtttgttggaaatgctccgactacaaagctcaacttgaatatgatggtggtaaattgagcaaagtttgtaaagactgttatcaaatcataagtggattcacagacagtgaagaaaagaaaagaaaaggaattttagagttccgcatggctggggaggcctcagaaaacgtacaatcatggcagaaggggaagaggcacatcttacatggtggcaagcgagagtgagcaagtgtatgaaggaagaactgtcagacacttacaaaaccatcagatctcatgagaactcacgatcacgagaacagcatgggggacactgcccccatgatccagttacctcctatcagattgaatcagcagaagtatctggaaacagtgtggtgtgcagctttcttcagtatatggagaagtcaaaaccttggcagaaagcttggtgtgtgatccccaagcaagaccctcttgtgctgtacatgtatggtgccccccaggacgtcagagcccaggccaccattccacttctgggctatgtggtggatgaaatgccaaggagcgcagacctgccacacagtttcaaactgacccagtctaagtccgtgcacagctttgctgcagacagtgaggaactgaagcagaagtggctgaaagtcatccttttagctgtcacagctaaacgcaaagagaagcagtgaaacagccttacccgcttctctcttattaaagaatcactgatgtttttactcaatgaaagaaagggcagagaggaataagataagaaactgaaacaagcaagaatgaagagagatgtgggggagagactgctggtctccagaccacagcaatgtgttttaagataagatgaaatattttaactgcagaagggatataaaatctatgtaattacatgct

SEQ ID NO: 135656 - DNA, 1629 bp, Homo sapiens
  Payload ID: 6520
  Gene Symbol: FGD4
  Gene Name: FYVE, RhoGEF and PH domain containing 4
  ENST ID: ENST00000472289
  CDS Start-End: 542-1165
ggagcacaaagacagcgattgttacccaataagcagtagtcacacacttctaccaatcgccttaggagggctggttaccatggaatccaccatctgttcactccccaccggaatgtgattatccttgctgggctgggaagtggggaaagcaggggagcctgtgctgggtgagattatctgcaatggaccgggttaatgggaggcttgctttggctcgctggaagaacaaatgaagggagttttacttcaaccatttgtgacttctggccaagaggaataaattcagcttttataaggcagcagtacctgtccaaagatcgctttagttccaccttgctccacaagcagcacaaccacactggttggtgagaatgtatctgaagaagaggctcagggaataaatgggaacaggccagcaaaacactcagctgcaagtccaaagccacaagtgcctccaaagccattacacctgcagaattcaccttcgtccaatatacaccaaacccccaggcataaagctttacctagtgcaaaaccaaggatggaggaaattaaacctgcctctgcttcttgtgtctcaaaagaaaaacccagtaaggtatcagatctcatcagtcgctttgaaggaggcagctcattatcaaattatagtgatttgaagaaagagtctgctgtgaacctaaatgctcctagaaccccaggaaggcatggattgacaaccacacctcaacaaaaactcctctcccagcacttgccacagaggcagggaaatgatacagataagactcagggtgcacagacttgtgtggccaacggtgtaatggcagcacaaaaccagatggaatgtgaggaggagaaagctgccactcttagctcagatacttctattcaagcttctgaacccttgcttgatacgcacatagtgaatggagaaagagatgaaactgccacagctcctgcatcacccacaacagacagctgtgatggaaatgcttctgacagtagctacaggactccaggcataggcccagtgctccccctagaagaaagaggggcagaaacagaaaccaaggtacaagagagggaaaatggggaaagccctctggaactggagcagctggaccagcaccatgagatgaaggtagagcatgagactagctcatgagcagggaaaaccctgcctattcgattgttgtcttaaaactctttatttattgcacccctgaaatgtatgaatcagatcacccacactggcagttaaacgattttcaagctctggctgctgattagcatttcccctatgctctaagcagatatttcactttttcttttcatgtagtttctgttaatatctctgttgtaatttcaggagtcagaacagtgtggaaactttaatataggaaatccacaaatgtattgtttttacatagaaagaaaatgttccttgttgctctagatgttggtgctgtatccctaatacttacgggccaagcaagaagaaattgtataatctttgttgttcagaagtttctaatagaataaataggcctgtaagatgaacttgccactagtaaatgttacttttaaggacatgaatatggaagtattaaattattcaacagattataa

SEQ ID NO: 135657 - DNA, 2987 bp, Homo sapiens
  Payload ID: 6520
  Gene Symbol: FGD4
  Gene Name: FYVE, RhoGEF and PH domain containing 4
  ENST ID: ENST00000493087
  CDS Start-End: 451-1158
atctgttcactccccaccggaatgtgattatccttgctgggctgggaagtggggaaagcaggggagcctgtgctgggtgagattatctgcaatggaccgggttaatgggaggcttgctttggctcgctggaagaacaaatgaagggagttttacttcaaccatttgtgacttctggccaagaggaataaattcagcttttataaggcagcagtacctgtccaaagatcgctttagttccaccttgctccacaagcagcacaaccacactggttggtgagaatgtatctgaagaagaggctcagggaataaatgggaacaggccagcaaaacactcagctgcaagtccaaagccacaagtgcctccaaagccattacacctgcagaattcaccttcgtccaatatacaccaaacccccaggcataaagctttacctagtgcaaaaccaaggatggaggaaattaaacctgcctctgcttcttgtgtctcaaaagaaaaacccagtaaggtatcagatctcatcagtcgctttgaaggaggcagctcattatcaaattatagtgatttgaagaaagagtctgctgtgaacctaaatgctcctagaaccccaggaaggcatggattgacaaccacacctcaacaaaaactcctctcccagcacttgccacagaggcagggaaatgatacagataagactcagggtgcacagacttgtgtggccaacggtgtaatggcagcacaaaaccagatggaatgtgaggaggagaaagctgccactcttagctcagatacttctattcaagcttctgaacccttgcttgatacgcacatagtgaatggagaaagagatgaaactgccacagctcctgcatcacccacaacagacagctgtgatggaaatgcttctgacagtagctacaggactccaggcataggcccagtgctccccctagaagaaagaggggcagaaacagaaaccaaggtacaagagagggaaaatggggaaagccctctggaactggagcagctggaccagcaccatgagatgaaggagactaatgagcaaaaacttcacaaaatagccaatgaacttttgcttactgaaagagcttatgtcaaccgacttgacctcttagatcagaaaatagagtggaggtgaatttagaaaattaacaaccatctggacattatgaaggaatagacctccttctgcctacatgtaacagaatggcaattaagaggtattttattgcaaactgttggaagaagcaaaccgaggctcgtttccagcagagatggtgaataaaatcttttctaatatttcatcaataaatgccttccatagtaaattcctcttgccagagctggagaaacgaatgcaagaatgggaaactactcctagaattggagacatccttcagaaattggcaccattccttaagatgtatggagaatatgtgaaaggatttgataatgcaatggaattggttaaaaacatgacagaacgtattccccagttcaaatcagtggttgaagaaattcagaaaacctttctcattacagaaacagaaaatctgtgggagcttaactttgcagcatcacatgctagaacctgttcagcggattccccggtatgagatgctccttaaggactatctaaggaaattgcctcctgattccctggactggaatgatgctaaaaaatcacttgaaattatatctacagcagcaagccattctaatagtgcaataaggaaaatggagaacctaaagaaactcttagagatttatgaaatgttgggagaagaagaagacattgtaaacccttcaaatgaactaataaaagaaggacagatcctcaaactagctgctcggaacacttcagcacaagaacgctaccttttcttattcaacaacatgttgctgtactgtgtgcccaaattcagcttggtaggctctaaattcacagttcgaaccagggttggcattgatggaatgaaaattgtagagactcaaaatgaagaatatccacatactttccaggtgtctgggaaagagagaacactggaactgcaggccagttctgcgcaagacaaagaagaatggatcaaggcccttcaagaaaccatcgatgcttttcatcaaaggcatgaaaccttcagaaatgcaattgcaaaggataatgacattcactcagaggtttctactgctgagctagggaaaagagccccaagatggatccgagataatgaagtgacaatgtgtatgaaatgtaaagaacctttcaatgcactgacacgaaggaggcatcattgtcgagcatgtggatatgtggtttgttggaaatgctccgactacaaagctcaacttgaatatgatggtggtaaattgagcaaagtttgtaaagactgttatcaaatcataagtggattcacagacagtgaagaaaagaaaagaaaaggaattttagagattgaatcagcagaagtatctggaaacagtgtggtgtgcagctttcttcagtatatggagaagtcaaaaccttggcagaaagcttggtgtgtgatccccaagcaagaccctcttgtgctgtacatgtatggtgccccccaggacgtcagagcccaggccaccattccacttctgggctatgtggtggatgaaatgccaaggagcgcagacctgccacacagtttcaaactgacccagtctaagtccgtgcacagctttgctgcagacagtgaggaactgaagcagaagtggctgaaagtcatccttttagctgtcacaggtgagacaccaggtggtccaaatgagcatccagccaccttggatgatcatcctgaacctaagaaaaaatcagaatgctgaactcctccaggaccagccatggtgtggaggtctcaggacttacagctcaagacattcccagctcttcttacacatctgctagcactttatgttgaaaaatataggcccataaatgca

SEQ ID NO: 135658 - DNA, 3503 bp, Homo sapiens
  Payload ID: 6520
  Gene Symbol: FGD4
  Gene Name: FYVE, RhoGEF and PH domain containing 4
  ENST ID: ENST00000546442
  CDS Start-End: 496-2517
ggggaaagcaggggagcctgtgctgggtgagattatctgcaatggaccgggttaatgggaggcttgctttggctcgctggaagaacaaatgaagggagttttacttcaaccatttgtgacttctggccaagaggaataaattcagcttttataaggcagcagtacctgtccaaagatcgctttagttccaccttgctccacaagcagcacaaccacactggttggtgagaatgtatctgaagaagaggctcagggaataaatgggaacaggccagcaaaacactcagctgcaagtccaaagccacaagctcattatcaaattatagtgatttgaagaaagagtctgctgtgaacctaaatgctcctagaaccccaggaaggcatggattgacaaccacacctcaacaaaaactcctctcccagcacttgccacagaggcagggaaatgatacagataagactcagggtgcacagacttgtgtggccaacggtgtaatggcagcacaaaaccagatggaatgtgaggaggagaaagctgccactcttagctcagatacttctattcaagcttctgaacccttgcttgatacgcacatagtgaatggagaaagagatgaaactgccacagctcctgcatcacccacaacagacagctgtgatggaaatgcttctgacagtagctacaggactccaggcataggcccagtgctccccctagaagaaagaggggcagaaacagaaaccaaggtacaagagagggaaaatggggaaagccctctggaactggagcagctggaccagcaccatgagatgaaggagactaatgagcaaaaacttcacaaaatagccaatgaacttttgcttactgaaagagcttatgtcaaccgacttgacctcttagatcaggtattttattgcaaactgttggaagaagcaaaccgaggctcgtttccagcagagatggtgaataaaatcttttctaatatttcatcaataaatgccttccatagtaaattcctcttgccagagctggagaaacgaatgcaagaatgggaaactactcctagaattggagacatccttcagaaattggcaccattccttaagatgtatggagaatatgtgaaaggatttgataatgcaatggaattggttaaaaacatgacagaacgtattccccagttcaaatcagtggttgaagaaattcagaaacagaaaatctgtgggagcttaactttgcagcatcacatgctagaacctgttcagcggattccccggtatgagatgctccttaaggactatctaaggaaattgcctcctgattccctggactggaatgatgctaaaaaatcacttgaaattatatctacagcagcaagccattctaatagtgcaataaggaaaatggagaacctaaagaaactcttagagatttatgaaatgttgggagaagaagaagacattgtaaacccttcaaatgaactaataaaagaaggacagatcctcaaactagctgctcggaacacttcagcacaagaacgctaccttttcttattcaacaacatgttgctgtactgtgtgcccaaattcagcttggtaggctctaaattcacagttcgaaccagggttggcattgatggaatgaaaattgtagagactcaaaatgaagaatatccacatactttccaggtgtctgggaaagagagaacactggaactgcaggccagttctgcgcaagacaaagaagaatggatcaaggcccttcaagaaaccatcgatgcttttcatcaaaggcatgaaaccttcagaaatgcaattgcaaaggataatgacattcactcagaggtttctactgctgagctagggaaaagagccccaagatggatccgagataatgaagtgacaatgtgtatgaaatgtaaagaacctttcaatgcactgacacgaaggaggcatcattgtcgagcatgtggatatgtggtttgttggaaatgctccgactacaaagctcaacttgaatatgatggtggtaaattgagcaaagtttgtaaagactgttatcaaatcataagtggattcacagacagtgaagaaaagaaaagaaaaggaattttagagattgaatcagcagaagtatctggaaacagtgtggtgtgcagctttcttcagtatatggagaagtcaaaaccttggcagaaagcttggtgtgtgatccccaagcaagaccctcttgtgctgtacatgtatggtgccccccaggacgtcagagcccaggccaccattccacttctgggctatgtggtggatgaaatgccaaggagcgcagacctgccacacagtttcaaactgacccagtctaagtccgtgcacagctttgctgcagacagtgaggaactgaagcagaagtggctgaaagtcatccttttagctgtcacaggtgagacaccaggtggtccaaatgagcatccagccaccttggatgatcatcctgaacctaagaaaaaatcagaatgctgaactcctccaggaccagccatggtgtggaggtctcaggacttacagctcaagacattcccagctcttcttacacatctgctagcactttatgttgaaaaatataggcccataaatgcatcttttgaggactattttcctatgtttatgtactcttagtgaaattagtgtgcagagtcattctaccgataaagttttgaaataatgtgaaaactggagcattttttgagctattccttgaatatgtgcttttttgtcttgaagaaatggtgtatcaattgattctgtcaccgtcaggttagaatgagcacttccatttaagaaatcctttcatgtcttcttctctttcacatgtaggacctggaacagtttgaaagatatacctccatgttgccaaaatagatccatggtgaaaaatacagggacagttgaggctattgtattaacttatttaatttagtttataaatctctagctgcataaatgatgtctgttcttttaaaacaaaagaaaaaggacaaattgttggtgttcagatttccgatttataaagaaaagataacttgtttttgtagaaatactcctaagaatgtcttaagtatatagcaattatgtatatatagtattaaatatatatattatacatgcttttaggttcacattcatctctaatttattttttaaatataaagcatggtttatcgtggaattgagcaatgttctaaactgaagaaatgttttggtgatttatgttttgctgattggcatttgagggtattgatatttttataataagcggtaatttatgtggcatgggatatatttgtgaattccaacagtacttttaaagtaccattttttgtttctgtgcctatttaaaacagtgcctctcttagaaggtgctattaatataagatgagggttcagttaatgcttcagtcttgattattctaagattaaagtgcattttggtcactgggacagtcaaa

SEQ ID NO: 135659 - DNA, 2977 bp, Homo sapiens
  Payload ID: 6520
  Gene Symbol: FGD4
  Gene Name: FYVE, RhoGEF and PH domain containing 4
  ENST ID: ENST00000534526
  CDS Start-End: 266-2977
ggtagcggctttgagtgagtgcgggagctgcagataccgagacgctgcgactgccgcaggagtcgccgcagccaaactcgccgcgacgccgggagggagcgtaccgggaaggagagggagaggaggcactcgctgaggagacgccgcagtagagggcgcccccggagtcgcgccgaacctgggcatgcaggcgacgccccccaggggccgctcgcggctggacgggagcgggaggagtcggggagcggcggtcgagcccggcaggatgagcgacgagggcggctccaacttcaggcgggtggcgatccggcggaagtccaacccctcctacctgccgcccggggtgccccggccctggagcaggcccgcgtcgcacctgggacgtgtagggaccgctgccttcaagggccaggtgccctcaggagccacaggcagcagtacctgtccaaagatcgctttagttccaccttgctccacaagcagcacaaccacactggttggtgagaatgtatctgaagaagaggctcagggaataaatgggaacaggccagcaaaacactcagctgcaagtccaaagccacaagtgcctccaaagccattacacctgcagaattcaccttcgtccaatatacaccaaacccccaggcataaagctttacctagtgcaaaaccaaggatggaggaaattaaacctgcctctgcttcttgtgtctcaaaagaaaaacccagtaaggtatcagatctcatcagtcgctttgaaggaggcagctcattatcaaattatagtgatttgaagaaagagtctgctgtgaacctaaatgctcctagaaccccaggaaggcatggattgacaaccacacctcaacaaaaactcctctcccagcacttgccacagaggcagggaaatgatacagataagactcagggtgcacagacttgtgtggccaacggtgtaatggcagcacaaaaccagatggaatgtgaggaggagaaagctgccactcttagctcagatacttctattcaagcttctgaacccttgcttgatacgcacatagtgaatggagaaagagatgaaactgccacagctcctgcatcacccacaacagacagctgtgatggaaatgcttctgacagtagctacaggactccaggcataggcccagtgctccccctagaagaaagaggggcagaaacagaaaccaaggtacaagagagggaaaatggggaaagccctctggaactggagcagctggaccagcaccatgagatgaaggagactaatgagcaaaaacttcacaaaatagccaatgaacttttgcttactgaaagagcttatgtcaaccgacttgacctcttagatcaggtattttattgcaaactgttggaagaagcaaaccgaggctcgtttccagcagagatggtgaataaaatcttttctaatatttcatcaataaatgccttccatagtaaattcctcttgccagagctggagaaacgaatgcaagaatgggaaactactcctagaattggagacatccttcagaaattggcaccattccttaagatgtatggagaatatgtgaaaggatttgataatgcaatggaattggttaaaaacatgacagaacgtattccccagttcaaatcagtggttgaagaaattcagaaacagaaaatctgtgggagcttaactttgcagcatcacatgctagaacctgttcagcggattccccggtatgagatgctccttaaggactatctaaggaaattgcctcctgattccctggactggaatgatgctaaaaaatcacttgaaattatatctacagcagcaagccattctaatagtgcaataaggaaaatggagaacctaaagaaactcttagagatttatgaaatgttgggagaagaagaagacattgtaaacccttcaaatgaactaataaaagaaggacagatcctcaaactagctgctcggaacacttcagcacaagaacgctaccttttcttattcaacaacatgttgctgtactgtgtgcccaaattcagcttggtaggctctaaattcacagttcgaaccagggttggcattgatggaatgaaaattgtagagactcaaaatgaagaatatccacatactttccaggtgtctgggaaagagagaacactggaactgcaggccagttctgcgcaagacaaagaagaatggatcaaggcccttcaagaaaccatcgatgcttttcatcaaaggcatgaaaccttcagaaatgcaattgcaaaggataatgacattcactcagaggtttctactgctgagctagggaaaagagccccaagatggatccgagataatgaagtgacaatgtgtatgaaatgtaaagaacctttcaatgcactgacacgaaggaggcatcattgtcgagcatgtggatatgtggtttgttggaaatgctccgactacaaagctcaacttgaatatgatggtggtaaattgagcaaagtttgtaaagactgttatcaaatcataagtggattcacagacagtgaagaaaagaaaagaaaaggaattttagagattgaatcagcagaagtatctggaaacagtgtggtgtgcagctttcttcagtatatggagaagtcaaaaccttggcagaaagcttggtgtgtgatccccaagcaagaccctcttgtgctgtacatgtatggtgccccccaggacgtcagagcccaggccaccattccacttctgggctatgtggtggatgaaatgccaaggagcgcagacctgccacacagtttcaaactgacccagtctaagtccgtgcacagctttgctgcagacagtgaggaactgaagcagaagtggctgaaagtcatccttttagctgtcacaggtgagacaccaggtggtccaaatgagcatccagccaccttggatgatcatcctgaacctaagaaaaaatcagaatgctga

SEQ ID NO: 135660 - DNA, 2435 bp, Homo sapiens
  Payload ID: 6520
  Gene Symbol: FGD4
  Gene Name: FYVE, RhoGEF and PH domain containing 4
  ENST ID: ENST00000551984
  CDS Start-End: 428-550
gtgattatccttgctgggctgggaagtggggaaagcaggggagcctgtgctgggtgagattatctgcaatggaccgggttaatgggaggcttgctttggctcgctggaagaacaaatgaagggagttttacttcaaccatttgtgacttctggccaagaggaataaattcagcttttataaggcagcagtacctgtccaaagatcgctttagttccaccttgctccacaagcagcacaaccacactggttggtgagaatgtatctgaagaagaggctcagggaataaatgggaacaggccagcaaaacactcagctgcaagtccaaagccacaagtgcctccaaagccattacacctgcagaattcaccttcgtccaatatacaccaaacccccaggcataaagctttacctagtgcaaaaccaaggatggaggaaattaaacctgcctctgcttcttgtgtctcaaaagaaaaacccagtaaggtatcagatctcatcagtcgctttgaaggaggcaggagactaatgagcaaaaacttcacaaaatagccaatgaacttttgcttactgaaagagcttatgtcaaccgacttgacctcttagatcaggtattttattgcaaactgttggaagaagcaaaccgaggctcgtttccagcagagatggtgaataaaatcttttctaatatttcatcaataaatgccttccatagtaaattcctcttgccagagctggagaaacgaatgcaagaatgggaaactactcctagaattggagacatccttcagaaattggcaccattccttaagatgtatggagaatatgtgaaaggatttgataatgcaatggaattggttaaaaacatgacagaacgtattccccagttcaaatcagtggttgaagaaattcagaaacagaaaatctgtgggagcttaactttgcagcatcacatgctagaacctgttcagcggattccccggtatgagatgctccttaaggactatctaaggaaattgcctcctgattccctggactggaatgatgctaaaaaatcacttgaaattatatctacagcagcaagccattctaatagtgcaataaggaaaatggagaacctaaagaaactcttagagatttatgaaatgttgggagaagaagaagacattgtaaacccttcaaatgaactaataaaagaaggacagatcctcaaactagctgctcggaacacttcagcacaagaacgctaccttttcttattcaacaacatgttgctgtactgtgtgcccaaattcagcttggtaggctctaaattcacagttcgaaccagggttggcattgatggaatgaaaattgtagagactcaaaatgaagaatatccacatactttccaggtgtctgggaaagagagaacactggaactgcaggccagttctgcgcaagacaaagaagaatggatcaaggcccttcaagaaaccatcgatgcttttcatcaaaggcatgaaaccttcagaaatgcaattgcaaaggataatgacattcactcagaggtttctactgctgagctagggaaaagagccccaagatggatccgagataatgaagtgacaatgtgtatgaaatgtaaagaacctttcaatgcactgacacgaaggaggcatcattgtcgagcatgtggatatgtggtttgttggaaatgctccgactacaaagctcaacttgaatatgatggtggtaaattgagcaaagtttgtaaagactgttatcaaatcataagtggattcacagacagtgaagaaaagaaaagaaaaggaattttagagattgaatcagcagaagtatctggaaacagtgtggtgtgcagctttcttcagtatatggagaagtcaaaaccttggcagaaagcttggtgtgtgatccccaagcaagaccctcttgtgctgtacatgtatggtgccccccaggacgtcagagcccaggccaccattccacttctgggctatgtggtggatgaaatgccaaggagcgcagacctgccacacagtttcaaactgacccagtctaagtccgtgcacagctttgctgcagacagtgaggaactgaagcagaagtggctgaaagtcatccttttagctgtcacaggtgagacaccaggtggtccaaatgagcatccagccaccttggatgatcatcctgaacctaagaaaaaatcagaatgctgaactcctccaggaccagccatggtgtggaggtctcaggacttacagctcaagacattcccagctcttcttacacatctgctagcactttatgttgaaaaatataggcccataaatgcatcttttgaggactattttcctatgtttatgtactcttagtgaaattagtgtgcagagtcattctaccgataaagttttgaaataatgtgaaaactgga

SEQ ID NO: 135661 - DNA, 580 bp, Homo sapiens
  Payload ID: 6520
  Gene Symbol: FGD4
  Gene Name: FYVE, RhoGEF and PH domain containing 4
  ENST ID: ENST00000583694
  CDS Start-End: 490-580
tatctgcaatggaccgggttaatgggaggcttgctttggctcgctggaagaacaaatgaagggagttttacttcaaccatttgtgacttctggccaagaggaataaattcagcttttataagatggagtctcactctgtcacctaggctggtgtgcagtggcacagtcttggctcactgcaacctccgcctcccggattcaagcaattctcccacctcagtctcctgagtagctgagattacaggcagcagtacctgtccaaagatcgctttagttccaccttgctccacaagcagcacaaccacactggttggtgagaatgtatctgaagaagaggctcagggaataaatgggaacaggccagcaaaacactcagctgcaagtccaaagccacaagtgcctccaaagccattacacctgcagaattcaccttcgtccaatatacaccaaacccccaggcataaagctttacctagtgcaaaaccaaggatggaggaaattaaacctgcctctgcttcttgtgtctcaaaagaaaaacccagtaaggtatcagatctcatcagtcgctttgaaggaggca

SEQ ID NO: 135662 - DNA, 5720 bp, Homo sapiens
  Payload ID: 6521
  Gene Symbol: FGD5
  Gene Name: FYVE, RhoGEF and PH domain containing 5
  Uniprot ID: Q6ZNL6
  ENST ID: ENST00000285046
  CDS Start-End: 111-4499
caaaaccacctgtcgctcccaagccaaagactaccagtccactgacgccagtgaccgcgcccaaattcccttcctcagccaggcccgagagtcttcacagtccaaactccatgttcaggggtccgaagccccccattgcccccaagcccaggctgactgccccaaacgagtggagagccagtgtgtacctgaatgacagcttgaacaaatgcagcaacgggcggctgccctgtgtagacagggggcttgatgaggggccccggtccatcccaaagtgctctgagtcggagaccgacgaggattacatcgtggtccccagggttccgctgagggaggatgaacccaaggacgagggcagtgtggggaacaaagccctggtgtctcccgagtcctctgcggaagaggaagaggagcgtgaagagggaggcgaggcatgtggcctggagggtacaggagctggtgaggattcagtggcccctgctgctccgggtgcaggagcgctgagcagggagggtgaggaaggcacagaccttgctcttgaggatgaaggggagggctgcgctgatgagccagggacactggagcaggtgtccagaagtgaggaggaagagaagctagtgcagccacacagggagtgcagcctggaggacagtgggccttgggctggagagggggtcttccagagcgacctcctcctgcctcacatccatggagaggaccaggagccccccgacacccccggggaggcagaggaggatgatgaggaaggctgtgccagcacagacccagcaggggcagatgagggttcgggtcctgacaggcccacggaggacatgggacaggatgctgaggacaccagtgaggagccccctgagaaggaggagctggccggggtccaggaggcagagacagccacagactgccctgaagttcttgaggagggatgtgaagaggccacgggtgtcacaggtggggaacaggttgacctcagtgaaccacctgaccacgagaagaaaaccaaccaagaagtggcagccgccaccctggaggaccatgcacaggatgagtccgccgaggagagctgccagattgtcccttttgagaatgactgcatggaggacttcgtgacttccctcacaggaagcccctatgagttcttcccaactgagagcacctctttttgcagcgagagctgttctcctctttctgaatcagcgaaaggtttagaatcagagcaggcaccaaagctggggctgcgtgcggaggagaaccccatggtgggggctttgtgtggccagtgtggctccctacagggtggagcggccgagggtcccgcagcccctgatgtggtggtcgtgctggaggaggaggccttggatgatgcactggccaacccctatgtgatgggagtgggcctgcccggtcaggcggcccctggagaaggagggcaggctgcatcggacgccctgggtggttatggctcgaaagaagaattgaactgtgaggcagagggtggcctggttcccgcggacaggaagaacaccagcacgagggtccggccccactctgggaaggtggccggctatgtcccagaaaccgtccctgaagaaaccggacctgaggcgggctcgtcagcccctggcattggaggtgccgcagaggaggtgggaaagacgcttttgtcattggaggggaagcccttggaagccagcagggccttgccagcaaagcccagggcctttactttataccctcggtcgttctccgtggaaggccgagagattccagtgtccgtgtaccaggagcctgaggggtcagggttggatgaccacaggataaagaggaaagaggacaatctctctctgtcgtgtgtaattggctcctctgggagtttctcccagagaaaccaccttccgtccagcggcacctccacgccttcttccatggtcgacatcccacctcctttcgacctggcctgcatcaccaagaagcccatcacaaagagctctccctcactcctgatcgagagcgactccccggacaagtacaagaagaagaagtcatcctttaagcgcttcctggcactgacgtttaagaagaagacggagaacaaattgcatgtggatgtgaacgtgtcttcctctaggtcctcttcagagtccagctaccacgggccttccaggattctggaagttgaccggagaagcctcagcaactcccctcagcttaagtctcggactgggaagctccgggcttctgaatccccctcctccctcatcttttatagagatggcaagaggaaaggtgtccccttcagcaggacggtgtccagagtggagtcctttgaagaccgctcccggccgcccttcctgcccttgccactgaccaagccacggtccatctccttccccagcgctgacacttcagactatgagaacattccagccatgaactcggactatgagaatatccagattccaccccggagacctgccagggctggcgcgttcacgaagctgtttgaagatcagagcagagccctgtccacagcaaacgaaaatgatggctacgtggacatgagcagcttcaacgcctttgagagcaaacagcagagtgcagaccaggacgcagaaagcgcctacacagagccctacaaagtctgtcccatctcgtcggcagcccccaaagaggaccttacgtcggatgaagagcagagaagctcggaggaggaggacagtgcttcaagagaccccagtgtcacccacaaggtggaaggacagtccagagcccttgtcatcgcacaggaactgctatcttcagagaaagcatacgtggagatgctccagcacttaaatctggatttccatggagctgtcatgagggccttggatgacatggaccatgaaggcagagacacattggcccgggaggagctgaggcagggcctgagtgaactcccagccatccacgaccttcatcaaggcatcctggaggagctggaggaaaggctgtcaaattgggagagccagcagaaggtagctgacgtcttcctggcccgggagcaggggtttgatcaccacgccactcacatcctgcagttcgacaggtacctaggtctgctcagtgagaattgcctccactctccccggctggcagctgctgtccgtgaatttgagcagagtgtacaaggaggcagccagactgcgaagcatcggctgctgcgggtggttcaacgcctcttccagtaccaagtgctcctcacagactatttaaacaacctttgtccggactccgccgagtacgacaacacacagggtgcactgagcctcatctccaaagtcacagaccgtgccaacgacagcatggagcaaggggaaaacctgcagaagctggtccacattgagcacagcgtccggggccaaggggatctcctccagccaggaagggagtttctgaaggaagggacgctgatgaaagtaacagggaaaaacagacggccccggcacctatttctgatgaacgatgtgctcctgtacacctatccccagaaggatgggaagtaccggctgaagaacacattggctgtggccaacatgaaggtcagccgccctgtgatggagaaagtgccctacgctctaaagattgagacttccgagtcctgcctgatgctgtctgcgagctcctgtgcagagagggacgagtggtatggctgtctgagcagagccctccctgaggactacaaggcccaggcgctggctgcattccaccatagcgtggagatacgagagaggctgggggttagccttggggagaggccccccaccctggtgcctgtcacacacgtcatgatgtgcatgaactgcggctgcgacttctccctcaccctgcggcgtcatcactgtcacgcctgtggcaagatcgtgtgccggaactgttcgcggaacaagtacccgctgaagtacctgaaggacaggatggccaaggtctgcgacggctgcttcggggagctgaagaagcggggcagggctgtcccgggcctgatgagagagcggcctgtgagcatgagcttcccgctgtcttcaccccgcttctcgggcagtgccttttcatccgtcttccagagcattaacccctcgaccttcaagaagcagaagaaagtcccttcagccctgacagaggtggctgcctctggagagggctctgccatcagtggctatctcagccggtgtaagaggggcaagcggcactggaagaagctctggtttgtcatcaaaggcaaagttctctacacctacatggccagtgaggacaaagtggccttggagagtatgcctctgctaggcttcaccattgctccagaaaaggaagagggcagcagtgaagtaggacctatttttcacctttaccacaagaaaaccctattttatagcttcaaagcagaagataccaattcagctcagaggtggatcgaggccatggaagatgcgagtgtgttatagcagttatcaagcatgtggacttgtaacaaattcttaggtcaatatgtgaatgcttttagaagctaagctgtggctcaactcatccggacacacacctggattcagcaatgaggcctgaccttttttgctataaccgccccaccactcccctgcccttgccaacatcttcatgaatggaatccttaagggatatttatggacctctccttttctgtgttttccacccctacccccacccgccacccagtaataaactatttccttaccccgcagtgagttaaaatttagtaagatgaagatgtggaaaccaatgaaaagtacatttagaaatgcaggctttttagtagaaagaagctcttacagtttttactcatgataaatcttatcacctttcaaaaattgattgtggtgcctcaggtgaaatgagaagctatcagtaacagctactctcatcgaaagcactttattattttacggagctgcaacctccaattttgtgttttctaagtgatttacttaagtcaataacagatggaatcctgtggactaatgtgccaccagttttctaacaagggtgtacataaaatggatttgtgcagacctggctgtggcttgctggtgtgcaagcacacatcactttagaggggctgcgccccaccagataggaaggggaggattttctcctccagtcgaccttgtgacctgtatactaacataacttattaaaggaggggtccctcctcccccagagcagtcctcaacactatgtcagtgctggaaatgcagccactggcagatctggccccccagacgtcaccgcagggcctctgaagagtcaaggtctgctttaatttattgtgtgcctttctgtgtttacctcactcaagctgacaacattgtttatgggaatctatccttcttttagacacacggtaatccttgggctgtattactgaaggctttttattttttgagaggtgaaaaaaagagaaaacaagttagactccaaaggtgaattcctggtcttggcagatggctctgggaacagcgagggagcacagaagtcgtggcctgaggctgttctatgggcacttggggctaaatcgcctcctgagggtgactgttgcttattctgctggacaggtttttacataaagcaaagggcatgtgaggggtgggattccttgttactcttactgcaataaaaatcaattgtttgat

SEQ ID NO: 135663 - DNA, 755 bp, Homo sapiens
  Payload ID: 6521
  Gene Symbol: FGD5
  Gene Name: FYVE, RhoGEF and PH domain containing 5
  ENST ID: ENST00000457774
  CDS Start-End: 1-755
ccagattccaccccggagacctgccagggctggcgcgttcacgaagctgtttgaagatcagagcagagccctgtccacagcaaacgaaaatgatggctacgtggacatgagcagcttcaacgcctttgagagcaaacagcagagtgcagaccaggacgcagaaagcgcctacacagagccctacaaagtctgtcccatctcgtcggcagcccccaaagaggaccttacgtcggatgaagagcagagaagctcggaggaggaggacagtgcttcaagagaccccagtgtcacccacaaggatttccatggagctgtcatgagggccttggatgacatggaccatgaaggcagagacacattggcccgggaggagctgaggcagggcctgagtgaactcccagccatccacgaccttcatcaaggcatcctggaggagctggaggaaaggctgtcaaattgggagagccagcagaaggtagctgacgtcttcctggcccgggagcaggggtttgatcaccacgccactcacatcctgcagttcgacaggtacctaggtctgctcagtgagaattgcctccactctccccggctggcagctgctgtccgtgaatttgagcagagtgtacaaggaggcagccagactgcgaagcatcggctgctgcgggtggttcaacgcctcttccagtaccaagtgctcctcacagactatttaaacaacctttgtccggactccgccgagtacgacaacacacagg

SEQ ID NO: 135664 - DNA, 5768 bp, Homo sapiens
  Payload ID: 6521
  Gene Symbol: FGD5
  Gene Name: FYVE, RhoGEF and PH domain containing 5
  ENST ID: ENST00000543601
  CDS Start-End: 834-4370
caaaaccacctgtcgctcccaagccaaagactaccagtccactgacgccagtgaccgcgcccaaattcccttcctcagccaggcccgagagtcttcacagtccaaactccatgttcaggggtccgaagccccccattgcccccaagcccaggctgactgccccaaacgagtggagagccagtgtgtacctgaatgacagcttgaacaaatgcagcaacgggcggctgccctgtgtagacagggggcttgatgaggggccccggtccatcccaaagtgctctgagtcggagaccgacgaggattacatcgtggtccccagggttccgctgagggaggatgaacccaaggacgagggcagtgtggggaacaaagccctggtgtctcccgagtcctctgcggaagaggaagaggagcgtgaagagggaggcgaggcatgtggcctggagggtacaggagctggtgaggattcagtggcccctgctgctccgggtgcaggagcgctgagcagggagggtgaggaaggcacagaccttgctcttgaggatgaaggggagggctgcgctgatgagccagggacactggagcaggtgtccagaagtgaggaggaagagaagctagtgcagccacacagggagtgcagcctggaggacagtgggccttgggctggagagggggtcttccagagcgacctcctcctgcctcacatccatggagaggaccaggagccccccgacacccccggggaggcagaggaggatgatgaggaaggctgtgccagcacagacccagcaggggcagatgagggttcgggtcctgacaggcccacggaggacatgggacaggatgctgaggacaccagtgaggagccccctgagaaggaggagctggccggggtccaggaggcagagacagccacagactgccctgaagttcttgaggagggatgtgaagaggccacgggtgtcacaggtggggaacaggttgacctcagtgaaccacctgaccacgagaagaaaaccaaccaagaagtggcagccgccaccctggaggaccatgcacaggatgagtccgccgaggagagctgccagattgtcccttttgagaatgactgcatggaggacttcgtgacttccctcacaggaagcccctatgagttcttcccaactgagagcacctctttttgcagcgagagctgttctcctctttctgaatcagcgaaaggtttagaatcagagcaggcaccaaagctggggctgcgtgcggaggagaaccccatggtgggggctttgtgtggccagtgtggctccctacagggtggagcggccgagggtcccgcagcccctgatgtggtggtcgtgctggaggaggaggccttggatgatgcactggccaacccctatgtgatgggagtgggcctgcccggtcaggcggcccctggagaaggagggcaggctgcatcggacgccctgggtggttatggctcgaaagaagaattgaactgtgaggcagagggtggcctggttcccgcggacaggaagaacaccagcacgagggtccggccccactctgggaaggtggccggctatgtcccagaaaccgtccctgaagaaaccggacctgaggcgggctcgtcagcccctggcattggaggtgccgcagaggaggtgggaaagacgcttttgtcattggaggggaagcccttggaagccagcagggccttgccagcaaagcccagggcctttactttataccctcggtcgttctccgtggaaggccgagagattccagtgtccgtgtaccaggagcctgaggggtcagggttggatgaccacaggataaagaggaaagaggacaatctctctctgtcgtgtgtaattggctcctctgggagtttctcccagagaaaccaccttccgtccagcggcacctccacgccttcttccatggtcgacatcccacctcctttcgacctggcctgcatcaccaagaagcccatcacaaagagctctccctcactcctgatcgagagcgactccccggacaagtacaagaagaagaagtcatcctttaagcgcttcctggcactgacgtttaagaagaagacggagaacaaattgcatgtggatgtgaacgtgtcttcctctaggtcctcttcagagtccagctaccacgggccttccaggattctggaagttgaccggagaagcctcagcaactcccctcagcttaagtctcggactgggaagctccgggcttctgaatccccctcctccctcatcttttatagagatggcaagaggaaaggtgtccccttcagcaggacggtgtccagagtggagtcctttgaagaccgctcccggccgcccttcctgcccttgccactgaccaagccacggtccatctccttccccagcgctgacacttcagactatgagaacattccagccatgaactcggactatgagaatatccagattccaccccggagacctgccagggctggcgcgttcacgaagctgtttgaagatcagagcagagccctgtccacagcaaacgaaaatgatggctacgtggacatgagcagcttcaacgcctttgagagcaaacagcagagtgcagaccaggacgcagaaagcgcctacacagagccctacaaagtctgtcccatctcgtcggcagcccccaaagaggaccttacgtcggatgaagagcagagaagctcggaggaggaggacagtgcttcaagagaccccagtgtcacccacaaggtggaaggacagtccagagcccttgtcatcgcacaggaactgctatcttcagagaaagcatacgtggagatgctccagcacttaaatctggatttccatggagctgtcatgagggccttggatgacatggaccatgaaggcagagacacattggcccgggaggagctgaggcagggcctgagtgaactcccagccatccacgaccttcatcaaggcatcctggaggagctggaggaaaggctgtcaaattgggagagccagcagaaggtagctgacgtcttcctggcccgggagcaggggtttgatcaccacgccactcacatcctgcagttcgacaggtacctaggtctgctcagtgagaattgcctccactctccccggctggcagctgctgtccgtgaatttgagcagagtgtacaaggaggcagccagactgcgaagcatcggctgctgcgggtggttcaacgcctcttccagtaccaagtgctcctcacagactatttaaacaacctttgtccggactccgccgagtacgacaacacacagggtgcactgagcctcatctccaaagtcacagaccgtgccaacgacagcatggagcaaggggaaaacctgcagaagctggtccacattgagcacagcgtccggggccaaggggatctcctccagccaggaagggagtttctgaaggaagggacgctgatgaaagtaacagggaaaaacagacggccccggcacctatttctgatgaacgatgtgctcctgtacacctatccccagaaggatgggaagtaccggctgaagaacacattggctgtggccaacatgaaggtcagccgccctgtgatggagaaagtgccctacgctctaaagattgagacttccgagtcctgcctgatgctgtctgcgagctcctgtgcagagagggacgagtggtatggctgtctgagcagagccctccctgaggactacaaggcccaggcgctggctgcattccaccatagcgtggagatacgagagaggctgggggttagccttggggagaggccccccaccctggtgcctgtcacacacgtcatgatgtgcatgaactgcggctgcgacttctccctcaccctgcggcgtcatcactgtcacgcctgtggcaagatcgtgtgccggaactgttcgcggaacaagtacccgctgaagtacctgaaggacaggatggccaaggtctgcgacggctgcttcggggagctgaagaagcggggcagggctgtcccgggcctgatgagagagcggcctgtgagcatgagcttcccgctgtcttcaccccgcttctcgggcagtgccttttcatccgtcttccagagcattaacccctcgaccttcaagaagcagaagaaagtcccttcagccctgacagaggacaaagtggccttggagagtatgcctctgctaggcttcaccattgctccagaaaaggaagagggcagcagtgaagtaggacctatttttcacctttaccacaagaaaaccctattttatagcttcaaagcagaagataccaattcagctcagaggtggatcgaggccatggaagatgcgagtgtgttatagcagttatcaagcatgtggacttgtaacaaattcttaggtcaatatgtgaatgcttttagaagctaagctgtggctcaactcatccggacacacacctggattcagcaatgaggcctgaccttttttgctataaccgccccaccactcccctgcccttgccaacatcttcatgaatggaatccttaagggatatttatggacctctccttttctgtgttttccacccctacccccacccgccacccagtaataaactatttccttaccccgcagtgagttaaaatttagtaagatgaagatgtggaaaccaatgaaaagtacatttagaaatgcaggctttttagtagaaagaagctcttacagtttttactcatgataaatcttatcacctttcaaaaattgattgtggtgcctcaggtgaaatgagaagctatcagtaacagctactctcatcgaaagcactttattattttacggagctgcaacctccaattttgtgttttctaagtgatttacttaagtcaataacagatggaatcctgtggactaatgtgccaccagttttctaacaagggtgtacataaaatggatttgtgcagacctggctgtggcttgctggtgtgcaagcacacatcactttagaggggctgcgccccaccagataggaaggggaggattttctcctccagtcgaccttgtgacctgtatactaacataacttattaaaggaggggtccctcctcccccagagcagtcctcaacactatgtcagtgctggaaatgcagccactggcagatctggccccccagacgtcaccgcagggcctctgaagagtcaaggtctgctttaatttattgtgtgcctttctgtgtttacctcactcaagctgacaacattgtttatgggaatctatccttcttttagacacacggtaatccttgggctgtattactgaaggctttttattttttgagaggtgaaaaaaagagaaaacaagttagactccaaaggtgaattcctggtcttggcagatggctctgggaacagcgagggagcacagaagtcgtggcctgaggctgttctatgggcacttggggctaaatcgcctcctgagggtgactgttgcttattctgctggacaggtttttacataaagcaaagggcatgtgaggggtgggattccttgttactcttactgcaataaaaatcaattgtttgatatcctgtccccattctgttgctgccctgtcccctacaaaaaagggaatttgctgacaaactttttgtaaaaagcaccatctctggacttacttgcattaaatattttcaggggaatttttttttccagtttgcagttcttttaaaatgtttgcattaaacatgtaactaatggttca

SEQ ID NO: 135665 - DNA, 9288 bp, Homo sapiens
  Payload ID: 6522
  Gene Symbol: FGD6
  Gene Name: FYVE, RhoGEF and PH domain containing 6
  Uniprot ID: Q6ZV73
  ENST ID: ENST00000343958
  CDS Start-End: 225-4517
agtgctcgcccgcccgaccccggcggctcgcgcccgggagcgccgcagggtcgctagagtcggccgcgtcctttgtgtggcgctcaggctgcgccgcggggcggcgggacggaatgtgggcgctgcgggggcttttctctcctacccgaactgtgggaacaatggactgaaaggggaagatggattgaggggccgagcggggaagcgagctgcaccggggaatcatgacttctgcagccgagataaagaagccaccagtggcccccaagcccaagtttgttgtggcaaataataagccagccccacctcctattgcacctaaacccgacattgtgatttctagtgttccacagtcgacaaagaaaatgaaaccagcaatagccccaaaaccaaaagtcctgaagacctcacctgttcgagagattgggcagtcgccatcaaggaaaatcatgttgaacctggaagggcataaacaggaattagctgaaagcactgacaactttaattgtaaatatgaaggcaatcagagcaatgattatatttcaccaatgtgttcctgcagttctgagtgtatccataagctgggccatagagagaatttgtgtgtaaagcagcttgttttagagcccctggaaatgaatgaaaatttagaaaacagtaaaattgatgagactttgactataaaaactaggagtaaatgtgatttgtatggtgaaaaagccaagaaccagggtggggttgttttaaaggcaagcgttttagaagaggagctcaaagatgccttaatacaccaaatgccaccttttatttctgcacagaagcacaggcccacagacagcccagaaatgaatggtggctgtaattcaaatggacaattcagaattgaatttgcggatttgtcaccttccccatccagctttgaaaaagttcctgatcatcacagttgccacttacagcttcctagtgatgaatgtgaacattttgaaacttgccaggatgacagtgaaaaaagcaataattgctttcagtcatctgaactagaggctctggaaaatgggaaaaggagtactttaatatcttcagatggagttagtaagaaatcagaagtcaaagaccttggtcccttagaaattcatttagtaccatataccccaaaatttccaactcccaagcccagaaagacacgaactgctcgtctgttacgccaaaagtgtgtagatactcctagtgaaagcactgaagaaccggggaattcagacagtagctcttcctgtcttactgaaaatagtttgaaaatcaataaaatcagtgttctgcatcagaatgttttgtgtaagcaggaacaggtggataaaatgaagctaggaaataaaagtgaattgaatatggaatccaacagtgatgcacaggacttagtcaattcacagaaagccatgtgtaatgaaacaacttcctttgaaaaaatggcaccttcttttgataaagactctaatttgagttctgacagcacaactgtagatggttctagtatgtcgcttgctgtggacgaagggaccggttttataagatgtactgtatctatgagcctgcctaagcagctcaaattaacttgcaatgaacatttgcaatctgggagaaacctgggagtttctgcccctcaaatgcaaaaggaatctgttataaaagaggaaaattctctacgaattgtccccaaaaaacctcaaagacatagcttgcctgctacaggagtgcttaaaaaggctgcctccgaggagcttttggaaaaaagttcttatccttcaagtgaagaaaaaagttcagagaagagtctagaaagaaatcaccttcagcatttgtgtgcccaaaaccgtggtgtgtcatcctcctttgatatgcctaaacgggcttcagaaaagccagtgtggaagttacctcatcctattttacccttttcagggaacccagaattcttaaagtctgtcaccgtatcgtcaaacagtgagccttcaacagccctaaccaagcccagagcaaaatcgttatctgctatggatgtggaaaagtgcactaagccttgcaaagactctacaaagaaaaactcttttaaaaagttgctcagcatgaaactgtccatctgtttcatgaagagtgactttcaaaaattttggtccaagagtagccaactcggagacaccaccacaggccacctctccagtggggagcagaaggggattgaaagtgattggcaaggcttgttggtaggagaggagaagagaagtaaacccatcaaggcatattccacagaaaactatagcctggaatctcaaaagaagaggaagaagtctcggggccagaccagtgcagctaatggtctgagagctgagtctttggatgaccaaatgctctcccgggagtcatcatctcaggcaccttacaagtctgttacaagcctctgtgcaccggagtatgaaaatatacgccattatgaggaaataccagagtacgagaacttgccatttattatggctatacggaaaactcaagagttggaatggcagaattccagcagcatggaggacgctgatgcaaatgtgtatgaggtagaagagccgtatgaagctccagatggccagctgcagcttggacccagacatcagcattccagttcaggagcatcccaggaggaacagaatgatcttggtcttggtgaccttccctctgatgaggaggaaatcatcaacagttctgatgaagatgatgtcagctctgagtcaagtaaaggagagcctgacccactggaagataaacaggatgaagataatggaatgaaaagtaaagttcatcatattgccaaggagatcatgagctcagagaaagtgtttgtggatgtgttaaaacttttgcatattgatttccgggatgcagtagctcatgcttccaggcaacttgggaaaccagtgattgaggaccggattctaaatcagatcctatactacttgcctcagctgtatgagctcaaccgggatctcttgaaggaactggaggaaagaatgttgcactggactgaacaacaaagaattgctgatatctttgtaaagaagggaccatatctaaaaatgtattccacatacatcaaagaatttgataagaatatagccttgctggatgaacagtgcaagaaaaatccaggttttgctgctgttgttagagaatttgagatgagccctcgctgtgctaatctggccctcaagcactacctgctcaagccggttcagaggatcccccagtacaggctgttgctgacagattatttgaagaatctcatagaagatgctggagattacagagacactcaagatgcccttgctgttgttatagaggtagccaaccacgccaatgacaccatgaagcaaggagacaactttcagaaacttatgcaaattcagtacagcttaaatggacaccatgaaattgtgcagcctggtcgggtttttctcaaagaaggaattctgatgaagctgtctcggaaagtgatgcaacctcgaatgtttttcctgtttaatgatgccctgctgtatacaacaccagtgcagtctgggatgtataaactgaacaacatgctctcactggctggaatgaaggtcagaaaacctacccaagaagcctatcagaatgaattaaagattgaaagtgtagaacgttccttcattctctcagccagttctgccacagaaagggatgaatggctagaagcgatttccagggcaatagaagagtatgccaagaaaagaatcaccttctgtcctagtaggagtcttgatgaggcagactcagaaaataaagaagaagttagtcctcttggatcgaaggctcccatctggattcctgataccagagccacaatgtgtatgatctgcacaagcgaattcactctcacctggagacgacaccactgccgggcctgtggaaagattgtatgccaagcttgttcgtctaataagtatggcttagattacctgaaaaatcaaccagcaagagtatgtgaacattgtttccaagaactgcagaaattagatcaccagcactcccctaggattggatctcctggaaatcacaaatctccttcaagtgccttatcatcagtcttacatagcattccatcagggaggaaacagaaaaaaatcccagctgctctcaaagaagtatcagcaaacacagaggattcttctatgagtggctacttgtacagatcaaagggcaataaaaaaccctggaaacacttttggtttgtcataaaaaataaagtactatatacatatgctgcaagtgaggacgtggccgctttggagagtcagcctttattaggattcactgttattcaagttaaagatgagaattccgagtctaaagtatttcagttactgcacaaaaacatgttattttatgtattcaaagcagaggatgctcattcggctcagaagtggatagaagcatttcaggaaggcacaatattgtagcagtattggtttcatctcttctgtgattccaaagaggtggaatttcatcagaatggagtaaatgcaattcaaaaattgtataaaaatgaacactgccaagataaagccaaccagacccttcatcaaagaaattgttttgttaggtataagcaatttttaaaaggtgtttgttttttcatttatgttatttattaaaattttgatgtttacttaatggtcagaattatttctgagacacactgaattctaaagtaccatttctttagagaccagaaaaactatcttaatactgtatactgtattaactattcgtgacatagttcacactgttttcttaccttacattgtaacaatcttactggtggaaagtctttgtaaggaaaaaacacatagcaaggagcaaatttccacaaagtgcttggtttaggaattgtgattattataaaactgctgatgaaaaaaatgcatgtctttgaatcaataaacttgggtgaatatttgtatcttttagtggaaaaacatggccagcttctacctcagtaactgtgaactgaaatttcagtaaattatctaaagtatttctgttgttaggtacctctttggcaggagttaatattacatcatcaaagaattatagcaaagagatagaatctgaattttttaaaactgtgagtaggaatgaagatgtttttatttgcagaataccacaaataaccaactcttccggcttttaagtccaatcttttaaaaaatctaccacttcgaaacaaacataaatgtatcattttttaaaatagcaaaatatagcaagcattatgtcacataatattccctgctattataagagttctgagcccaagtcaatgatgatatttgtatctataagtaatgttacatttccaaaaatattgtgcattacaaatggaactggaattactatatcagaaaagcataattataagccagtaataactgaaattctatagtattcattttcaaaaggtctttttctgccagtttgtgatatcctccctcctaattaaaaaaaaaaacaacaaatcctttctctataagcagctatcagcacacctccttaggaaagatttagattcataattctggtgcacttactgtttaacatatgaactaccttgcacatacaattgttgattagcagaagaaaatgaaataacactgtgataaaagccatccctgatgttcacaatacacaatttattaactaagtttaaactataaattatcttaactgccatgagcggtggctcacacctacaatctcagcattttgggaggccgaggccgttggaccacctgaggtcaggagatcgagaccagcctggccaatatggtgaaaccccatctctattaaaaatacaagaattagccggtcgtggtggtacatggctgtagtcctagctattcagcaggctgaggcaggagcatcgcttgaacccaggaggcagaggttgcagtgagccgagatggtgccactgcactccagcctgggatgacagagcgagactccatctcaaaaaaaaaaaaaaaaaaaaaattgaacagcaaggttatccatataatatttctttaaagggtacaagaattttcctttctgcctctaaataaaggatttcctaattcagtgtgatccttaacagcaaccatgaggattactgagtgcctttctggggccttttgaatgctgtttggtacagcaccagagtccctactagatctagagttggctgctatagttttttgtggcgattttttgccatggagtcatttgaacctcatacacaatcctaacatgccatcccctttctgtcatagcaggtacactaaaatttctttgtagctcaattttatataatcaagatcacataaataaggcttccatgttagaatcgttgcagtttttagtgtattcctttttggaggctaaagttgtaccttataaactgtttctgcgtctggcatttagcaagacaagttatttgggttttctttccctcctcttgagctctcagccttctgactacaaggtttggcttaagccttataatctaaaaaatatcagccaggctattctatcttctaagacctggctgaatcatgagccagttctaaatctaaagagagtgagagagggaagaaatctggcacaaacttacagtctctttaattacatgtaaaatgcatgtgactgtattacctattggcttagccccatggagggtttagaaaaatgtgtagtctttgtggaagctatccaattatccttctcccaaaaagatgttttaaatgtggaatagtattacattcccctgcccctttatgagtccttcataacttactaaagctgaccaattgttatttatgtaacctggctcattcattgtcaactaagaacctaattatatgcaatttattgtaaaaaaagctataaaaatatattttgctagtattttagaggaaaaatgatattgggcacagtctataaatggggagaaaagttaagtagtatctagattccaaggatactatatttattatacagatatgtgtgcctgtgcttccatcaaaccctttttcaggtatctccttttaattcataaggaggaaagagtagggcatttataaagctaagctaaaaatgatgctaagcataacgtagatgagacgccaggctgaaccaggggaaggctggcattgttagtgtccccaactagcagtccacctttatctgtggcagctataaatgtacaggacccatcagagtcctaagaaaatgagagtaattatctctggcatcatccacatttccgactctttccaatctcttttccctttttctgtaatgtacccagcatccccctattgtattttggttgcccaagattcttgattctttgagtgtgtagtagcatttcttaaaatgagatcatcagaccaacccttgattcacatgaaagctgtaatgacacaacaaagagaaggcgacagttttaaagtataattgtcagccaaatgtgtattttatatttggttcatagaatatatctagatgtggggaaagtctcctatttggtaatttagttaaaatgtaaatgttatatcacagcatatgttggtatgttttggagtgtgcttccattgtgctcagcttttgaaaagtttgaaatccactttagtcaaatgtagtcaatgggatttccagagatacatattgtttttcttagtgtaccacacactccttgaaggcagatactgtacttaatatatcactgtcttccataatactgccctaggtctttttagtttttaagagaccgggtctcgctatgtttcccatgctgaactcaaatgcctgggcttaagcaatcctcccacctcagcctctggagtagctgggactacaggggcatgcaccaccaggcctggcttcctaggagggtctttaaagagaaaatatttgttcaattgaaaacaggattcttgtcatctacaactccaacacagcctgaaaatatccacattataacctggaccttagacctactttctccactatcctgcaaagctacatctgtaactacctattggctatctatatgagtcctcaagcatctcagactttacatgaataaaactcaacttccttcccattcaaatctgtttattttcttctgtaagagaaagataccatttgagactccagaatctgcctctaactctcaacaagactctgcaattactcaagtatcctttccatcctcattgccctgctgttattacataggccctggttcaagtccttgttacttgttcccattattgcaataacttctaattccaatgccgttgtgtgatcccattttaaacacggccagagcagtcttccaacaacatagctctaatctagtttcatccccacttttacatgcctcagtggctttcccagtgacttggcatggaacacgtcctcagttgccatacattccagctaactcttacccaacctttctttgttcacacagtttccttttccttcctcattgacccatccgcatctctgtttatccaagacttctctgtgatagctgacccttagtctttctctcccctattcctccagactagatcctgtctccttcctgcagccccgacacagccttcagttcatatcttttgcatgatgcttagcaccttctatccctaaggacaacttactcatttgagatttctggcagggtaccttgcatgcagtggacactcagtatttgctgaattaaattccttcctatggatcccttctgattttttttaagtgcctctaatacacatatcattctagggctcatgccacttttaatgtcattttctaaaggaaaatcttatctatgatattttcccttataagagatagttgttttgagtagggttttttaaaagataaaggtagtaggaaattttttaaagcctaaatatcaaattcctttccctttggagttgggggaaggaatgaagggggagcaacttgctctttcatatgagttggtcatagcatgtaagaaccaatcttgaaatatcgttttttttttaatggcttataatgtatttctagaaatactttgtacttaaaatgataacagtttgtatctttttgtccatatatactttataaataaaaaaattagcattgtaaataatgttaatatgtatttatacaaaataaatttactataatata

SEQ ID NO: 135666 - DNA, 2232 bp, Homo sapiens
  Payload ID: 6522
  Gene Symbol: FGD6
  Gene Name: FYVE, RhoGEF and PH domain containing 6
  ENST ID: ENST00000451107
  CDS Start-End: 243-422
gctctgcggggcggtgctagtgctcgcccgcccgaccccggcggctcgcgcccgggagcgccgcagggtcgctagagtcggccgcgtcctttgtgtggcgctcaggctgcgccgcggggcggcgggacggaatgtgggcgctgcgggggcttttctctcctacccgaactgtgggaacaatggactgaaaggggaagatggattgaggggccgagcggggaagcgagctgcaccggggaatcatgacttctgcagccgttcaggagcatcccaggaggaacagaatgatcttggtcttggtgaccttccctctgatgaggaggaaatcatcaacagttctgatgaagatgatgtcagctctgagtcaagtaaaggagagcctgacccactggaagataaacaggatgaagataatggaatgaaaagtaaagttcatcatattgccaaggagatcatgagctcagagaaagtgtttgtggatgtgttaaaacttttgcatattgatttccgggatgcagtagctcatgcttccaggcaacttgggaaaccagtgattgaggaccggattctaaatcagatcctatactacttgcctcagctgtatgagctcaaccgggatctcttgaaggaactggaggaaagaatgttgcactggactgaacaacaaagaattgctgatatctttgtaaagaagggaccatatctaaaaatgtattccacatacatcaaagaatttgataagaatatagccttgctggatgaacagtgcaagaaaaatccaggttttgctgctgttgttagagaatttgagatgagccctcgctgtgctaatctggccctcaagcactacctgctcaagccggttcagaggatcccccagtacaggctgttgctgacagattatttgaagaatctcatagaagatgctggagattacagagacactcaagatgcccttgctgttgttatagaggtagccaaccacgccaatgacaccatgaagcaaggagacaactttcagaaacttatgcaaattcagtacagcttaaatggacaccatgaaattgtgcagcctggtcgggtttttctcaaagaaggaattctgatgaagctgtctcggaaagtgatgcaacctcgaatgtttttcctgtttaatgatgccctgctgtatacaacaccagtgcagtctgggatgtataaactgaacaacatgctctcactggctggaatgaaggtcagaaaacctacccaagaagcctatcagaatgaattaaagattgaaagtgtagaacgttccttcattctctcagccagttctgccacagaaagggatgaatggctagaagcgatttccagggcaatagaagagtatgccaagaaaagaatcaccttctgtcctagtaggagtcttgatgaggcagactcagaaaataaagaagaagttagtcctcttggatcgaaggctcccatctggattcctgataccagagccacaatgtgtatgatctgcacaagcgaattcactctcacctggagacgacaccactgccgggcctgtggaaagattgtatgccaagcttgttcgtctaataagtatggcttagattacctgaaaaatcaaccagcaagagtatgtgaacattgtttccaagaactgcagaaattagatcaccagcactcccctaggattggatctcctggaaatcacaaatctccttcaagtgccttatcatcagtcttacatagcattccatcagggaggaaacagaaaaaaatcccagctgctctcaaagaagtatcagcaaacacagaggattcttctatgagtggctacttgtacagatcaaagggcaataaaaaaccctggaaacacttttggtttgtcataaaaaataaagtactatatacatatgctgcaagtgaggacgtggccgctttggagagtcagcctttattaggattcactgttattcaagttaaagatgagaattccgagtctaaagtatttcagttactgcacaaaaacatgttattttatgtattcaaagcagaggatgctcattcggctcagaagtggatagaagcatttcaggaaggcacaatattgtagcagtattggtttcatctcttctgtgattccaaagaggtggaatttcatcagaatggagtaaatgcaattcaaaaattgtataaaaatgaacactgccaagataaagccaaccagacccttca

SEQ ID NO: 135667 - DNA, 725 bp, Homo sapiens
  Payload ID: 6522
  Gene Symbol: FGD6
  Gene Name: FYVE, RhoGEF and PH domain containing 6
  ENST ID: ENST00000548069
  CDS Start-End: 1-401
ctaataagtatggcttagattacctgaaaaatcaaccagcaagagtatgtgaacattgtttccaagaactgcagaaattagatcaccagcactcccctaggattggatctcctggaaatcacaaatctccttcaagtgccttatcatcagtcttacatagcattccatcagggaggaaacagaaaaaaatcccagctgctctcaaagaagtatcagcaaacacagaggattcttctatgagtggctacttgtacagatcaaagggcaataaaaaaccctggaaacacttttggtttgtcataaaaaataaagtactatatacatatgctgcaagtgaggtggatagaagcatttcaggaaggcacaatattgtagcagtattggtttcatctcttctgtgattccaaagaggtggaatttcatcagaatggagtaaatgcaattcaaaaattgtataaaaatgaacactgccaagataaagccaaccagacccttcatcaaagaaattgttttgttaggtataagcaatttttaaaaggtgtttgttttttcatttatgttatttattaaaattttgatgtttacttaatggtcagaattatttctgagacacactgaattctaaagtaccatttctttagagaccagaaaaactatcttaatactgtatactgtattaactattcgtgacatagttcacactgttttcttaccttacattgtaa

SEQ ID NO: 135668 - DNA, 3757 bp, Homo sapiens
  Payload ID: 6522
  Gene Symbol: FGD6
  Gene Name: FYVE, RhoGEF and PH domain containing 6
  ENST ID: ENST00000549499
  CDS Start-End: 140-3757
aggctgcgccgcggggcggcgggacggaatgtgggcgctgcgggggcttttctctcctacccgaactgtgggaacaatggactgaaaggggaagatggattgaggggccgagcggggaagcgagctgcaccggggaatcatgacttctgcagccgagataaagaagccaccagtggcccccaagcccaagtttgttgtggcaaataataagccagccccacctcctattgcacctaaacccgacattgtgatttctagtgttccacagtcgacaaagaaaatgaaaccagcaatagccccaaaaccaaaagtcctgaagacctcacctgttcgagagattgggcagtcgccatcaaggaaaatcatgttgaacctggaagggcataaacaggaattagctgaaagcactgacaactttaattgtaaatatgaaggcaatcagagcaatgattatatttcaccaatgtgttcctgcagttctgagtgtatccataagctgggccatagagagaatttgtgtgtaaagcagcttgttttagagcccctggaaatgaatgaaaatttagaaaacagtaaaattgatgagactttgactataaaaactaggagtaaatgtgatttgtatggtgaaaaagccaagaaccagggtggggttgttttaaaggcaagcgttttagaagaggagctcaaagatgccttaatacaccaaatgccaccttttatttctgcacagaagcacaggcccacagacagcccagaaatgaatggtggctgtaattcaaatggacaattcagaattgaatttgcggatttgtcaccttccccatccagctttgaaaaagttcctgatcatcacagttgccacttacagcttcctagtgatgaatgtgaacattttgaaacttgccaggatgacagtgaaaaaagcaataattgctttcagtcatctgaactagaggctctggaaaatgggaaaaggagtactttaatatcttcagatggagttagtaagaaatcagaagtcaaagaccttggtcccttagaaattcatttagtaccatataccccaaaatttccaactcccaagcccagaaagacacgaactgctcgtctgttacgccaaaagtgtgtagatactcctagtgaaagcactgaagaaccggggaattcagacagtagctcttcctgtcttactgaaaatagtttgaaaatcaataaaatcagtgttctgcatcagaatgttttgtgtaagcaggaacaggtggataaaatgaagctaggaaataaaagtgaattgaatatggaatccaacagtgatgcacaggacttagtcaattcacagaaagccatgtgtaatgaaacaacttcctttgaaaaaatggcaccttcttttgataaagactctaatttgagttctgacagcacaactgtagatggttctagtatgtcgcttgctgtggacgaagggaccggttttataagatgtactgtatctatgagcctgcctaagcagctcaaattaacttgcaatgaacatttgcaatctgggagaaacctgggagtttctgcccctcaaatgcaaaaggaatctgttataaaagaggaaaattctctacgaattgtccccaaaaaacctcaaagacatagcttgcctgctacaggagtgcttaaaaaggctgcctccgaggagcttttggaaaaaagttcttatccttcaagtgaagaaaaaagttcagagaagagtctagaaagaaatcaccttcagcatttgtgtgcccaaaaccgtggtgtgtcatcctcctttgatatgcctaaacgggcttcagaaaagccagtgtggaagttacctcatcctattttacccttttcagggaacccagaattcttaaagtctgtcaccgtatcgtcaaacagtgagccttcaacagccctaaccaagcccagagcaaaatcgttatctgctatggatgtggaaaagtgcactaagccttgcaaagactctacaaagaaaaactcttttaaaaagttgctcagcatgaaactgtccatctgtttcatgaagagtgactttcaaaaattttggtccaagagtagccaactcggagacaccaccacaggccacctctccagtggggagcagaaggggattgaaagtgattggcaaggcttgttggtaggagaggagaagagaagtaaacccatcaaggcatattccacagaaaactatagcctggaatctcaaaagaagaggaagaagtctcggggccagaccagtgcagctaatggtctgagagctgagtctttggatgaccaaatgctctcccgggagtcatcatctcaggcaccttacaagtctgttacaagcctctgtgcaccggagtatgaaaatatacgccattatgaggaaataccagagtacgagaacttgccatttattatggctatacggaaaactcaagagttggaatggcagaattccagcagcatggaggacgctgatgcaaatgtgtatgaggtagaagagccgtatgaagctccagatggccagctgcagcttggacccagacatcagcattccagttcaggagcatcccaggaggaacagaatgatcttggtcttggtgaccttccctctgatgaggaggaaatcatcaacagttctgatgaagatgatgtcagctctgagtcaagtaaaggagagcctgacccactggaagataaacaggatgaagataatggaatgaaaagtaaagttcatcatattgccaaggagatcatgagctcagagaaagtgtttgtggatgtgttaaaacttttgcatattgatttccgggatgcagtagctcatgcttccaggcaacttgggaaaccagtgattgaggaccggattctaaatcagatcctatactacttgcctcagctgtatgagctcaaccgggatctcttgaaggaactggaggaaagaatgttgcactggactgaacaacaaagaattgctgatatctttgtaaagaagggaccatatctaaaaatgtattccacatacatcaaagaatttgataagaatatagccttgctggatgaacagtgcaagaaaaatccaggttttgctgctgttgttagagaatttgagatgagccctcgctgtgctaatctggccctcaagcactacctgctcaagccggttcagaggatcccccagtacaggctgttgctgacagattatttgaagaatctcatagaagatgctggagattacagagacactcaagatgcccttgctgttgttatagaggtagccaaccacgccaatgacaccatgaagcaaggagacaactttcagaaacttatgcaaattcagtacagcttaaatggacaccatgaaattgtgcagcctggtcgggtttttctcaaagaaggaattctgatgaagctgtctcggaaagtgatgcaacctcgaatgtttttcctgtttaatgatgccctgctgtatacaacaccagtgcagtctgggatgtataaactgaacaacatgctctcactggctggaatgaaggtcagaaaacctacccaagaagcctatcagaatgaattaaagattgaaagtgtagaacgttccttcattctctcagccagttctgccacagaaagggatgaatggctagaagcgatttccagggcaatagaagagtatgccaagaaaagaatcaccttctgtcctagtaggagtcttgatgaggcagactcagaaaataaa

SEQ ID NO: 135669 - DNA, 904 bp, Homo sapiens
  Payload ID: 6522
  Gene Symbol: FGD6
  Gene Name: FYVE, RhoGEF and PH domain containing 6
  ENST ID: ENST00000551521
  CDS Start-End: 67-904
agttactggggcagctactggtttcctgttcctcccatctgactcagggtgatcagtcacattcttatgctgcagttaaggccccaggtgattcttaactgtttaaggagatccaggccctgctctctttgccaagattatttgaagaatctcatagaagatgctggagattacagagacactcaagatgcccttgctgttgttatagaggtagccaaccacgccaatgacaccatgaagcaaggagacaactttcagaaacttatgcaaattcagtacagcttaaatggacaccatgaaattgtgcagcctggtcgggtttttctcaaagaaggaattctgatgaagctgtctcggaaagtgatgcaacctcgaatgtttttcctgtttaatgatgccctgctgtatacaacaccagtgcagtctgggatgtataaactgaacaacatgctctcactggctggaatgaaggtcagaaaacctacccaagaagcctatcagaatgaattaaagattgaaagtgtagaacgttccttcattctctcagccagttctgccacagaaagggatgaatggctagaagcgatttccagggcaatagaagagtatgccaagaaaagaatcaccttctgtcctagtaggagtcttgatgaggcagactcagaaaataaagaagaagttagtcctcttggatcgaaggctcccatctggattcctgataccagagccacaatgtgtatgatctgcacaagcgaattcactctcacctggagacgacaccactgccgggcctgtggaaagattgtatgccaagcttgttcgtctaataagtatggcttagattacctgaaaaatcaaccagcaagagtatgtgaacattgtttccaagaactgcagaaattag

SEQ ID NO: 135670 - DNA, 4568 bp, Homo sapiens
  Payload ID: 6522
  Gene Symbol: FGD6
  Gene Name: FYVE, RhoGEF and PH domain containing 6
  Uniprot ID: Q6ZV73
  ENST ID: ENST00000546711
  CDS Start-End: 225-4349
agtgctcgcccgcccgaccccggcggctcgcgcccgggagcgccgcagggtcgctagagtcggccgcgtcctttgtgtggcgctcaggctgcgccgcggggcggcgggacggaatgtgggcgctgcgggggcttttctctcctacccgaactgtgggaacaatggactgaaaggggaagatggattgaggggccgagcggggaagcgagctgcaccggggaatcatgacttctgcagccgagataaagaagccaccagtggcccccaagcccaagtttgttgtggcaaataataagccagccccacctcctattgcacctaaacccgacattgtgatttctagtgttccacagtcgacaaagaaaatgaaaccagcaatagccccaaaaccaaaagtcctgaagacctcacctgttcgagagattgggcagtcgccatcaaggaaaatcatgttgaacctggaagggcataaacaggaattagctgaaagcactgacaactttaattgtaaatatgaaggcaatcagagcaatgattatatttcaccaatgtgttcctgcagttctgagtgtatccataagctgggccatagagagaatttgtgtgtaaagcagcttgttttagagcccctggaaatgaatgaaaatttagaaaacagtaaaattgatgagactttgactataaaaactaggagtaaatgtgatttgtatggtgaaaaagccaagaaccagggtggggttgttttaaaggcaagcgttttagaagaggagctcaaagatgccttaatacaccaaatgccaccttttatttctgcacagaagcacaggcccacagacagcccagaaatgaatggtggctgtaattcaaatggacaattcagaattgaatttgcggatttgtcaccttccccatccagctttgaaaaagttcctgatcatcacagttgccacttacagcttcctagtgatgaatgtgaacattttgaaacttgccaggatgacagtgaaaaaagcaataattgctttcagtcatctgaactagaggctctggaaaatgggaaaaggagtactttaatatcttcagatggagttagtaagaaatcagaagtcaaagaccttggtcccttagaaattcatttagtaccatataccccaaaatttccaactcccaagcccagaaagacacgaactgctcgtctgttacgccaaaagtgtgtagatactcctagtgaaagcactgaagaaccggggaattcagacagtagctcttcctgtcttactgaaaatagtttgaaaatcaataaaatcagtgttctgcatcagaatgttttgtgtaagcaggaacaggtggataaaatgaagctaggaaataaaagtgaattgaatatggaatccaacagtgatgcacaggacttagtcaattcacagaaagccatgtgtaatgaaacaacttcctttgaaaaaatggcaccttcttttgataaagactctaatttgagttctgacagcacaactgtagatggttctagtatgtcgcttgctgtggacgaagggaccggttttataagatgtactgtatctatgagcctgcctaagcagctcaaattaacttgcaatgaacatttgcaatctgggagaaacctgggagtttctgcccctcaaatgcaaaaggaatctgttataaaagaggaaaattctctacgaattgtccccaaaaaacctcaaagacatagcttgcctgctacaggagtgcttaaaaaggctgcctccgaggagcttttggaaaaaagttcttatccttcaagtgaagaaaaaagttcagagaagagtctagaaagaaatcaccttcagcatttgtgtgcccaaaaccgtggtgtgtcatcctcctttgatatgcctaaacgggcttcagaaaagccagtgtggaagttacctcatcctattttacccttttcagggaacccagaattcttaaagtctgtcaccgtatcgtcaaacagtgagccttcaacagccctaaccaagcccagagcaaaatcgttatctgctatggatgtggaaaagtgcactaagccttgcaaagactctacaaagaaaaactcttttaaaaagttgctcagcatgaaactgtccatctgtttcatgaagagtgactttcaaaaattttggtccaagagtagccaactcggagacaccaccacaggccacctctccagtggggagcagaaggggattgaaagtgattggcaaggcttgttggtaggagaggagaagagaagtaaacccatcaaggcatattccacagaaaactatagcctggaatctcaaaagaagaggaagaagtctcggggccagaccagtgcagctaatggtctgagagctgagtctttggatgaccaaatgctctcccgggagtcatcatctcaggcaccttacaagtctgttacaagcctctgtgcaccggagtatgaaaatatacgccattatgaggaaataccagagtacgagaacttgccatttattatggctatacggaaaactcaagagttggaatggcagaattccagcagcatggaggacgctgatgcaaatgtgtatgaggtagaagagccgtatgaagctccagatggccagctgcagcttggacccagacatcagcattccagttcaggagcatcccaggaggaacagaatgatcttggtcttggtgaccttccctctgatgaggaggaaatcatcaacagttctgatgaagatgatgtcagctctgagtcaagtaaaggagagcctgacccactggaagataaacaggatgaagataatggaatgaaaagtaaagttcatcatattgccaaggagatcatgagctcagagaaagtgtttgtggatgtgttaaaacttttgcatattgatttccgggatgcagtagctcatgcttccaggcaacttgggaaaccagtgattgaggaccggattctaaatcagatcctatactacttgcctcagctgtatgagctcaaccgggatctcttgaaggaactggaggaaagaatgttgcactggactgaacaacaaagaattgctgatatctttgtaaagaagggaccatatctaaaaatgtattccacatacatcaaagaatttgataagaatatagccttgctggatgaacagtgcaagaaaaatccaggttttgctgctgttgttagagaatttgagatgagccctcgctgtgctaatctggccctcaagcactacctgctcaagccggttcagaggatcccccagtacaggctgttgctgacagattatttgaagaatctcatagaagatgctggagattacagagacactcaagatgcccttgctgttgttatagaggtagccaaccacgccaatgacaccatgaagcaaggagacaactttcagaaacttatgcaaattcagtacagcttaaatggacaccatgaaattgtgcagcctggtcgggtttttctcaaagaaggaattctgatgaagctgtctcggaaagtgatgcaacctcgaatgtttttcctgtttaatgatgccctgctgtatacaacaccagtgcagtctgggatgtataaactgaacaacatgctctcactggctggaatgaaggtcagaaaacctacccaagaagcctatcagaatgaattaaagattgaaagtgtagaacgttccttcattctctcagccagttctgccacagaaagggatgaatggctagaagcgatttccagggcaatagaagagtatgccaagaaaagaatcaccttctgtcctagtaggagtcttgatgaggcagactcagaaaataaagaagaagttagtcctcttggatcgaaggctcccatctggattcctgataccagagccacaatgtgtatgatctgcacaagcgaattcactctcacctggagacgacaccactgccgggcctgtggaaagattgtatgccaagcttgttcgtctaataagtatggcttagattacctgaaaaatcaaccagcaagagtatgtgaacattgtttccaagaactgcagaaattagatcaccagcactcccctaggattggatctcctggaaatcacaaatctccttcaagtgccttatcatcagtcttacatagcattccatcagggaggaaacagaaaaaaatcccagctgctctcaaagaagtatcagcaaacacagaggattcttctatgagtggctacttgtacagatcaaagggcaataaaaaaccctggaaacacttttggtttgtcataaaaaataaagtactatatacatatgctgcaagtgaggtaagatctgaaatctaaagatgagtaatttggggttttgtaatgccaactgcaagtaattacaatattttaaaaatccatttattttacataagattttttgctttgcttttggatgggggaggtgttgttgctgttatttttaatgtgaacagtgttcttgctttgtacctggagagctctttctcaaatgtgttaggaattttccatattattaaaatgcaatttttgtgtgtg

SEQ ID NO: 135671 - DNA, 768 bp, Homo sapiens
  Payload ID: 6523
  Gene Symbol: GAGE1
  Gene Name: G antigen 1
  Uniprot ID: Q13068
  ENST ID: ENST00000381700
  CDS Start-End: 75-428
agctgtgaggcagtgctgtgtggttcctgccgtccggactctttttcctctactgagattcatctgtgtgaaatatgagttggcgaggaagatcgacctattattggcctagaccaaggcgctatgtacagcctcctgaaatgattgggcctatgcggcccgagcagttcagtgatgaagtggaaccagcaacacctgaagaaggggaaccagcaactcaacgtcaggatcctgcagctgctcaggagggagaggatgagggagcatctgcaggtcaagggccgaagcctgaagctgatagccaggaacagggtcacccacagactgggtgtgagtgtgaagatggtcctgatgggcaggagatggacccgccaaatccagaggaggtgaaaacgcctgaagaaggtgaagggcaatcacagtgttaaaagaagacatgctgaaatgttgcaggctgctcctatgttggaaaattcttcattgaagttctcccaataaagctttacagccttctgcaaagaagtcttgtgaatcttttgtcaattttatttctagctatttgatgctgtgaaatgtttcattctttgcaattttgtattctatctccttgagctgtgtgtagaggcataattctcatgtattgattttctatccagcaaccttgttaaatatgcttatgaattttaaaagtttacttctaggttttttcagttttcaacctacagaatcatatcatttttgaataagaacaattttgtttctgccttt

SEQ ID NO: 135672 - DNA, 3129 bp, Homo sapiens
  Payload ID: 6523
  Gene Symbol: GAGE1
  Gene Name: G antigen 1
  Uniprot ID: Q13065
  ENST ID: ENST00000381709
  CDS Start-End: 112-531
ctgcccggccccttcgcccacgtgaagaacgccagggagctgtgaggcagtgctgtgtggttcctgccgtccggactctttttcctctactgagattcatctgtgtgaaatatgagttggcgaggaagatcgacctattattggcctagaccaaggcgctatgtacagcctcctgaaatgattgggcctatgcggcccgagcagttcagtgatgaagtggaaccagcaacacctgaagaaggggaaccagcaactcaacgtcaggatcctgcagctgctcaggagggagaggatgagggagcatctgcaggtcaagggccgaagcctgaagctgatagccaggaacagggtcacccacagactgggtgtgagtgtgaagatggtcctgatgggcaggagatggacccgccaaatccagaggaggtgaaaacgcctgaagaagagatgaggtctcactatgttgcccagactgggattctctggcttttaatgaacaattgcttcttaaatctttccccacggaaaccttgagtgactgaaatatcaaatggcaagagaccgtttagttcctatcatctgtggcatgtgaagggcaatcacagtgttaaaagaagacatgctgaaatgttgcaggctgctcctatgttggaaaattcttcattgaagttctcccaataaagctttacagccttctgcaaagaagtcttgtgaatcttttgtcaattttatttctagctatttgatgctgtgaaatgtttcattctttgcaattttgtattctatctccttgagctgtgtgtagaggcataattctcatgtattgattttctatccagcaaccttgttaaatatgcttatgaattttaaaagtttacttctaggttttttcagttttcaacctacagaatcatatcatttttgaataagaacaattttgtttctgccttttttgtttgttttttcttttgtatttttcgtagaggtgggattttggcctgtgtcctaggctttttttgaactcctgagcgcaagtaatccactctccttggcctttcaaagtgttgggattacaggcatgggccaccgtgctggtcctgtttttgccattttaaacccttttatttccttttctgattttatggcattgagcagatctaccggatacaattgtgatagtggaaatttttgtgttattcctgatgagaaatggaaaaatttcaacatttcacgacaatatttagtgtactttttttgtagatggactttttcagagtaagtcaagccattctgttttagtttgttgagagtgttcattttgaatatatgttgaatttcatcaaacactgacctgagtcatcttaaaacatgtgaattgagatttctttgctactaagaaagtgagcgggcactctgcttcatgtttacttttgtcatgttgcatgaaaaacattttgcttcatgtttgattctgtatgttgaaaactgaaatcatctattgtgattaccacagggttttttcccccagtaatctgtttatgtagtcaattacgttgataaatctgtactttttaaattttaacaattgagacaggtctcactctgtcacccatgctgactgcagtagtgtgatcacagcttactgcaacctcaacctcctgggctcaggcgatcctcccacctcaccctcctcagtagctaggactataggtacatgccaccatgccaagctaatttttctgttttagagatggtattttttcatgttgcccaggctggttttatactcctaatctcaagccatccactagcctcagcctcccaaagtgctgggattacaggaatgagtcacggtgcctggaaattttgtacatttaaaccaacaatttggtcatgggtaatctatgtcctaataatttatttaaggatttttatgtatatcctcatgagtgacattacctgtacttttatttcatatgctcatttgttggacgttgttatcaaggttcctctagcttcataaaacgggttggtatgtaaaacctctttttccattcactggaactcaagtctcctcaaggctgtgagtaatgcagggctaggctttcccataatgagcttttctagaatgcttctctcagatttggaccctacttaaacagcagtgaccaaacgggcagctccaggtacctatcccctcaaactttgtgagggtcgcgttctctgaagatgcctcttcaatttgaaagctatctgttcctgtttctctgctgatattaactctctgtgcacagaaagttaaacgtcactggttattaatttccctagattttgatctgtgctgtgtggctgagaatgggctgactgaccctagatctgtgtataattatgacaatggctccatttatttttaaaataagaggaattattataaaattcctatttactggatgtgtactatctatgaattacttctttgtgctaggttgtgtacatgtatgacctctttagatcctcacaagataaggcagaattttcatgaaattgatgactgactccagtaagaagcagatttggggggatttcaatttctaagctcaaagcccttgcacttttctcaaagtaaagcttttgaaagtgttaaatgtacacgaactgatggtgtatatgatgattttagttgtaatctgatgttttctttaaaaatttacatatacaaaagtgtttgactcaaaaggctttgttcttcccttaaaggaagcatctaccaaaatgtggcacacaaaccttgcatggtgtctctagggcctcctaccccgcatttcccctgctttttctcttgttctgactgaaaaacaaagtgctttgactgtgctgtgacccagccagctgcatgtttacccagcatgcttgaacccaagctggagccttgaacataaaggtgtttaagttgttgctcaaaatatggaaagaatctagctctggccttgaaccaaatcccttaaactctcctataaaactccataacctgaccccctcagtgcggatatacctaggcatgacattcttgttgcctgttgcgaggatgctttagcctactctaagttctcccaataaatgctttggactgat

SEQ ID NO: 135673 - DNA, 564 bp, Homo sapiens
  Payload ID: 6523
  Gene Symbol: GAGE1
  Gene Name: G antigen 1
  Uniprot ID: Q13068
  ENST ID: ENST00000610680
  CDS Start-End: 117-470
gtcttctgcccggccccttcgcccacgtgaagaacgccagggagctgtgaggcagtgctgtgtggttcctgccgtccggactctttttcctctactgagattcatctgtgtgaaatatgagttggcgaggaagatcgacctattattggcctagaccaaggcgctatgtacagcctcctgaaatgattgggcctatgcggcccgagcagttcagtgatgaagtggaaccagcaacacctgaagaaggggaaccagcaactcaacgtcaggatcctgcagctgctcaggagggagaggatgagggagcatctgcaggtcaagggccgaagcctgaagctgatagccaggaacagggtcacccacagactgggtgtgagtgtgaagatggtcctgatgggcaggagatggacccgccaaatccagaggaggtgaaaacgcctgaagaaggtgaagggcaatcacagtgttaaaagaagacatgctgaaatgttgcaggctgctcctatgttggaaaattcttcattgaagttctcccaataaagctttacagccttctgcaaagaa

SEQ ID NO: 135674 - DNA, 2873 bp, Homo sapiens
  Payload ID: 6523
  Gene Symbol: GAGE1
  Gene Name: G antigen 1
  Uniprot ID: Q13068
  ENST ID: ENST00000619375
  CDS Start-End: 1-354
atgagttggcgaggaagatcgacctattattggcctagaccaaggcgctatgtacagcctcctgaaatgattgggcctatgcggcccgagcagttcagtgatgaagtggaaccagcaacacctgaagaaggggaaccagcaactcaacgtcaggatcctgcagctgctcaggagggagaggatgagggagcatctgcaggtcaagggccgaagcctgaagctgatagccaggaacagggtcacccacagactgggtgtgagtgtgaagatggtcctgatgggcaggagatggacccgccaaatccagaggaggtgaaaacgcctgaagaaggtgaagggcaatcacagtgttaaaagaagacatgctgaaatgttgcaggctgctcctatgttggaaaattcttcattgaagttctcccaataaagctttacagccttctgcaaagaagtcttgtgaatcttttgtcaattttatttctagctatttgatgctgtgaaatgtttcattctttgcaattttgtattctatctccttgagctgtgtgtagaggcataattctcatgtattgattttctatccagcaaccttgttaaatatgcttatgaattttaaaagtttacttctaggttttttcagttttcaacctacagaatcatatcatttttgaataagaacaattttgtttctgccttttttgtttgttttttcttttgtatttttcgtagaggtgggattttggcctgtgtcctaggctttttttgaactcctgagcgcaagtaatccactctccttggcctttcaaagtgttgggattacaggcatgggccaccgtgctggtcctgtttttgccattttaaacccttttatttccttttctgattttatggcattgagcagatctaccggatacaattgtgatagtggaaatttttgtgttattcctgatgagaaatggaaaaatttcaacatttcacgacaatatttagtgtactttttttgtagatggactttttcagagtaagtcaagccattctgttttagtttgttgagagtgttcattttgaatatatgttgaatttcatcaaacactgacctgagtcatcttaaaacatgtgaattgagatttctttgctactaagaaagtgagcgggcactctgcttcatgtttacttttgtcatgttgcatgaaaaacattttgcttcatgtttgattctgtatgttgaaaactgaaatcatctattgtgattaccacagggttttttcccccagtaatctgtttatgtagtcaattacgttgataaatctgtactttttaaattttaacaattgagacaggtctcactctgtcacccatgctgactgcagtagtgtgatcacagcttactgcaacctcaacctcctgggctcaggcgatcctcccacctcaccctcctcagtagctaggactataggtacatgccaccatgccaagctaatttttctgttttagagatggtattttttcatgttgcccaggctggttttatactcctaatctcaagccatccactagcctcagcctcccaaagtgctgggattacaggaatgagtcacggtgcctggaaattttgtacatttaaaccaacaatttggtcatgggtaatctatgtcctaataatttatttaaggatttttatgtatatcctcatgagtgacattacctgtacttttatttcatatgctcatttgttggacgttgttatcaaggttcctctagcttcataaaacgggttggtatgtaaaacctctttttccattcactggaactcaagtctcctcaaggctgtgagtaatgcagggctaggctttcccataatgagcttttctagaatgcttctctcagatttggaccctacttaaacagcagtgaccaaacgggcagctccaggtacctatcccctcaaactttgtgagggtcgcgttctctgaagatgcctcttcaatttgaaagctatctgttcctgtttctctgctgatattaactctctgtgcacagaaagttaaacgtcactggttattaatttccctagattttgatctgtgctgtgtggctgagaatgggctgactgaccctagatctgtgtataattatgacaatggctccatttatttttaaaataagaggaattattataaaattcctatttactggatgtgtactatctatgaattacttctttgtgctaggttgtgtacatgtatgacctctttagatcctcacaagataaggcagaattttcatgaaattgatgactgactccagtaagaagcagatttggggggatttcaatttctaagctcaaagcccttgcacttttctcaaagtaaagcttttgaaagtgttaaatgtacacgaactgatggtgtatatgatgattttagttgtaatctgatgttttctttaaaaatttacatatacaaaagtgtttgactcaaaaggctttgttcttcccttaaaggaagcatctaccaaaatgtggcacacaaaccttgcatggtgtctctagggcctcctaccccgcatttcccctgctttttctcttgttctgactgaaaaacaaagtgctttgactgtgctgtgacccagccagctgcatgtttacccagcatgcttgaacccaagctggagccttgaacataaaggtgtttaagttgttgctcaaaatatggaaagaatctagctctggccttgaaccaaatcccttaaactctcctataaaactccataacctgaccccctcagtgcggatatacctaggcatgacattcttgttgcctgttgcgaggatgctttagcctactctaagttctcccaataaatgctttggactg

SEQ ID NO: 135675 - DNA, 538 bp, Homo sapiens
  Payload ID: 6524
  Gene Symbol: GAGE10
  Gene Name: G antigen 10
  Uniprot ID: A6NGK3
  ENST ID: ENST00000407599
  CDS Start-End: 94-444
cacgtggagaacgccagggagctgtgagggtgtgtggtctcgttcctgtcgtctggaatatttttcctctactgagattcatctgtgtgaaatatgagttggcgaggaagatcgacctatcggcctagaccaagacgctacgtagagccccctgaaatgattgggcctatgctgcccgagcagttcagtgatgaagtggaaccagcaacacctgaagaaggggaaccagcaactcaacgtcaggatcctgcagctgctcaggagggagaggatgagggagcatctgcaggtcaagggccgaagcctgaagctgatagccaggaacaggttcacccaaagactgggtgtgagtgtggagatggtcctgatggccaggagatgggcctgccaaatccagaggaggtgaaaaggcctgaagaaggtgaaaagcaatcacagtgttaaaagaagacacgttgaaatgatgcaggctgctcctatgttggaaatttgttcattaaaattctcccaataaagctttacagccttctgcaaagaa

SEQ ID NO: 135676 - DNA, 117 bp, Homo sapiens
  Payload ID: 6525
  Gene Symbol: GAGE12B
  Gene Name: G antigen 12B
  ENST ID: ENST00000361446
  CDS Start-End: 1-23
gtgaaaagcaatcacagtgttaaaagaagacacgttgaaatgatgcaggctgctcctatgttggaaatttgttcattaaaattctcccaataaagctttacagccttctgcaaagaa

SEQ ID NO: 135677 - DNA, 527 bp, Homo sapiens
  Payload ID: 6526
  Gene Symbol: GAGE12C
  Gene Name: G antigen 12C
  Uniprot ID: A1L429
  ENST ID: ENST00000420398
  CDS Start-End: 83-436
cgccagggagctgtgaggcagtgctgtgtggttcctgccgtccggactctttttcctctactgagattcatctgtgtgaaatatgagttggcgaggaagatcgacctattattggcctagaccaaggcgctatgtacagcctcctgaaatgattgggcctatgcggcccgagcagttcagtgatgaagtggaaccagcaacacctgaagaaggggaaccagcaactcaatgtcaggatcctgcagctgctcaggagggagaggatgagggagcatctgcaggtcaagggccgaagcctgaagctcatagccaggaacagggtcacccacagactgggtgtgagtgtgaagatggtcctgatgggcaggagatggacccgccaaatccagaggaggtgaaaacgcctgaagaaggtgaaaagcaatcacagtgttaaaagaagacacgttgaaatgatgcaggctgctcctatgttggaaatttgttcattaaaattctcccaataaagctttacagccttctgcaaa

SEQ ID NO: 135678 - DNA, 527 bp, Homo sapiens; identical to SEQ ID NO: 135677
  Payload ID: 6527
  Gene Symbol: GAGE12D
  Gene Name: G antigen 12D
  Uniprot ID: A1L429
  ENST ID: ENST00000405679
  CDS Start-End: 83-436

SEQ ID NO: 135679 - DNA, 520 bp, Homo sapiens
  Payload ID: 6528
  Gene Symbol: GAGE12E
  Gene Name: G antigen 12E
  Uniprot ID: A1L429
  ENST ID: ENST00000381698
  CDS Start-End: 73-426
ctgtgaggcagtgctgtgtggttcctgccgtccggactctttttcctctactgagattcatctgtgtgaaatatgagttggcgaggaagatcgacctattattggcctagaccaaggcgctatgtacagcctcctgaaatgattgggcctatgcggcccgagcagttcagtgatgaagtggaaccagcaacacctgaagaaggggaaccagcaactcaatgtcaggatcctgcagctgctcaggagggagaggatgagggagcatctgcaggtcaagggccgaagcctgaagctcatagccaggaacagggtcacccacagactgggtgtgagtgtgaagatggtcctgatgggcaggagatggacccgccaaatccagaggaggtgaaaacgcctgaagaaggtgaaaagcaatcacagtgttaaaagaagacacgttgaaatgatgcaggctgctcctatgttggaaatttgttcattaaaattctcccaataaagctttacagccttctgcaaagaa

SEQ ID NO: 135680 - DNA, 527 bp, Homo sapiens
  Payload ID: 6529
  Gene Symbol: GAGE12F
  Gene Name: G antigen 12F
  Uniprot ID: P0CL80
  ENST ID: ENST00000440137
  CDS Start-End: 83-436
cgccagggagctgtgaggcagtgctgtgtggttcctgccgtccggactctttttcctctactgagattcatctgtgtgaaatatgagttggcgaggaagatcgacctattattggcctagaccaaggcgctatgtacagcctcctgaaatgattgggcctatgcggcccgagcagttcagtgatgaagtggaaccagcaacacctgaagaaggggaaccagcaactcaacgtcaggatcctgcagctgctcaggagggagaggatgagggagcatctgcaggtcaagggccgaagcctgaagctcatagccaggaacagggtcacccacagactgggtgtgagtgtgaagatggtcctgatgggcaggagatggacccgccaaatccagaggaggtgaaaacgcctgaagaaggtgaaaagcaatcacagtgttaaaagaagacacgttgaaatgatgcaggctgctcctatgttggaaatttgttcattaaaattctcccaataaagctttacagccttctgcaaa

SEQ ID NO: 135681 - DNA, 527 bp, Homo sapiens; identical to SEQ ID NO: 135680
  Payload ID: 6530
  Gene Symbol: GAGE12G
  Gene Name: G antigen 12G
  Uniprot ID: P0CL81
  ENST ID: ENST00000445148
  CDS Start-End: 83-436

SEQ ID NO: 135682 - DNA, 527 bp, Homo sapiens
  Payload ID: 6531
  Gene Symbol: GAGE12H
  Gene Name: G antigen 12H
  Uniprot ID: A6NDE8
  ENST ID: ENST00000381722
  CDS Start-End: 83-436
cgccagggagctgtgaggcagtgctgtgtggttcctgccgtccggactctttttcctctactgagattcatctgtgtgaaatatgagttggcgaggaagatcgacctattattggcctagaccaaggcgctatgtacagcctcctgaaatgattgggcctatgcggcccgagcagttcagtgatgaagtggaaccagcaacacctgaagaaggggaaccagcaactcaatgtcaggatcctgcagctgctcagaagggagaggatgagggagcatctgcaggtcaagggccgaagcctgaagctcatagccaggaacagggtcacccacagactgggtgtgagtgtgaagatggtcctgatgggcaggagatggacccgccaaatccagaggaggtgaaaacgcctgaagaaggtgaaaagcaatcacagtgttaaaagaagacacgttgaaatgatgcaggctgctcctatgttggaaatttgttcattaaaattctcccaataaagctttacagccttctgcaaa

SEQ ID NO: 135683 - DNA, 541 bp, Homo sapiens
  Payload ID: 6532
  Gene Symbol: GAGE12J
  Gene Name: G antigen 12J
  Uniprot ID: A6NER3
  ENST ID: ENST00000442437
  CDS Start-End: 97-450
gcccacgtgaagaacgccagggagctgtgaggcagtgctgtgtggttcctgccgtccggactctttttcctctactgagattcatctgtgtgaaatatgagttggcgaggaagatcgacctattattggcctagaccaagaccctatgtacagcctcctgaaatgattgggcctatgcggcccgagcagttcagtgatgaagtggaaccagcaacacctgaagaaggggaaccagcaactcaacgtcaggatcctgcagctgctcaggagggagaggatgagggagcatctgcaggtcaagggccgaagcctgaagctgatagccaggaacagggtcacccacagactgggtgtgagtgtgaagatggtcctgatgggcaggagatggacccgccaaatccagaggaggtgaaaacgcctgaagaaggtgaaaagcaatcacagtgttaaaagaagacacgttgaaatgatgcaggctgctcctatgttggaaatttgttcattaaaattctcccaataaagctttacagccttctgcaaa

SEQ ID NO: 135684 - DNA, 530 bp, Homo sapiens
  Payload ID: 6533
  Gene Symbol: GAGE13
  Gene Name: G antigen 13
  ENST ID: ENST00000612958
  CDS Start-End: 83-436
cgccagggagctgtgaggcagtgctgtgtggttcctgccgtccggactctttttcctctactgagattcatctgtgtgaaatatgagttggcgaggaagatcgacctattattggcctagaccaagacgctacgtagagcctcctgaaatgattgggcctatgcggcccgagcagttcagtgatgaagtggaaccagcaacacctgaagaaggggaaccagcaactcaacgtcaggatcctgcagctgctcaggagggagaggatgagggagcatctgcaggtcaagggccgaagcctgaagctgatagccaggaacagggtcacccacagactgggtgtgagtgtgaagatggtcctgatgggcaggagatggacccgccaaatccagaggaggtgaaaacgcctgaagaaggtgaaaagcaatcacagtgttaaaagaagacacgttgaaatgatgcaggctgctcctatgttggaaatttgttcattaaaattctcccaataaagctttacagccttctgcaaagaa

SEQ ID NO: 135685 - DNA, 528 bp, Homo sapiens
  Payload ID: 6534
  Gene Symbol: GAGE2A
  Gene Name: G antigen 2A
  Uniprot ID: Q6NT46
  ENST ID: ENST00000362097
  CDS Start-End: 84-434
acgccagggagctgtgaggcagtgctgtgtggttcctgccgtccggactctttttcctctactgagattcatctgtgtgaaatatgagttggcgaggaagatcgacctatcggcctagaccaagacgctacgtagagcctcctgaaatgattgggcctatgcggcccgagcagttcagtgatgaagtggaaccagcaacacctgaagaaggggaaccagcaactcaacgtcaggatcctgcagctgctcaggagggacaggatgagggagcatctgcaggtcaagggccgaagcctgaagctcatagccaggaacagggtcacccacagactgggtgtgagtgtgaagatggtcctgatgggcaggagatggacccgccaaatccagaggaggtgaaaacgcctgaagaaggtgaaaagcaatcacagtgttaaaagaagacacgttgaaatgatgcaggctgctcctatgttggaaatttgttcattaaaattctcccaataaagctttacagccttctgcaaagaa

SEQ ID NO: 135686 - DNA, 403 bp, Homo sapiens
  Payload ID: 6535
  Gene Symbol: GAGE2E
  Gene Name: G antigen 2E
  ENST ID: ENST00000621907
  CDS Start-End: 73-403
ctgtgaggcagtgctgtgtggttcctgccgtccggactctttttcctctactgagattcatctgtgtgaaatatgagttggcgaggaagatcgacctattattggcctagaccaaggcgctatgtacagcctcctgaaatgattgggcctatgcggcccgagcagttcagtgatgaagtggaaccagcaacacctgaagaaggggaaccagcaactcaacgtcaggatcctgcagctgctcaggagggagaggatgagggagcatctgcaggtcaagggccgaagcctgaagctcatagccaggaacagggtcacccacagactgggtgtgagtgtgaagatggtcctgatgggcaggagatggacccgccaaatccagaggaggtgaaaacgcctgaagaag

SEQ ID NO: 135687 - DNA, 3453 bp, Homo sapiens
  Payload ID: 6536
  Gene Symbol: GFM1
  Gene Name: G elongation factor, mitochondrial 1
  Uniprot ID: Q96RP9
  ENST ID: ENST00000264263
  CDS Start-End: 39-2351
cggcgccacgggactttgacgcgtgctctgcgcttgccatgagactcctgggagctgcagccgtcgcggctctggggcgcggaagggcccccgcctccctaggctggcagaggaagcaggttaattggaaggcctgccgatggtcttcatcaggggtgattcctaatgaaaaaatacgaaatattggaatctcagctcacattgattctgggaaaactacattaacagaacgagtcctttactacactggcagaattgcaaagatgcatgaggtgaaaggtaaagatggagttggtgctgtcatggattccatggaactagagagacaaagaggaatcactattcagtcagcagccacttacaccatgtggaaagatgtcaatattaacattatagatactcctgggcatgtggacttcacaatagaagtggaaagggccctgagagtgttggatggtgcagtccttgttctctgtgctgttggaggggtacagtgccagaccatgactgtcaatcgtcagatgaagcgctacaacgttccgtttctaacttttattaacaaattggaccgaatgggctccaacccagccagggccctgcagcaaatgaggtctaaactaaatcataatgcagcgtttatgcagatacccatgggtttggagggtaattttaaaggtattgtagatcttattgaggaacgagccatctattttgatggagactttgggcacttcctgagggatttccttcctctgctatggaattgggatcgcaggtctggcagtcagattgttcgatatggtgagattccagctgaattaagggcggcggccactgaccaccggcaggagctaattgaatgtgttgccaattcagatgaacagcttggtgagatgtttctggaagaaaaaatcccctcgatttctgatttaaagctagcaattcgaagagctactctgaaaagatcatttactcctgtatttttgggaagcgccttgaagaacaaaggagttcagcctcttttagatgctgttttagaatacctcccaaatccatctgaagtccagaactatgctattctcaataaagaggatgactcaaaagagaaaaccaaaatcctaatgaactccagtagagacaattcccacccatttgtaggcctggcttttaaactggaggtaggtcgatttggacaattaacttatgttcgcagttatcagggagagctaaagaagggtgacaccatctataacacaaggacaagaaagaaagtacggttgcaacggctggctcgcatgcatgccgacatgatggaggatgttgaggaagtatatgccggagacatctgtgcattgtttggcattgactgtgctagtggagacacattcacagacaaagccaacagcggcctttctatggagtcaattcatgttcctgatcctgtcatttcaatagcaatgaagccttctaacaagaacgatctggaaaaattttcaaaaggtattggcaggtttacaagagaagatcccacatttaaagtatactttgacactgagaacaaagagacagttatatctggaatgggagaattacacctggaaatctatgctcagaggctggaaagagagtatggctgtccttgtatcacaggaaagccaaaagttgcctttcgagagaccattactgcccctgtcccgtttgactttacacataaaaaacaatcaggtggtgcaggccagtatggaaaagtaataggtgtcctggagcctctggacccagaggactacactaaattggaattttcagatgaaacattcggatcaaatattccaaagcagtttgtgcctgctgtagaaaaggggtttttagatgcctgcgagaagggccctctttctggtcacaagctctctgggctccggtttgtcctgcaagatggagcacaccacatggttgattctaatgaaatctctttcatccgagcaggagaaggtgctcttaaacaagccttggcaaatgcaacattatgtattcttgaacctattatggctgtggaagttgtagctccaaatgaatttcagggacaagtaattgcaggaattaaccgacgccatggggtaatcactgggcaagatggagttgaggactattttacactgtatgcagatgtccctctaaatgatatgtttggttattccactgaacttaggtcatgcacagagggaaagggagaatacacaatggagtatagcaggtatcagccatgtttaccatccacacaagaagacgtcattaataagtatttggaagctacaggtcaacttcctgttaaaaaaggaaaagccaagaactaactttgcttactgtgagttgactgactctaattgaatctgcgtggttttgatactttgatggattccagtggaataaattcaggctgctgaaacaagaaattctgagcccaggaagcgggctcttctttcttcaaaagaagcccttcttgttcatattcaggagcttctgttatattcaaaggtaattctatgtctatctcaactctattgattggttttatagttcattgaaaatcctcaaataaaatataattattactgaaatatgtttaatatttaaggggaaaagagactaatttcagttatacttttaagcttagaatgtatgttcatttccaaattttgtatcataagagttttcaacatagagaaaagctgaaaaaatgcaaagaataaccacatactttccatctaccttcctttgttaacgggttgtttatcatataataatttgttttgtcatatttgctttcactgtctattatctgtttaagtctcataactctatttttagtttgctgaagacttgaaagtgaatcgcatatatcatgacacttcttggagtgtcattaatgggcaggcttttctgttgaagagtggattccgtatgttcttcatagagagtgtttttcagattcttcattgggatattaaaatattagccaaatttctctctgttttatatatgtctgtttatttcagtttgtggtttctgcaaatttgtaactgcctctgttttaggagtataagtattacttccttgtggtctattgtgaagtaaaaagtagacccttgcatatactattcttgtttgtgttcatcttaatgtttttgtacagctaaatcaaatgtaatttatagagttagtttcatcaacctaatgaatgctagttaaatttgaattccttggaatttatcgtatattgtattcactgagattatgaagggacaaatgttaatcttttgtttccagaaaaagttgggctttcccaagcagttctattacccggttcagaattgcttcatccaaaaatcatctgatggtatagatggatcctagtccttttcattacctgatggtagaaataaaataattgatttt

SEQ ID NO: 135688 - DNA, 3470 bp, Homo sapiens
  Payload ID: 6536
  Gene Symbol: GFM1
  Gene Name: G elongation factor, mitochondrial 1
  ENST ID: ENST00000478254
  CDS Start-End: 108-1469
ctcttacaacattggctgccggcgtgactttgaccgcttcccggtgcgttaccggcagctgaacccacccggcgccacgggactttgacgcgtgctctgcgcttgccatgagactcctgggagctgcagccgtcgcggctctggggcgcggaagggcccccgcctccctaggctggcagaggaagcaggttaattggaaggcctgccgatggtcttcatcaggggtgattcctaatgaaaaaatacgaaatattggaatctcagctcacattgattctgggaaaactacattaacagaacgagtcctttactacactggcagaattgcaaagatgcatgaggtgaaaggtaaagatggagttggtgctgtcatggattccatggaactagagagacaaagaggaatcactattcagtcagcagccacttacaccatgtggaaagatgtcaatattaacattatagatactcctgggcatgtggacttcacaatagaagtggaaagggccctgagagtgttggatggtgcagtccttgttctctgtgctgttggaggggtacagtgccagaccatgactgtcaatcgtcagatgaagcgctacaacgttccgtttctaacttttattaacaaattggaccgaatgggctccaacccagccagggccctgcagcaaatgaggtctaaactaaatcataatgcagcgtttatgcagatacccatgggtttggagggtaattttaaaggtattgtagatcttattgaggaacgagccatctattttgatggagactttggtcagattgttcgatatggtgagattccagctgaattaagggcggcggccactgaccaccggcaggagctaattgaatgtgttgccaattcagatgaacagcttggtgagatgtttctggaagaaaaaatcccctcgatttctgatttaaaggcaacaattcgaagagctactctgaaaagatcatttactcctgtatttttgggaagcgccttgaagaacaaaggagttcagcctcttttagatgctgttttagaatacctcccaaatccatctgaagtccagaactatgctattctcaataaagaggatgactcaaaagagaaaaccaaaatcctaatgaactccagtagagacaattcccacccatttgtaggcctggcttttaaactggaggtaggtcgatttggacaattaacttatgttcgcagttatcagggagagctaaagaagggtgacaccatctataacacaaggacaagaaagaaagtacggttgcaacggctggctcgcatgcatgccgacatgatggaggcaagtacagagaagtatatgccggagacatctgtgcattgtttggcattgactgtgctagtggagacacattcacagacaaagccaacagcggcctttctatggagtcaattcatgttcctgatcctgtcatttcaatagcaatgaagccttctaacaagaacgatctggaaaaattttcaaaaggtattggcaggtttacaagagaagatcccacatttaaagtatactttgacactgagaacaaagagacagttatatctggaatgggagaattacacctggaaatctatgctcagaggctggaaagagagtatggctgtccttgtatcacaggaaagccaaaagttgcctttcgagagaccattactgcccctgtcccgtttgactttacacataaaaaacaatcaggtggtgcaggccagtatggaaaagtaataggtgtcctggagcctctggacccagaggactacactaaattggaattttcagatgaaacattcggatcaaatattccaaagcagtttgtgcctgctgtagaaaaggggtttttagatgcctgcgagaagggccctctttctggtcacaagctctctgggctccggtttgtcctgcaagatggagcacaccacatggttgattctaatgaaatctctttcatccgagcaggagaaggtgctcttaaacaagccttggcaaatgcaacattatgtattcttgaacctattatggctgtggaagttgtagctccaaatgaatttcagggacaagtaattgcaggaattaaccgacgccatggggtaatcactgggcaagatggagttgaggactattttacactgtatgcagatgtccctctaaatgatatgtttggttattccactgaacttaggtcatgcacagagggaaagggagaatacacaatggagtatagcaggtatcagccatgtttaccatccacacaagaagacgtcattaataagtatttggaagctacaggtcaacttcctgttaaaaaaggaaaagccaagaactaactttgcttactgtgagttgactgactctaattgaatctgcgtggttttgatactttgatggattccagtggaataaattcaggctgctgaaacaagaaattctgagcccaggaagcgggctcttctttcttcaaaagaagcccttcttgttcatattcaggagcttctgttatattcaaaggtaattctatgtctatctcaactctattgattggttttatagttcattgaaaatcctcaaataaaatataattattactgaaatatgtttaatatttaaggggaaaagagactaatttcagttatacttttaagcttagaatgtatgttcatttccaaattttgtatcataagagttttcaacatagagaaaagctgaaaaaatgcaaagaataaccacatactttccatctaccttcctttgttaacgggttgtttatcatataataatttgttttgtcatatttgctttcactgtctattatctgtttaagtctcataactctatttttagtttgctgaagacttgaaagtgaatcgcatatatcatgacacttcttggagtgtcattaatgggcaggcttttctgttgaagagtggattccgtatgttcttcatagagagtgtttttcagattcttcattgggatattaaaatattagccaaatttctctctgttttatatatgtctgtttatttcagtttgtggtttctgcaaatttgtaactgcctctgttttaggagtataagtattacttccttgtggtctattgtgaagtaaaaagtagacccttgcatatactattcttgtttgtgttcatcttaatgtttttgtacagctaaatcaaatgtaatttatagagttagtttcatcaacctaatgaatgctagttaaatttgaattccttggaatttatcgtatattgtattcactgagattatgaagggacaaatgttaatcttttgtttccagaaaaagttgggctttcccaagcagttctattacccggttcagaattgcttcatccaaaaatcatctgatggtatagatggatcctagtccttttcattacctgatggtagaaataaaataattgattttaaa

SEQ ID NO: 135689 - DNA, 502 bp, Homo sapiens
  Payload ID: 6536
  Gene Symbol: GFM1
  Gene Name: G elongation factor, mitochondrial 1
  ENST ID: ENST00000464732
  CDS Start-End: 322-502
agaggaagcaggtaccggagcatagagaggctaaatcgggaccattcccggaaccttgtgatcccttctgggcaatggaaggccgtgacaccccctgggtcctcatgactgacagctccgaatactggcagtcgctcgtcagtgctgaaaagcacctcggtgcctgcacattagctcgttaattggaaggcctgccgatggtcttcatcaggggtgattcctaatgaaaaaatacgaaatattggaatctcagctcacattgattctgggaaaactacattaacagaacgagtcctttactacactggcagaattgcaaagatgcatgaggtgaaaggtaaagatggagttggtgctgtcatggattccatggaactagagagacaaagaggaatcactattcagtcagcagccacttacaccatgtggaaagatgtcaatattaacattatagatactcctgggcatgtggacttcacaatagaagtggaaagggccctga

SEQ ID NO: 135690 - DNA, 2147 bp, Homo sapiens
  Payload ID: 6536
  Gene Symbol: GFM1
  Gene Name: G elongation factor, mitochondrial 1
  ENST ID: ENST00000478576
  CDS Start-End: 108-1883
ctcttacaacattggctgccggcgtgactttgaccgcttcccggtgcgttaccggcagctgaacccacccggcgccacgggactttgacgcgtgctctgcgcttgccatgagactcctgggagctgcagccgtcgcggctctggggcgcggaagggcccccgcctccctaggctggcagaggaagcaggttaattggaaggcctgccgatggtcttcatcaggggtgattcctaatgaaaaaatacgaaatattggaatctcagctcacattgattctgggaaaactacattaacagaacgagtcctttactacactggcagaattgcaaagatgcatgaggtgaaaggtaaagatggagttggtgctgtcatggattccatggaactagagagacaaagaggaatcactattcagtcagcagccacttacaccatgtggaaagatgtcaatattaacattatagatactcctgggcatgtggacttcacaatagaagtggaaagggccctgagagtgttggatggtgcagtccttgttctctgtgctgttggaggggtacagtgccagaccatgactgtcaatcgtcagatgaagcgctacaacgttccgtttctaacttttattaacaaattggaccgaatgggctccaacccagccagggccctgcagcaaatgaggtctaaactaaatcataatgcagcgtttatgcagatacccatgggtttggagggtaattttaaaggtattgtagatcttattgaggaacgagccatctattttgatggagactttggtcagattgttcgatatggtgagattccagctgaattaagggcggcggccactgaccaccggcaggagctaattgaatgtgttgccaattcagatgaacagcttggtgagatgtttctggaagaaaaaatcccctcgatttctgatttaaagctagcaattcgaagagctactctgaaaagatcatttactcctgtatttttgggaagcgccttgaagaacaaaggagttcagcctcttttagatgctgttttagaatacctcccaaatccatctgaagtccagaactatgctattctcaataaagaggatgactcaaaagagaaaaccaaaatcctaatgaactccagtagagacaattcccacccatttgtaggcctggcttttaaactggaggtaggtcgatttggacaattaacttatgttcgcagttatcagggagagctaaagaagggtgacaccatctataacacaaggacaagaaagaaagtacggttgcaacggctggctcgcatgcatgccgacatgatggaggatgttgaggaagtatatgccggagacatctgtgcattgtttggcattgactgtgctagtggagacacattcacagacaaagccaacagcggcctttctatggagtcaattcatgttcctgatcctgtcatttcaatagcaatgaagccttctaacaagaacgatctggaaaaattttcaaaaggtattggcaggtttacaagagaagatcccacatttaaagtatactttgacactgagaacaaagagacagttatatctggaatgggagaattacacctggaaatctatgctcagaggctggaaagagagtatggctgtccttgtatcacaggaaagccaaaagttgcctttcgagagaccattactgcccctgtcccgtttgactttacacataaaaaacaatcaggtggtgcaggccagtatggaaaagtaataggtgtcctggagcctctggacccagaggactacactaaattggaattttcagatgaaacattcggatcaaatattccaaagcagtttgtgcctgctgtagaaaaggtaaatttttaaaaaagtgtttttgcatttttacttactaaaaacagtttatcaggtattaaatcatactttgtcttccatcatgttgtctatcacagtttgttttagttacagtcctgtttctctgattgttaagctttccatctgatttagaatctctaattcattaagcagaagagctgtaaatccatgctgtgacaatgatgggaaattattatgtttctgaatcatagttatatttttcttaataaattgaaactactgtattgattgtaa

SEQ ID NO: 135691 - DNA, 3721 bp, Homo sapiens
  Payload ID: 6536
  Gene Symbol: GFM1
  Gene Name: G elongation factor, mitochondrial 1
  Uniprot ID: Q96RP9
  ENST ID: ENST00000486715
  CDS Start-End: 358-2613
ttctgtatcttcatacagaggtaatatttaaaaaagaagacgaagacaaaaggactcccttccctcacccatatacctatgccgtcttactgggagcaaacacttctttagctccgcaaagcgattgcactttctcttccaagtcggcagacggcgcgcgagcagcgtaggcactgctccgcctccaatccagttgctcttctttcttttcctcactctctttttcctcgcgtcctttgccccggaagtgctcttacaacattggctgccggcgtgactttgaccgcttcccggtgcgttaccggcagctgaacccacccggcgccacgggactttgacgcgtgctctgcgcttgccatgagactcctgggagctgcagccgtcgcggctctggggcgcggaagggcccccgcctccctaggctggcagaggaagcaggttaattggaaggcctgccgatggtcttcatcaggggtgattcctaatgaaaaaatacgaaatattggaatctcagctcacattgattctgggaaaactacattaacagaacgagtcctttactacactggcagaattgcaaagatgcatgaggtgaaaggtaaagatggagttggtgctgtcatggattccatggaactagagagacaaagaggaatcactattcagtcagcagccacttacaccatgtggaaagatgtcaatattaacattatagatactcctgggcatgtggacttcacaatagaagtggaaagggccctgagagtgttggatggtgcagtccttgttctctgtgctgttggaggggtacagtgccagaccatgactgtcaatcgtcagatgaagcgctacaacgttccgtttctaacttttattaacaaattggaccgaatgggctccaacccagccagggccctgcagcaaatgaggtctaaactaaatcataatgcagcgtttatgcagatacccatgggtttggagggtaattttaaaggtattgtagatcttattgaggaacgagccatctattttgatggagactttggtcagattgttcgatatggtgagattccagctgaattaagggcggcggccactgaccaccggcaggagctaattgaatgtgttgccaattcagatgaacagcttggtgagatgtttctggaagaaaaaatcccctcgatttctgatttaaagctagcaattcgaagagctactctgaaaagatcatttactcctgtatttttgggaagcgccttgaagaacaaaggagttcagcctcttttagatgctgttttagaatacctcccaaatccatctgaagtccagaactatgctattctcaataaagaggatgactcaaaagagaaaaccaaaatcctaatgaactccagtagagacaattcccacccatttgtaggcctggcttttaaactggaggtaggtcgatttggacaattaacttatgttcgcagttatcagggagagctaaagaagggtgacaccatctataacacaaggacaagaaagaaagtacggttgcaacggctggctcgcatgcatgccgacatgatggaggatgttgaggaagtatatgccggagacatctgtgcattgtttggcattgactgtgctagtggagacacattcacagacaaagccaacagcggcctttctatggagtcaattcatgttcctgatcctgtcatttcaatagcaatgaagccttctaacaagaacgatctggaaaaattttcaaaaggtattggcaggtttacaagagaagatcccacatttaaagtatactttgacactgagaacaaagagacagttatatctggaatgggagaattacacctggaaatctatgctcagaggctggaaagagagtatggctgtccttgtatcacaggaaagccaaaagttgcctttcgagagaccattactgcccctgtcccgtttgactttacacataaaaaacaatcaggtggtgcaggccagtatggaaaagtaataggtgtcctggagcctctggacccagaggactacactaaattggaattttcagatgaaacattcggatcaaatattccaaagcagtttgtgcctgctgtagaaaaggggtttttagatgcctgcgagaagggccctctttctggtcacaagctctctgggctccggtttgtcctgcaagatggagcacaccacatggttgattctaatgaaatctctttcatccgagcaggagaaggtgctcttaaacaagccttggcaaatgcaacattatgtattcttgaacctattatggctgtggaagttgtagctccaaatgaatttcagggacaagtaattgcaggaattaaccgacgccatggggtaatcactgggcaagatggagttgaggactattttacactgtatgcagatgtccctctaaatgatatgtttggttattccactgaacttaggtcatgcacagagggaaagggagaatacacaatggagtatagcaggtatcagccatgtttaccatccacacaagaagacgtcattaataagtatttggaagctacaggtcaacttcctgttaaaaaaggaaaagccaagaactaactttgcttactgtgagttgactgactctaattgaatctgcgtggttttgatactttgatggattccagtggaataaattcaggctgctgaaacaagaaattctgagcccaggaagcgggctcttctttcttcaaaagaagcccttcttgttcatattcaggagcttctgttatattcaaaggtaattctatgtctatctcaactctattgattggttttatagttcattgaaaatcctcaaataaaatataattattactgaaatatgtttaatatttaaggggaaaagagactaatttcagttatacttttaagcttagaatgtatgttcatttccaaattttgtatcataagagttttcaacatagagaaaagctgaaaaaatgcaaagaataaccacatactttccatctaccttcctttgttaacgggttgtttatcatataataatttgttttgtcatatttgctttcactgtctattatctgtttaagtctcataactctatttttagtttgctgaagacttgaaagtgaatcgcatatatcatgacacttcttggagtgtcattaatgggcaggcttttctgttgaagagtggattccgtatgttcttcatagagagtgtttttcagattcttcattgggatattaaaatattagccaaatttctctctgttttatatatgtctgtttatttcagtttgtggtttctgcaaatttgtaactgcctctgttttaggagtataagtattacttccttgtggtctattgtgaagtaaaaagtagacccttgcatatactattcttgtttgtgttcatcttaatgtttttgtacagctaaatcaaatgtaatttatagagttagtttcatcaacctaatgaatgctagttaaatttgaattccttggaatttatcgtatattgtattcactgagattatgaagggacaaatgttaatcttttgtttccagaaaaagttgggctttcccaagcagttctattacccggttcagaattgcttcatccaaaaatcatctgatggtatagatggatcctagtccttttcattacctgatggtagaaataaaataattgattttaaattc

SEQ ID NO: 135692 - DNA, 656 bp, Homo sapiens
  Payload ID: 6536
  Gene Symbol: GFM1
  Gene Name: G elongation factor, mitochondrial 1
  ENST ID: ENST00000472383
  CDS Start-End: 1-52
ctctttcatccgagcaggagaaggtgctcttaaacaaggtccctctaaatgatatgtttggttattccactgaacttaggtcatgcacagagggaaagggagaatacacaatggagtatagcaggtatcagccatgtttaccatccacacaagaagacgtcattaataagtatttggaagctacaggtcaacttcctgttaaaaaaggaaaagccaagaactaactttgcttactgtgagttgactgactctaattgaatctgcgtggttttgatactttgatggattccagtggaataaattcaggctgctgaaacaagaaattctgagcccaggaagcgggctcttctttcttcaaaagaagcccttcttgttcatattcaggagcttctgttatattcaaaggtaattctatgtctatctcaactctattgattggttttatagttcattgaaaatcctcaaataaaatataattattactgaaatatgtttaatatttaaggggaaaagagactaatttcagttatacttttaagcttagaatgtatgttcatttccaaattttgtatcataagagttttcaacatagagaaaagctgaaaaaatgcaaagaataaccacatactttccatctaccttcctttgttaacggg

SEQ ID NO: 135693 - DNA, 2856 bp, Homo sapiens
  Payload ID: 6537
  Gene Symbol: GFM2
  Gene Name: G elongation factor, mitochondrial 2
  Uniprot ID: Q969S9
  ENST ID: ENST00000345239
  CDS Start-End: 209-2407
tggaggtgtggctgcccgaggcggtagagcggagaaagcctattttcttttcgtttagatacattgccttttgcctaggctggcgtcgagacttgaggccgttgcagactttggcgcggctcgcgcctcctgcttcaagagcccagcggtgagagctggcctgcggcacgcggcctaatgccagacagtaacagtttggaggatcaagatgttgaccaacttgaggatatttgcaatgagtcatcagacaatacccagtgtgtatattaataatatatgctgctataaaataagagcaagtttaaaaagattaaagccacatgtgccgcttggaagaaattgcagttctctaccaggcttaataggaaatgatatcaaatcccttcattccatcatcaatcctcccatagctaaaatccgtaatattggaattatggctcatattgatgcaggcaaaactaccaccacagaaagaatattgtactattccggatatacaagatcactgggagatgttgatgatggagacacagtgacagatttcatggcccaagagcgagaaagaggcattactattcaatcagctgctgttacatttgattggaaaggttatagagtcaatctaattgatacaccaggtcatgtggactttaccttggaggttgagcggtgcctaagagtgttggatggtgcagtggctgtatttgatgcctctgctggtgtagaggcccagactctcacagtatggaggcaagctgataaacacaatatacctcgaatctgttttttaaacaagatggacaaaactggagcaagctttaagtatgcagttgaaagcatcagagagaagttaaaggcaaagcctttgcttttacagttaccaattggtgaagccaaaactttcaaaggagtggtggatgtagtaatgaaagaaaaacttctttggaattgcaattcaaatgatggaaaagactttgagagaaagcccctcttggaaatgaatgatcctgaattgctgaaggaaacaactgaagcaaggaatgccttaattgaacaagttgcagatttggatgatgaatttgctgacttggttttagaagaatttagtgagaattttgatttgttaccagctgaaaagctacagactgcaatacatagagtgacactagctcagacagcagtgcctgtgctttgtggaagtgccctgaaaaacaaagggatacagcccttgttagatgctgttactatgtacttaccttcacctgaagagcgtaactatgaatttctggagagaataagtcgtctgcttttgccgtttgctgaccaacatgtagaaatcccttcattgactgctggtaacattgctttgactgttgggcttaaacatactgccactggagacaccattgtctcatccaagtccagtgcattagctgcagctcgtagagccgaacgggagggagaaaagaagcacagacaaaacaatgaagcagagagacttttattggctggagtggagattccagaacctgttttcttctgtaccatagaacccccatcactgtctaagcagccagatttggaacatgcgttgaaatgtcttcagcgtgaagatcccagtttgaaagtgaggctagatcctgactctggacaaactgttctgtgtggtatgggggagttacatatagagattattcatgatcgaatcaagagggaatatggactggagacctatctcgggcctctccaggtggcatatcgagagaccatcctaaactcagttcgtgccacagataccttagatagaactttaggagacaaaaggcatcttgtgactgtagaagtggaagcaaggccaattgaaacatcatctgttatgcctgtgattgagtttgagtatgctgaaagtatcaatgaaggccttttgaaggtctcccaagaggccattgaaaatggaattcacagcgcatgtctccaaggaccattgcttggatccccaattcaggatgtagcaattactttacattccctgacaattcatcctggcacctccacaactatgatttctgcctgtgtctcaagatgcgtgcaaaaggctctgaagaaagctgataagcaagttttggagcctctgatgaatcttgaggttacagtagctagagattatctcagccctgtcctggcagatctggcacaaagaagaggaaacattcaggaaattcagactcgccaggacaacaaagttgttattggatttgttcccttagcagaaattatgggttattcaactgtgcttcgaacgctaacatcaggctcagctacttttgccttagaactatctacttatcaagccatgaatcctcaagatcaaaatacactgctcaaccggagaagtggtttgacctaaatgttttagtttttggagagaaattcaggagcacctagctacttcattttcagtaagaacaatttttattgctttatttattggacgaataaagtactgtttcagtacattcagagaactagataaaagatataacttaagctttgatagtggcactggagccacccgttttaatttatataatgagaaatgtgctttgatgtttaaagccactgtacctgaatcatgctgttcatctatgaagttattactataagtagccttcagaagagtggtatcacaaagttgtgtttcttttgtgtccttaagcttgtctcacaagaaagatgccaggcctctaaatgtaataagatagagggtcaaaggttcaatcaataaaaatattttattcaaaaaacagtctaatatcttattttacatgatttcaaaataaagttgattgtagtaca

SEQ ID NO: 135694 - DNA, 3249 bp, Homo sapiens
  Payload ID: 6537
  Gene Symbol: GFM2
  Gene Name: G elongation factor, mitochondrial 2
  Uniprot ID: Q969S9
  ENST ID: ENST00000296805
  CDS Start-End: 459-2798
ctccttaccatggtgacggccgcagagccgccaggagcagccgctggagtgcgaaaacgctctcaattttcgggtctcaaagacccacaagcccacaccacgcaggccgggacaggaaagagtcaccctttaaaacggccgagtgaagagcaagaaccacgcagcggttccgagcctctgttttccgcttttagctaggaggacggaagttgctggcaggcggcatttggccggtacaccgccggaagtgtggaggtgtggctgcccgaggcggtagagcggagaaagcctattttcttttcgtttagatacattgccttttgcctaggctggcgtcgagacttgaggccgttgcagactttggcgcggctcgcgcctcctgcttcaagagcccagcggtgagagctggcctgcggcacgcggcctaatgccagacagtaacagtttggaggatcaagatgttgaccaacttgaggatatttgcaatgagtcatcagacaatacccagtgtgtatattaataatatatgctgctataaaataagagcaagtttaaaaagattaaagccacatgtgccgcttggaagaaattgcagttctctaccaggcttaataggaaatgatatcaaatcccttcattccatcatcaatcctcccatagctaaaatccgtaatattggaattatggctcatattgatgcaggcaaaactaccaccacagaaagaatattgtactattccggatatacaagatcactgggagatgttgatgatggagacacagtgacagatttcatggcccaagagcgagaaagaggcattactattcaatcagctgctgttacatttgattggaaaggttatagagtcaatctaattgatacaccaggtcatgtggactttaccttggaggttgagcggtgcctaagagtgttggatggtgcagtggctgtatttgatgcctctgctggtgtagaggcccagactctcacagtatggaggcaagctgataaacacaatatacctcgaatctgttttttaaacaagatggacaaaactggagcaagctttaagtatgcagttgaaagcatcagagagaagttaaaggcaaagcctttgcttttacagttaccaattggtgaagccaaaactttcaaaggagtggtggatgtagtaatgaaagaaaaacttctttggaattgcaattcaaatgatggaaaagactttgagagaaagcccctcttggaaatgaatgatcctgaattgctgaaggaaacaactgaagcaaggaatgccttaattgaacaagttgcagatttggatgatgaatttgctgacttggttttagaagaatttagtgagaattttgatttgttaccagctgaaaagctacagactgcaatacatagagtgacactagctcagacagcagtgcctgtgctttgtggaagtgccctgaaaaacaaagggatacagcccttgttagatgctgttactatgtacttaccttcacctgaagagcgtaactatgaatttctgcagtggtataaggatgacttatgtgcattggcatttaaagttctccatgacaagcagcgaggaccactggtttttatgcgcatttactcaggcactataaaaccccagttggccattcataatattaatggaaactgcacggagagaataagtcgtctgcttttgccgtttgctgaccaacatgtagaaatcccttcattgactgctggtaacattgctttgactgttgggcttaaacatactgccactggagacaccattgtctcatccaagtccagtgcattagctgcagctcgtagagccgaacgggagggagaaaagaagcacagacaaaacaatgaagcagagagacttttattggctggagtggagattccagaacctgttttcttctgtaccatagaacccccatcactgtctaagcagccagatttggaacatgcgttgaaatgtcttcagcgtgaagatcccagtttgaaagtgaggctagatcctgactctggacaaactgttctgtgtggtatgggggagttacatatagagattattcatgatcgaatcaagagggaatatggactggagacctatctcgggcctctccaggtggcatatcgagagaccatcctaaactcagttcgtgccacagataccttagatagaactttaggagacaaaaggcatcttgtgactgtagaagtggaagcaaggccaattgaaacatcatctgttatgcctgtgattgagtttgagtatgctgaaagtatcaatgaaggccttttgaaggtctcccaagaggccattgaaaatggaattcacagcgcatgtctccaaggaccattgcttggatccccaattcaggatgtagcaattactttacattccctgacaattcatcctggcacctccacaactatgatttctgcctgtgtctcaagatgcgtgcaaaaggctctgaagaaagctgataagcaagttttggagcctctgatgaatcttgaggttacagtagctagagattatctcagccctgtcctggcagatctggcacaaagaagaggaaacattcaggaaattcagactcgccaggacaacaaagttgttattggatttgttcccttagcagaaattatgggttattcaactgtgcttcgaacgctaacatcaggctcagctacttttgccttagaactatctacttatcaagccatgaatcctcaagatcaaaatacactgctcaaccggagaagtggtttgacctaaatgttttagtttttggagagaaattcaggagcacctagctacttcattttcagtaagaacaatttttattgctttatttattggacgaataaagtactgtttcagtacattcagagaactagataaaagatataacttaagctttgatagtggcactggagccacccgttttaatttatataatgagaaatgtgctttgatgtttaaagccactgtacctgaatcatgctgttcatctatgaagttattactataagtagccttcagaagagtggtatcacaaagttgtgtttcttttgtgtccttaagcttgtctcacaagaaagatgccaggcctctaaatgtaataagatagagggtcaaaggttcaatcaataaaaatattttattcaaaaaacagtctaatatcttattttacatgatttcaaaataaagttgattgtagtacaga

SEQ ID NO: 135695 - DNA, 1870 bp, Homo sapiens
  Payload ID: 6537
  Gene Symbol: GFM2
  Gene Name: G elongation factor, mitochondrial 2
  Uniprot ID: Q969S9
  ENST ID: ENST00000427854
  CDS Start-End: 234-1775
tttggccggtacaccgccggaagtgtggaggtgtggctgcccgaggcggtagagcggagaaagcctattttcttttcgtttagatacattgccttttgcctaggctggcgtcgagacttgaggccgttgcagactttggcgcggctcgcgcctcctgcttcaagagcccagcggtgagagctggcctgcggcacgcggcctaatgccagacagtaacagtttggaggatcaagatgttgaccaacttgaggatatttgcaatgagtcatcagacaatacccagtgtgtatattaataatatatgctgctataaaataagagcaagtttaaaaagattaaagccacatgtgccgcttggaagaaattgcagttctctaccaggcttaataggaaatgatatcaaatcccttcattccatcatcaatcctcccatagctaaaatccgtaatattggaattatggctcatattgatgcaggcaaaactaccaccacagaaagaatattgtactattccggatatacaagatcactgggagatgttgatgatggagacacagtgacagatttcatggcccaagagcgagaaagaggcattactattcaatcagctgctgttacatttgattggaaaggttatagagtcaatctaattgatacaccaggtcatgtggactttaccttggaggttgagcggtgcctaagagtgttggatggtgcagtggctgtatttgatgcctctgctggtgtagaggcccagactctcacagtatggaggcaagctgataaacacaatatacctcgaatctgttttttaaacaagatggacaaaactggagcaagctttaagtatgcagttgaaagcatcagagagaagttaaaggcaaagcctttgcttttacagttaccaattggtgaagccaaaactttcaaaggagtggtggatgtagtaatgaaagaaaaacttctttggaattgcaattcaaatgatggaaaagactttgagagaaagcccctcttggaaatgaatgatcctgaattgctgaaggaaacaactgaagcaaggaatgccttaattgaacaagttgcagatttggatgatgaatttgctgacttggttttagaagaatttagtgagaattttgatttgttaccagctgaaaagctacagactgcaatacatagagtgacactagctcagacagcagtgcctgtgctttgtggaagtgccctgaaaaacaaagggatacagcccttgttagatgctgttactatgtacttaccttcacctgaagagcgtaactatgaatttctgcagtggtataaggatgacttatgtgcattggcatttaaagttctccatgacaagcagcgaggaccactggtttttatgcgcatttactcaggcactataaaaccccagttggccattcataatattaatggaaactgcacggagagaataagtcgtctgcttttgccgtttgctgaccaacatgtagaaatcccttcattgactgctggtaacattgctttgactgttgggcttaaacatactgccactggagacaccattgtctcatccaagtccagtgcattagctgcagctcgtagagccgaacgggagggagaaaagaagcacagacaaaacaatgaagcagagagacttttattggctggagtggagattccagaacctgttttcttctgtaccatagaacccccatcactgtctaagcagccaggtataaatggtcttagtgtgtcaactaattagtgcgctgataatttatataaaatagttgcaatataccctcaagagatttcttatgtgattgaggtaaattttatctgaatatattggtaaacatt

SEQ ID NO: 135696 - DNA, 1004 bp, Homo sapiens
  Payload ID: 6537
  Gene Symbol: GFM2
  Gene Name: G elongation factor, mitochondrial 2
  ENST ID: ENST00000509097
  CDS Start-End: 149-1004
acattgccttttgcctaggctggcgtcgagacttgaggccgttgcagactttggcgcggctcgcgcctcctgcttcaagagcccagcggtgagagctggcctgcggcacgcggcctaatgccagacagtaacagtttggaggatcaagatgttgaccaacttgaggatatttgcaatgagtcatcagacaatacccagtgtgtatattaataatatatgctgctataaaataagagcaagtttaaaaagattaaagccacatgtgccgcttggaagaaattgcagttctctaccaggcttaataggaaatgatatcaaatcccttcattccatcatcaatcctcccatagctaaaatccgtaatattggaattatggctcatattgatgcaggcaaaactaccaccacagaaagaatattgtactattccggatatacaagatcactgggaggtcatgtggactttaccttggaggttgagcggtgcctaagagtgttggatggtgcagtggctgtatttgatgcctctgctggtgtagaggcccagactctcacagtatggaggcaagctgataaacacaatatacctcgaatctgttttttaaacaagatggacaaaactggagcaagctttaagtatgcagttgaaagcatcagagagaagttaaaggcaaagcctttgcttttacagttaccaattggtgaagccaaaactttcaaaggagtggtggatgtagtaatgaaagaaaaacttctttggaattgcaattcaaatgatggaaaagactttgagagaaagcccctcttggaaatgaatgatcctgaattgctgaaggaaacaactgaagcaaggaatgccttaattgaacaagttgcagatttggatgatgaatttgctgacttggttttagaagaatttagtgagaattttgatttgttaccagctgaaaagctacagactgcaatacatagagtgacactagctcagacagcagtgcctgtgc

SEQ ID NO: 135697 - DNA, 566 bp, Homo sapiens
  Payload ID: 6537
  Gene Symbol: GFM2
  Gene Name: G elongation factor, mitochondrial 2
  ENST ID: ENST00000506778
  CDS Start-End: 373-566
atttggccggtacaccgccggaagtgtggaggtgtggctgcccgaggcggtagagcggagaaagcctattttcttttcgtttagatacattgccttttgcctaggctggcgtcgagacttgaggccgttgcagactttggcgcggctcgcgcctcctgcttcaagagcccagcggtgagagctggcctgcggcacgcggcctaatgccagaatatatgctgctataaaataagagcaagtttaaaaagattaaagccacatgtgccgcttggaagaaattgcagttctctaccaggcttaataggaaatgatatcaaatcccttcattccatcatcaatcctcccatagctaaaatccgtaatattggaattatggctcatattgatgcaggcaaaactaccaccacagaaagaatattgtactattccggatatacaagatcactgggagatgttgatgatggagacacagtgacagatttcatggcccaagagcgagaaagaggcattactattcaatcagctgctgttacatttgattggaaaggttatagagtcaatctaat

SEQ ID NO: 135698 - DNA, 3047 bp, Homo sapiens
  Payload ID: 6537
  Gene Symbol: GFM2
  Gene Name: G elongation factor, mitochondrial 2
  Uniprot ID: Q969S9
  ENST ID: ENST00000509430
  CDS Start-End: 311-2650
cgaggcggtagagcggagaaagcctattttcttttcgtttagatacattgccttttgcctaggctggcgtcgagacttgaggccgttgcagactttggcgcggctcgcgcctcctgcttcaagagcccagcggtgagagctggcctgcggcacgcggcctaatgccagtcacaactgtggagagactatgaggccctgaactttggcgttaccaatgaaaagggaatggattcaaggccaggcatggtggctcacgcctgtaatcccagcactttgggaggccgagacagtaacagtttggaggatcaagatgttgaccaacttgaggatatttgcaatgagtcatcagacaatacccagtgtgtatattaataatatatgctgctataaaataagagcaagtttaaaaagattaaagccacatgtgccgcttggaagaaattgcagttctctaccaggcttaataggaaatgatatcaaatcccttcattccatcatcaatcctcccatagctaaaatccgtaatattggaattatggctcatattgatgcaggcaaaactaccaccacagaaagaatattgtactattccggatatacaagatcactgggagatgttgatgatggagacacagtgacagatttcatggcccaagagcgagaaagaggcattactattcaatcagctgctgttacatttgattggaaaggttatagagtcaatctaattgatacaccaggtcatgtggactttaccttggaggttgagcggtgcctaagagtgttggatggtgcagtggctgtatttgatgcctctgctggtgtagaggcccagactctcacagtatggaggcaagctgataaacacaatatacctcgaatctgttttttaaacaagatggacaaaactggagcaagctttaagtatgcagttgaaagcatcagagagaagttaaaggcaaagcctttgcttttacagttaccaattggtgaagccaaaactttcaaaggagtggtggatgtagtaatgaaagaaaaacttctttggaattgcaattcaaatgatggaaaagactttgagagaaagcccctcttggaaatgaatgatcctgaattgctgaaggaaacaactgaagcaaggaatgccttaattgaacaagttgcagatttggatgatgaatttgctgacttggttttagaagaatttagtgagaattttgatttgttaccagctgaaaagctacagactgcaatacatagagtgacactagctcagacagcagtgcctgtgctttgtggaagtgccctgaaaaacaaagggatacagcccttgttagatgctgttactatgtacttaccttcacctgaagagcgtaactatgaatttctgcagtggtataaggatgacttatgtgcattggcatttaaagttctccatgacaagcagcgaggaccactggtttttatgcgcatttactcaggcactataaaaccccagttggccattcataatattaatggaaactgcacggagagaataagtcgtctgcttttgccgtttgctgaccaacatgtagaaatcccttcattgactgctggtaacattgctttgactgttgggcttaaacatactgccactggagacaccattgtctcatccaagtccagtgcattagctgcagctcgtagagccgaacgggagggagaaaagaagcacagacaaaacaatgaagcagagagacttttattggctggagtggagattccagaacctgttttcttctgtaccatagaacccccatcactgtctaagcagccagatttggaacatgcgttgaaatgtcttcagcgtgaagatcccagtttgaaagtgaggctagatcctgactctggacaaactgttctgtgtggtatgggggagttacatatagagattattcatgatcgaatcaagagggaatatggactggagacctatctcgggcctctccaggtggcatatcgagagaccatcctaaactcagttcgtgccacagataccttagatagaactttaggagacaaaaggcatcttgtgactgtagaagtggaagcaaggccaattgaaacatcatctgttatgcctgtgattgagtttgagtatgctgaaagtatcaatgaaggccttttgaaggtctcccaagaggccattgaaaatggaattcacagcgcatgtctccaaggaccattgcttggatccccaattcaggatgtagcaattactttacattccctgacaattcatcctggcacctccacaactatgatttctgcctgtgtctcaagatgcgtgcaaaaggctctgaagaaagctgataagcaagttttggagcctctgatgaatcttgaggttacagtagctagagattatctcagccctgtcctggcagatctggcacaaagaagaggaaacattcaggaaattcagactcgccaggacaacaaagttgttattggatttgttcccttagcagaaattatgggttattcaactgtgcttcgaacgctaacatcaggctcagctacttttgccttagaactatctacttatcaagccatgaatcctcaagatcaaaatacactgctcaaccggagaagtggtttgacctaaatgttttagtttttggagagaaattcaggagcacctagctacttcattttcagtaagaacaatttttattgctttatttattggacgaataaagtactgtttcagtacattcagagaactagataaaagatataacttaagctttgatagtggcactggagccacccgttttaatttatataatgagaaatgtgctttgatgtttaaagccactgtacctgaatcatgctgttcatctatgaagttattactataagtagccttcagaagagtggtatcacaaagttgtgtttcttttgtgtccttaagcttgtctcacaagaaagatgccaggcctctaaatgtaataagatagagggtcaaaggttcaatcaataaaaatattttattcaaaaaa

SEQ ID NO: 135699 - DNA, 1511 bp, Homo sapiens
  Payload ID: 6538
  Gene Symbol: GKAP1
  Gene Name: G kinase anchoring protein 1
  Uniprot ID: Q5VSY0
  ENST ID: ENST00000376365
  CDS Start-End: 292-1239
cgacacttgacccagaccagtcccaacgcccagtgcggccgcccggggagccgcgggagaggcggcggcggggggaggagggagaggagggccgagccggcggcacgggaggcccggttttgaagccgcttctctgcccgagttaggtttcgcccagcgcaatttctttctctatgtactttgcgaataagtttcggagcatcggttaacagcctatgggtgaaatttggctttcattcatgaatgagaaattattcttgacagaagtattttaaaagaaaaatctttacgatggcctcagcagtacttagttctgttcccaccaccgcttctcgttttgccctgttacaagtggatagtggcagtggctctgattctgaacctggaaaaggtaaaggtcgaaatactggaaagtctcaaactttaggaagcaagtcaactacaaatgagaaaaaaagagagaaaagaagaaaaaagaaggaacagcaacagagtgaagcaaatgagctcaggaatcttgcttttaagaaaattccccagaaatcctcccatgctgtttgtaacgctcaacatgatcttccattgtcaaacccagtacagaaggattcacgagaagaaaattggcaagagtggagacaaagagatgagcagctgacatctgaaatgtttgaagcagatcttgagaaggcattgttactaagtaaactagaatatgaagagcacaaaaaggagtatgaagatgctgaaaatacttcaactcagtccaaagttatgaataaaaaagataaaagaaagaatcatcagggaaaagacagacctctcacagtatcactaaaagattttcattcggaagatcacattagtaaaaagactgaggaagtggttctgaaagatggaagaattgaaagactaaagttagagcttgaaaggaaagatgctgaaatccagaagctgaaaaatgtaatcactcaatgggaggcaaagtataaggaagtaaaggcaagaaatgcacaattattgaaaatgcttcaggaaggtgaaatgaaagataaggcagaaatacttctgcaagttgatgaatcacaaagtatcaagaatgagctcactattcaggtgacttcacttcatgctgcattagaacaagaaagatctaaagtgaaagtattacaagcagagttagccaaataccagggtggcagaaaagggaaaagaaactctgaatccgaccagtgtaggtgattacattagcctttgaagtcaacacaaagtttaaaacttccaggattttgcaaagttgtatatatttaatgctgtgcaactgctaaactatgcagtttttcttgaaggaactaaaagcaactagctccctaatggtctataattttatttcttttggcttaaagtgaaaaagaagaaatagagaattccagcagaattcagtggttgtctactatccatacttcttatcactttagtttttcatcagtcaataaaattaatttactcttcca

SEQ ID NO: 135700 - DNA, 1778 bp, Homo sapiens
  Payload ID: 6538
  Gene Symbol: GKAP1
  Gene Name: G kinase anchoring protein 1
  Uniprot ID: Q5VSY0
  ENST ID: ENST00000376371
  CDS Start-End: 402-1502
tgcagccgcgctcacctccgcggtccgccccggcgccccgggacccgttagtgcccagcctgtgggccgaccgcgacccccgcccggcgcgagcctgcccccagctctgccgacacttgacccagaccagtcccaacgcccagtgcggccgcccggggagccgcgggagaggcggcggcggggggaggagggagaggagggccgagccggcggcacgggaggcccggttttgaagccgcttctctgcccgagttaggtttcgcccagcgcaatttctttctctatgtactttgcgaataagtttcggagcatcggttaacagcctatgggtgaaatttggctttcattcatgaatgagaaattattcttgacagaagtattttaaaagaaaaatctttacgatggcctcagcagtacttagttctgttcccaccaccgcttctcgttttgccctgttacaagtggatagtggcagtggctctgattctgaacctggaaaaggtaaaggtcgaaatactggaaagtctcaaactttaggaagcaagtcaactacaaatgagaaaaaaagagagaaaagaagaaaaaagaaggaacagcaacagagtgaagcaaatgagctcaggaatcttgcttttaagaaaattccccagaaatcctcccatgctgtttgtaacgctcaacatgatcttccattgtcaaacccagtacagaaggattcacgagaagaaaattggcaagagtggagacaaagagatgagcagctgacatctgaaatgtttgaagcagatcttgagaaggcattgttactaagtaaactagaatatgaagagcacaaaaaggagtatgaagatgctgaaaatacttcaactcagtccaaagttatgaataaaaaagataaaagaaagaatcatcagggaaaagacagacctctcacagtatcactaaaagattttcattcggaagatcacattagtaaaaagactgaggaattgagttcttctcagactttatcacatgatggaggattcttcaatagactggaagatgatgttcataaaattcttattagagaaaaacgaagagaacagcttacagaatataatggaacagataattgtacagctcatgaacacaaccaggaagtggttctgaaagatggaagaattgaaagactaaagttagagcttgaaaggaaagatgctgaaatccagaagctgaaaaatgtaatcactcaatgggaggcaaagtataaggaagtaaaggcaagaaatgcacaattattgaaaatgcttcaggaaggtgaaatgaaagataaggcagaaatacttctgcaagttgatgaatcacaaagtatcaagaatgagctcactattcaggtgacttcacttcatgctgcattagaacaagaaagatctaaagtgaaagtattacaagcagagttagccaaataccagggtggcagaaaagggaaaagaaactctgaatccgaccagtgtaggtgattacattagcctttgaagtcaacacaaagtttaaaacttccaggattttgcaaagttgtatatatttaatgctgtgcaactgctaaactatgcagtttttcttgaaggaactaaaagcaactagctccctaatggtctataattttatttcttttggcttaaagtgaaaaagaagaaatagagaattccagcagaattcagtggttgtctactatccatacttcttatcactttagtttttcatcagtcaataaaattaatttactcttccactaa

SEQ ID NO: 135701 - DNA, 1231 bp, Homo sapiens
  Payload ID: 6538
  Gene Symbol: GKAP1
  Gene Name: G kinase anchoring protein 1
  ENST ID: ENST00000388782
  CDS Start-End: 526-906
agaaaagaagaatactaacatacagttttcctgagttaccttaagtgagttgaaaactaaaagccctatccctcaaggaacttacagtccagtgacattacttatggagagagtaaagcaggcctgcagccgcgctcacctccgcggtccgccccggcgccccgggacccgttagtgcccagcctgtgggccgaccgcgacccccgcccggcgcgagcctgcccccagctctgccgacacttgacccagaccagtcccaacgcccagtgcggccgcccggggagccgcgggagaggcggcggcggggggaggagggagaggagggccgagccggcggcacgggaggcccggttttgaagccgcttctctgcccgagttaggtttcgcccagcgcaatttctttctctatgtactttgcgaataagtttcggagcatcggttaacagcctatgggtgaaatttggctttcattcatgaatgagaaattattcttgacagaagtattttaaaagaaaaatctttacgatggcctcagcagtacttagttctgttcccaccaccgcttctcgttttgccctgttacaagtggatagtggcagtggctctgattctgaacctggaaaaggtaaaggtcgaaatactggaaagtctcaaactttaggaagcaagtcaactacaaatgagaaaaaaagagagaaaagaagaaaaaagaaggaacagcaacagagtgaagcaaatgagctcaggaatcttgcttttaagaaaattccccagaaatcctcccatgctgtttgtaacgctcaacatgatcttccattgtcaaacccagtacagaaggattcacgagaagaaaattggcaagagtggagacaaagagatgagcagatggggagtaggaggcaatgaggaagtcaagaggaaggggatctgaagtactccatcttggacacatctgacatctgaaatgtttgaagcagatcttgagaaggcattgttactaagtaaactagaatatgaagagcacaaaaaggagtatgaagatgctgaaaatacttcaactcagtccaaagttatgaataaaaaagataaaagaaagaatcatcagggaaaagacagacctctcacagtatcactaaaagattttcattcggaagatcacattagtaaaaagactgaggaattgagttcttctcagactttatcacatgatggaggattcttcaatagactg

SEQ ID NO: 135702 - DNA, 403 bp, Homo sapiens
  Payload ID: 6538
  Gene Symbol: GKAP1
  Gene Name: G kinase anchoring protein 1
  ENST ID: ENST00000485742
  CDS Start-End: 241-403
acccgactcccaggccggcgaccgctgagcctcccgagaccccgtgggggccgctcgagtgacaggttttgaagccgcttctctgcccgagttaggtttcgcccagcgcaatttctttctctatgtactttgcgaataagtttcggagcatcggttaacagcctatgggtgaaatttggctttcattcatgaatgagaaattattcttgacagaagtattttaaaagaaaaatctttacgatggcctcagcagtacttagttctgttcccaccaccgcttctcgttttgccctgttacaagtggatagtggcagtggctctgattctgaacctggaaaaggtaaaggtcgaaatactggaaagtctcaaactttaggaagcaagtcaactacaaatgagaaaa

SEQ ID NO: 135703 - DNA, 2793 bp, Homo sapiens
  Payload ID: 6539
  Gene Symbol: GPANK1
  Gene Name: G patch domain and ankyrin repeats 1
  Uniprot ID: O95872
  ENST ID: ENST00000211377
  CDS Start-End: 686-1756
cacatcaaagtccggagaccccatgtgccgctcccagcgacaagggactcggagcagcgacgacttcagactcaccggctggacggggaccaggactggggtggggtagggaagttgctacttccagggaacggcggcgaccgctacagcgcaggccgcggacccgaccgcggcaggcgaagtggggtggggggagtggaaattagggagggtggggaagagggcaacacgcaagcgccaagggtcaggtgccgcggtggatgccgggacacggagtccccggtagagaaagaaactggctaaatgagagaaagcgaactaccaatcccaggatgacccgcgcacgacctggctgtcacgaaggcccggaggagggcgcttgcgggcggggcacaacgagaagccaccggaagcggaagccagaatggcgccattttgcggtacggaagctacacagcaacacgtataggagactctccccgagatcttctagggagtgacccatctatttttgtttgggaagaggaaactccgaaatgggatcgcggaagacttaaagggccaggctgatttttttttcctactggtctctgaggctgtggttgctacagggtcaccacgagcttggcttacttgtctcatccttcccttgcctggtatcattttctcagttctcccaaaagccatgtcccggcccttgctcatcaccttcaccccagccactgaccccagcgacctctggaaggatgggcagcagcagccacagcccgagaagccagagtccaccctggatggggctgcagccctagctttctatgaggccctgattggggatgagagcagcgctcctgactcccagagatctcagactgaacctgccagagaaagaaagagaaagaaaagaagaataatgaaggcaccagcagcagaagcagtggcagaaggagcatcaggaagacatggacaagggagatcccttgaggctgaggataagatgactcaccggatactgagggcagcccaggagggggacctgccagaacttaggagactgctggaaccgcatgaggcaggaggagctggggggaatatcaacgcccgggatgccttctggtggaccccactgatgtgtgctgctcgagcgggccagggggcagctgtgagctatctcctgggccgtggggctgcctgggtgggggtctgtgagctgagtggcagggatgcggctcagctcgctgaagaagctggcttccctgaggtagcccgcatggtcagggagagccatggagagacaaggagcccggaaaaccggtctcctactccctccctccagtactgcgagaactgtgacacccacttccaagattccaaccaccgcacatccactgctcacctgctgtcactgtcgcagggtcctcagcctcccaaccttccacttggggtgcccatctccagcccgggcttcaaactgctgctgagggggggctgggagccaggaatggggctgggaccccggggtgagggccgtgccaatcccatccccactgtcctcaagagggaccaggaaggactaggctacagatcagcaccccagccccgagtgacacatttcccagcttgggatacccgagctgtggctgggagggagagaccccctcgggtggccacactgagctggagggaggagagaaggagggaggagaaagacagggcttgggagcgggatctaaggacttacatgaacctcgagttctgactttggtaaagtctgaccctagtctgctgctgaagtctgaacttgggcctctgacctgggccctttgacttccccttcctgggatctgctcagatgcagatcctgaagtttttggtcaataggctctgtcttcgtgagagacgggctgagagtcagaaataaatcaaccatttgtggtttattcacttttctggaagctattttgaggaagccaaacagaagcctgggagccacatgcaagtcccacctgagtcagaaggggcagcctctccaggtggcatgataaggtcacctccctgccaatctgggttcactttcaggtcccagaccctcctgggagtcccccacctattctttcaacccccctggaccaagaattgcccagcttcgtgcaagtctcacttcccccaggaggagttccctgactacagccaattcactgatttcacaaacataagtccatatactatgtgccaagaatacaggtaaagacattcccaaccctcaaagagttcacagctggagagggaaagtgccatgttatcaatttttttcttttttttttgagatgcagtttcgctctcattgcccaggctggagtgcaatggcatgatctcggctcaccacaacctctgccccccgagttcaagggattctcctgcctcagcctccccagtagctgggattacaggcatgccccaccacgcccagctaattttgtatttttagtagagacggggtttctccatgttggccaagctggtcttgaactcccgacctcaggtgatccgccggcctcggcttcccaaagtgctggggttgcaggcatgagccaccactcccggcccatgttatcaaatattataatgcagggtgataagggaagtcaaggcctctagagatgagaatgggtagggttttgctggaagaggccagtgtgataggaaggcccacgattatcaagcttgtacacttagttgaactgggaccagaactctagcccccaaatctaaactttaaacttctttgttccaccc

SEQ ID NO: 135704 - DNA, 1598 bp, Homo sapiens
  Payload ID: 6539
  Gene Symbol: GPANK1
  Gene Name: G patch domain and ankyrin repeats 1
  Uniprot ID: O95872
  ENST ID: ENST00000375893
  CDS Start-End: 338-1408
cagagacccttgacgggcatactgtttcctccgggctcctgcctcatgaggggagaggtgcggcttggctccaatggcgccattttgcggtacggaagctacacagcaacacgtataggagactctccccgagatcttctagggagtgacccatctatttttgtttgggaagaggaaactccgaaatgggatcgcggaagacttaaagggccaggctgatttttttttcctactgcaggtctctgaggctgtggttgctacagggtcaccacgagcttggcttacttgtctcatccttcccttgcctggtatcattttctcagttctcccaaaagccatgtcccggcccttgctcatcaccttcaccccagccactgaccccagcgacctctggaaggatgggcagcagcagccacagcccgagaagccagagtccaccctggatggggctgcagcccgagctttctatgaggccctgattggggatgagagcagcgctcctgactcccagagatctcagactgaacctgccagagaaagaaagagaaagaaaagaagaataatgaaggcaccagcagcagaagcagtggcagaaggagcatcaggaagacatggacaagggagatcccttgaggctgaggataagatgactcaccggatactgagggcagcccaggagggggacctgccagaacttaggagactgctggaaccgcatgaggcaggaggagctggggggaatatcaacgcccgggatgccttctggtggaccccactgatgtgtgctgctcgagcgggccagggggcagctgtgagctatctcctgggccgtggggctgcctgggtgggggtctgtgagctgagtggcagggatgcggctcagctcgctgaagaagctggcttccctgaggtagcccgcatggtcagggagagccatggagagacaaggagcccggaaaaccggtctcctactccctccctccagtactgcgagaactgtgacacccacttccaagattccaaccaccgcacatccactgctcacctgctgtcactgtcgcagggtcctcagcctcccaaccttccacttggggtgcccatctccagcccgggcttcaaactgctgctgagggggggctgggagccaggaatggggctgggaccccggggtgagggccgtgccaatcccatccccactgtcctcaagagggaccaggaaggactaggctacagatcagcaccccagccccgagtgacacatttcccagcttgggatacccgagctgtggctgggagggagagaccccctcgggtggccacactgagctggagggaggagagaaggagggaggagaaagacagggcttgggagcgggatctaaggacttacatgaacctcgagttctgactttggtaaagtctgaccctagtctgctgctgaagtctgaacttgggcctctgacctgggccctttgacttccccttcctgggatctgctcagatgcagatcctgaagtttttggtcaataggctctgtcttcgtgagagacgggctgagagtcagaaataaatcaaccatttgtggtttattcactttt

SEQ ID NO: 135705 - DNA, 1800 bp, Homo sapiens
  Payload ID: 6539
  Gene Symbol: GPANK1
  Gene Name: G patch domain and ankyrin repeats 1
  Uniprot ID: O95872
  ENST ID: ENST00000375895
  CDS Start-End: 540-1610
cggggcccgggagtctgggcaatacagttttgtgctcactgggtgaagaggctgacttagggcggggaaaggagggagccaggctggatctctttccgcagctctcctcacgttcccctctagtcccggcgcggcgctgctgcccaggggactggcctatcctcggccaatccgctgggtccttattgcctgttgggcccctagtgcgaatcagtcccgccagagacccttgacgggcatactgtttcctccgggctcctgcctcatgaggggagagaatggcgccattttgcggtacggaagctacacagcaacacgtataggagactctccccgagatcttctagggagtgacccatctatttttgtttgggaagaggaaactccgaaatgggatcgcggaagacttaaagggccaggctgatttttttttcctactggtctctgaggctgtggttgctacagggtcaccacgagcttggcttacttgtctcatccttcccttgcctggtatcattttctcagttctcccaaaagccatgtcccggcccttgctcatcaccttcaccccagccactgaccccagcgacctctggaaggatgggcagcagcagccacagcccgagaagccagagtccaccctggatggggctgcagcccgagctttctatgaggccctgattggggatgagagcagcgctcctgactcccagagatctcagactgaacctgccagagaaagaaagagaaagaaaagaagaataatgaaggcaccagcagcagaagcagtggcagaaggagcatcaggaagacatggacaagggagatcccttgaggctgaggataagatgactcaccggatactgagggcagcccaggagggggacctgccagaacttaggagactgctggaaccgcatgaggcaggaggagctggggggaatatcaacgcccgggatgccttctggtggaccccactgatgtgtgctgctcgagcgggccagggggcagctgtgagctatctcctgggccgtggggctgcctgggtgggggtctgtgagctgagtggcagggatgcggctcagctcgctgaagaagctggcttccctgaggtagcccgcatggtcagggagagccatggagagacaaggagcccggaaaaccggtctcctactccctccctccagtactgcgagaactgtgacacccacttccaagattccaaccaccgcacatccactgctcacctgctgtcactgtcgcagggtcctcagcctcccaaccttccacttggggtgcccatctccagcccgggcttcaaactgctgctgagggggggctgggagccaggaatggggctgggaccccggggtgagggccgtgccaatcccatccccactgtcctcaagagggaccaggaaggactaggctacagatcagcaccccagccccgagtgacacatttcccagcttgggatacccgagctgtggctgggagggagagaccccctcgggtggccacactgagctggagggaggagagaaggagggaggagaaagacagggcttgggagcgggatctaaggacttacatgaacctcgagttctgactttggtaaagtctgaccctagtctgctgctgaagtctgaacttgggcctctgacctgggccctttgacttccccttcctgggatctgctcagatgcagatcctgaagtttttggtcaataggctctgtcttcgtgagagacgggctgagagtcagaaataaatcaaccatttgtggtttattcactttt

SEQ ID NO: 135706 - DNA, 1910 bp, Homo sapiens
  Payload ID: 6539
  Gene Symbol: GPANK1
  Gene Name: G patch domain and ankyrin repeats 1
  Uniprot ID: O95872
  ENST ID: ENST00000375896
  CDS Start-End: 650-1720
aggcgtgacgttatttcattacacggcttctcggcattccacaggtttccctccgcctcctgagggcctttcctaacccacagagtggattcctggctccagaaaatgggcttggagcgggggccacgttgaggaaggcgaagggcattgtgggggcgttatgtaaaagtaggaccccaaccgacagatcctagtgctcgcgccacctgggcgcgcggagctttgctcgtttactattgaaaaagttccagcgcgggaaactgaacccggagctttgcgcacgcccgagccctcaagtaatgtgggttgtggtttttgttgttgttgtcgccacgcatgcgtcttcgtgccgtgtggctatttgattgtgtcaactcttctgattagaatggcgccattttgcggtacggaagctacacagcaacacgtataggagactctccccgagatcttctagggagtgacccatctatttttgtttgggaagaggaaactccgaaatgggatcgcggaagacttaaagggccaggctgatttttttttcctactggtctctgaggctgtggttgctacagggtcaccacgagcttggcttacttgtctcatccttcccttgcctggtatcattttctcagttctcccaaaagccatgtcccggcccttgctcatcaccttcaccccagccactgaccccagcgacctctggaaggatgggcagcagcagccacagcccgagaagccagagtccaccctggatggggctgcagcccgagctttctatgaggccctgattggggatgagagcagcgctcctgactcccagagatctcagactgaacctgccagagaaagaaagagaaagaaaagaagaataatgaaggcaccagcagcagaagcagtggcagaaggagcatcaggaagacatggacaagggagatcccttgaggctgaggataagatgactcaccggatactgagggcagcccaggagggggacctgccagaacttaggagactgctggaaccgcatgaggcaggaggagctggggggaatatcaacgcccgggatgccttctggtggaccccactgatgtgtgctgctcgagcgggccagggggcagctgtgagctatctcctgggccgtggggctgcctgggtgggggtctgtgagctgagtggcagggatgcggctcagctcgctgaagaagctggcttccctgaggtagcccgcatggtcagggagagccatggagagacaaggagcccggaaaaccggtctcctactccctccctccagtactgcgagaactgtgacacccacttccaagattccaaccaccgcacatccactgctcacctgctgtcactgtcgcagggtcctcagcctcccaaccttccacttggggtgcccatctccagcccgggcttcaaactgctgctgagggggggctgggagccaggaatggggctgggaccccggggtgagggccgtgccaatcccatccccactgtcctcaagagggaccaggaaggactaggctacagatcagcaccccagccccgagtgacacatttcccagcttgggatacccgagctgtggctgggagggagagaccccctcgggtggccacactgagctggagggaggagagaaggagggaggagaaagacagggcttgggagcgggatctaaggacttacatgaacctcgagttctgactttggtaaagtctgaccctagtctgctgctgaagtctgaacttgggcctctgacctgggccctttgacttccccttcctgggatctgctcagatgcagatcctgaagtttttggtcaataggctctgtcttcgtgagagacgggctgagagtcagaaataaatcaaccatttgtggtttattcactttt

SEQ ID NO: 135707 - DNA, 1814 bp, Homo sapiens
  Payload ID: 6539
  Gene Symbol: GPANK1
  Gene Name: G patch domain and ankyrin repeats 1
  Uniprot ID: O95872
  ENST ID: ENST00000375900
  CDS Start-End: 554-1624
ggtatggcgttcggggcccgggagtctgggcaatacagttttgtgctcactgggtgaagaggctgacttagggcggggaaaggagggagccaggctggatctctttccgcagctctcctcacgttcccctctagtcccggcgcggcgctgctgcccaggggactggcctatcctcggccaatccgctgggtccttattgcctgttgggcccctagtgcgaatcagtcccgccagagacccttgacgggcatactgtttcctccgggctcctgcctcatgaggggagagaatggcgccattttgcggtacggaagctacacagcaacacgtataggagactctccccgagatcttctagggagtgacccatctatttttgtttgggaagaggaaactccgaaatgggatcgcggaagacttaaagggccaggctgatttttttttcctactgcaggtctctgaggctgtggttgctacagggtcaccacgagcttggcttacttgtctcatccttcccttgcctggtatcattttctcagttctcccaaaagccatgtcccggcccttgctcatcaccttcaccccagccactgaccccagcgacctctggaaggatgggcagcagcagccacagcccgagaagccagagtccaccctggatggggctgcagcccgagctttctatgaggccctgattggggatgagagcagcgctcctgactcccagagatctcagactgaacctgccagagaaagaaagagaaagaaaagaagaataatgaaggcaccagcagcagaagcagtggcagaaggagcatcaggaagacatggacaagggagatcccttgaggctgaggataagatgactcaccggatactgagggcagcccaggagggggacctgccagaacttaggagactgctggaaccgcatgaggcaggaggagctggggggaatatcaacgcccgggatgccttctggtggaccccactgatgtgtgctgctcgagcgggccagggggcagctgtgagctatctcctgggccgtggggctgcctgggtgggggtctgtgagctgagtggcagggatgcggctcagctcgctgaagaagctggcttccctgaggtagcccgcatggtcagggagagccatggagagacaaggagcccggaaaaccggtctcctactccctccctccagtactgcgagaactgtgacacccacttccaagattccaaccaccgcacatccactgctcacctgctgtcactgtcgcagggtcctcagcctcccaaccttccacttggggtgcccatctccagcccgggcttcaaactgctgctgagggggggctgggagccaggaatggggctgggaccccggggtgagggccgtgccaatcccatccccactgtcctcaagagggaccaggaaggactaggctacagatcagcaccccagccccgagtgacacatttcccagcttgggatacccgagctgtggctgggagggagagaccccctcgggtggccacactgagctggagggaggagagaaggagggaggagaaagacagggcttgggagcgggatctaaggacttacatgaacctcgagttctgactttggtaaagtctgaccctagtctgctgctgaagtctgaacttgggcctctgacctgggccctttgacttccccttcctgggatctgctcagatgcagatcctgaagtttttggtcaataggctctgtcttcgtgagagacgggctgagagtcagaaataaatcaaccatttgtggtttattcactttt

SEQ ID NO: 135708 - DNA, 2793 bp, Homo sapiens
  Payload ID: 6539
  Gene Symbol: GPANK1
  Gene Name: G patch domain and ankyrin repeats 1
  Uniprot ID: O95872
  ENST ID: ENST00000375906
  CDS Start-End: 686-1756
cacatcaaagtccggagaccccatgtgccgctcccagcgacaagggactcggagcagcgacgacttcagactcaccggctggacggggaccaggactggggtggggtagggaagttgctacttccagggaacggcggcgaccgctacagcgcaggccgcggacccgaccgcggcaggcgaagtggggtggggggagtggaaattagggagggtggggaagagggcaacacgcaagcgccaagggtcaggtgccgcggtggatgccgggacacggagtccccggtagagaaagaaactggctaaatgagagaaagcgaactaccaatcccaggatgacccgcgcacgacctggctgtcacgaaggcccggaggagggcgcttgcgggcggggcacaacgagaagccaccggaagcggaagccagaatggcgccattttgcggtacggaagctacacagcaacacgtataggagactctccccgagatcttctagggagtgacccatctatttttgtttgggaagaggaaactccgaaatgggatcgcggaagacttaaagggccaggctgatttttttttcctactggtctctgaggctgtggttgctacagggtcaccacgagcttggcttacttgtctcatccttcccttgcctggtatcattttctcagttctcccaaaagccatgtcccggcccttgctcatcaccttcaccccagccactgaccccagcgacctctggaaggatgggcagcagcagccacagcccgagaagccagagtccaccctggatggggctgcagcccgagctttctatgaggccctgattggggatgagagcagcgctcctgactcccagagatctcagactgaacctgccagagaaagaaagagaaagaaaagaagaataatgaaggcaccagcagcagaagcagtggcagaaggagcatcaggaagacatggacaagggagatcccttgaggctgaggataagatgactcaccggatactgagggcagcccaggagggggacctgccagaacttaggagactgctggaaccgcatgaggcaggaggagctggggggaatatcaacgcccgggatgccttctggtggaccccactgatgtgtgctgctcgagcgggccagggggcagctgtgagctatctcctgggccgtggggctgcctgggtgggggtctgtgagctgagtggcagggatgcggctcagctcgctgaagaagctggcttccctgaggtagcccgcatggtcagggagagccatggagagacaaggagcccggaaaaccggtctcctactccctccctccagtactgcgagaactgtgacacccacttccaagattccaaccaccgcacatccactgctcacctgctgtcactgtcgcagggtcctcagcctcccaaccttccacttggggtgcccatctccagcccgggcttcaaactgctgctgagggggggctgggagccaggaatggggctgggaccccggggtgagggccgtgccaatcccatccccactgtcctcaagagggaccaggaaggactaggctacagatcagcaccccagccccgagtgacacatttcccagcttgggatacccgagctgtggctgggagggagagaccccctcgggtggccacactgagctggagggaggagagaaggagggaggagaaagacagggcttgggagcgggatctaaggacttacatgaacctcgagttctgactttggtaaagtctgaccctagtctgctgctgaagtctgaacttgggcctctgacctgggccctttgacttccccttcctgggatctgctcagatgcagatcctgaagtttttggtcaataggctctgtcttcgtgagagacgggctgagagtcagaaataaatcaaccatttgtggtttattcacttttctggaagctattttgaggaagccaaacagaagcctgggagccacatgcaagtcccacctgagtcagaaggggcagcctctccaggtggcatgataaggtcacctccctgccaatctgggttcactttcaggtcccagaccctcctgggagtcccccacctattctttcaacccccctggaccaagaattgcccagcttcgtgcaagtctcacttcccccaggaggagttccctgactacagccaattcactgatttcacaaacataagtccatatactatgtgccaagaatacaggtaaagacattcccaaccctcaaagagttcacagctggagagggaaagtgccatgttatcaatttttttcttttttttttgagatgcagtttcgctctcattgcccaggctggagtgcaatggcatgatctcggctcaccacaacctctgccccccgagttcaagggattctcctgcctcagcctccccagtagctgggattacaggcatgccccaccacgcccagctaattttgtatttttagtagagacggggtttctccatgttggccaagctggtcttgaactcccgacctcaggtgatccgccggcctcggcttcccaaagtgctggggttgcaggcatgagccaccactcccggcccatgttatcaaatattataatgcagggtgataagggaagtcaaggcctctagagatgagaatgggtagggttttgctggaagaggccagtgtgataggaaggcccacgattatcaagcttgtacacttagttgaactgggaccagaactctagcccccaaatctaaactttaaacttctttgttccaccc

SEQ ID NO: 135709 - DNA, 1598 bp, Homo sapiens
  Payload ID: 6539
  Gene Symbol: GPANK1
  Gene Name: G patch domain and ankyrin repeats 1
  Uniprot ID: O95872
  ENST ID: ENST00000383434
  CDS Start-End: 338-1408
cagagacccttgacgggcatactgtttcctccgggctcctgcctcatgaggggagaggtgcggcttggctccaatggcgccattttgcggtacggaagctacacagcaacacgtataggagactctccccgagatcttctagggagtgacccatctatttttgtttgggaagaggaaactccgaaatgggatcgcggaagacttaaagggccaggctgatttttttttcctactgcaggtctctgaggctgtggttgctacagggtcaccacgagcttggcttacttgtctcatccttcccttgcctggtatcattttctcagttctcccaaaagccatgtcccggcccttgctcatcaccttcaccccagccactgaccccagcgacctctggaaggatgggcagcagcagccacagcccgagaagccagagtccaccctggatggggctgcagccctagctttctatgaggccctgattggggatgagagcagcgctcctgactcccagagatctcagactgaacctgccagagaaagaaagagaaagaaaagaagaataatgaaggcaccagcagcagaagcagtggcagaaggagcatcaggaagacatggacaagggagatcccttgaggctgaggataagatgactcaccggatactgagggcagcccaggagggggacctgccagaacttaggagactgctggaaccgcatgaggcaggaggagctggggggaatatcaacgcccgggatgccttctggtggaccccactgatgtgtgctgctcgagcgggccagggggcagctgtgagctatctcctgggccgtggggctgcctgggtgggggtctgtgagctgagtggcagggatgcggctcagctcgctgaagaagctggcttccctgaggtagcccgcatggtcagggagagccatggagagacaaggagcccggaaaaccggtctcctactccctccctccagtactgcgagaactgtgacacccacttccaagattccaaccaccgcacatccactgctcacctgctgtcactgtcgcagggtcctcagcctcccaaccttccacttggggtgcccatctccagcccgggcttcaaactgctgctgagggggggctgggagccaggaatggggctgggaccccggggtgagggccgtgccaatcccatccccactgtcctcaagagagaccaggaaggactaggctacagatcagcaccccagccccgagtgacacatttcccagcttgggatacccgagctgtggctgggagggagagaccccctcgggtggccacactgagctggagggaggagagaaggagggaggagaaagacagggcttgggagcgggatctaaggacttacatgaacctcgagttctgactttggtaaagtctgaccctagtctgctgctgaagtctgaacttgggcctctgacctgggccctttgacttccccttcctgggatctgcccagatgcagatcctgaagtttttggtcaataggctctgtcttcgtgagagacgggctgagagtcagaaataaatcaaccatttgtggtttattcactttt

SEQ ID NO: 135710 - DNA, 1814 bp, Homo sapiens
  Payload ID: 6539
  Gene Symbol: GPANK1
  Gene Name: G patch domain and ankyrin repeats 1
  Uniprot ID: O95872
  ENST ID: ENST00000383436
  CDS Start-End: 554-1624
ggtatggcgttcggggcccgggagtctgggcaatacagttttgtgctcactgggtgaagaggctgacttagggcggggaaaggagggagccaggctggatctctttccgcagctctcctcacgttcccctctagtcccggcgaggcgctgctgcccaggggactggcctatcctcggccaatccgctgggtccttattgcctgttgggcccctagtgcgaatcagtcccgccagagacccttgacgggcatactgtttcctccgggctcctgcctcatgaggggagagaatggcgccattttgcggtacggaagctacacagcaacacgtataggagactctccccgagatcttctagggagtgacccatctatttttgtttgggaagaggaaactccgaaatgggatcgcggaagacttaaagggccaggctgatttttttttcctactgcaggtctctgaggctgtggttgctacagggtcaccacgagcttggcttacttgtctcatccttcccttgcctggtatcattttctcagttctcccaaaagccatgtcccggcccttgctcatcaccttcaccccagccactgaccccagcgacctctggaaggatgggcagcagcagccacagcccgagaagccagagtccaccctggatggggctgcagccctagctttctatgaggccctgattggggatgagagcagcgctcctgactcccagagatctcagactgaacctgccagagaaagaaagagaaagaaaagaagaataatgaaggcaccagcagcagaagcagtggcagaaggagcatcaggaagacatggacaagggagatcccttgaggctgaggataagatgactcaccggatactgagggcagcccaggagggggacctgccagaacttaggagactgctggaaccgcatgaggcaggaggagctggggggaatatcaacgcccgggatgccttctggtggaccccactgatgtgtgctgctcgagcgggccagggggcagctgtgagctatctcctgggccgtggggctgcctgggtgggggtctgtgagctgagtggcagggatgcggctcagctcgctgaagaagctggcttccctgaggtagcccgcatggtcagggagagccatggagagacaaggagcccggaaaaccggtctcctactccctccctccagtactgcgagaactgtgacacccacttccaagattccaaccaccgcacatccactgctcacctgctgtcactgtcgcagggtcctcagcctcccaaccttccacttggggtgcccatctccagcccgggcttcaaactgctgctgagggggggctgggagccaggaatggggctgggaccccggggtgagggccgtgccaatcccatccccactgtcctcaagagagaccaggaaggactaggctacagatcagcaccccagccccgagtgacacatttcccagcttgggatacccgagctgtggctgggagggagagaccccctcgggtggccacactgagctggagggaggagagaaggagggaggagaaagacagggcttgggagcgggatctaaggacttacatgaacctcgagttctgactttggtaaagtctgaccctagtctgctgctgaagtctgaacttgggcctctgacctgggccctttgacttccccttcctgggatctgcccagatgcagatcctgaagtttttggtcaataggctctgtcttcgtgagagacgggctgagagtcagaaataaatcaaccatttgtggtttattcactttt

SEQ ID NO: 135711 - DNA, 1910 bp, Homo sapiens
  Payload ID: 6539
  Gene Symbol: GPANK1
  Gene Name: G patch domain and ankyrin repeats 1
  Uniprot ID: O95872
  ENST ID: ENST00000400129
  CDS Start-End: 650-1720
aggcgtgacgttatttcattacacggcttctcggcattccacaggtttccctccgcctcctgagggcctttcctaacccacagagtggattcctggctccagaaaatgggcttggagcgggggccacgttgaggaaggcgaagggcattgtgggggcgttatgtaaaagtaggaccccaaccgacagatcctagtgctcgcgccacctgggcgcgcggagctttgctcgtttactattgaaaaagttccagcgcgggaaactgaacccggagctttgcgcacgcccgagccctcaagtaatgtgggttgtggtttttgttgttgttgtcgccacgcatgcgtcttcgtgccgtgtggctatttgattgtgtcaactcttctgattagaatggcgccattttgcggtacggaagctacacagcaacacgtataggagactctccccgagatcttctagggagtgacccatctatttttgtttgggaagaggaaactccgaaatgggatcgcggaagacttaaagggccaggctgatttttttttcctactggtctctgaggctgtggttgctacagggtcaccacgagcttggcttacttgtctcatccttcccttgcctggtatcattttctcagttctcccaaaagccatgtcccggcccttgctcatcaccttcaccccagccactgaccccagcgacctctggaaggatgggcagcagcagccacagcccgagaagccagagtccaccctggatggggctgcagccctagctttctatgaggccctgattggggatgagagcagcgctcctgactcccagagatctcagactgaacctgccagagaaagaaagagaaagaaaagaagaataatgaaggcaccagcagcagaagcagtggcagaaggagcatcaggaagacatggacaagggagatcccttgaggctgaggataagatgactcaccggatactgagggcagcccaggagggggacctgccagaacttaggagactgctggaaccgcatgaggcaggaggagctggggggaatatcaacgcccgggatgccttctggtggaccccactgatgtgtgctgctcgagcgggccagggggcagctgtgagctatctcctgggccgtggggctgcctgggtgggggtctgtgagctgagtggcagggatgcggctcagctcgctgaagaagctggcttccctgaggtagcccgcatggtcagggagagccatggagagacaaggagcccggaaaaccggtctcctactccctccctccagtactgcgagaactgtgacacccacttccaagattccaaccaccgcacatccactgctcacctgctgtcactgtcgcagggtcctcagcctcccaaccttccacttggggtgcccatctccagcccgggcttcaaactgctgctgagggggggctgggagccaggaatggggctgggaccccggggtgagggccgtgccaatcccatccccactgtcctcaagagagaccaggaaggactaggctacagatcagcaccccagccccgagtgacacatttcccagcttgggatacccgagctgtggctgggagggagagaccccctcgggtggccacactgagctggagggaggagagaaggagggaggagaaagacagggcttgggagcgggatctaaggacttacatgaacctcgagttctgactttggtaaagtctgaccctagtctgctgctgaagtctgaacttgggcctctgacctgggccctttgacttccccttcctgggatctgcccagatgcagatcctgaagtttttggtcaataggctctgtcttcgtgagagacgggctgagagtcagaaataaatcaaccatttgtggtttattcactttt

SEQ ID NO: 135712 - DNA, 1800 bp, Homo sapiens
  Payload ID: 6539
  Gene Symbol: GPANK1
  Gene Name: G patch domain and ankyrin repeats 1
  Uniprot ID: O95872
  ENST ID: ENST00000400134
  CDS Start-End: 540-1610
cggggcccgggagtctgggcaatacagttttgtgctcactgggtgaagaggctgacttagggcggggaaaggagggagccaggctggatctctttccgcagctctcctcacgttcccctctagtcccggcgaggcgctgctgcccaggggactggcctatcctcggccaatccgctgggtccttattgcctgttgggcccctagtgcgaatcagtcccgccagagacccttgacgggcatactgtttcctccgggctcctgcctcatgaggggagagaatggcgccattttgcggtacggaagctacacagcaacacgtataggagactctccccgagatcttctagggagtgacccatctatttttgtttgggaagaggaaactccgaaatgggatcgcggaagacttaaagggccaggctgatttttttttcctactggtctctgaggctgtggttgctacagggtcaccacgagcttggcttacttgtctcatccttcccttgcctggtatcattttctcagttctcccaaaagccatgtcccggcccttgctcatcaccttcaccccagccactgaccccagcgacctctggaaggatgggcagcagcagccacagcccgagaagccagagtccaccctggatggggctgcagccctagctttctatgaggccctgattggggatgagagcagcgctcctgactcccagagatctcagactgaacctgccagagaaagaaagagaaagaaaagaagaataatgaaggcaccagcagcagaagcagtggcagaaggagcatcaggaagacatggacaagggagatcccttgaggctgaggataagatgactcaccggatactgagggcagcccaggagggggacctgccagaacttaggagactgctggaaccgcatgaggcaggaggagctggggggaatatcaacgcccgggatgccttctggtggaccccactgatgtgtgctgctcgagcgggccagggggcagctgtgagctatctcctgggccgtggggctgcctgggtgggggtctgtgagctgagtggcagggatgcggctcagctcgctgaagaagctggcttccctgaggtagcccgcatggtcagggagagccatggagagacaaggagcccggaaaaccggtctcctactccctccctccagtactgcgagaactgtgacacccacttccaagattccaaccaccgcacatccactgctcacctgctgtcactgtcgcagggtcctcagcctcccaaccttccacttggggtgcccatctccagcccgggcttcaaactgctgctgagggggggctgggagccaggaatggggctgggaccccggggtgagggccgtgccaatcccatccccactgtcctcaagagagaccaggaaggactaggctacagatcagcaccccagccccgagtgacacatttcccagcttgggatacccgagctgtggctgggagggagagaccccctcgggtggccacactgagctggagggaggagagaaggagggaggagaaagacagggcttgggagcgggatctaaggacttacatgaacctcgagttctgactttggtaaagtctgaccctagtctgctgctgaagtctgaacttgggcctctgacctgggccctttgacttccccttcctgggatctgcccagatgcagatcctgaagtttttggtcaataggctctgtcttcgtgagagacgggctgagagtcagaaataaatcaaccatttgtggtttattcactttt

SEQ ID NO: 135713 - DNA, 2798 bp, Homo sapiens
  Payload ID: 6539
  Gene Symbol: GPANK1
  Gene Name: G patch domain and ankyrin repeats 1
  Uniprot ID: O95872
  ENST ID: ENST00000400139
  CDS Start-End: 686-1756
cacatcaaagtccggagaccccatgtgccgctcccagcgacaagggactcggagcagcgacgacttcagactcaccggctggacggggaccaggactggggtggggtagggaagttgctacttccagggaacggcggcgaccgctacagcgcaggccgcggacccgaccgcggcaggcgaagtggggtggggggagtggaaattagggagggtggggaagagggcaacacgcaagcgccaagggtcaggtgccgcggtggatgccgggacacggagtccccggtagagaaagaaactggctaaatgagagaaagcgaactaccaatcccaggatgacccgcgcacgacctggctgtcacgaaggcccggaggagggcgcttgcgggcggggcacaacgagaagccaccggaagcggaagccagaatggcgccattttgcggtacggaagctacacagcaacacgtataggagactctccccgagatcttctagggagtgacccatctatttttgtttgggaagaggaaactccgaaatgggatcgcggaagacttaaagggccaggctgatttttttttcctactggtctctgaggctgtggttgctacagggtcaccacgagcttggcttacttgtctcatccttcccttgcctggtatcattttctcagttctcccaaaagccatgtcccggcccttgctcatcaccttcaccccagccactgaccccagcgacctctggaaggatgggcagcagcagccacagcccgagaagccagagtccaccctggatggggctgcagccctagctttctatgaggccctgattggggatgagagcagcgctcctgactcccagagatctcagactgaacctgccagagaaagaaagagaaagaaaagaagaataatgaaggcaccagcagcagaagcagtggcagaaggagcatcaggaagacatggacaagggagatcccttgaggctgaggataagatgactcaccggatactgagggcagcccaggagggggacctgccagaacttaggagactgctggaaccgcatgaggcaggaggagctggggggaatatcaacgcccgggatgccttctggtggaccccactgatgtgtgctgctcgagcgggccagggggcagctgtgagctatctcctgggccgtggggctgcctgggtgggggtctgtgagctgagtggcagggatgcggctcagctcgctgaagaagctggcttccctgaggtagcccgcatggtcagggagagccatggagagacaaggagcccggaaaaccggtctcctactccctccctccagtactgcgagaactgtgacacccacttccaagattccaaccaccgcacatccactgctcacctgctgtcactgtcgcagggtcctcagcctcccaaccttccacttggggtgcccatctccagcccgggcttcaaactgctgctgagggggggctgggagccaggaatggggctgggaccccggggtgagggccgtgccaatcccatccccactgtcctcaagagagaccaggaaggactaggctacagatcagcaccccagccccgagtgacacatttcccagcttgggatacccgagctgtggctgggagggagagaccccctcgggtggccacactgagctggagggaggagagaaggagggaggagaaagacagggcttgggagcgggatctaaggacttacatgaacctcgagttctgactttggtaaagtctgaccctagtctgctgctgaagtctgaacttgggcctctgacctgggccctttgacttccccttcctgggatctgcccagatgcagatcctgaagtttttggtcaataggctctgtcttcgtgagagacgggctgagagtcagaaataaatcaaccatttgtggtttattcacttttctggaagctattttgaggaagccaaacagaagcctgggagccacatgcaagtcccacctgagtcagaaggggcagcctctccaggtggcatgataaggtcacctccctgccaatctgggttcactttcaggtcccagaccctcctgggagtcccccacctattctttcaacccccctggaccaagaattgcccagcttcgtgcaagtctcacttcccccaggaggagttccctgactacagccaattcactgattcacaaacataagtccatatactatgtgccaagaatacaggtaaagacattcccaaccctcaaagagttcacagctggagagggaaagtgccatgttatcaatttttttctttttttttttgagatgcagtttcgctctcattgcccaggctggagtgcaatggcatgatctcggctcaccacaacctctgccccccgagttcaagggattctcctgcctcagcctccccagtagctgggattacaggcatgccccaccacgcccagctaattttgtatttttagtagagacggggtttctccatgttggccaagctggtcttgaactcccgacctcaggtgatccgccggcctcggcttcccaaagtgctggggttgcaggcatgagccaccactcccggcccatgttatcaaatattataatgcagggtgataagggaagtcaaggcctctagagatgagaatgggtagggttttgctggaagaggccagtgtgataggagggcccacgattatcaagcttgtacacttagttgaactgggaccagaactctagcccccaaatctaaactttaagtcaaacttctttgttccaccc

SEQ ID NO: 135714 - DNA, 986 bp, Homo sapiens
  Payload ID: 6539
  Gene Symbol: GPANK1
  Gene Name: G patch domain and ankyrin repeats 1
  ENST ID: ENST00000423574
  CDS Start-End: 391-986
gacttagggcggggaaaggagggagccaggctggatctctttccgcagctctcctcacgttcccctctagtcccggcgcggcgctgctgcccaggggactggcctatcctcggccaatccgctgggtccttattgcctgttgggcccctagtgcgaatcagtcccgccagagacccttgacgggcatactgtttcctccgggctcctgcctcatgaggggagaggaagaggaaactccgaaatgggatcgcggaagacttaaagggccaggctgatttttttttcctactggtctctgaggctgtggttgctacagggtcaccacgagcttggcttacttgtctcatccttcccttgcctggtatcattttctcagttctcccaaaagccatgtcccggcccttgctcatcaccttcaccccagccactgaccccagcgacctctggaaggatgggcagcagcagccacagcccgagaagccagagtccaccctggatggggctgcagcccgagctttctatgaggccctgattggggatgagagcagcgctcctgactcccagagatctcagactgaacctgccagagaaagaaagagaaagaaaagaagaataatgaaggcaccagcagcagaagcagtggcagaaggagcatcaggaagacatggacaagggagatcccttgaggctgaggataagatgactcaccggatactgagggcagcccaggagggggacctgccagaacttaggagactgctggaaccgcatgaggcaggaggagctggggggaatatcaacgcccgggatgccttctggtggaccccactgatgtgtgctgctcgagcgggccagggggcagctgtgagctatctcctgggccgtggggctgcctgggtgggggtctgtgagctgagtggcagggatgcggctcagctcgctgaagaagctggcttccctgaggtagcccgcatggtcagggagag

SEQ ID NO: 135715 - DNA, 2794 bp, Homo sapiens
  Payload ID: 6539
  Gene Symbol: GPANK1
  Gene Name: G patch domain and ankyrin repeats 1
  ENST ID: ENST00000419261
  CDS Start-End: 687-1757
cacatcaaagtccggagaccccatgtgccgctcccagcgacaagggactcggagcagcgacgacttcagactcaccggctggacggggaccaggactggggtggggtagggaagttgctacttccagggaacggcggcgaccgctacagcgcaggccgcggacccgaccgcggcaggcgaagtggggtggggggagtggaaattagggagggtggggaagagggcaaacacgcaagcgccaagggtcaggtgccgcggtggatgccgggacacggagtccccggtagagaaagaaactggctaaatgagagaaagcgaactaccaatcccaggatgacccgcgcacgacctggctgtcacgaaggcccggaggagggcgcttgcgggcggggcacaacgagaagccaccggaagcggaagccagaatggcgccattttgcggtacggaagctacacagcaacacgtataggagactctccccgagatcttctagggagtgacccatctatttttgtttgggaagaggaaactccgaaatgggatcgcggaagacttaaagggccaggctgatttttttttcctactggtctctgaggctgtggttgctacagggtcaccacgagcttggcttacttgtctcatccttcccttgcctggtatcattttctcagttctcccaaaagccatgtcccggcccttgctcatcaccttcaccccagccactgaccccagcgacctctggaaggatgggcagcagcagccacagcccgagaagccagagtccaccctggatggggctgcagcccgagctttctatgaggccctgattggggatgagagcagcgctcctgactcccagagatctcagactgaacctgccagagaaagaaagagaaagaaaagaagaataatgaaggcaccagcagcagaagcagtggcagaaggagcatcaggaagacatggacaagggagatcccttgaggctgaggataagatgactcaccggatactgagggcagcccaggagggggacctgccagaacttaggagactgctggaaccgcatgaggcaggaggagctggggggaatatcaacgcccgggatgccttctggtggaccccactgatgtgtgctgctcgagcgggccagggggcagctgtgagctatctcctgggccgtggggctgcctgggtgggggtctgtgagctgagtggcagggatgcggctcagctcgctgaagaagctggcttccctgaggtagcccgcatggtcagggagagccatggagagacaaggagcccggaaaaccggtctcctactccctccctccagtactgcgagaactgtgacacccacttccaagattccaaccaccgcacatccactgctcacctgctgtcactgtcgcagggtcctcagcctcccaaccttccacttggggtgcccatctccagcccgggcttcaaactgctgctgaggcggggctgggagccaggaatggggctgggaccccggggtgagggccgtgccaatcccatccccactgtcctcaagagggaccaggaaggactaggctacagatcagcaccccagccccgagtgacacatttcccagcttgggatacccgagctgtggctgggagggagagaccccctcgggtggccacactgagctggagggaggagagaaggagggaggagaaagacagggcttgggagcgggatctaaggacttacatgaacctcgagttctgactttggtaaagtctgaccctagtctgctgctgaagtctgaacttgggcctctgacctgggccctttgacttccccttcctgggatctgctcagatgcagatcctgaagtttttggtcaataggctctgtcttcgtgagagacgggctgagagtcagaaataaatcaaccatttgtggtttattcacttttctggaagctattttgaggaagccaaacagaagcctgggagccacatgcaagtcccacctgagtcagaaggggcagcctctccaggtggcatgataaggtcacctccctgccaatctgggttcactttcaggtcccagaccctcctgggagtcccccacctattctttcaacccccctggaccaagaattgcccagcttcgtgcaagtctcacttcccccaggaggagttccctgactacagccaattcactgatttcacaaacataagtccatatactatgtgccaagaatacaggtaaagacattcccaaccctcaaagagttcacagctggagagggaaagtgccatgttatcaatttttttcttttttttttgagatgcagtttcgctctcattgcccaggctggagtgcaatggcatgatctcggctcaccacaacctctgccccccgagttcaagggattctcctgcctcagcctccccagtagctgggattacaggcatgccccaccacgcccagctaattttgtatttttagtagagacggggtttctccatgttggccaagctggtcttgaactcccgacctcaggtgatccgccggcctcggcttcccaaagtgctggggttgcaggcatgagccaccactcccggcccatgttatcaaatattataatgcagggtgataagggaagtcaaggcctctagagatgagaatgggtagggttttgctggaagaggccagtgtgataggaaggcccacgattatcaagcttgtacacttagttgaactgggaccagaactctagcccccaaatctaaactttaaacttctttgttccaccc

SEQ ID NO: 135716 - DNA, 1910 bp, Homo sapiens
  Payload ID: 6539
  Gene Symbol: GPANK1
  Gene Name: G patch domain and ankyrin repeats 1
  ENST ID: ENST00000430994
  CDS Start-End: 650-1720
aggcgtgacgttatttcattacacggcttctcggcattccacaggtttccctccgcctcctgagggcctttcctaacccacagagtggattcctggctccagaaaatgggcttggagcgggggccacgttgaggaaggcgaagggcattgtgggggcgttatgtaaaagtaggaccccaaccgacagatcctagtgctcgcgccacctgggcgcgcggagctttgctcgtttactattgaaaaagttccagcgcgggaaactgaacccggagctttgcgcacgcccgagccctcaagtaatgtgggttgtggtttttgttgttgttgtcgccacgcatgcgtcttcgtgccgtgtggctatttgattgtgtcaactcttctgattagaatggcgccattttgcggtacggaagctacacagcaacacgtataggagactctccccgagatcttctagggagtgacccatctatttttgtttgggaagaggaaactccgaaatgggatcgcggaagacttaaagggccaggctgatttttttttcctactggtctctgaggctgtggttgctacagggtcaccacgagcttggcttacttgtctcatccttcccttgcctggtatcattttctcagttctcccaaaagccatgtcccggcccttgctcatcaccttcaccccagccactgaccccagcgacctctggaaggatgggcagcagcagccacagcccgagaagccagagtccaccctggatggggctgcagcccgagctttctatgaggccctgattggggatgagagcagcgctcctgactcccagagatctcagactgaacctgccagagaaagaaagagaaagaaaagaagaataatgaaggcaccagcagcagaagcagtggcagaaggagcatcaggaagacatggacaagggagatcccttgaggctgaggataagatgactcaccggatactgagggcagcccaggagggggacctgccagaacttaggagactgctggaaccgcatgaggcaggaggagctggggggaatatcaacgcccgggatgccttctggtggaccccactgatgtgtgctgctcgagcgggccagggggcagctgtgagctatctcctgggccgtggggctgcctgggtgggggtctgtgagctgagtggcagggatgcggctcagctcgctgaagaagctggcttccctgaggtagcccgcatggtcagggagagccatggagagacaaggagcccggaaaaccggtctcctactccctccctccagtactgcgagaactgtgacacccacttccaagattccaaccaccgcacatccactgctcacctgctgtcactgtcgcagggtcctcagcctcccaaccttccacttggggtgcccatctccagcccgggcttcaaactgctgctgaggcggggctgggagccaggaatggggctgggaccccggggtgagggccgtgccaatcccatccccactgtcctcaagagggaccaggaaggactaggctacagatcagcaccccagccccgagtgacacatttcccagcttgggatacccgagctgtggctgggagggagagaccccctcgggtggccacactgagctggagggaggagagaaggagggaggagaaagacagggcttgggagcgggatctaaggacttacatgaacctcgagttctgactttggtaaagtctgaccctagtctgctgctgaagtctgaacttgggcctctgacctgggccctttgacttccccttcctgggatctgctcagatgcagatcctgaagtttttggtcaataggctctgtcttcgtgagagacgggctgagagtcagaaataaatcaaccatttgtggtttattcactttt

SEQ ID NO: 135717 - DNA, 1814 bp, Homo sapiens; identical to SEQ ID NO: 135710
  Payload ID: 6539
  Gene Symbol: GPANK1
  Gene Name: G patch domain and ankyrin repeats 1
  Uniprot ID: O95872
  ENST ID: ENST00000414528
  CDS Start-End: 554-1624

SEQ ID NO: 135718 - DNA, 1598 bp, Homo sapiens
  Payload ID: 6539
  Gene Symbol: GPANK1
  Gene Name: G patch domain and ankyrin repeats 1
  ENST ID: ENST00000419139
  CDS Start-End: 338-1408
cagagacccttgacgggcatactgtttcctccgggctcctgcctcatgaggggagaggtgcggcttggctccaatggcgccattttgcggtacggaagctacacagcaacacgtataggagactctccccgagatcttctagggagtgacccatctatttttgtttgggaagaggaaactccgaaatgggatcgcggaagacttaaagggccaggctgatttttttttcctactgcaggtctctgaggctgtggttgctacagggtcaccacgagcttggcttacttgtctcatccttcccttgcctggtatcattttctcagttctcccaaaagccatgtcccggcccttgctcatcaccttcaccccagccactgaccccagcgacctctggaaggatgggcagcagcagccacagcccgagaagccagagtccaccctggatggggctgcagcccgagctttctatgaggccctgattggggatgagagcagcgctcctgactcccagagatctcagactgaacctgccagagaaagaaagagaaagaaaagaagaataatgaaggcaccagcagcagaagcagtggcagaaggagcatcaggaagacatggacaagggagatcccttgaggctgaggataagatgactcaccggatactgagggcagcccaggagggggacctgccagaacttaggagactgctggaaccgcatgaggcaggaggagctggggggaatatcaacgcccgggatgccttctggtggaccccactgatgtgtgctgctcgagcgggccagggggcagctgtgagctatctcctgggccgtggggctgcctgggtgggggtctgtgagctgagtggcagggatgcggctcagctcgctgaagaagctggcttccctgaggtagcccgcatggtcagggagagccatggagagacaaggagcccggaaaaccggtctcctactccctccctccagtactgcgagaactgtgacacccacttccaagattccaaccaccgcacatccactgctcacctgctgtcactgtcgcagggtcctcagcctcccaaccttccacttggggtgcccatctccagcccgggcttcaaactgctgctgaggcggggctgggagccaggaatggggctgggaccccggggtgagggccgtgccaatcccatccccactgtcctcaagagggaccaggaaggactaggctacagatcagcaccccagccccgagtgacacatttcccagcttgggatacccgagctgtggctgggagggagagaccccctcgggtggccacactgagctggagggaggagagaaggagggaggagaaagacagggcttgggagcgggatctaaggacttacatgaacctcgagttctgactttggtaaagtctgaccctagtctgctgctgaagtctgaacttgggcctctgacctgggccctttgacttccccttcctgggatctgctcagatgcagatcctgaagtttttggtcaataggctctgtcttcgtgagagacgggctgagagtcagaaataaatcaaccatttgtggtttattcactttt

SEQ ID NO: 135719 - DNA, 1598 bp, Homo sapiens; identical to SEQ ID NO: 135704
  Payload ID: 6539
  Gene Symbol: GPANK1
  Gene Name: G patch domain and ankyrin repeats 1
  Uniprot ID: O95872
  ENST ID: ENST00000453746
  CDS Start-End: 338-1408

SEQ ID NO: 135720 - DNA, 822 bp, Homo sapiens
  Payload ID: 6539
  Gene Symbol: GPANK1
  Gene Name: G patch domain and ankyrin repeats 1
  ENST ID: ENST00000432713
  CDS Start-End: 367-822
cgccacctgggcgcgcggagctttgctcgtttactattgaaaaagttccagcgcgggaaactgaacccggagctttgcgcacgcccgagccctcaagtaataatggcgccattttgcggtacggaagctacacagcaacacgtataggagactctccccgagatcttctagggagtgacccatctatttttgtttgggaagaggaaactccgaaatgggatcgcggaagacttaaagggccaggctgatttttttttcctactgcaggtctctgaggctgtggttgctacagggtcaccacgagcttggcttacttgtctcatccttcccttgcctggtatcattttctcagttctcccaaaagccatgtcccggcccttgctcatcaccttcaccccagccactgaccccagcgacctctggaaggatgggcagcagcagccacagcccgagaagccagagtccaccctggatggggctgcagcccgagctttctatgaggccctgattggggatgagagcagcgctcctgactcccagagatctcagactgaacctgccagagaaagaaagagaaagaaaagaagaataatgaaggcaccagcagcagaagcagtggcagaaggagcatcaggaagacatggacaagggagatcccttgaggctgaggataagatgactcaccggatactgagggcagcccaggagggggacctgccagaacttaggagactgctggaaccgcatgaggcaggaggagctggggggaatatcaacgcccgggatgccttctggtggaccccactgatgtgtgctgctcga

SEQ ID NO: 135721 - DNA, 1598 bp, Homo sapiens
  Payload ID: 6539
  Gene Symbol: GPANK1
  Gene Name: G patch domain and ankyrin repeats 1
  Uniprot ID: O95872
  ENST ID: ENST00000427527
  CDS Start-End: 338-1408
cagagacccttgacgggcatactgtttcctccgggctcctgcctcatgaggggagaggtgcggcttggctccaatggcgccattttgcggtacggaagctacacagcaacacgtataggagactctccccgagatcttctagggagtgacccatctatttttgtttgggaagaggaaactccgaaatgggatcgcggaagacttaaagggccaggctgatttttttttcctactgcaggtctctgaggctgtggttgctacagggtcaccacgagcttggcttacttgtctcatccttcccttgcctggtatcattttctcagttctcccaaaagccatgtcccggcccttgctcatcaccttcaccccagccactgaccccagcgacctctggaaggatgggcagcagcagccacagcccgagaagccagagtccaccctggatggggctgcagccctagctttctatgaggccctgattggggatgagagcagcgctcctgactcccagagatctcagactgaacctgccagagaaagaaagagaaagaaaagaagaataatgaaggcaccagcagcagaagcagtggcagaaggagcatcaggaagacatggacaagggagatcccttgaggctgaggataagatgactcaccggatactgagggcagcccaggagggggacctgccagaacttaggagactgctggaaccgcatgaggcaggaggagctggggggaatatcaacgcccgggatgccttctggtggaccccactgatgtgtgctgctcgagcgggccagggggcagctgtgagctatctcctgggccgtggggctgcctgggtgggggtctgtgagctgagtggcagggatgcggctcagctcgctgaagaagctggcttccctgaggtagcccgcatggtcagggagagccatggagagacaaggagcccggaaaaccggtctcctactccctccctccagtactgcgagaactgtgacacccacttccaagattccaaccaccgcacatccactgctcacctgctgtcactgtcgcagggtcctcagcctcccaaccttccacttggggtgcccatctccagcccgggcttcaaactgctgctgagggggggctgggagccaggaatggggctgggaccccggggtgagggccgtgccaatcccatccccactgtcctcaagagggaccaggaaggactaggctacagatcagcaccccagccccgagtgacacatttcccagcttgggatacccgagctgtggctgggagggagagaccccctcgggtggccacactgagctggagggaggagagaaggagggaggagaaagacagggcttgggagcgggatctaaggacttacatgaacctcgagttctgactttggtaaagtctgaccctagtctgctgctgaagtctgaacttgggcctctgacctgggccctttgacttccccttcctgggatctgctcagatgcagatcctgaagtttttggtcaataggctctgtcttcgtgagagacgggctgagagtcagaaataaatcaaccatttgtggtttattcactttt

SEQ ID NO: 135722 - DNA, 627 bp, Homo sapiens
  Payload ID: 6539
  Gene Symbol: GPANK1
  Gene Name: G patch domain and ankyrin repeats 1
  ENST ID: ENST00000443202
  CDS Start-End: 359-627
cctgggcgcgcggagctttgctcgtttactattgaaaaagttccagcgcgggaaactgaacccggagctttgcgcacgcccgagccctcaagtaataatggcgccattttgcggtacggaagctacacagcaacacgtataggagactctccccgagatcttctagggagtgacccatctatttttgtttgggaagaggaaactccgaaatgggatcgcggaagacttaaagggccaggctgatttttttttcctactggtctctgaggctgtggttgctacagggtcaccacgagcttggcttacttgtctcatccttcccttgcctggtatcattttctcagttctcccaaaagccatgtcccggcccttgctcatcaccttcaccccagccactgaccccagcgacctctggaaggatgggcagcagcagccacagcccgagaagccagagtccaccctggatggggctgcagcccgagctttctatgaggccctgattggggatgagagcagcgctcctgactcccagagatctcagactgaacctgccagagaaagaaagagaaagaaaagaagaataatgaaggcaccagcagcagaagcagtggcagaaggagcatcagg

SEQ ID NO: 135723 - DNA, 751 bp, Homo sapiens
  Payload ID: 6539
  Gene Symbol: GPANK1
  Gene Name: G patch domain and ankyrin repeats 1
  ENST ID: ENST00000418144
  CDS Start-End: 431-751
gggcaatacagttttgtgctcactgggtgaagaggctgacttagggcggggaaaggagggagccaggctggatctctttccgcagctctcctcacgttcccctctagtcccggcgcggcgctgctgcccaggggactggcctatcctcggccaatccgctgggtccttattgcctgttgggcccctagtgcgaatcagtcccgccagagacccttgacgggcatactgtttcctccgggctcctgcctcatgaggggagaggaagaggaaactccgaaatgggatcgcggaagacttaaagggccaggctgatttttttttcctactgcaggtctctgaggctgtggttgctacagggtcaccacgagcttggcttacttgtctcatccttcccttgcctggtatcattttctcagttctcccaaaagccatgtcccggcccttgctcatcaccttcaccccagccactgaccccagcgacctctggaaggatgggcagcagcagccacagcccgagaagccagagtccaccctggatggggctgcagcccgagctttctatgaggccctgattggggatgagagcagcgctcctgactcccagagatctcagactgaacctgccagagaaagaaagagaaagaaaagaagaataatgaaggcaccagcagcagaagcagtggcagaaggagcatcaggaagacatggacaagggagatcccttgaggctgaggataagatgactcaccgg

SEQ ID NO: 135724 - DNA, 751 bp, Homo sapiens
  Payload ID: 6539
  Gene Symbol: GPANK1
  Gene Name: G patch domain and ankyrin repeats 1
  ENST ID: ENST00000441661
  CDS Start-End: 431-751
gggcaatacagttttgtgctcactgggtgaagaggctgacttagggcggggaaaggagggagccaggctggatctctttccgcagctctcctcacgttcccctctagtcccggcgaggcgctgctgcccaggggactggcctatcctcggccaatccgctgggtccttattgcctgttgggcccctagtgcgaatcagtcccgccagagacccttgacgggcatactgtttcctccgggctcctgcctcatgaggggagaggaagaggaaactccgaaatgggatcgcggaagacttaaagggccaggctgatttttttttcctactgcaggtctctgaggctgtggttgctacagggtcaccacgagcttggcttacttgtctcatccttcccttgcctggtatcattttctcagttctcccaaaagccatgtcccggcccttgctcatcaccttcaccccagccactgaccccagcgacctctggaaggatgggcagcagcagccacagcccgagaagccagagtccaccctggatggggctgcagccctagctttctatgaggccctgattggggatgagagcagcgctcctgactcccagagatctcagactgaacctgccagagaaagaaagagaaagaaaagaagaataatgaaggcaccagcagcagaagcagtggcagaaggagcatcaggaagacatggacaagggagatcccttgaggctgaggataagatgactcaccgg

SEQ ID NO: 135725 - DNA, 822 bp, Homo sapiens; identical to SEQ ID NO: 135720
  Payload ID: 6539
  Gene Symbol: GPANK1
  Gene Name: G patch domain and ankyrin repeats 1
  ENST ID: ENST00000415256
  CDS Start-End: 367-822

SEQ ID NO: 135726 - DNA, 751 bp, Homo sapiens
  Payload ID: 6539
  Gene Symbol: GPANK1
  Gene Name: G patch domain and ankyrin repeats 1
  ENST ID: ENST00000453239
  CDS Start-End: 431-751
gggcaatacagttttgtgctcactgggtgaagaggctgacttagggcggggaaaggagggagccaggctggatctctttccgcagctctcctcacgttcccctctagtcccggcgcggcgctgctgcccgggggactggcctatcctcggccaatccgctgggtccttattgcctgttgggcccctagtgcgaatcagtcccgccagagacccttgacgggcatactgtttcctccgggctcctgcctcatgaggggagaggaagaggaaactccgaaatgggatcgcggaagacttaaagggccaggctgatttttttttcctactgcaggtctctgaggctgtggttgctacagggtcaccacgagcttggcttacttgtctcatccttcccttgcctggtatcattttctcagttctcccaaaagccatgtcccggcccttgctcatcaccttcaccccagccactgaccccagcgacctctggaaggatgggcagcagcagccacagcccgagaagccagagtccaccctggatggggctgcagcccgagctttctatgaggccctgattggggatgagagcagcgctcctgactcccagagatctcagactgaacctgccagagaaagaaagagaaagaaaagaagaataatgaaggcaccagcagcagaagcagtggcagaaggagcatcaggaagacatggacaagggagatcccttgaggctgaggataagatgactcaccgg

SEQ ID NO: 135727 - DNA, 1910 bp, Homo sapiens; identical to SEQ ID NO: 135706
  Payload ID: 6539
  Gene Symbol: GPANK1
  Gene Name: G patch domain and ankyrin repeats 1
  Uniprot ID: O95872
  ENST ID: ENST00000449868
  CDS Start-End: 650-1720

SEQ ID NO: 135728 - DNA, 802 bp, Homo sapiens
  Payload ID: 6539
  Gene Symbol: GPANK1
  Gene Name: G patch domain and ankyrin repeats 1
  ENST ID: ENST00000458083
  CDS Start-End: 309-802
cttaggctctaagtgtgaccttcgaaccctggtcagagtaatgaatggcgccattttgcggtacggaagctacacagcaacacgtataggagactctccccgagatcttctagggagtgacccatctatttttgtttgggaagaggaaactccgaaatgggatcgcggaagacttaaagggccaggctgatttttttttcctactgcaggtctctgaggctgtggttgctacagggtcaccacgagcttggcttacttgtctcatccttcccttgcctggtatcattttctcagttctcccaaaagccatgtcccggcccttgctcatcaccttcaccccagccactgaccccagcgacctctggaaggatgggcagcagcagccacagcccgagaagccagagtccaccctggatggggctgcagcccgagctttctatgaggccctgattggggatgagagcagcgctcctgactcccagagatctcagactgaacctgccagagaaagaaagagaaagaaaagaagaataatgaaggcaccagcagcagaagcagtggcagaaggagcatcaggaagacatggacaagggagatcccttgaggctgaggataagatgactcaccggatactgagggcagcccaggagggggacctgccagaacttaggagactgctggaaccgcatgaggcaggaggagctggggggaatatcaacgcccgggatgccttctggtggaccccactgatgtgtgctgctcgagcgggccagggggcagctgtgagctatctcctgggccg

SEQ ID NO: 135729 - DNA, 627 bp, Homo sapiens; identical to SEQ ID NO: 135722
  Payload ID: 6539
  Gene Symbol: GPANK1
  Gene Name: G patch domain and ankyrin repeats 1
  ENST ID: ENST00000456540
  CDS Start-End: 359-627

SEQ ID NO: 135730 - DNA, 627 bp, Homo sapiens
  Payload ID: 6539
  Gene Symbol: GPANK1
  Gene Name: G patch domain and ankyrin repeats 1
  ENST ID: ENST00000416364
  CDS Start-End: 359-627
cctgggcgcgcggagctttgctcgtttactattgaaaaagttccagcgcgggaaactgaacccggagctttgcgcacgcccgagccctcaagtaataatggcgccattttgcggtacggaagctacacagcaacacgtataggagactctccccgagatcttctagggagtgacccatctatttttgtttgggaagaggaaactccgaaatgggatcgcggaagacttaaagggccaggctgatttttttttcctactggtctctgaggctgtggttgctacagggtcaccacgagcttggcttacttgtctcatccttcccttgcctggtatcattttctcagttctcccaaaagccatgtcccggcccttgctcatcaccttcaccccagccactgaccccagcgacctctggaaggatgggcagcagcagccacagcccgagaagccagagtccaccctggatggggctgcagccctagctttctatgaggccctgattggggatgagagcagcgctcctgactcccagagatctcagactgaacctgccagagaaagaaagagaaagaaaagaagaataatgaaggcaccagcagcagaagcagtggcagaaggagcatcagg

SEQ ID NO: 135731 - DNA, 1910 bp, Homo sapiens; identical to SEQ ID NO: 135711
  Payload ID: 6539
  Gene Symbol: GPANK1
  Gene Name: G patch domain and ankyrin repeats 1
  Uniprot ID: O95872
  ENST ID: ENST00000426326
  CDS Start-End: 650-1720

SEQ ID NO: 135732 - DNA, 1800 bp, Homo sapiens; identical to SEQ ID NO: 135705
  Payload ID: 6539
  Gene Symbol: GPANK1
  Gene Name: G patch domain and ankyrin repeats 1
  Uniprot ID: O95872
  ENST ID: ENST00000440777
  CDS Start-End: 540-1610

SEQ ID NO: 135733 - DNA, 751 bp, Homo sapiens; identical to SEQ ID NO: 135723
  Payload ID: 6539
  Gene Symbol: GPANK1
  Gene Name: G patch domain and ankyrin repeats 1
  ENST ID: ENST00000430230
  CDS Start-End: 431-751

SEQ ID NO: 135734 - DNA, 627 bp, Homo sapiens; identical to SEQ ID NO: 135730
  Payload ID: 6539
  Gene Symbol: GPANK1
  Gene Name: G patch domain and ankyrin repeats 1
  ENST ID: ENST00000438225
  CDS Start-End: 359-627

SEQ ID NO: 135735 - DNA, 986 bp, Homo sapiens
  Payload ID: 6539
  Gene Symbol: GPANK1
  Gene Name: G patch domain and ankyrin repeats 1
  ENST ID: ENST00000426953
  CDS Start-End: 391-986
gacttagggcggggaaaggagggagccaggctggatctctttccgcagctctcctcacgttcccctctagtcccggcgaggcgctgctgcccaggggactggcctatcctcggccaatccgctgggtccttattgcctgttgggcccctagtgcgaatcagtcccgccagagacccttgacgggcatactgtttcctccgggctcctgcctcatgaggggagaggaagaggaaactccgaaatgggatcgcggaagacttaaagggccaggctgatttttttttcctactggtctctgaggctgtggttgctacagggtcaccacgagcttggcttacttgtctcatccttcccttgcctggtatcattttctcagttctcccaaaagccatgtcccggcccttgctcatcaccttcaccccagccactgaccccagcgacctctggaaggatgggcagcagcagccacagcccgagaagccagagtccaccctggatggggctgcagccctagctttctatgaggccctgattggggatgagagcagcgctcctgactcccagagatctcagactgaacctgccagagaaagaaagagaaagaaaagaagaataatgaaggcaccagcagcagaagcagtggcagaaggagcatcaggaagacatggacaagggagatcccttgaggctgaggataagatgactcaccggatactgagggcagcccaggagggggacctgccagaacttaggagactgctggaaccgcatgaggcaggaggagctggggggaatatcaacgcccgggatgccttctggtggaccccactgatgtgtgctgctcgagcgggccagggggcagctgtgagctatctcctgggccgtggggctgcctgggtgggggtctgtgagctgagtggcagggatgcggctcagctcgctgaagaagctggcttccctgaggtagcccgcatggtcagggagag

SEQ ID NO: 135736 - DNA, 2798 bp, Homo sapiens; identical to SEQ ID NO: 135713
  Payload ID: 6539
  Gene Symbol: GPANK1
  Gene Name: G patch domain and ankyrin repeats 1
  Uniprot ID: O95872
  ENST ID: ENST00000433880
  CDS Start-End: 686-1756

SEQ ID NO: 135737 - DNA, 1800 bp, Homo sapiens
  Payload ID: 6539
  Gene Symbol: GPANK1
  Gene Name: G patch domain and ankyrin repeats 1
  Uniprot ID: O95872
  ENST ID: ENST00000456191
  CDS Start-End: 540-1610
cggggcccgggagtctgggcaatacagttttgtgctcactgggtgaagaggctgacttagggcggggaaaggagggagccaggctggatctctttccgcagctctcctcacgttcccctctagtcccggcgaggcgctgctgcccaggggactggcctatcctcggccaatccgctgggtccttattgcctgttgggcccctagtgcgaatcagtcccgccagagacccttgacgggcatactgtttcctccgggctcctgcctcatgaggggagagaatggcgccattttgcggtacggaagctacacagcaacacgtataggagactctccccgagatcttctagggagtgacccatctatttttgtttgggaagaggaaactccgaaatgggatcgcggaagacttaaagggccaggctgatttttttttcctactggtctctgaggctgtggttgctacagggtcaccacgagcttggcttacttgtctcatccttcccttgcctggtatcattttctcagttctcccaaaagccatgtcccggcccttgctcatcaccttcaccccagccactgaccccagcgacctctggaaggatgggcagcagcagccacagcccgagaagccagagtccaccctggatggggctgcagccctagctttctatgaggccctgattggggatgagagcagcgctcctgactcccagagatctcagactgaacctgccagagaaagaaagagaaagaaaagaagaataatgaaggcaccagcagcagaagcagtggcagaaggagcatcaggaagacatggacaagggagatcccttgaggctgaggataagatgactcaccggatactgagggcagcccaggagggggacctgccagaacttaggagactgctggaaccgcatgaggcaggaggagctggggggaatatcaacgcccgggatgccttctggtggaccccactgatgtgtgctgctcgagcgggccagggggcagctgtgagctatctcctgggccgtggggctgcctgggtgggggtctgtgagctgagtggcagggatgcggctcagctcgctgaagaagctggcttccctgaggtagcccgcatggtcagggagagccatggagagacaaggagcccggaaaaccggtctcctactccctccctccagtactgcgagaactgtgacacccacttccaagattccaaccaccgcacatccactgctcacctgctgtcactgtcgcagggtcctcagcctcccaaccttccacttggggtgcccatctccagcccgggcttcaaactgctgctgagggggggctgggagccaggaatggggctgggaccccggggtgagggccgtgccaatcccatccccactgtcctcaagagggaccaggaaggactaggctacagatcagcaccccagccccgagtgacacatttcccagcttgggatacccgagctgtggctgggagggagagaccccctcgggtggccacactgagctggagggaggagagaaggagggaggagaaagacagggcttgggagcgggatctaaggacttacatgaacctcgagttctgactttggtaaagtctgaccctagtctgctgctgaagtctgaacttgggcctctgacctgggccctttgacttccccttcctgggatctgctcagatgcagatcctgaagtttttggtcaataggctctgtcttcgtgagagacgggctgagagtcagaaataaatcaaccatttgtggtttattcactttt

SEQ ID NO: 135738 - DNA, 802 bp, Homo sapiens; identical to SEQ ID NO: 135728
  Payload ID: 6539
  Gene Symbol: GPANK1
  Gene Name: G patch domain and ankyrin repeats 1
  ENST ID: ENST00000412886
  CDS Start-End: 309-802

SEQ ID NO: 135739 - DNA, 2793 bp, Homo sapiens; identical to SEQ ID NO: 135708
  Payload ID: 6539
  Gene Symbol: GPANK1
  Gene Name: G patch domain and ankyrin repeats 1
  Uniprot ID: O95872
  ENST ID: ENST00000416384
  CDS Start-End: 686-1756

SEQ ID NO: 135740 - DNA, 802 bp, Homo sapiens; identical to SEQ ID NO: 135728
  Payload ID: 6539
  Gene Symbol: GPANK1
  Gene Name: G patch domain and ankyrin repeats 1
  ENST ID: ENST00000420352
  CDS Start-End: 309-802

SEQ ID NO: 135741 - DNA, 751 bp, Homo sapiens; identical to SEQ ID NO: 135724
  Payload ID: 6539
  Gene Symbol: GPANK1
  Gene Name: G patch domain and ankyrin repeats 1
  ENST ID: ENST00000440952
  CDS Start-End: 431-751

SEQ ID NO: 135742 - DNA, 1910 bp, Homo sapiens
  Payload ID: 6539
  Gene Symbol: GPANK1
  Gene Name: G patch domain and ankyrin repeats 1
  Uniprot ID: O95872
  ENST ID: ENST00000447705
  CDS Start-End: 650-1720
aggcgtgacgttatttcattacacggcttctcggcattccacaggtttccctccgcctcctgagggcctttcctaacccacagagtggattcctggctccagaaaatgggcttggagcgggggccacgttgaggaaggcgaagggcattgtgggggcgttatgtaaaagtaggaccccaaccgacagatcctagtgctcgcgccacctgggcgcgcggagctttgctcgtttactattgaaaaagttccagcgcgggaaactgaacccggagctttgcgcacgcccgagccctcaagtaatgtgggttgtggtttttgttgttgttgtcgccacgcatgcgtcttcgtgccgtgtggctatttgattgtgtcaactcttctgattagaatggcgccattttgcggtacggaagctacacagcaacacgtataggagactctccccgagatcttctagggagtgacccatctatttttgtttgggaagaggaaactccgaaatgggatcgcggaagacttaaagggccaggctgatttttttttcctactggtctctgaggctgtggttgctacagggtcaccacgagcttggcttacttgtctcatccttcccttgcctggtatcattttctcagttctcccaaaagccatgtcccggcccttgctcatcaccttcaccccagccactgaccccagcgacctctggaaggatgggcagcagcagccacagcccgagaagccagagtccaccctggatggggctgcagccctagctttctatgaggccctgattggggatgagagcagcgctcctgactcccagagatctcagactgaacctgccagagaaagaaagagaaagaaaagaagaataatgaaggcaccagcagcagaagcagtggcagaaggagcatcaggaagacatggacaagggagatcccttgaggctgaggataagatgactcaccggatactgagggcagcccaggagggggacctgccagaacttaggagactgctggaaccgcatgaggcaggaggagctggggggaatatcaacgcccgggatgccttctggtggaccccactgatgtgtgctgctcgagcgggccagggggcagctgtgagctatctcctgggccgtggggctgcctgggtgggggtctgtgagctgagtggcagggatgcggctcagctcgctgaagaagctggcttccctgaggtagcccgcatggtcagggagagccatggagagacaaggagcccggaaaaccggtctcctactccctccctccagtactgcgagaactgtgacacccacttccaagattccaaccaccgcacatccactgctcacctgctgtcactgtcgcagggtcctcagcctcccaaccttccacttggggtgcccatctccagcccgggcttcaaactgctgctgagggggggctgggagccaggaatggggctgggaccccggggtgagggccgtgccaatcccatccccactgtcctcaagagggaccaggaaggactaggctacagatcagcaccccagccccgagtgacacatttcccagcttgggatacccgagctgtggctgggagggagagaccccctcgggtggccacactgagctggagggaggagagaaggagggaggagaaagacagggcttgggagcgggatctaaggacttacatgaacctcgagttctgactttggtaaagtctgaccctagtctgctgctgaagtctgaacttgggcctctgacctgggccctttgacttccccttcctgggatctgctcagatgcagatcctgaagtttttggtcaataggctctgtcttcgtgagagacgggctgagagtcagaaataaatcaaccatttgtggtttattcactttt

SEQ ID NO: 135743 - DNA, 822 bp, Homo sapiens
  Payload ID: 6539
  Gene Symbol: GPANK1
  Gene Name: G patch domain and ankyrin repeats 1
  ENST ID: ENST00000424420
  CDS Start-End: 367-822
cgccacctgggcgcgcggagctttgctcgtttactattgaaaaagttccagcgcgggaaactgaacccggagctttgcgcacgcccgagccctcaagtaataatggcgccattttgcggtacggaagctacacagcaacacgtataggagactctccccgagatcttctagggagtgacccatctatttttgtttgggaagaggaaactccgaaatgggatcgcggaagacttaaagggccaggctgatttttttttcctactgcaggtctctgaggctgtggttgctacagggtcaccacgagcttggcttacttgtctcatccttcccttgcctggtatcattttctcagttctcccaaaagccatgtcccggcccttgctcatcaccttcaccccagccactgaccccagcgacctctggaaggatgggcagcagcagccacagcccgagaagccagagtccaccctggatggggctgcagccctagctttctatgaggccctgattggggatgagagcagcgctcctgactcccagagatctcagactgaacctgccagagaaagaaagagaaagaaaagaagaataatgaaggcaccagcagcagaagcagtggcagaaggagcatcaggaagacatggacaagggagatcccttgaggctgaggataagatgactcaccggatactgagggcagcccaggagggggacctgccagaacttaggagactgctggaaccgcatgaggcaggaggagctggggggaatatcaacgcccgggatgccttctggtggaccccactgatgtgtgctgctcga

SEQ ID NO: 135744 - DNA, 627 bp, Homo sapiens; identical to SEQ ID NO: 135722
  Payload ID: 6539
  Gene Symbol: GPANK1
  Gene Name: G patch domain and ankyrin repeats 1
  ENST ID: ENST00000442498
  CDS Start-End: 359-627

SEQ ID NO: 135745 - DNA, 802 bp, Homo sapiens
  Payload ID: 6539
  Gene Symbol: GPANK1
  Gene Name: G patch domain and ankyrin repeats 1
  ENST ID: ENST00000450924
  CDS Start-End: 309-802
cttaggctctaagtgtgaccttcgaaccctggtcagagtaatgaatggcgccattttgcggtacggaagctacacagcaacacgtataggagactctccccgagatcttctagggagtgacccatctatttttgtttgggaagaggaaactccgaaatgggatcgcggaagacttaaagggccaggctgatttttttttcctactgcaggtctctgaggctgtggttgctacagggtcaccacgagcttggcttacttgtctcatccttcccttgcctggtatcattttctcagttctcccaaaagccatgtcccggcccttgctcatcaccttcaccccagccactgaccccagcgacctctggaaggatgggcagcagcagccacagcccgagaagccagagtccaccctggatggggctgcagccctagctttctatgaggccctgattggggatgagagcagcgctcctgactcccagagatctcagactgaacctgccagagaaagaaagagaaagaaaagaagaataatgaaggcaccagcagcagaagcagtggcagaaggagcatcaggaagacatggacaagggagatcccttgaggctgaggataagatgactcaccggatactgagggcagcccaggagggggacctgccagaacttaggagactgctggaaccgcatgaggcaggaggagctggggggaatatcaacgcccgggatgccttctggtggaccccactgatgtgtgctgctcgagcgggccagggggcagctgtgagctatctcctgggccg

SEQ ID NO: 135746 - DNA, 1800 bp, Homo sapiens; identical to SEQ ID NO: 135712
  Payload ID: 6539
  Gene Symbol: GPANK1
  Gene Name: G patch domain and ankyrin repeats 1
  Uniprot ID: O95872
  ENST ID: ENST00000457505
  CDS Start-End: 540-1610

SEQ ID NO: 135747 - DNA, 751 bp, Homo sapiens; identical to SEQ ID NO: 135724
  Payload ID: 6539
  Gene Symbol: GPANK1
  Gene Name: G patch domain and ankyrin repeats 1
  ENST ID: ENST00000418462
  CDS Start-End: 431-751

SEQ ID NO: 135748 - DNA, 1814 bp, Homo sapiens
  Payload ID: 6539
  Gene Symbol: GPANK1
  Gene Name: G patch domain and ankyrin repeats 1
  Uniprot ID: O95872
  ENST ID: ENST00000433857
  CDS Start-End: 554-1624
ggtatggcgttcggggcccgggagtctgggcaatacagttttgtgctcactgggtgaagaggctgacttagggcggggaaaggagggagccaggctggatctctttccgcagctctcctcacgttcccctctagtcccggcgaggcgctgctgcccaggggactggcctatcctcggccaatccgctgggtccttattgcctgttgggcccctagtgcgaatcagtcccgccagagacccttgacgggcatactgtttcctccgggctcctgcctcatgaggggagagaatggcgccattttgcggtacggaagctacacagcaacacgtataggagactctccccgagatcttctagggagtgacccatctatttttgtttgggaagaggaaactccgaaatgggatcgcggaagacttaaagggccaggctgatttttttttcctactgcaggtctctgaggctgtggttgctacagggtcaccacgagcttggcttacttgtctcatccttcccttgcctggtatcattttctcagttctcccaaaagccatgtcccggcccttgctcatcaccttcaccccagccactgaccccagcgacctctggaaggatgggcagcagcagccacagcccgagaagccagagtccaccctggatggggctgcagccctagctttctatgaggccctgattggggatgagagcagcgctcctgactcccagagatctcagactgaacctgccagagaaagaaagagaaagaaaagaagaataatgaaggcaccagcagcagaagcagtggcagaaggagcatcaggaagacatggacaagggagatcccttgaggctgaggataagatgactcaccggatactgagggcagcccaggagggggacctgccagaacttaggagactgctggaaccgcatgaggcaggaggagctggggggaatatcaacgcccgggatgccttctggtggaccccactgatgtgtgctgctcgagcgggccagggggcagctgtgagctatctcctgggccgtggggctgcctgggtgggggtctgtgagctgagtggcagggatgcggctcagctcgctgaagaagctggcttccctgaggtagcccgcatggtcagggagagccatggagagacaaggagcccggaaaaccggtctcctactccctccctccagtactgcgagaactgtgacacccacttccaagattccaaccaccgcacatccactgctcacctgctgtcactgtcgcagggtcctcagcctcccaaccttccacttggggtgcccatctccagcccgggcttcaaactgctgctgagggggggctgggagccaggaatggggctgggaccccggggtgagggccgtgccaatcccatccccactgtcctcaagagggaccaggaaggactaggctacagatcagcaccccagccccgagtgacacatttcccagcttgggatacccgagctgtggctgggagggagagaccccctcgggtggccacactgagctggagggaggagagaaggagggaggagaaagacagggcttgggagcgggatctaaggacttacatgaacctcgagttctgactttggtaaagtctgaccctagtctgctgctgaagtctgaacttgggcctctgacctgggccctttgacttccccttcctgggatctgctcagatgcagatcctgaagtttttggtcaataggctctgtcttcgtgagagacgggctgagagtcagaaataaatcaaccatttgtggtttattcactttt

SEQ ID NO: 135749 - DNA, 627 bp, Homo sapiens; identical to SEQ ID NO: 135730
  Payload ID: 6539
  Gene Symbol: GPANK1
  Gene Name: G patch domain and ankyrin repeats 1
  ENST ID: ENST00000440374
  CDS Start-End: 359-627

SEQ ID NO: 135750 - DNA, 802 bp, Homo sapiens; identical to SEQ ID NO: 135728
  Payload ID: 6539
  Gene Symbol: GPANK1
  Gene Name: G patch domain and ankyrin repeats 1
  ENST ID: ENST00000438145
  CDS Start-End: 309-802

SEQ ID NO: 135751 - DNA, 1800 bp, Homo sapiens; identical to SEQ ID NO: 135705
  Payload ID: 6539
  Gene Symbol: GPANK1
  Gene Name: G patch domain and ankyrin repeats 1
  Uniprot ID: O95872
  ENST ID: ENST00000439710
  CDS Start-End: 540-1610

SEQ ID NO: 135752 - DNA, 802 bp, Homo sapiens; identical to SEQ ID NO: 135745
  Payload ID: 6539
  Gene Symbol: GPANK1
  Gene Name: G patch domain and ankyrin repeats 1
  ENST ID: ENST00000424195
  CDS Start-End: 309-802

SEQ ID NO: 135753 - DNA, 822 bp, Homo sapiens; identical to SEQ ID NO: 135720
  Payload ID: 6539
  Gene Symbol: GPANK1
  Gene Name: G patch domain and ankyrin repeats 1
  ENST ID: ENST00000445768
  CDS Start-End: 367-822

SEQ ID NO: 135754 - DNA, 1800 bp, Homo sapiens
  Payload ID: 6539
  Gene Symbol: GPANK1
  Gene Name: G patch domain and ankyrin repeats 1
  ENST ID: ENST00000423886
  CDS Start-End: 540-1610
cggggcccgggagtctgggcaatacagttttgtgctcactgggtgaagaggctgacttagggcggggaaaggagggagccaggctggatctctttccgcagctctcctcacgttcccctctagtcccggcgcggcgctgctgcccgggggactggcctatcctcggccaatccgctgggtccttattgcctgttgggcccctagtgcgaatcagtcccgccagagacccttgacgggcatactgtttcctccgggctcctgcctcatgaggggagagaatggcgccattttgcggtacggaagctacacagcaacacgtataggagactctccccgagatcttctagggagtgacccatctatttttgtttgggaagaggaaactccgaaatgggatcgcggaagacttaaagggccaggctgatttttttttcctactggtctctgaggctgtggttgctacagggtcaccacgagcttggcttacttgtctcatccttcccttgcctggtatcattttctcagttctcccaaaagccatgtcccggcccttgctcatcaccttcaccccagccactgaccccagcgacctctggaaggatgggcagcagcagccacagcccgagaagccagagtccaccctggatggggctgcagcccgagctttctatgaggccctgattggggatgagagcagcgctcctgactcccagagatctcagactgaacctgccagagaaagaaagagaaagaaaagaagaataatgaaggcaccagcagcagaagcagtggcagaaggagcatcaggaagacatggacaagggagatcccttgaggctgaggataagatgactcaccggatactgagggcagcccaggagggggacctgccagaacttaggagactgctggaaccgcatgaggcaggaggagctggggggaatatcaacgcccgggatgccttctggtggaccccactgatgtgtgctgctcgagcgggccagggggcagctgtgagctatctcctgggccgtggggctgcctgggtgggggtctgtgagctgagtggcagggatgcggctcagctcgctgaagaagctggcttccctgaggtagcccgcatggtcagggagagccatggagagacaaggagcccggaaaaccggtctcctactccctccctccagtactgcgagaactgtgacacccacttccaagattccaaccaccgcacatccactgctcacctgctgtcactgtcgcagggtcctcagcctcccaaccttccacttggggtgcccatctccagcccgggcttcaaactgctgctgaggcggggctgggagccaggaatggggctgggaccccggggtgagggccgtgccaatcccatccccactgtcctcaagagggaccaggaaggactaggctacagatcagcaccccagccccgagtgacacatttcccagcttgggatacccgagctgtggctgggagggagagaccccctcgggtggccacactgagctggagggaggagagaaggagggaggagaaagacagggcttgggagcgggatctaaggacttacatgaacctcgagttctgactttggtaaagtctgaccctagtctgctgctgaagtctgaacttgggcctctgacctgggccctttgacttccccttcctgggatctgctcagatgcagatcctgaagtttttggtcaataggctctgtcttcgtgagagacgggctgagagtcagaaataaatcaaccatttgtggtttattcactttt

SEQ ID NO: 135755 - DNA, 1814 bp, Homo sapiens; identical to SEQ ID NO: 135707
  Payload ID: 6539
  Gene Symbol: GPANK1
  Gene Name: G patch domain and ankyrin repeats 1
  Uniprot ID: O95872
  ENST ID: ENST00000422131
  CDS Start-End: 554-1624

SEQ ID NO: 135756 - DNA, 2793 bp, Homo sapiens
  Payload ID: 6539
  Gene Symbol: GPANK1
  Gene Name: G patch domain and ankyrin repeats 1
  Uniprot ID: O95872
  ENST ID: ENST00000448091
  CDS Start-End: 686-1756
cacatcaaagtccggagaccccatgtgccgctcccagcgacaagggactcggagcagcgacgacttcagactcaccggctggacggggaccaggactggggtggggtagggaagttgctacttccagggaacggcggcgaccgctacagcgcaggccgcggacccgaccgcggcaggcgaagtggggtggggggagtggaaattagggagggtggggaagagggcaacacgcaagcgccaagggtcaggtgccgcggtggatgccgggacacggagtccccggtagagaaagaaactggctaaatgagagaaagcgaactaccaatcccaggatgacccgcgcacgacctggctgtcacgaaggcccggaggagggcgcttgcgggcggggcacaacgagaagccaccggaagcggaagccagaatggcgccattttgcggtacggaagctacacagcaacacgtataggagactctccccgagatcttctagggagtgacccatctatttttgtttgggaagaggaaactccgaaatgggatcgcggaagacttaaagggccaggctgatttttttttcctactggtctctgaggctgtggttgctacagggtcaccacgagcttggcttacttgtctcatccttcccttgcctggtatcattttctcagttctcccaaaagccatgtcccggcccttgctcatcaccttcaccccagccactgaccccagcgacctctggaaggatgggcagcagcagccacagcccgagaagccagagtccaccctggatggggctgcagcccgagctttctatgaggccctgattggggatgagagcagcgctcctgactcccagagatctcagactgaacctgccagagaaagaaagagaaagaaaagaagaataatgaaggcaccagcagcagaagcagtggcagaaggagcatcaggaagacatggacaagggagatcccttgaggctgaggataagatgactcaccggatactgagggcagcccaggagggggacctgccagaacttaggagactgctggaaccgcatgaggcaggaggagctggggggaatatcaacgcccgggatgccttctggtggaccccactgatgtgtgctgctcgagcgggccagggggcagctgtgagctatctcctgggccgtggggctgcctgggtgggggtctgtgagctgagtggcagggatgcggctcagctcgctgaagaagctggcttccctgaggtagcccgcatggtcagggagagccatggagagacaaggagcccggaaaaccggtctcctactccctccctccagtactgcgagaactgtgacacccacttccaagattccaaccaccgcacatccactgctcacctgctgtcactgtcgcagggtcctcagcctcccaaccttccacttggggtgcccatctccagcccgggcttcaaactgctgctgagggggggctgggagccaggaatggggctgggaccccggggtgagggccgtgccaatcccatccccactgtcctcaagagggaccaggaaggactaggctacagatcagcaccccagccccgagtgacacatttcccagcttgggatacccgagctgtggctgggagggagagaccccctcgggtggccacactgagctggagggaggagagaaggagggaggagaaagacagggcttgggagcgggatctaaggacttacatgaacctcgagttctgactttggtaaagtctgaccctagtctgctgctgaagtctgaacttgggcctctgacctgggccctttgacttccccttcctgggatctgctcagatgcagatcctgaagtttttggtcaataggctctgtcttcgtgagagacgggctgagagtcagaaataaatcaaccatttgtggtttattcacttttctggaagctattttgaggaagccaaacagaagcctgggagccacatgcaagtcccacctgagtcagaaggggcagcctctccaggtggcatgataaggtcacctccctgccaatctgggttcactttcaggtcccagaccctcctgggagtcccccacctattctttcaacccccctggaccaagaattgcccagcttcgtgcaagtctcacttcccccaggaggagttccctgactacagccaattcactgatttcacaaacataagtccatatactatgtgccaagaatacaggtaaagacattcccaaccctcaaagagttcacagctggagagggaaagtgccatgttaccaatttttttcttttttttttgagatgcagtttcgctctcattgcccaggctggagtgcaatggcatgatctcggctcaccacaacctctgccccccgagttcaagggattctcctgcctcagcctccccagtagctgggattacaggcatgccccaccacgcccagctaattttgtatttttagtagagacggggtttctccatgttggccaagctggtcttgaactcccgacctcaggtgatccgccggcctcggcttcccaaagtgctggggttgcaggcatgagccaccactcccggcccatgttatcaaatattataatgcagggtgataagggaagtcaaggcctctagagatgagaatgggtagggttttgctggaagaggccagtgtgataggaaggcccacgattatcaagcttgtacacttagttgaactgggaccagaactctagcccccaaatctaaactttaaacttctttgttccaccc

SEQ ID NO: 135757 - DNA, 1910 bp, Homo sapiens; identical to SEQ ID NO: 135706
  Payload ID: 6539
  Gene Symbol: GPANK1
  Gene Name: G patch domain and ankyrin repeats 1
  Uniprot ID: O95872
  ENST ID: ENST00000418502
  CDS Start-End: 650-1720

SEQ ID NO: 135758 - DNA, 986 bp, Homo sapiens
  Payload ID: 6539
  Gene Symbol: GPANK1
  Gene Name: G patch domain and ankyrin repeats 1
  ENST ID: ENST00000446315
  CDS Start-End: 391-986
gacttagggcggggaaaggagggagccaggctggatctctttccgcagctctcctcacgttcccctctagtcccggcgcggcgctgctgcccgggggactggcctatcctcggccaatccgctgggtccttattgcctgttgggcccctagtgcgaatcagtcccgccagagacccttgacgggcatactgtttcctccgggctcctgcctcatgaggggagaggaagaggaaactccgaaatgggatcgcggaagacttaaagggccaggctgatttttttttcctactggtctctgaggctgtggttgctacagggtcaccacgagcttggcttacttgtctcatccttcccttgcctggtatcattttctcagttctcccaaaagccatgtcccggcccttgctcatcaccttcaccccagccactgaccccagcgacctctggaaggatgggcagcagcagccacagcccgagaagccagagtccaccctggatggggctgcagcccgagctttctatgaggccctgattggggatgagagcagcgctcctgactcccagagatctcagactgaacctgccagagaaagaaagagaaagaaaagaagaataatgaaggcaccagcagcagaagcagtggcagaaggagcatcaggaagacatggacaagggagatcccttgaggctgaggataagatgactcaccggatactgagggcagcccaggagggggacctgccagaacttaggagactgctggaaccgcatgaggcaggaggagctggggggaatatcaacgcccgggatgccttctggtggaccccactgatgtgtgctgctcgagcgggccagggggcagctgtgagctatctcctgggccgtggggctgcctgggtgggggtctgtgagctgagtggcagggatgcggctcagctcgctgaagaagctggcttccctgaggtagcccgcatggtcagggagag

SEQ ID NO: 135759 - DNA, 1598 bp, Homo sapiens; identical to SEQ ID NO: 135704
  Payload ID: 6539
  Gene Symbol: GPANK1
  Gene Name: G patch domain and ankyrin repeats 1
  Uniprot ID: O95872
  ENST ID: ENST00000429266
  CDS Start-End: 338-1408

SEQ ID NO: 135760 - DNA, 986 bp, Homo sapiens; identical to SEQ ID NO: 135714
  Payload ID: 6539
  Gene Symbol: GPANK1
  Gene Name: G patch domain and ankyrin repeats 1
  ENST ID: ENST00000429097
  CDS Start-End: 391-986

SEQ ID NO: 135761 - DNA, 822 bp, Homo sapiens; identical to SEQ ID NO: 135720
  Payload ID: 6539
  Gene Symbol: GPANK1
  Gene Name: G patch domain and ankyrin repeats 1
  ENST ID: ENST00000458699
  CDS Start-End: 367-822

SEQ ID NO: 135762 - DNA, 1598 bp, Homo sapiens; identical to SEQ ID NO: 135709
  Payload ID: 6539
  Gene Symbol: GPANK1
  Gene Name: G patch domain and ankyrin repeats 1
  Uniprot ID: O95872
  ENST ID: ENST00000453899
  CDS Start-End: 338-1408

SEQ ID NO: 135763 - DNA, 986 bp, Homo sapiens; identical to SEQ ID NO: 135735
  Payload ID: 6539
  Gene Symbol: GPANK1
  Gene Name: G patch domain and ankyrin repeats 1
  ENST ID: ENST00000424956
  CDS Start-End: 391-986

SEQ ID NO: 135764 - DNA, 627 bp, Homo sapiens; identical to SEQ ID NO: 135722
  Payload ID: 6539
  Gene Symbol: GPANK1
  Gene Name: G patch domain and ankyrin repeats 1
  ENST ID: ENST00000452805
  CDS Start-End: 359-627

SEQ ID NO: 135765 - DNA, 822 bp, Homo sapiens; identical to SEQ ID NO: 135743
  Payload ID: 6539
  Gene Symbol: GPANK1
  Gene Name: G patch domain and ankyrin repeats 1
  ENST ID: ENST00000424399
  CDS Start-End: 367-822

SEQ ID NO: 135766 - DNA, 1814 bp, Homo sapiens
  Payload ID: 6539
  Gene Symbol: GPANK1
  Gene Name: G patch domain and ankyrin repeats 1
  ENST ID: ENST00000426206
  CDS Start-End: 554-1624
ggtatggcgttcggggcccgggagtctgggcaatacagttttgtgctcactgggtgaagaggctgacttagggcggggaaaggagggagccaggctggatctctttccgcagctctcctcacgttcccctctagtcccggcgcggcgctgctgcccgggggactggcctatcctcggccaatccgctgggtccttattgcctgttgggcccctagtgcgaatcagtcccgccagagacccttgacgggcatactgtttcctccgggctcctgcctcatgaggggagagaatggcgccattttgcggtacggaagctacacagcaacacgtataggagactctccccgagatcttctagggagtgacccatctatttttgtttgggaagaggaaactccgaaatgggatcgcggaagacttaaagggccaggctgatttttttttcctactgcaggtctctgaggctgtggttgctacagggtcaccacgagcttggcttacttgtctcatccttcccttgcctggtatcattttctcagttctcccaaaagccatgtcccggcccttgctcatcaccttcaccccagccactgaccccagcgacctctggaaggatgggcagcagcagccacagcccgagaagccagagtccaccctggatggggctgcagcccgagctttctatgaggccctgattggggatgagagcagcgctcctgactcccagagatctcagactgaacctgccagagaaagaaagagaaagaaaagaagaataatgaaggcaccagcagcagaagcagtggcagaaggagcatcaggaagacatggacaagggagatcccttgaggctgaggataagatgactcaccggatactgagggcagcccaggagggggacctgccagaacttaggagactgctggaaccgcatgaggcaggaggagctggggggaatatcaacgcccgggatgccttctggtggaccccactgatgtgtgctgctcgagcgggccagggggcagctgtgagctatctcctgggccgtggggctgcctgggtgggggtctgtgagctgagtggcagggatgcggctcagctcgctgaagaagctggcttccctgaggtagcccgcatggtcagggagagccatggagagacaaggagcccggaaaaccggtctcctactccctccctccagtactgcgagaactgtgacacccacttccaagattccaaccaccgcacatccactgctcacctgctgtcactgtcgcagggtcctcagcctcccaaccttccacttggggtgcccatctccagcccgggcttcaaactgctgctgaggcggggctgggagccaggaatggggctgggaccccggggtgagggccgtgccaatcccatccccactgtcctcaagagggaccaggaaggactaggctacagatcagcaccccagccccgagtgacacatttcccagcttgggatacccgagctgtggctgggagggagagaccccctcgggtggccacactgagctggagggaggagagaaggagggaggagaaagacagggcttgggagcgggatctaaggacttacatgaacctcgagttctgactttggtaaagtctgaccctagtctgctgctgaagtctgaacttgggcctctgacctgggccctttgacttccccttcctgggatctgctcagatgcagatcctgaagtttttggtcaataggctctgtcttcgtgagagacgggctgagagtcagaaataaatcaaccatttgtggtttattcactttt

SEQ ID NO: 135767 - DNA, 1814 bp, Homo sapiens; identical to SEQ ID NO: 135707
  Payload ID: 6539
  Gene Symbol: GPANK1
  Gene Name: G patch domain and ankyrin repeats 1
  Uniprot ID: O95872
  ENST ID: ENST00000417890
  CDS Start-End: 554-1624

SEQ ID NO: 135768 - DNA, 802 bp, Homo sapiens; identical to SEQ ID NO: 135745
  Payload ID: 6539
  Gene Symbol: GPANK1
  Gene Name: G patch domain and ankyrin repeats 1
  ENST ID: ENST00000415610
  CDS Start-End: 309-802

SEQ ID NO: 135769 - DNA, 822 bp, Homo sapiens; identical to SEQ ID NO: 135743
  Payload ID: 6539
  Gene Symbol: GPANK1
  Gene Name: G patch domain and ankyrin repeats 1
  ENST ID: ENST00000414010
  CDS Start-End: 367-822

SEQ ID NO: 135770 - DNA, 986 bp, Homo sapiens; identical to SEQ ID NO: 135735
  Payload ID: 6539
  Gene Symbol: GPANK1
  Gene Name: G patch domain and ankyrin repeats 1
  ENST ID: ENST00000425437
  CDS Start-End: 391-986

SEQ ID NO: 135771 - DNA, 1742 bp, Homo sapiens
  Payload ID: 6540
  Gene Symbol: GPKOW
  Gene Name: G patch domain and KOW motifs
  Uniprot ID: Q92917
  ENST ID: ENST00000156109
  CDS Start-End: 80-1510
actttggccggcccctagcgatctgaacccaaactaaatttcccagcaagcagcgcgccggcctgggaaaaggagcaagatggctgactccaaagagggtgttttgccgctgacggctgcttccactgccccaatttcattcggcttcactcgcacgtccgcacggaggcggctggccgactcgggagacggcgcggggccatctccggaggagaaggatttcttgaaaaccgtggaagggagggagctgcagagtgtgaagccccaggaggcccccaaggaactcgtcatccctttgatccagaatggccatcgcaggcagccaccagcccggccccctgggccatccacagatactggggccttggcggatggggtggtgtcccaggctgtgaaggagctcattgcggaatccaagaagtctctggaagagagagagaatgcgggtgtcgaccccacgctcgctatccccatgatccagaaaggatgcacccccagcggggaaggggcagacagcgaaccccgggcagagacagtgccagaggaggctaattatgaggcggtccccgtggaggcctatgggctggccatgctgcggggcatgggctggaaacctggcgagggcatcggccgcaccttcaatcaagtagtgaagccccgtgtcaactcactgaggcccaaggggttagggctgggtgccaacctgaccgaggcccaggccttgacccccactggcccctcccgcatgccaagaccagatgaggagcaagagaaagataaggaagatcagcctcaagggctggtgcctggaggagctgtggtggttctttctggccctcaccgaggcctctatgggaaggtggaaggccttgatcctgacaatgttcgggccatggttcgtctggctgtggggagccgggtggtgactgttagtgagtactacctgcggcctgtctcccagcaggagtttgacaagaacaccttggatctcaggcaacagaacggaactgcctcatcacggaagaccctctggaatcaagaactctacatccagcaggacaactcagagaggaagcggaaacaccttccagaccgacaggatgggcctgcagccaagagtgagaaagcagcccccagaagtcagcactggttgcacagggacctgcgtgtgcggtttgtggacaacatgtacaaaggaggccaatattacaacaccaagatgataattgaagatgtcctaagcccagatacctgtgtatgtcggacagatgaaggccgagtcctggaaggcctgagggaagacatgctggagaccctggttcccaaggcagagggtgaccgtgtgatggtggtgctgggcccacagactggaagggtgggacatttgctgagccgggacagagcacggagccgggctttggtgcaactgccaagagaaaatcaggtggtggagcttcactacgatgccatctgccagtacatgggccctagtgacacagatgatgactgacccatgggactcctcccatcccccaggctggtaccagttctgtaccatatgagaaagttgccttcagaaggtgggaagatcattgttccatcctctacttctggtgcagtcctgggacaaggacaagggaaagggatgggtgaaccagtagggaagctagaaacaaacccaatatttaccaaaatttagggtataataaaaaccatttcaagtacttaatagaaagatgaaa

SEQ ID NO: 135772 - DNA, 3492 bp, Homo sapiens
  Payload ID: 6541
  Gene Symbol: GPATCH1
  Gene Name: G patch domain containing 1
  Uniprot ID: Q9BRR8
  ENST ID: ENST00000170564
  CDS Start-End: 315-3110
caggcatcggtgtcgcctcgcagggaacagttgggtggcttccagcttatgccaggagtctcctcctcacccgcacatcgcggggctaggatgggatgtcgtggctgccaaatcctccgaggcaactcctgcctgggacggcctaccacaggatgggcctgagaatccggagcgcaggctcgggccgctaggacaccttcccccgcccgcggacccagccttccagcatcaccggggttcgcggaggagaaagaggaaaggcgtttggcctgccaaggccgccgtagcgagggggcggggcccggaagagcaggatggcggcgcgggacagtgacagcgaagaagatctggtcagctatgggaccgggctggagcctctggaagaaggtgaaagaccaaagaaaccaatccctcttcaggatcagactgtcagagatgaaaaaggaaggtataaacgattccacggggcctttagtggaggtttctctgctggatacttcaatactgttggctcaaaagaaggatggacaccctctacctttgtgtcttcacgacagaacagagcagacaaatctgttcttggtcctgaagattttatggatgaagaggatcttagtgaatttgggatagcacctaaagcgattgtcaccacagacgattttgcctccaaaaccaaagacagaatacgagaaaaggctaggcagttggccgctgctactgcccctattcctggagccaccctccttgatgacctcataacgccagcaaaattatctgttggtttcgaattgctaagaaaaatgggttggaaagaaggacaaggagttggtcctcgagtaaagagacggccacgccgacagaaacctgatcctggagtcaaaatctatggctgtgcattaccccctggaagctcggaaggatctgagggtgaagatgatgactacttgcctgataatgtgacctttgcacccaaagatgtcacacctgtggatttcacacctaaagataatgtgcatggtctagcttacaagggcctggatccccaccaggcactgtttggaacttcgggagaacattttaatcttttcagtggtggttctgagagagctggcgatcttggagaaattggactgaataaaggaagaaaattgggaatttcaggccaggcttttggtgtaggtgccctggaagaggaagatgatgatatctatgccacagaaactctatccaagtatgacactgttctgaaggacgaggagcctggagacggactctatggctggacagcacccaggcagtataaaaaccagaaagaatcagagaaagaccttcggtacgttggcaaaattttggatggattttccttggcttctaaacctttatcttctaagaaaatctatccacctccagagctgccaagagactatcgaccagtgcattatttcagacccatggtggccgccacctccgagaactcacacttactgcaggtattatcagagtcagctggaaaggcaacgcctgacccagggacacacagtaagcaccaactgaatgcctccaaacgggctgagttgcttggagagacgcctattcaaggttcagctacttcagtgttagaatttctgtcccaaaaagacaaagagagaatcaaagaaatgaagcaggcaactgacctgaaagcagctcagctcaaggccaggagtctggcccagaacgctcagagcagcagagcccagctctcccctgcagcggctgctgggcactgctcttggaacatggcattaggtggtgggacggccaccttaaaagccagcaacttcaagcctttcgccaaagatccggaaaagcaaaagcgatacgacgagttcttagtacacatgaaacagggtcagaaagatgctctggaacgctgtctggaccccagcatgacagagtgggagcgaggccgtgagcgggatgagtttgcccgggcggccctgctgtacgcatcttcccattcgaccttgtcctccaggttcactcacgccaaggaggaggatgactcagatcaggttgaagtccctcgagaccaagagaatgatgtcggggataagcagtcggctgtgaagatgaagatgtttgggaagctcacccgagacacgtttgagtggcaccctgacaagcttctatgtaagagatttaatgtccctgacccttatccagattcaactttagttggcttaccaagagtgaagcgtgacaagtactcagtcttcaactttctgacgctcccagagacagcttccttgcccaccactcaagcatcaagtgaaaaagtatcacagcaccgaggtcccgacaaatcaagaaaaccatccagatgggatacctctaaacacgaaaagaaagaagattccattagtgaatttttaagtttggctagatcaaaagccgagccacctaaacaacagtccagccccttagtaaacaaagaggaagagcatgcaccagaattatccgcaaatcagaccgtcaacaaagatgtggacgcacaggctgaaggagaagggagccgcccatccatggacttattcagggccatctttgccagttcctcagatgaaaagtcctcatcctccgaggatgagcaaggtgacagtgaagatgatcaggcaggctctggggaggccaacttccaaagctcccaagacactgacttgggggaaacatcatctgtggctcacgctcttgtgccagcaccccaggagccgccaccttccttcccgatacaaaagatgcagatagatgaaagagaagagttcggcccgcggctgcctcccgtcttctgccccaatgctcgtcagacacttgaggttcctcaaaaagagaaacataaaaagaacaaagacaagcacaaggccaagaaagagcacaggcggaagaaagagaagaaaaagaaacacaggaagcacaaacacaaaggcaagcaaaagaataaaaaaccagagaaaagtagtagctccgagagttccgacagcagcgacagccagagtgacgaggaaaccgcagacgtgtcgccccaggagctgctgagacggctgaaaagtcttccactaagaaggcagtaattgaatgctgccctggctcgtcctagaatcatttctcctccatgatggaagcccagtgattgttcagttaacgcattgtacagagtgtatttatatgtaaattcctgctgtaaaataatttttaaaaccttgacatttcaaagactgccttgaaaggtcgcagaaattgatttctatttttaatttcagttagtatcgggggaaaaaaatccagactgaacagtttaattaaagtggaatttttctattttcttcttgatttttaaaaaatttcctgggacgttaaaaaagaagttaaaagtgaaggcttctctctggttttgtgatgaagacagcctggactcactgaaggacaagcgtgtgagaaggggcggttgcggcc

SEQ ID NO: 135773 - DNA, 1584 bp, Homo sapiens
  Payload ID: 6541
  Gene Symbol: GPATCH1
  Gene Name: G patch domain containing 1
  ENST ID: ENST00000592165
  CDS Start-End: 296-682
gcagggaacagttgggtggcttccagcttatgccaggagtctcctcctcacccgcacatcgcggggctaggatgggatgtcgtggctgccaaatcctccgaggcaactcctgcctgggacggcctaccacaggatgggcctgagaatccggagcgcaggctcgggccgctaggacaccttcccccgcccgcggacccagccttccagcatcaccggggttcgcggaggagaaagaggaaaggcgtttggcctgccaaggccgccgtagcgagggggcggggcccggaagagcaggatggcggcgcgggacagtgacagcgaagaagatctggtcagctatgggaccgggctggagcctctggaagaaggtgaaagaccaaagaaaccaatccctcttcaggatcagactgtcagagatgaaaaaggaaggtataaacgattccacggggcctttagtggaggtttctctgctggatacttcaatactgttggctcaaaagaaggatggacaccctctacctttgtgtcttcacgacagaacagagcagacaaatctgttcttggtcctgaagattttatggatgaagagatcctggagtcaaaatctatggctgtgcattaccccctggaagctcggaaggatctgagggtgaagatgatgactacttgcctgataatgtgacctttgcacccaaagatgtcacacctgtggatttcacacctaaagataatgtgcatggtctagcttacaagggcctggatccccaccaggcactgtttggaacttcgggagaacattttaatcttttcagtggtggttctgagagagctggcgatcttggagaaattggactgaataaaggaagaaaattgggaatttcaggccaggcttttggtgtaggtgccctggaagaggaagatgatgatatctatgccacagaaactctatccaagtatgacactgttctgaaggacgaggagcctggagacggactctatggctggacagcacccaggcagtataaaaaccagaaagaattcttcagaatgaactcataaacatgaaatttctgggttttgagataatacaagttccaagaatgtgaaattgaatcccacattacctgaagaaattttaaatcagagaaagaccttcggtacgttggcaaaattttggatggattttccttggcttctaaacctttatcttctaagaaaatctatccacctccagagctgccaagagactatcgaccagtgcattatttcagacccatggtggccgccacctccgagaactcacacttactgcaggtattatcagagtcagctggaaaggcaacgcctgacccagggacacacagtaagcaccaactgaatgcctccaaacgggctgagttgcttggagagacgcctattcaaggttcagctacttcagtgttagaatttctgtcccaaaaagacaaagagagaatcaaagaaatgaagcaggcaactgacctgaaagcagctcagctcaaggccaggagtctggcccagaacgctcagagcagcagagcccagctctcccctgcagcggctgct

SEQ ID NO: 135774 - DNA, 3570 bp, Homo sapiens
  Payload ID: 6542
  Gene Symbol: GPATCH11
  Gene Name: G patch domain containing 11
  Uniprot ID: Q8N954
  ENST ID: ENST00000281932
  CDS Start-End: 119-589
atgcgcagcgcgcgctctacggcgctgaaccggggcgagcagagagctgtcagatactatagccatatgaagttgaacatggcagaagaagaggactatatgtctgattccttcattaatgtccaggaaaagtggcattggtcatgaggcatcattaaaacggaaagcagaggaaaaattggaaagctacagaaaaaagattcacatgaaaaaccaagctgaagaaaaagctgcagaacagtttcgaatgcgacttaaaaataagcaagatgaaatgaagctagaaggagatctcagaagaagccagcgagcctgtcaacaactggatgtccagaaaaatattcaggttcccagggaagcatggtactggttgaggcttgaagaggagactgaagaagatgaagaagaaaaagaacaggatgaagatgaatataagagtgaagatttaagcgtactggaaaaattacaaatattgactagttatttaagagaagaacatctatattgtatttggtgtggaacagcctatgaagataaagaagacctatcttcaaattgtccaggaccaacttctgcagatcatgactaagattattcccaataaagtggaaacttgaaaaatgttattacttcctagggatagacaatttagcagttggaaatctcaaattttttatgccagtaaagaaagggggactttatataatgttttgttctttttgtactttagaatatgaatgttcattgacttgaaaaaaataatgcaatggcatttcagaacacaagtatcacagagatggacagttacaatttattgctatattgtgatacgtgaggggtttaaggacaccaacaggtaacttcttattcccctcttcactttggaacaaattgagaaataagaaatgggagtcagaggaagagaaaaatatccactttatcagtgaataaactgatacagagaagaaggttgactttttctccagtcagagactgtaatatttctccctgattggagagaacagcgggtctctgccttgttggggcagagcccatctttgcattctgagaccagttagctttcaaggtcagggaaaccaccaggggctggaccacacatgctcagttccttcttgtatcacccatgggataagacagttctctcttgggaaggaatgaatgagggttcagagagctttttcctacacttcttgctttgaaggagcaaggagaagttcccttccctccatccaagcatgaagaggaggggaaaagtattcccctcaataaggctgatgtcagaggcaatgttcgaccagtactactaaattctaatccatttaactgtgataatttctggtaaaatcatgagttttcatgacaatgtctatatccattatatgtgatctgttggaagttttggctagagaaacttaattgtgaggaaatttaaatattgtgtgatgcaagtacttactgaatttggaaaccccttgatagcattcccagcaagtgatagttcaacctttgcttttattcttccagccacagagaactcactgctttaaaaccattccattactgggtagctctgaattgttttcattgttttctcttaaactgaaatctgcttccctgtaatattaatgaatacagctaaggacataccgtgtggcatactatgagagagctccatccagggtgaggcatcaaaatcatgaacctttttaaaagttcatatgctcaggtgtctctcctagtgattgattttgatttgtcttggctaaggtggttcctggatatctatatatttattttgaagtcccaagaatgagtgataagcacctgaggataagaactagtactgaggttaaggatggagcaccaccattctttggatagagttgtgatcacctgtgtgattttatagctcacctgttagttagattgagcaagagaacaaccccttttattagaaacagcatacataagaagattgtaaaaattaacctacacttgctagggtaagataatcagtagtacaatttgtattaatctctgacctaatatgacctaattcacttttcaagtttaacttggggagctttacaaaatagtaataaaagggtcccatcccaagagattctgatgccattagtcactgtgacttgggcatcactgcccttgattctaaaatgcagcctaccttgagccactaatctagttaacttctgggcctcagttcttcatccagaaaactaatcattatttttatgaatgtaaatatgtgtatatatataatatttatatgtttggatgctattgtttaatatttacttttttgtttttaaaaaaattataaaattggctgagcgcagtggttcactcctgtaatcccagcactttaggacgccaaggcaggcagatcacttgaagccaggagttcaagaccaacctggccaacatggtgaaaccccatctctactaaaaatacaaaaattagctgggcgtggtggcattcgcctgtaatcccagctactcagaaggcggaggcatgagaattgcttgaacctgggaggcagatattgcagtgagctgagatcatgctgctgcactccagcctgggtgacagagcaagaccctgtctcaaaaaaaaaaattatatatatatatgtatgtatatatatatatatatagagagagagagagagagagagctattaataaaacagaggagtacattttacccttgcaattccagtcaatactgtggtgtcatttcagccaacataccaacattcagtcaaatcccaaagccaaatggataatttcagatggaatggagttagacaggaactggcttccctttctcctgttactatgaggacaacccacacctgctcagtggcctaaaatattttaaatatgttcatgacaattatgctgagaatgccaggataacactgatggaacccatgacttcaccaggattgtggtctacatttacaggcctagtactagaactagaccggcttagagagtgggagatatccctctgttgtccatcgaaagataaaaatacaggctttcagccgggtgcagtggtgcatgcctttggtcccagctactcagggggctgagatggggaatcctttgagcccagaagtttgaaaccagcctgggcaacatagtgagagacctccatcttaagggaataaaaaaaaaatcagactttcaatatgagtaacaagttatttttaggccttttatgactttataaataggcaataatgaacaccaagggaagcaaaacactgaaaagaattttaaaatttgttgtagaacattaatacgaaatttgaaactgcaaaacaatgtaaaatttaatgtcatgttgtcatttacttttgtgtatattgtgccatgtttattttcaaagtcctatctagaaattctaaaatgtctaattttcttaattaaaaatccagaattctgtagtttctgaaattcaaaataaatactttaacataccaaattggtttttctaataaacatttatttcaagtgtta

SEQ ID NO: 135775 - DNA, 3906 bp, Homo sapiens
  Payload ID: 6542
  Gene Symbol: GPATCH11
  Gene Name: G patch domain containing 11
  ENST ID: ENST00000409774
  CDS Start-End: 68-925
aatagagtctgcactaggaaactggtgggagccgaggtccggaagtccgacgctggtcggtgggcgcatgcgcagcgcgcgctctacggcgctgaaccggggcgagcagagagctgtcagatactatagccatatgaagttgaacatggcagaagaagaggactatatgtctgattccttcattaatgtccaagaagatatcagaccaggattgccaatgctaaggcaaatccgagaagcccgtcgaaaagaagaaaagcaacaggaagccaatttgaaaaacaggcagaagagtttaaaagaagaagaacaagaaagacgtgacattgggttgaagaatgcactaggctgtgaaaacaaagggtttgccttgctccaaaagatgggctataaaagtggtcaggcacttggcaagagtgggggtggtattgttgaaccaattcctctcaatatcaaaacagggaaaagtggcattggtcatgaggcatcattaaaacggaaagcagaggaaaaattggaaagctacagaaaaaagattcacatgaaaaaccaagctgaagaaaaagctgcagaacagtttcgaatgcgacttaaaaataagcaagatgaaatgaagctagaaggagatctcagaagaagccagcgagcctgtcaacaactggatgtccagaaaaatattcaggttcccagggaagcatggtactggttgaggcttgaagaggagactgaagaagatgaagaagaaaaagaacaggatgaagatgaatataagagtgaagatttaagcgtactggaaaaattacaaatattgactagttatttaagagaagaacatctatattgtatttggtgtggaacagcctatgaagataaagaagacctatcttcaaattgtccaggaccaacttctgcagatcatgactaagattattcccaataaagtggaaacttgaaaaatgttattacttcctagggatagacaatttagcagttggaaatctcaaattttttatgccagtaaagaaagggggactttatataatgttttgttctttttgtactttagaatatgaatgttcattgacttgaaaaaaataatgcaatggcatttcagaacacaagtatcacagagatggacagttacaatttattgctatattgtgatacgtgaggggtttaaggacaccaacaggtaacttcttattcccctcttcactttggaacaaattgagaaataagaaatgggagtcagaggaagagaaaaatatccactttatcagtgaataaactgatacagagaagaaggttgactttttctccagtcagagactgtaatatttctccctgattggagagaacagcgggtctctgccttgttggggcagagcccatctttgcattctgagaccagttagctttcaaggtcagggaaaccaccaggggctggaccacacatgctcagttccttcttgtatcacccatgggataagacagttctctcttgggaaggaatgaatgagggttcagagagctttttcctacacttcttgctttgaaggagcaaggagaagttcccttccctccatccaagcatgaagaggaggggaaaagtattcccctcaataaggctgatgtcagaggcaatgttcgaccagtactactaaattctaatccatttaactgtgataatttctggtaaaatcatgagttttcatgacaatgtctatatccattatatgtgatctgttggaagttttggctagagaaacttaattgtgaggaaatttaaatattgtgtgatgcaagtacttactgaatttggaaaccccttgatagcattcccagcaagtgatagttcaacctttgcttttattcttccagccacagagaactcactgctttaaaaccattccattactgggtagctctgaattgttttcattgttttctcttaaactgaaatctgcttccctgtaatattaatgaatacagctaaggacataccgtgtggcatactatgagagagctccatccagggtgaggcatcaaaatcatgaacctttttaaaagttcatatgctcaggtgtctctcctagtgattgattttgatttgtcttggctaaggtggttcctggatatctatatatttattttgaagtcccaagaatgagtgataagcacctgaggataagaactagtactgaggttaaggatggagcaccaccattctttggatagagttgtgatcacctgtgtgattttatagctcacctgttagttagattgagcaagagaacaaccccttttattagaaacagcatacataagaagattgtaaaaattaacctacacttgctagggtaagataatcagtagtacaatttgtattaatctctgacctaatatgacctaattcacttttcaagtttaacttggggagctttacaaaatagtaataaaagggtcccatcccaagagattctgatgccattagtcactgtgacttgggcatcactgcccttgattctaaaatgcagcctaccttgagccactaatctagttaacttctgggcctcagttcttcatccagaaaactaatcattatttttatgaatgtaaatatgtgtatatatataatatttatatgtttggatgctattgtttaatatttacttttttgtttttaaaaaaattataaaattggctgagcgcagtggttcactcctgtaatcccagcactttaggacgccaaggcaggcagatcacttgaagccaggagttcaagaccaacctggccaacatggtgaaaccccatctctactaaaaatacaaaaattagctgggcgtggtggcattcgcctgtaatcccagctactcagaaggcggaggcatgagaattgcttgaacctgggaggcagatattgcagtgagctgagatcatgctgctgcactccagcctgggtgacagagcaagaccctgtctcaaaaaaaaaaattatatatatatatgtatgtatatatatatatatatagagagagagagagagagagagctattaataaaacagaggagtacattttacccttgcaattccagtcaatactgtggtgtcatttcagccaacataccaacattcagtcaaatcccaaagccaaatggataatttcagatggaatggagttagacaggaactggcttccctttctcctgttactatgaggacaacccacacctgctcagtggcctaaaatattttaaatatgttcatgacaattatgctgagaatgccaggataacactgatggaacccatgacttcaccaggattgtggtctacatttacaggcctagtactagaactagaccggcttagagagtgggagatatccctctgttgtccatcgaaagataaaaatacaggctttcagccgggtgcagtggtgcatgcctttggtcccagctactcagggggctgagatggggaatcctttgagcccagaagtttgaaaccagcctgggcaacatagtgagagacctccatcttaagggaataaaaaaaaaatcagactttcaatatgagtaacaagttatttttaggccttttatgactttataaataggcaataatgaacaccaagggaagcaaaacactgaaaagaattttaaaatttgttgtagaacattaatacgaaatttgaaactgcaaaacaatgtaaaatttaatgtcatgttgtcatttacttttgtgtatattgtgccatgtttattttcaaagtcctatctagaaattctaaaatgtctaattttcttaattaaaaatccagaattctgtagtttctgaaattcaaaataaatactttaacataccaaattggtttttctaataaacatttatttcaagtgtta

SEQ ID NO: 135776 - DNA, 3218 bp, Homo sapiens
  Payload ID: 6543
  Gene Symbol: GPATCH2
  Gene Name: G patch domain containing 2
  Uniprot ID: Q9NW75
  ENST ID: ENST00000366934
  CDS Start-End: 112-1242
ccggaagctcatctcaaaatgctgaactgctctttggaagtcgccggtgctgttgtagttggagtctgttcacgggcctgagcttcgaggccaggctcccgggtgtcgttaatgttcggggccgccgggcgccaaccgatcggagctccagcagccgggaacagctggcatttcagtagaaccatggaggagctggttcatgaccttgtctcagcattggaagagagctcagagcaagctcgaggtggatttgctgaaacaggagaccattctcgaagtatatcttgccctctgaaacgccaggcaaggaaaaggagagggagaaaacggaggtcgtataatgtgcatcacccgtgggagactggtcactgcttaagtgaaggctctgattctagtttagaagaaccaagcaaggactatagagagaatcacaataataataaaaaagatcacagtgactctgatgaccaaatgttagtagcaaagcgcaggccgtcatcaaacttaaataataatgttcgagggaaaagacctctatggcatgagtctgattttgctgtggacaatgttgggaatagaactctgcgcaggaggagaaaggtaaaacgcatggcagtagatctcccacaggacatctctaacaaacggacaatgacccagccacctgagggttgtagagatcaggacatggacagtgatagagcctaccagtatcaagaatttaccaagaacaaagtcaaaaaaagaaagttgaaaataatcagacaaggaccaaaaatccaagatgaaggagtagttttagaaagtgaggaaacgaaccagaccaataaggacaaaatggaatgtgaagagcaaaaagtctcagatgagctcatgagtgaaagtgattccagcagtctcagcagcactgatgctggattgtttaccaatgatgagggaagacaaggtgatgatgaacagagtgactggttctacgaaaaggaatcaggtggagcatgtggtatcactggagttgtgccctggtgggaaaaggaagatcctactgagctagacaaaaatgtaccagatcctgtctttgaaagtatcttaactggttcttttccccttatgtcacacccaagcagaagaggtttccaagctagactcagtcgccttcatggaatgtcttcaaagaatattaaaaaatctggagggactccaacttcaatggctacaaactggaccagtgagattcccctataaaccaaatcttctaatgctaataaattagttacgttttgaacatctggggaatgacattcgagggaacctggctcctgtcctcttccctggaggaatatcattgaagtgagagcctctttgatgaaaagatggggctgtttttgctggaggactggtattcttccttttagtcagaagtgaacctgactggggaggctttctagggatttaggttggcccagggtggatagaaactactgtaaattatatatttttctcttttatggttttttttttacattgaatccatttatgtatacttgctttgccaaaatgctaacaaagctagaaaattttaaacttccagatcgacaagtattccttaatgtttatattgtgactgattaagaattaatttttacatatctgactgttgtaaataaaaatcatgatgcattgacatttatggttcatttttagagaagtcttatataaccagcattatttaaaatatttgcattttactcagggtattttaacaagggctaagatgagtagtaggtaaggttgataatctttgctggagtttgtattttgttcagcttcctttctacttgggtaatctgcttgtattgcaaactcattgtattttatagtatagctttcattgtactgcaaaaatcatcctcgttttaaattagccacagtgataactagtctgcactagtagaatcatttaccttttaaattatctgctttgtctgatacctgaaacacatcaaaattattattttggtttagagcttaatgaaacatgtgaaagctggtatttttaacaaatgctgtgtgattctgaatcatattgtcatgtttaaaagtgagagctgcttgtacatctttagaatggcagaccatatgtgtcactgtgagtgtcagaaatacttgcatgagctcattttcaccaactggggggaaaatgtaatgtttctattgatggtataatttagacactataataagttcagccatttgagttcttcaaaatggttatattaaaatgatatttttattaagcttcaataatgaaaaacaatgtgatttaatatgtgtatttttatattattgtatggattaattgttaattcagcatttaatggctaacttaaatatgattggaaaagaaacttcaagttgccattgcttttacctaaagtttttaaagtctgaaagatttcagcaaatgcattaaacaggaatgtgtgacatcttcttttagattgcttgtctaatttggagagattaaaaatggtaaaatgcaactttgagtctctttacctttgcatatttaaaggtacaatagtgtggtgttggtaattgtaagtaagcttttctgtgctatgtctttggagtgaaaattcatgttttttttctgaattacataaatgcttttgttttattttgtataatgactgtcttttagatctgaataagtcactttaaaaccttggcctatgaactttgccttatcaatcatgaatctagatgaatgctatctagttcttggttcagttttacctatttttatttttggttcactgcttgcttgagcatagctgggatttgtagcccattttctaggcttattgcaatctcactgtggtattttatagaagctattacaactgataggctagcttcatggtattgatgatacatggcttaaccatactaaaagctgctttccctctctaaattgtaaaaaggtgatgaagtttcacttgatggagacatactatatatgtgtgtttatcatggaactagtgcattaggccataagctgtttttctggtctatgttttttgtatttaaaactttactgaagacaatggactccttcgggttttctttctttcaaccctgaattgtccttgtttgaatttttaagtactgtaatttttttttttcaataaaatctctgacttgggcaagaaaggtaa

SEQ ID NO: 135777 - DNA, 5851 bp, Homo sapiens
  Payload ID: 6543
  Gene Symbol: GPATCH2
  Gene Name: G patch domain containing 2
  Uniprot ID: Q9NW75
  ENST ID: ENST00000366935
  CDS Start-End: 112-1698
ccggaagctcatctcaaaatgctgaactgctctttggaagtcgccggtgctgttgtagttggagtctgttcacgggcctgagcttcgaggccaggctcccgggtgtcgttaatgttcggggccgccgggcgccaaccgatcggagctccagcagccgggaacagctggcatttcagtagaaccatggaggagctggttcatgaccttgtctcagcattggaagagagctcagagcaagctcgaggtggatttgctgaaacaggagaccattctcgaagtatatcttgccctctgaaacgccaggcaaggaaaaggagagggagaaaacggaggtcgtataatgtgcatcacccgtgggagactggtcactgcttaagtgaaggctctgattctagtttagaagaaccaagcaaggactatagagagaatcacaataataataaaaaagatcacagtgactctgatgaccaaatgttagtagcaaagcgcaggccgtcatcaaacttaaataataatgttcgagggaaaagacctctatggcatgagtctgattttgctgtggacaatgttgggaatagaactctgcgcaggaggagaaaggtaaaacgcatggcagtagatctcccacaggacatctctaacaaacggacaatgacccagccacctgagggttgtagagatcaggacatggacagtgatagagcctaccagtatcaagaatttaccaagaacaaagtcaaaaaaagaaagttgaaaataatcagacaaggaccaaaaatccaagatgaaggagtagttttagaaagtgaggaaacgaaccagaccaataaggacaaaatggaatgtgaagagcaaaaagtctcagatgagctcatgagtgaaagtgattccagcagtctcagcagcactgatgctggattgtttaccaatgatgagggaagacaaggtgatgatgaacagagtgactggttctacgaaaaggaatcaggtggagcatgtggtatcactggagttgtgccctggtgggaaaaggaagatcctactgagctagacaaaaatgtaccagatcctgtctttgaaagtatcttaactggttcttttccccttatgtcacacccaagcagaagaggtttccaagctagactcagtcgccttcatggaatgtcttcaaagaatattaaaaaatctggagggactccaacttcaatggtacccattcctggcccagtgggtaacaagagaatggttcatttttccccggattctcatcaccatgaccattggtttagccctggggctaggacagagcatgaccagcatcagcttctgagagataatcgagctgaaagaggacacaagaaaaattgttctgtgagaacagccagcaggcaaacaagcatgcatttaggatccttatgcacgggagatatcaaacggagaagaaaagctgcacctttgcctggacctactactgcaggatttgtaggtgaaaatgcccagccaatcctagaaaataatattggaaaccgaatgcttcagaatatgggctggacgcctgggtcaggccttggacgagatggcaaggggatctctgagccaattcaagccatgcagaggccaaagggattaggacttggatttcctctaccaaaaagtacttccgcaactactacccccaatgcaggaaaatccgcctaagaaaagcaaagaagaaatgttttacagactttattcactatgtcccattgttctaaaatgataacatgacttctgtttttgaagcaaaaatctacattgcctcaaacacatcactctagcttccttactgcatacagtcctgccatagtgagagaaatgggatttcatcacaattcatggtgctaaaatgaaaacctctgcactttaatttttttcagtaatttccagctatttctaggtataaagagcagctcgtttctcttatttattttagtctcatgtgtcaatactttccgatgctttgcttaattcatgtatgtgtgcagtgctgcaatgcccagacaaacgtgagcacacccaccagtttctaaaatggaatagacaggaaaagattgtgttttatatcatccctatctattgtaacccaaaagacctaccatcgcatcagtgaagtccgaacacatctttgtttgaaaggcttgtcaatttcatattccttgaattggcttcttggtgaggattttctgacagagtgatacccatcaattttctatccttagacaatgtagtgtgaagttcacagttgacaaacaacaattaatgtttcccttggatgttttgacaaaaataaacctcatcgttgttatcaccagagtgccctctaccttactttaatgcagattttataaattttacctcatttagaacataaaataattattgaaagaaaaatgtattttttaaattcaccgtgattgaactgtaaattctattaatccagatgtacttctacctctgttttcccaaagattgatattatttttaagatcaactcaagtgtagtaaacggatttaaaattttaatcattggagtaatttattacaatattgaatcaatttacatgaaaagttaaatggctctcccagaactcagatttctggcaatgacccaacccatttagaaggtgaacaaaagaagtaaatggtactgatttgccctttctaggacccaagatgttactttaaaacctagcaaaagaggtcgtttgtattacgtgcctagtattgagctgtttctgagtcatttgcttcatagtatcagaaattctaaattgcttttagtttagaagatctttatttattatcttcattattaacaacttattatgatgatgattattatcattctatttataatggcctttgctggttgagtaaagactgagataacacatgtgaatcacctttctaatgggtttttaaaatcttgtcactttccaaaagagtttttttgtttctttttttttttttttttttttgacagagtctgcctctgtcgcccaggctggagtgcagtggcgcactctcggctcactgcagcctccccctcctgggttcaagtgattgttctgcctcagcctcccaaatagcagggattacaggcacccacgaccatacccggataatttttgtatttttagtatagacggagtttcaccatgttggccaggctggtctcgaactcctgacctcaagtgatccgcccaccttggcctcccaaagagctgggattacaggcatgaaccacagcgcccagcccccagaagagtttttaaaaggtgttaaaggaggtttatgcacgtaacagacctttctcaggtggtcccctaaaaaaaatcctgccaactagggaggggaagtccaacctgctatttgaaagccttcacggtttgccaaatgtacatttcttgagaattatcttctttcccagggatattgtacctagaggacaggttggttagggaactatggacgaccagaagagatgttcttttgaagcattcttactggataaagtaaccccatggtatcattactttctacaagttttttacttacaaatttgccatttttttaactgatattttctaaatgctcattctgtctatgtagccggggggagattatatacaagttttaaaacttctttgtgatagtgtattgtgctctggggtctattcaaaatttggtgtttgaggttttgttaatttgattgcctggagatctgctaaaatcctagaatctcaaaaagccaagtttgaagccactgagagcaaacaatgaggtcattgttagcctggttccacactcctgaggacttggctgttctttttcaccttattatgttctaatggaagtaaaaaccctcatagtgaagaagagcagtatatacaccagactagtgtataggaacttcttcattaaatattgcagtccttatgagtgctctttattgttgctgttctggacaggtacaaatcttctgaagcaacttctgtgggatgttaacttagcttctctaacacctaaaaaaattcttctttgtattttcagctaatagaagacagttcttcttcatcttgacacctagagccctctatgtgattcacagaggacttaaaatacttcttactctgttgaagtgtttaattgtacagaatatatgtactctacagtatatgtgaatcagcactcaaagcagagaagtgataacatcccaagcttcccccatacttctactgacatgccctcagtctttaagaaaactcagtacagacctgatgttctggttgtacctgaacttaattggagaaacaaacgcaattaaaatacgaattttttagtgcaaatcaaatgtctttcaccatctgaagcccactaatttgtcttttatatatagttaattttttgccagttacaacgtccatagaaccccaagatttagaatgtatcatttatatttcctctaaaaggtagtaagatatttcttctgctgttttgtgaagccactcttctacagtatctgtagccttatagcaaattaattggttgtactaaaaattttagagactgcataggtctcccttttctatcctaattacctgcaatagcctagagacgctgagcatgattacattagcaacttgactgtttaaaaaatttgttatacttgataatgaccagactgtgtgctggagtcatttgtttccttcttttctgctccccgaatacactatttaatttggttacttttatttttaaactatatggcacccttttaaataaacattcattgctaattaaaatctgccaataaattggtctcagcatttaaataccatatattttataactcatactgtggctatcaaacagaagttaacacagtaggggtaaagatatacataatgtgtacctataggtgtatttataatgcctgtgtgcagtatacagacataattacaaaatactgcattttattaatgtttattttaatattgagaattggcattcttgtaaattgaactgacaattgcttctattcagtacactttattttgagcagatatttccgaaaagagaaaaaatcactgttgacatgctttttaaaactgttttcacctgtattttgtctttcaaaaagaaaagtgatctaagttggcattgtaaagaaattgttagcaaagaatatttttttttattttttcttttggtagaaagtcatgttaatagtacaacaaagaatcaaagaataaaacataatgtttaagaacattatttataagtagtcattgtctttgtgctttaaatgtttcccttttaccttagagttattttttaaaagttgaaagtactttaaaaattggtttaaatgagtacccattgacaattatcatttaatagtgcagttaagttcagcgaaaaatttcaatatctcaaaaaaattagagaaaaatattggtaaatgtatttgattcacaaatgtattcatagccgattgtgagctgctctaccacattttcctgtttttattgtttctgtgaagcttgattagactaacttgcttaaggtctctttcccctcaaggattctgtgattctaatgtaacaaggtacacacgctctctctgaccacttaaagtatcagagttcaaatctgttacaatcactccatttccttttggaaagttgtgcctctcataaagctgcttggacattttaagtgttttgtaatatgcattgaagtgttgagttttgtttgctgtaagaggcatttcactatgttgattaaacttatcttttctcccaaaaaa

SEQ ID NO: 135778 - DNA, 14007 bp, Homo sapiens
  Payload ID: 6544
  Gene Symbol: GPATCH2L
  Gene Name: G patch domain containing 2-like
  Uniprot ID: Q9NWQ4
  ENST ID: ENST00000261530
  CDS Start-End: 67-1515
cggcggtgagagtcggcccaaaaagcggcggccgttggaggtggctgcggcagctgatgtggcctcatggatgagctggtacacgacttagcctcagccttggagcagacatctgagcagaataagcttggtgaactgtgggaggagatggcgctgagcccccgacagcagaggcggcagcttcggaaacgccgaggtcggaagcgtcgttctgacttcactcacctggcagagcatacctgctgctacagcgaggcctctgagtcaagtctggatgaggccactaaggactgtcgagaagtggctccggtgaccaattttagtgactctgatgacacaatggtagccaaacgacacccagctctcaatgccattgtcaagagtaagcaacattcttggcatgaatctgactcctttactgaaaatgcaccttgtcgaccactcaggcgcaggcggaaggtgaagcgagtgacatcagaggtggctgctagccttcagcagaagctgaaggtgtcagattggagctatgagagaggctgcaggttcaagtctgctaagaagcagcgtctgtcccgctggaaggagaatactccctggacctcatcaggccacggattgtgtgaatcagcagaaaataggactttcctaagcaaaacaggaaggaaagaaaggatggagtgtgaaacagatgaacaaaaacagggctctgatgagaacatgtcagaatgtgaaaccagcagtgtgtgtagcagcagtgacactgggctctttaccaatgatgaagggcgacaaggtgatgacgaacagagtgattggttctatgaaggagaatgtgtcccaggattcactgtccctaatcttctgcccaagtgggctcctgatcattgttctgaagtagaaagaatggattctggattggataaattttcagattccacattccttttaccttctcggccagctcaaagagggtaccatactcgcttgaatcgtctacctggagctgcagctcgatgcctcagaaaggggcgaagaaggctggttgggaaggagaccagcataaacactttggggactgagaggataagccatatcattagtgaccctcggcagaaagaaaagaataaagcgttggcttctgattttcctcacatttctgcttgtgcacatgagttcaatcccctgtctcccctttactccctggatgttcttgccgatgcttctcaccgaaggtgttcaccagcacactgctctgccagacaggcaaatgtacactggggaccaccatgttcacgtgacatcaagaggaagcggaaaccagtggccacagcatctttgtctagccccagtgcagttcacatggatgcagtggagccaaccacaccagcatcacaagcccccaaatcacccagctctgagtggttggtgaggacctctgcagcagagaaagccacagacgcaactactgctacattttttaaaatgccacaagaaaagagccctggatacagctagagagcaggacttcaccctccaggagctgactgggtgttgctgaagcaaatgttggactttgtgttagatagtcttgcatatcttaatcgacattcccagtcctttcaccaccagaaccaactcctctttcaaacacagcagtggattctttctctcagaagatcatgttgtgggaatcttttttttaaatagtgaaatattgaggcagcaattttttacaaaaaggtcatcctctgctctatttgttaccttgttattgctgtctcaacatttactacagctccatttacagaactgttgcttttttgcagttgtctttgttcttgaaaaaccagtaactgcttctgcataccttttgtgtagagcttttaatatcatttgaggaagttccaaatttgtagccagttccaaacaaatttaaatattgagttgagacctgtatggaattgtgttcgcaggagataaggcttgcctttgagcctactcttgattcatgcagagtgccaataagataaatcaaccaagttttggggcctcaaaagagacaccagcaactgggccttgagaacttccatttttttgcagattgtctgcagaaactcagacagctcatcagcagcagcagctgtattgtattttacctcatcttcagagtttatgttctactgaaagaggacgtgtgtatacacacacacacacacacacacacacagattggtataatggagaagatggtttaggtgtacagcaaatttaaaatagtcagtggattgtgtcttactacttcatgtcccagtgtaagcctttatgtcctaagcaggactttattgttagtattataggctaataacctgcagcagaaattcatactctattataataatggcttcttggggccatgctttggggaagtaaaatgtctttttgacatgcctttatacttggcgtgtttatgatggctcagctgcatgtggagttatatatacagtcgtgcctgaagttggatgctactttgtcaaaatgagaaataagtgatggcctggagctgctggagagaagccacgctttctagaaaatattatcaggagtgtctgtcattcattcaggggcctagctgacagaagggctcttttttttataccaatgagtgcgtttactctgaaatacatagaagctcttggtgaagtgctccctgctctggtcacattgtagagggactcccactcatgcatctgcttattttctgtcttaaataggtgctgaatggggcagcacctccttcccccaaagtgcgattgcccctgtttcccatacgaagtgtaatgacgggttgcttttaaaattatagtccttatcaatggaaactccagatttctttatcaaagggaggtgggtgggcatgaatctagttggaaaaggggacttgaagctaagtttacatggcactttaagactgagaacatatcaattgttcataatcaggaatatggtagagggagagcaggtgtagatgatgggacgggaaagtgctgaaaccagcccagcagacctgtgagtcgcctctggttctcacgcagcagtgtgtgtgtgctcacagggatgttccacccctggttctcatgcagtagtgtgggagagtgctgaagccggcccagcatgcctcttagttgcctctggttctcatgcagcagtgtgtgtgcttacaggagtggagatgatgggatgggagagtgctgaagctggcccagcatgcctctgagtcacccctggctctcatgcagcagtgtgtgtgcttacagggacttcccaggctgcacttcccttccctgtgggctgcacccgtagaagtatagaaaatgtaatgtctgttgaatataaaatcgtaccactgaattgttctagtgatgaggttagattttgttgtcatgtgcattgtcaccatagtgacccgtggcatatatttttaacatacttggttgggtttgagagaaatctgtggacgtaattttttgtttgtgtcaagctctatgactcatgcagtgattggtcccatgatcatggcctattagtgaaaacctccaaaggtcaggtggccaaggtgttcccacattttttctatataacttgtttcctaatagtctgcctttctacctatgattaaaaataatttttatatacaacattatttacatttcaaacatctctacgaagtcatgccattttaaggagatgaaaacagccacagagttgagtgacttgctccaaatcacataactaagccaggactagaatcccagactttcagattttctctgccctgggttataatctcttgtttttcagtgatagacctgagtcagtctgagatgcttatttatgaaacagtataccatgaatatttattatctttcttgggcatgcttttctacacattttgaatactttcaacagggattacccaagaatgcaacatctacctgtaataaatggggagaaaattagttgcctgagagaacagaatattaagcacacaaatactttccaacacagggttgtaaattgtgctcctcattttaaggtgctgtacgtgcatgtttaaggaattattaatcagtgtattctgcttgctttctgtattaaccagttccagaggatagccttagaaatgagtgtattttgaatcttaaagtttctttatatgcggcacagtgtataatgtcgtaagttaagaaaaatctgttatctttcaaagaagttacgtagtttcaaaaatgaggttttgtaatcagtgttgaaaaaactctgaactatgacttactttgaggatgatccttgagctcatgtatttgatctgctcaaaagtaataactaaagctgagttaaacagttgttatttatttcagggttctgatttttcccagctggctacacaaatggcctgtctgaatcctagtttagtgtgttttccacgatgggcagaagtcagaacattatctgcttctgtgaggatcataataaaaagttagttttaattacgagtttaaaggaattttagatttttttcagatgcagtattttaaaggaacaaaactcctgtgttgccttttgttgttgttgttgttgttgttgtttcctagagacaggttcttgatctgtcactcaggttagagtgcagtgatgtgttcatagctcactgtaaccttgaactcataagctcaagccatcctcctgcctcagcctcctgagttgtgaggactatggaagtgtgccaccatgcctggctaattttttaagtttttggagagatggggtcttgctctgttgcctatgctggtcttgaactcctaacctcaagcaatcttcctgcctcagcctccccaggtgttgtaataataggtgcgagccaccatgcccagccttgtgttgcctcttggtaagaaataataaaaagaaattagtagcttgtttacctggtaccagatttggagggggctgagtataatttttactgagtggtatgtggttggaaaataggccacatttagccttgaattgtttagaaatcaaatgcgattcagaattgaagaggacattgctgggctatgaaatagggtactaacaaggctatttttgtagcaaaatggccaaaagctgaaataaatcttcttagtctgtgatgcttgtagcatcctttgttaagtaaagcacaacaccctggacaagcgactagttatgacttccaaatagattgataatagccttgcatgttgtagttagagacactgtagctgtatctgtatacctgtaatatagcctgggaagttctgttgctgcagagttatcattaaagtcacttggaattgaaaaagatacagagtgttgagacaaaggaactaggctggcacagtcattgctgatgcgatgggttctccactttggctccaggcgaaggctcctggtggtgatgcatgattgatttcaggtctttgtttcattttggcttcattactgtgattctgagccacacaggtttttccccctggggagaagactatgtaaaaatctcagcgttagaagctgtgttcagtgccctatatgtcttgtgaacctatctgagctgggctgagagcagagtggcttactgtagcagctgtggatgcagtctagttggaggcatggcttggaggacgtcatggttcatgcgatggttggagggatggtaaaagcagttagctcttgtcagctgcttccctctgctagtgcttgagctgccaattttatttgtcagtatttcctgatctcccactcctgttgtgaaaggtcacagagttactgtcactggcaacaatttcgccccttagaagaaaactggtacagagggaaagggtgaggaaaatggtgagttccatcactcagaactaaatgcaagtggtagagagatgctttctcctgtgttaacgtctccaaaagatgaacatcaaatgcccggaaacagcaacatcaaaaagaaggaagatgagaagtattgttgaagagtatggacctacagggtttttaacaagtccagcaaaacaaactatggccaaaagaagaaatttttctgtcactgcgagtagacatcataaatgcttggtaaaattgccagatttagggaataaaaaatttttaaagtacagtgttgaagaatggggcatgtcatgaagacattcagcaaagaagcaatcttggcaaggtggagaagtgggaagcaatggggagagaaagggagatgcccagagcaggaattctcaatgtgtggtccctaggccaacagcatcagcacatcttgccctcaccagacctactgaatccgaaactcccagcgcaaggcccagcagtcttcaacaagccctccaggggtctttggtgcatgctcaagtttgagaaccataggctttgccacggttaaaaagatgttttaatggactggtctcctcctaagctctgaggtgctctcatattccctccataagtaaagagattttttttgtataattctttgcagaaactgttaatgtctttatttctcatattttttttttcccctacaagctcctgaaagatctttttgaagaattgacaaaggatgctatcaagggctatgtttaggtggatggaaataaccttttgaaaatggataaagcctgggtgtggtgactcacgcccataatcccaacactttgggaggccagggcgggaggattgctttattgcaggagttgaagaccagcctatgcaacacagtgagaccttgtctctacaaaaaattttaaaaattagctggctgtggtggtgcatgcctgtggtcccagctacttgggaggcagaggcaggaggatcactcaagcccaggaggttgagggtgcagtgagccatgatctggccactgcactccagcctgggtgacagagcaagaccctgtatcaaaaaatagataataaaataaaaattgataaaaatagatcaatgaattgttagtctacgaatgatagtcatttttcacaattggcagtaaaaataggatttgtgtaaggtatgagtttaccatatttgttcattagatcttagtttcaagggaaagtatcatgtattttccagcatgataatgatgaatcatttaaagtacggctcataaaaatgaaaaaaaaaattggaagaaaaaaacaccttgggtacatagatgtgtaataaatacctgttgagttattggtaatctcttgctaggactgaatctcagtacttcagagcatgtaaaaatcaattttctgtgatcccacttaatcacaccgtgttttctttttttagatttcagctagcaattttgcaggggttggagaccaatagcgatgtcatgctttttggttgttgttattgtctgactcgtggattcagcatttcagaatatggtactctaatcttaaggctttgaaaagaaaccatggccattttttcttcatattttacctttattaattgggctgggtcctaactggttgccagagcccagaaatccaagttctgtcttttcagggaatatgcatagctaaagagttcattgtgtttgcaaaggtgtactaggagttctcatttcctcagatgctcatgtctgtaggctgttaagctctcatttcaatttttgcagtcttttaaaacaccacacttcttttccatcttgaagaccagttaaaactacctctggccaaaaatgttagtgttactagatattatcaaggtgtgagactaaaaagttagaaggctttaagatgtaaattatataagttaatgttttctttccctaaaagttctgacccttgctgacccctcaatcaaatgtttttaattgaaaggggaaagaaaatatcagagaacttaaagatggccttcgtgactttgactcaaaatcaatgcatttcattatgtatgggtcctacaccttgcttcctcaagtggccatgaaaaaaaatctcacgaccatgcaaactgatgccaccccaaagtcatggtaacgatttgaattgctctcagtattgatgtcaaactccctcctgttgtcagcagcttattgcaaactggccattctaaacccttttacccccaccttctctcaatcttagcagttaatctcagccctcccccaccacataacagcctcgggcagaacttcccacttagacacccacacacacacacgcttccttaccttcttgccagtgcctgtcctgcccaagacgaaccccttttcctgtgccctaggacctctcccttgataaatgacttgatctagctacagcctcacactcctggcacatacagctttgcatttaaacatgttcagatactccttccttcaaacaaaagacctttcctcaaccctttgaaagcctgagtaccactaaggtatactgcccttatctgcactctgtccattctgcagtctaccgaggcagtggtttttaaccctggctgcatgttagggtcacctgggaagttttaaaaagtcctaattcctggactggaccacagaccagttaaatcagcatggggaggtggggatgggtttcagtctttaaaaagaaatgtagctgaggctgagaaccaccactctaaaacctggctgctacccttgctaccattaaaactgttcttgctggattcacccaccagtgacttctactattaaaatttagcccataggttgatttttatgacactgatgctatataaccacttccttctttggaatgctccctttcctgaccctactttcctgatttttctgccacttctttgctctttctcagtttctgtggagttgtttggtaggtcagtctagcacagactggatgccggtctctgccgccacctccgttatttcagtgaacacctgtatgccagtgagttcctttgccataccaccttaatgcaccaacttaaaagcacagattagagtggagcattcacatttattactgcaggcttctaggaaagcatattaaaggtctctggtccttctctcacctcccttgttcctcctccaagcccagtgaggtaggaggaattgctaattagattagtgagattctaaggtgggtcactcctgtttacttatgagttgctatttatgaaaagatggcctggactgtgttccctcttctgctttctcctcttccgggtcttggactggtaagggggcctgtgcccaaaaggggctcctccacctaatgctgtctttaatctgtggctttctgctgctggttaattttttaatttggcttcctcaagcctttttggccttgaacttcatgttgatttttatcaaagaactttttattggggcatcagcactagccctatgaatacagtgaaacttggggttccactttcatcagatgtgaccctgtgtgttcctgatgtctttgaatcactagtttctgattcaaaatatggggtaggtggatctgattagtagtcatatgcctgtgtcctggctaggaagtcagaatgaggttatctggaaagttgagcttcctcacacatgggaaggtacttcagatgctggacagccaataagaataacaaaggtccaccagaaccattgccccagtcactgattgaacaaacatttactgaacactgatgaagcgaagtcctcctcagggacctcttagggaagagggtaactgccctaaagcaggatactcctgggctccttagatatactatccttgaaactattaggcccctgtccagagtacctaataataataatggcaaatatgtatttggtggtctgccatttggaagcaacatctcacttattcaacaactctaaaggtaggtacttttatctccattttaaaacaatgaaatacacttacagttacagacaaacttgctcgagtcacatatctattaagtgtcagtcaagattcagattcaagtctgatgttaaagagtgtctgttcccaatcaatacctctgctgcctctttttacaaactgaactgttggagggcatgtacatatgcataagctgtgggccactgggccatgggccagtgtctgatgagacctctttattgacttgtttgtcctggtgggctgtttctctaccaggcaactgtgaatgggctcatcccttctctgtgcgtacatgattgaaaggagatagccggtttctgtgacatcctcttataacaacctagttttgttcttgagagtgaccagagcaagagaaaagtcaatgaaattttgcagatcttgcaaacctgtggcaataagaaggtattatcctttctgtaccaaggcacaactgattcctaagtgagggggatatgtgttctgagatgttaatgttagtgatagactgttttcaacaccttggtaaacatttcttttgactgttagcaaaagctgccttaacagtcttggcttttagaaatgccccttcattcattagatgtgtatggaacacatcttatgccaagcactctgctaggagctgggtatacagagaagaaaggcattcctgctctcatgatgttcatggtcttctgcggaagagaccagaaaaaaagtattacaatgtagaatgaaataagaatgacagggtattttggcagcaaggaggagggcactttaactcaaactgggcagtggaagaagtaaaaaaaaacattgaaagaaatcctgaaggataagcaggagttaagaagagtggatgaagccctccaagggtaaaagcatggtttattcagagcactgcaagtgttttagtatggcccacatgtaaagcttacagaggaacaaagagagaaaggcaagagccaggaagtgaagggtcctgtgtatactggcttacttgttgagttggagaactattgccgtattcctctgctaagctcagggtgcattcgtggaaaccctactgcaactggcccattgtgcatacaaagctggaactgagatgtgaacagatttgcattgccttgatcaccttccgtgggaaatatagctaggcccacttattggtaggagctactgacatgttaaaactaggttaaactgaattggaagtaatggtgtatttggaatcatggctgactgattccattacatgttctagcatgataccagtctgaggttattccccttgaaccaccgacttagtagagtttaatgcacaatgtgatggtcttagttccttgtactgttcttcagtgtcaaagttgttcaactaccagttaagttttttgggctttgtttctcagtagtgacaataaatttgtgttgatctatttacaccttttggactgaacaccttagcaatcattgatattttaagcctacaggaagtgcccatgggataaaaccaatctgctggctcacactaagttctgatcccatgattttggtctcattaataccgtgctataaataaagttagctaaatcttttgaaactgcataaaagtgaaataattatgagttttgggccaacatttttcctgaacagcttctgactgaccagcattttaaattaggcgatgcagtctagcttttgtacatagaaataagaaagtgacttatgttccattattaaaatagtatagggaggacaggtaaattactaatttttcattgctcatagtagagaattaaggtatattgactagtgaaatagaggattatggggatcatatgaaaatatgattaaagagattatcactagaagaaaaattcagactgctaattatgagaaaaaacatgtatgcacaaccaaacaaatcacaaaaatgaaagatgtctaaaaccatagaataggaacaaatgtacctgtcatattaataaaagtaaacttatctgtagataaaaggcaaaaatgtcagcaaacactaatttcatgttataagattcagaaaggttgagcaaaagtaaaccaagcaaacacaaacaagaaaatgagttgtagtctgcatatcaggcaaggttgaacttagggaaaaggaaccggaaaaaaaaaaaccaaaaaaaaccacgacataatgctaaagggtgtgactcacgagataatgtttctagatatctgtgtaccaaataatggaaaaccatttatgtattggaaaccataggagacacaggaagaaacaaatacaatgttagttggatattttaattcaattctgtcaattcatgacagatcaagtggataaaaaactaggacatgggatgatttaaataagatacagaagatctagttgatgcatattagactttaccctaaaagtggtaactacacttcaaagtatccatgaaacatttccccatttgactgtgtattagagcgtacagaaaacataagtttcagaacggaaaaaaggaacaacagatggcatttgctgataaaaatgcaataaacttagaatttgaggataggtggtcagaaaaaaaaatgcaataaattaaagccagaaaacactgctcatctgcaatccaaaatgtttttaagctcttcaactattcttgggttgattaggaaatgcaaagtattaaaaaaacatttcatatctaaaatataaacttgttcctctgagatacaaataaaacagtgctcagaggaaaattcattgccctaaaatttatgtattaaaaaataagataaatgtcatataactcaaaatattaggaaaaggaatcttttaaaggcaggctaaaagaatcaagaaaaattaattagaaaaatgaggaaacaaagctaatttttaaaatatgtagtaaaatatgtaacattttagctaacattacaagagaagacaaacacaaaataagaattaccaagtattgaataggtaagagtcataaaatattctttgctcaactgtatgcaaacaatttaaaaacttggattaaatggataattttccaggaaggtatagtttgccaaaaaatgacatcaaaagaaatctaatataacaattgtcatagaagaaatgaagtaagtatttcaattagcatgacagactaaatacttttaaagacccaatgaaaacaaagaaatgcatttggagaattaacagaaactttttgtaacaccaattttttattttacattttaaagcatggaatggaatttattgtaaagacgtgtattttatagaatccaagcaaaagctcaccagccagagataaagtgaggccagctcagggaatgtgagcagtggcgatttattccctctggtgttccatgttagcctgacacagagccccctcttcacattctcaggggctcttgatccaaaaccttttttaaaaaaaataattttagacttaacagaaaatctgcaaaaatagatttcctgtgtgcccttctctcagcttcttctaatgttaacttacataccaatggtacaattattgaaactaggaaattaacattggcacaatcctattaactacatactttatttgaattgtagctgttttcccagtaatgttgtttttctggttcggtattcaatccaggatccatatgtacttgggtctttctgggttttctgttccactggtctacttgtgcatggtaccacactgttttaattatagagactttatagtatgttttaacaactggcaaggctagtcccccttataatttttcctattgtgcttctggctattcatacatgtttgtttttccatgtgaactttagtatcaacttgtctaaattcattttttaaggtacattggtattttattgatattatatgatattaactgatttagagagaactaacatctttaaaatgtggtgtcatcctatccaagaataggagatgtatttccatttattcaagtctattttgtgccttttagcagtgttttaaaattatccttgtgtaggttttgtgcatttcttgctaagcttatccctaagtatttaatttatttgctagta

SEQ ID NO: 135779 - DNA, 2438 bp, Homo sapiens
  Payload ID: 6544
  Gene Symbol: GPATCH2L
  Gene Name: G patch domain containing 2-like
  Uniprot ID: Q9NWQ4
  ENST ID: ENST00000312858
  CDS Start-End: 68-1501
ccggcggtgagagtcggcccaaaaagcggcggccgttggaggtggctgcggcagctgatgtggcctcatggatgagctggtacacgacttagcctcagccttggagcagacatctgagcagaataagcttggtgaactgtgggaggagatggcgctgagcccccgacagcagaggcggcagcttcggaaacgccgaggtcggaagcgtcgttctgacttcactcacctggcagagcatacctgctgctacagcgaggcctctgagtcaagtctggatgaggccactaaggactgtcgagaagtggctccggtgaccaattttagtgactctgatgacacaatggtagccaaacgacacccagctctcaatgccattgtcaagagtaagcaacattcttggcatgaatctgactcctttactgaaaatgcaccttgtcgaccactcaggcgcaggcggaaggtgaagcgagtgacatcagaggtggctgctagccttcagcagaagctgaaggtgtcagattggagctatgagagaggctgcaggttcaagtctgctaagaagcagcgtctgtcccgctggaaggagaatactccctggacctcatcaggccacggattgtgtgaatcagcagaaaataggactttcctaagcaaaacaggaaggaaagaaaggatggagtgtgaaacagatgaacaaaaacagggctctgatgagaacatgtcagaatgtgaaaccagcagtgtgtgtagcagcagtgacactgggctctttaccaatgatgaagggcgacaaggtgatgacgaacagagtgattggttctatgaaggagaatgtgtcccaggattcactgtccctaatcttctgcccaagtgggctcctgatcattgttctgaagtagaaagaatggattctggattggataaattttcagattccacattccttttaccttctcggccagctcaaagagggtaccatactcgcttgaatcgtctacctggagctgcagctcgatgcctcagaaaggggcgaagaaggctggttgggaaggagaccagcataaacactttggggactgagaggataagccatatcattagtgaccctcggcagaaagatttctggttaccatcagctgggaaaagagaacgaaatcagttcaatcccctgtctcccctttactccctggatgttcttgccgatgcttctcaccgaaggtgttcaccagcacactgctctgccagacaggcaaatgtacactggggaccaccatgttcacgtgacatcaagaggaagcggaaaccagtggccacagcatctttgtctagccccagtgcagttcacatggatgcagtggagccaaccacaccagcatcacaagcccccaaatcacccagctctgagtggttggtgaggacctctgcagcagagaaagccacagacgcaactactgctacattttttaaaatgccacaagaaaagagccctggatacagctagagagcaggacttcaccctccaggagctgactgggtgttgctgaagcaaatgttggactttgtgttagatagtcttgcatatcttaatcgacattcccagtcctttcaccaccagaaccaactcctctttcaaacacagcagtggattctttctctcagaagatcatgttgtgggaatcttttttttaaatagtgaaatattgaggcagcaattttttacaaaaaggtcatcctctgctctatttgttaccttgttattgctgtctcaacatttactacagctccatttacagaactgttgcttttttgcagttgtctttgttcttgaaaaaccagtaactgcttctgcataccttttgtgtagagcttttaatatcatttgaggaagttccaaatttgtagccagttccaaacaaatttaaatattgagttgagacctgtatggaattgtgttcgcaggagataaggcttgcctttgagcctactcttgattcatgcagagtgccaataagataaatcaaccaagttttggggcctcaaaagagacaccagcaactgggccttgagaacttccatttttttgcagattgtctgcagaaactcagacagctcatcagcagcagcagctgtattgtattttacctcatcttcagagtttatgttctactgaaagaggacgtgtgtatacacacacacacacacacacacacacagattggtataatggagaagatggtttaggtgtacagcaaatttaaaatagtcagtggattgtgtcttactacttcatgtcccagtgtaagcctttatgtcctaagcaggactttattgttagtattataggctaataacctgcagcagaaattcatactctattataataatggcttcttggggccatgctttggggaagtaaaatgtctttttgacatgccttt

SEQ ID NO: 135780 - DNA, 529 bp, Homo sapiens
  Payload ID: 6544
  Gene Symbol: GPATCH2L
  Gene Name: G patch domain containing 2-like
  ENST ID: ENST00000557207
  CDS Start-End: 159-344
aagccccggcggtgagagtcggcccaaaaagcggcggccgttggaggtggctgcggcagctgctacccgttccttcctgtgcgtgactcagcctcatctctgcccgggtgcgtgcctggccgccgggtcctctcgagagtgtgcatccgcgactggagatggggagttctagggttcttttgtcactactgttggaattacaggctttgaggcaggaaaggattctgcacaggcattcgactgcaagttgtttgatgacttcgttccatgttcaagtttgtgctgttctgcctgaggtttttatttgttcttttgtttttgttttttgtatttttgttgcctgagtttttaaagcagtaattctttattagggaagtagattttgacatgctgttcccacttgtttctttattttggtcttagggacagttgtctcccaaacctcaatcatggcattttaatccacttttttttttcccattttttccccttcttttcacaggtgttgataaaccacttcttaatgctt

SEQ ID NO: 135781 - DNA, 575 bp, Homo sapiens
  Payload ID: 6544
  Gene Symbol: GPATCH2L
  Gene Name: G patch domain containing 2-like
  ENST ID: ENST00000556109
  CDS Start-End: 84-575
gtcagagagggaagccccggcggtgagagtcggcccaaaaagcggcggccgttggaggtggctgcggcagctgatgtggcctcatggatgagctggtacacgacttagcctcagccttggagcagacatctgagcagaataagcttggtgaactgtgggaggagatggcgctgagcccccgacagcagaggcggcagcttcggaaacgccgaggtcggaagcgtcgttctgacttcactcacctggcagagcatacctgctgctacagcgaggcctctgagtcaagtctggatgaggccactaaggactgtcgagaagtggctccggtgaccaattttagtgactctgatgacacaatggtagccaaacgacacccagctctcaatgccattgtcaagagtaagcaacattcttggcatgaatctgactcctttactgaaaatgcaccttgtcgaccactcaggcgcaggcggaaggagaatactccctggacctcatcaggccacggattgtgtgaatcagcagaaaataggactttcctaagcaaaacaggaaggaaagaaaggatggagtgt

SEQ ID NO: 135782 - DNA, 2112 bp, Homo sapiens
  Payload ID: 6544
  Gene Symbol: GPATCH2L
  Gene Name: G patch domain containing 2-like
  Uniprot ID: Q9NWQ4
  ENST ID: ENST00000556663
  CDS Start-End: 719-1774
tactgtataaggttctatacctggtagcttccaggtggtagttggtaccagaatgggcgcaaacttagtctcttctccattctgacttcaaacctgggtcactacaatttcttggatcacgaaaactgcattcttccttaaatggtgtcactaagttgtctttctgtttctttctgccatggtcattgtcagcagtgaccccaggccaaagaacagtttttcattcattctcaatacctcgatgagaccatgtgctactctgtgtttccacaactctagtgtgattttgaagttgtatgtttttctgttcctgtctagtgagacagtctctaatctttctggatctcatcattaggtaattcaatgacaagtttaattggggaaaagagagaaggatctagtcccccgaatttgttttgggtcctgtcccagttgtcttctggttagtaggtttttgtgcttaagaatatgttgacttcaggcatttaacaagggacaaaacatctatttttagtgacttaaggaagtggtaggaacagaatctaagtgtagccagatgaaaggtgacttattttgtttagacaggcagaactgtggactaccatgatctgtttcatcaaattattccaaaacaacagatcctttttcaggctttctttttctttttcttttctttctttctttttttcctaaacttccttttggcagatgtggcctcatggatgagctggtacacgacttagcctcagccttggagcagacatctgagcagaataagcttggtgaactgtgggaggagatggcgctgagcccccgacagcagaggcggcagcttcggaaacgccgaggtcggaagcgtcgttctgacttcactcacctggcagagcatacctgctgctacagcgaggcctctgagtcaagtctggatgaggccactaaggactgtcgagaagtggctccggtgaccaattttagtgactctgatgacacaatggtagccaaacgacacccagctctcaatgccattgtcaagagtaagcaacattcttggcatgaatctgactcctttactgaaaatgcaccttgtcgaccactcaggcgcaggcggaaggtgaagcgagtgacatcagaggtggctgctagccttcagcagaagctgaaggtgtcagattggagctatgagagaggctgcaggttcaagtctgctaagaagcagcgtctgtcccgctggaaggagaatactccctggacctcatcaggccacggattgtgtgaatcagcagaaaataggactttcctaagcaaaacaggaaggaaagaaaggatggagtgtgaaacagatgaacaaaaacagggctctgatgagaacatgtcagaatgtgaaaccagcagtgtgtgtagcagcagtgacactgggctctttaccaatgatgaagggcgacaaggtgatgacgaacagagtgattggttctatgaaggagaatgtgtcccaggattcactgtccctaatcttctgcccaagtgggctcctgatcattgttctgaagtagaaagaatggattctggattggataaattttcagattccacattccttttaccttctcggccagctcaaagagggtaccatactcgcttgaatcgtctacctggagctgcagctcgatgcctcagaaaggggcgaagaaggctggttgggaaggtgatacctctcacagttagcttggctcagtggggagataatattccctatgggagttgtgtatcctattaacaatcagaggtgctacagaactccctgaagttaatggagccaactggaatgtgttgggagtttacaagagtgaacattatgtagaatgtgaatggatatacaaataaaagatgaaacgtaattcatatagaagtactgacaaaaaaaaaaaacactgtcattacagtgtctattgcctgtaaacctacaagcctgagctgtgtcttctgtaacttttgattaatgttatgttattattgtgtaagttaaaatactcttggcttctttatgactcctcttgaattcatgaatgcatctttgttctttcctaattttggtctttcatcctagaattcatt

SEQ ID NO: 135783 - DNA, 821 bp, Homo sapiens
  Payload ID: 6544
  Gene Symbol: GPATCH2L
  Gene Name: G patch domain containing 2-like
  ENST ID: ENST00000554799
  CDS Start-End: 657-821
agtagcttggatttctagtgtcaagatgatttctgtcccattaatgagataccaacgataaatgaagtatggacatatattctttattcaccttttatgataaaggcaaatatagcaagaaatccctcaggtgatgacgaacagagtgattggttctatgaaggagaatgtgtcccaggattcactgtccctaatcttctgcccaagtgggctcctgatcattgttctgaagtagaaagaatggattctggattggataaattttcagattccacattccttttaccttctcggccagctcaaagagggtaccatactcgcttgaatcgtctacctggagctgcagctcgatgcctcagaaaggggcgaagaaggctggttgggaaggagaccagcataaacactttggggactgagaggataagccatatcattagtgaccctcggcagaaagaaaagaataaagcgttggcttctgattttcctcacatttctgcttgtgcacatgagttttgaactttgcagtaagaaagcagaatgaatctgatttgcatatggtttagttcaacatcagaatcctgcgttgagaagtactatgttgaagcctaaacgtatggagcagaagttcaatcccctgtctcccctttactccctggatgttcttgccgatgcttctcaccgaaggtgttcaccagcacactgctctgccagacaggcaaatgtacactggggaccaccatgttcacgtgacatcaagaggaagcggaaaccagtggccacagcatctttgtctagccccagtgcaggtgattacatgcagt

SEQ ID NO: 135784 - DNA, 1458 bp, Homo sapiens
  Payload ID: 6544
  Gene Symbol: GPATCH2L
  Gene Name: G patch domain containing 2-like
  Uniprot ID: Q9NWQ4
  ENST ID: ENST00000557263
  CDS Start-End: 65-1120
agagagggaagccccggcggtgagagtcggcccaaaaagcggcggccgttggagatgtggcctcatggatgagctggtacacgacttagcctcagccttggagcagacatctgagcagaataagcttggtgaactgtgggaggagatggcgctgagcccccgacagcagaggcggcagcttcggaaacgccgaggtcggaagcgtcgttctgacttcactcacctggcagagcatacctgctgctacagcgaggcctctgagtcaagtctggatgaggccactaaggactgtcgagaagtggctccggtgaccaattttagtgactctgatgacacaatggtagccaaacgacacccagctctcaatgccattgtcaagagtaagcaacattcttggcatgaatctgactcctttactgaaaatgcaccttgtcgaccactcaggcgcaggcggaaggtgaagcgagtgacatcagaggtggctgctagccttcagcagaagctgaaggtgtcagattggagctatgagagaggctgcaggttcaagtctgctaagaagcagcgtctgtcccgctggaaggagaatactccctggacctcatcaggccacggattgtgtgaatcagcagaaaataggactttcctaagcaaaacaggaaggaaagaaaggatggagtgtgaaacagatgaacaaaaacagggctctgatgagaacatgtcagaatgtgaaaccagcagtgtgtgtagcagcagtgacactgggctctttaccaatgatgaagggcgacaaggtgatgacgaacagagtgattggttctatgaaggagaatgtgtcccaggattcactgtccctaatcttctgcccaagtgggctcctgatcattgttctgaagtagaaagaatggattctggattggataaattttcagattccacattccttttaccttctcggccagctcaaagagggtaccatactcgcttgaatcgtctacctggagctgcagctcgatgcctcagaaaggggcgaagaaggctggttgggaaggtgatacctctcacagttagcttggctcagtggggagataatattccctatgggagttgtgtatcctattaacaatcagaggtgctacagaactccctgaagttaatggagccaactggaatgtgttgggagtttacaagagtgaacattatgtagaatgtgaatggatatacaaataaaagatgaaacgtaattcatatagaagtactgacaaaaaaaaaaaacactgtcattacagtgtctattgcctgtaaacctacaagcctgagctgtgtcttctgtaacttttgattaatgttatgttattattgtgtaagttaaaatactcttggcttctttatgactcctcttgaattcatgaatgcatctttgttctttcctaattttggtctttcatcctagaattcatt

SEQ ID NO: 135785 - DNA, 539 bp, Homo sapiens
  Payload ID: 6544
  Gene Symbol: GPATCH2L
  Gene Name: G patch domain containing 2-like
  ENST ID: ENST00000556372
  CDS Start-End: 1-94
ttcacgtgacatcaagaggaagcggaaaccagtggccacagcatctttgtctagccccagtgcaggtggtagaaggacagcccccctgccctgagacaacactcggaggcctgtattccagcgagagtgccctgacaagacagctctggccacccttgcctggctcctccaccttcccgtcagtttcgtgagttctccagccttttcccagctggtcattgttggtgaaagctaaggagcaagtaggagttctcaagatgaaatggatgacccatgagaccggtatggttatcattcccattttatacaagaagaaaagaaggctgagagagtttaagtcacttgctaccacatgagtaggttgcggcagagctgggacaggctcatcatagcattgatttcattgtgtcatgaatgcctgttttcttttctctttccccaattcagctgttaactggttgatggcatacaccacaatttttgttgactttaaaaatattgtaaagtatagcacatatacattattaaaagaaaaactg

SEQ ID NO: 135786 - DNA, 776 bp, Homo sapiens
  Payload ID: 6544
  Gene Symbol: GPATCH2L
  Gene Name: G patch domain containing 2-like
  ENST ID: ENST00000553588
  CDS Start-End: 14-316
ctttactccctggatgttcttgccgatgcttctcaccgaaggtgttcaccagcacactgctctgccagacaggcaaatgtacactggggaccaccatgttcacgtgacatcaagaggaagcggaaaccagtggccacagcatctttgtctagccccagtgcaggtgattacatgcagttatcatttattgagcatgtaccgtgtgccaggcactaaattatgtgttttgtataccttttcatgtaatgtttgtgatagtgtaggtcattttattcccactttacatgggaaaactgagactacaagaaataattagcctagttcttgctgactctgaagtctgtgctttttcactgttacatggctatctagagtttgaaaccctatattccactatcagcaatctccagtcatctgagcttttgttttagcagacaggaaattaggtccatgttaatgaaagtccaggtgaagtggcagttcagtcaggcagtcacacagggttatttactttcttattttgcatacagtacagtacattcttactgcttttataagtagaatgctaatattttactggtcatgacattcctaattaaaaacaattttttaggctaaaacttttcagttttttttttttttttttttaacaaaactaacactaattggtagaagccaaaatagtgcttctctttggtggggggcagtgaccaagagagggcacaaagaaaccctctgggctgttggcaatgctccatatgatgaacttggtgggg

SEQ ID NO: 135787 - DNA, 1791 bp, Homo sapiens
  Payload ID: 6544
  Gene Symbol: GPATCH2L
  Gene Name: G patch domain containing 2-like
  ENST ID: ENST00000554375
  CDS Start-End: 87-1184
gaggtcagagagggaagccccggcggtgagagtcggcccaaaaagcggcggccgttggaggtggctgcggcagctgatgtggcctcatggatgagctggtacacgacttagcctcagccttggagcagacatctgagcagaataagcttggtgaactgtgggaggagatggcgctgagcccccgacagcagaggcggcagcttcggaaacgccgaggtcggaagcgtcgttctgacttcactcacctggcagagcatacctgctgctacagcgaggcctctgagtcaagtctggatgaggccactaaggactgtcgagaagtggctccggtgaccaattttagtgactctgatgacacaatggtagccaaacgacacccagctctcaatgccattgtcaagagtaagcaacattcttggcatgaatctgactcctttactgaaaatgcaccttgtcgaccactcaggcgcaggcggaaggtgaagcgagtgacatcagaggtggctgctagccttcagcagaagctgaaggtgtcagattggagctatgagagaggctgcaggttcaagtctgctaagaagcagcgtctgtcccgctggaaggagaatactccctggacctcatcaggccacggattgtgtgaatcagcagaaaataggactttcctaagcaaaacaggaaggaaagaaaggatggagtgtgaaacagatgaacaaaaacagggctctgatgagaacatgtcagaatgtgaaaccagcagtgtgtgtagcagcagtgacactgggctctttaccaatgatgaagggcgacaaggtgatgacgaacagagtgattggttctatgaaggagaatgtgtcccaggattcactgtccctaatcttctgcccaagtgggctcctgatcattgttctgaagtagaaagaatggattctggattggataaattttcagattccacattccttttaccttctcggccagctcaaagagggtaccatactcgcttgaatcgtctacctggagctgcagctcgatgcctcagaaaggggcgaagaaggctggttgggaaggagaccagcataaacactttggggactgagaggataagccatatcattagtgaccctcggcagaaagatttctggttaccatcagctgggaaaagagaacgaaatcagttttgaactttgcagtaagaaagcagaatgaatctgatttgcatatggtttagttcaacatcagaatcctgcgttgagaagtactatgttgaagcctaaacgtatggagcagaagttcaatcccctgtctcccctttactccctggatgttcttgccgatgcttctcaccgaaggtgttcaccagcacactgctctgccagacaggcaaatgtacactggggaccaccatgttcacgtgacatcaagaggaagcggaaaccagtggccacagcatctttgtctagccccagtgcagttcacatggatgcagtggagccaaccacaccagcatcacaagcccccaaatcacccagctctgagtggttggtgaggacctctgcagcagagaaagccacagacgcaactactgctacattttttaaaatgccacaagaaaagagccctggatacagctagagagcaggacttcaccctccaggagctgactgggtgttgctgaagcaaatgttggactttgtgttagatagtcttgcatatcttaatcgacattcccagtcctttcaccaccagaaccaactcctctttcaaacacagcagtggattctttctctc

SEQ ID NO: 135788 - DNA, 446 bp, Homo sapiens
  Payload ID: 6544
  Gene Symbol: GPATCH2L
  Gene Name: G patch domain containing 2-like
  ENST ID: ENST00000557542
  CDS Start-End: 129-446
gtcagagagggaagccccggcggtgagagtcggcccaaaaagcggcggccgttggaggtggctgcggcagctgctacccgttccttcctgtgcgtgactcagcctcatctctgcccggatgtggcctcatggatgagctggtacacgacttagcctcagccttggagcagacatctgagcagaataagcttggtgaactgtgggaggagatggcgctgagcccccgacagcagaggcggcagcttcggaaacgccgaggtcggaagcgtcgttctgacttcactcacctggcagagcatacctgctgctacagcgaggcctctgagtcaagtctggatgaggccactaaggactgtcgagaagtggctccggtgaccaattttagtgactctgatgacacaatggtagccaaacgacacccagctctcaatgccattgtcaagagt

SEQ ID NO: 135789 - DNA, 12396 bp, Homo sapiens
  Payload ID: 6544
  Gene Symbol: GPATCH2L
  Gene Name: G patch domain containing 2-like
  Uniprot ID: Q9NWQ4
  ENST ID: ENST00000621494
  CDS Start-End: 11-1444
atgtggcctcatggatgagctggtacacgacttagcctcagccttggagcagacatctgagcagaataagcttggtgaactgtgggaggagatggcgctgagcccccgacagcagaggcggcagcttcggaaacgccgaggtcggaagcgtcgttctgacttcactcacctggcagagcatacctgctgctacagcgaggcctctgagtcaagtctggatgaggccactaaggactgtcgagaagtggctccggtgaccaattttagtgactctgatgacacaatggtagccaaacgacacccagctctcaatgccattgtcaagagtaagcaacattcttggcatgaatctgactcctttactgaaaatgcaccttgtcgaccactcaggcgcaggcggaaggtgaagcgagtgacatcagaggtggctgctagccttcagcagaagctgaaggtgtcagattggagctatgagagaggctgcaggttcaagtctgctaagaagcagcgtctgtcccgctggaaggagaatactccctggacctcatcaggccacggattgtgtgaatcagcagaaaataggactttcctaagcaaaacaggaaggaaagaaaggatggagtgtgaaacagatgaacaaaaacagggctctgatgagaacatgtcagaatgtgaaaccagcagtgtgtgtagcagcagtgacactgggctctttaccaatgatgaagggcgacaaggtgatgacgaacagagtgattggttctatgaaggagaatgtgtcccaggattcactgtccctaatcttctgcccaagtgggctcctgatcattgttctgaagtagaaagaatggattctggattggataaattttcagattccacattccttttaccttctcggccagctcaaagagggtaccatactcgcttgaatcgtctacctggagctgcagctcgatgcctcagaaaggggcgaagaaggctggttgggaaggagaccagcataaacactttggggactgagaggataagccatatcattagtgaccctcggcagaaagatttctggttaccatcagctgggaaaagagaacgaaatcagttcaatcccctgtctcccctttactccctggatgttcttgccgatgcttctcaccgaaggtgttcaccagcacactgctctgccagacaggcaaatgtacactggggaccaccatgttcacgtgacatcaagaggaagcggaaaccagtggccacagcatctttgtctagccccagtgcagttcacatggatgcagtggagccaaccacaccagcatcacaagcccccaaatcacccagctctgagtggttggtgaggacctctgcagcagagaaagccacagacgcaactactgctacattttttaaaatgccacaagaaaagagccctggatacagctagagagcaggacttcaccctccaggagctgactgggtgttgctgaagcaaatgttggactttgtgttagatagtcttgcatatcttaatcgacattcccagtcctttcaccaccagaaccaactcctctttcaaacacagcagtggattctttctctcagaagatcatgttgtgggaatcttttttttaaatagtgaaatattgaggcagcaattttttacaaaaaggtcatcctctgctctatttgttaccttgttattgctgtctcaacatttactacagctccatttacagaactgttgcttttttgcagttgtctttgttcttgaaaaaccagtaactgcttctgcataccttttgtgtagagcttttaatatcatttgaggaagttccaaatttgtagccagttccaaacaaatttaaatattgagttgagacctgtatggaattgtgttcgcaggagataaggcttgcctttgagcctactcttgattcatgcagagtgccaataagataaatcaaccaagttttggggcctcaaaagagacaccagcaactgggccttgagaacttccatttttttgcagattgtctgcagaaactcagacagctcatcagcagcagcagctgtattgtattttacctcatcttcagagtttatgttctactgaaagaggacgtgtgtatacacacacacacacacacacacacacagattggtataatggagaagatggtttaggtgtacagcaaatttaaaatagtcagtggattgtgtcttactacttcatgtcccagtgtaagcctttatgtcctaagcaggactttattgttagtattataggctaataacctgcagcagaaattcatactctattataataatggcttcttggggccatgctttggggaagtaaaatgtctttttgacatgcctttatacttggcgtgtttatgatggctcagctgcatgtggagttatatatacagtcgtgcctgaagttggatgctactttgtcaaaatgagaaataagtgatggcctggagctgctggagagaagccacgctttctagaaaatattatcaggagtgtctgtcattcattcaggggcctagctgacagaagggctcttttttttataccaatgagtgcgtttactctgaaatacatagaagctcttggtgaagtgctccctgctctggtcacattgtagagggactcccactcatgcatctgcttattttctgtcttaaataggtgctgaatggggcagcacctccttcccccaaagtgcgattgcccctgtttcccatacgaagtgtaatgacgggttgcttttaaaattatagtccttatcaatggaaactccagatttctttatcaaagggaggtgggtgggcatgaatctagttggaaaaggggacttgaagctaagtttacatggcactttaagactgagaacatatcaattgttcataatcaggaatatggtagagggagagcaggtgtagatgatgggacgggaaagtgctgaaaccagcccagcagacctgtgagtcgcctctggttctcacgcagcagtgtgtgtgtgctcacagggatgttccacccctggttctcatgcagtagtgtgggagagtgctgaagccggcccagcatgcctcttagttgcctctggttctcatgcagcagtgtgtgtgcttacaggagtggagatgatgggatgggagagtgctgaagctggcccagcatgcctctgagtcacccctggctctcatgcagcagtgtgtgtgcttacagggacttcccaggctgcacttcccttccctgtgggctgcacccgtagaagtatagaaaatgtaatgtctgttgaatataaaatcgtaccactgaattgttctagtgatgaggttagattttgttgtcatgtgcattgtcaccatagtgacccgtggcatatatttttaacatacttggttgggtttgagagaaatctgtggacgtaattttttgtttgtgtcaagctctatgactcatgcagtgattggtcccatgatcatggcctattagtgaaaacctccaaaggtcaggtggccaaggtgttcccacattttttctatataacttgtttcctaatagtctgcctttctacctatgattaaaaataatttttatatacaacattatttacatttcaaacatctctacgaagtcatgccattttaaggagatgaaaacagccacagagttgagtgacttgctccaaatcacataactaagccaggactagaatcccagactttcagattttctctgccctgggttataatctcttgtttttcagtgatagacctgagtcagtctgagatgcttatttatgaaacagtataccatgaatatttattatctttcttgggcatgcttttctacacattttgaatactttcaacagggattacccaagaatgcaacatctacctgtaataaatggggagaaaattagttgcctgagagaacagaatattaagcacacaaatactttccaacacagggttgtaaattgtgctcctcattttaaggtgctgtacgtgcatgtttaaggaattattaatcagtgtattctgcttgctttctgtattaaccagttccagaggatagccttagaaatgagtgtattttgaatcttaaagtttctttatatgcggcacagtgtataatgtcgtaagttaagaaaaatctgttatctttcaaagaagttacgtagtttcaaaaatgaggttttgtaatcagtgttgaaaaaactctgaactatgacttactttgaggatgatccttgagctcatgtatttgatctgctcaaaagtaataactaaagctgagttaaacagttgttatttatttcagggttctgatttttcccagctggctacacaaatggcctgtctgaatcctagtttagtgtgttttccacgatgggcagaagtcagaacattatctgcttctgtgaggatcataataaaaagttagttttaattacgagtttaaaggaattttagatttttttcagatgcagtattttaaaggaacaaaactcctgtgttgccttttgttgttgttgttgttgttgttgtttcctagagacaggttcttgatctgtcactcaggttagagtgcagtgatgtgttcatagctcactgtaaccttgaactcataagctcaagccatcctcctgcctcagcctcctgagttgtgaggactatggaagtgtgccaccatgcctggctaattttttaagtttttggagagatggggtcttgctctgttgcctatgctggtcttgaactcctaacctcaagcaatcttcctgcctcagcctccccaggtgttgtaataataggtgcgagccaccatgcccagccttgtgttgcctcttggtaagaaataataaaaagaaattagtagcttgtttacctggtaccagatttggagggggctgagtataatttttactgagtggtatgtggttggaaaataggccacatttagccttgaattgtttagaaatcaaatgcgattcagaattgaagaggacattgctgggctatgaaatagggtactaacaaggctatttttgtagcaaaatggccaaaagctgaaataaatcttcttagtctgtgatgcttgtagcatcctttgttaagtaaagcacaacaccctggacaagcgactagttatgacttccaaatagattgataatagccttgcatgttgtagttagagacactgtagctgtatctgtatacctgtaatatagcctgggaagttctgttgctgcagagttatcattaaagtcacttggaattgaaaaagatacagagtgttgagacaaaggaactaggctggcacagtcattgctgatgcgatgggttctccactttggctccaggcgaaggctcctggtggtgatgcatgattgatttcaggtctttgtttcattttggcttcattactgtgattctgagccacacaggtttttccccctggggagaagactatgtaaaaatctcagcgttagaagctgtgttcagtgccctatatgtcttgtgaacctatctgagctgggctgagagcagagtggcttactgtagcagctgtggatgcagtctagttggaggcatggcttggaggacgtcatggttcatgcgatggttggagggatggtaaaagcagttagctcttgtcagctgcttccctctgctagtgcttgagctgccaattttatttgtcagtatttcctgatctcccactcctgttgtgaaaggtcacagagttactgtcactggcaacaatttcgccccttagaagaaaactggtacagagggaaagggtgaggaaaatggtgagttccatcactcagaactaaatgcaagtggtagagagatgctttctcctgtgttaacgtctccaaaagatgaacatcaaatgcccggaaacagcaacatcaaaaagaaggaagatgagaagtattgttgaagagtatggacctacagggtttttaacaagtccagcaaaacaaactatggccaaaagaagaaatttttctgtcactgcgagtagacatcataaatgcttggtaaaattgccagatttagggaataaaaaatttttaaagtacagtgttgaagaatggggcatgtcatgaagacattcagcaaagaagcaatcttggcaaggtggagaagtgggaagcaatggggagagaaagggagatgcccagagcaggaattctcaatgtgtggtccctaggccaacagcatcagcacatcttgccctcaccagacctactgaatccgaaactcccagcgcaaggcccagcagtcttcaacaagccctccaggggtctttggtgcatgctcaagtttgagaaccataggctttgccacggttaaaaagatgttttaatggactggtctcctcctaagctctgaggtgctctcatattccctccataagtaaagagattttttttgtataattctttgcagaaactgttaatgtctttatttctcatattttttttttcccctacaagctcctgaaagatctttttgaagaattgacaaaggatgctatcaagggctatgtttaggtggatggaaataaccttttgaaaatggataaagcctgggtgtggtgactcacgcccataatcccaacactttgggaggccagggcgggaggattgctttattgcaggagttgaagaccagcctatgcaacacagtgagaccttgtctctacaaaaaattttaaaaattagctggctgtggtggtgcatgcctgtggtcccagctacttgggaggcagaggcaggaggatcactcaagcccaggaggttgagggtgcagtgagccatgatctggccactgcactccagcctgggtgacagagcaagaccctgtatcaaaaaatagataataaaataaaaattgataaaaatagatcaatgaattgttagtctacgaatgatagtcatttttcacaattggcagtaaaaataggatttgtgtaaggtatgagtttaccatatttgttcattagatcttagtttcaagggaaagtatcatgtattttccagcatgataatgatgaatcatttaaagtacggctcataaaaatgaaaaaaaaaattggaagaaaaaaacaccttgggtacatagatgtgtaataaatacctgttgagttattggtaatctcttgctaggactgaatctcagtacttcagagcatgtaaaaatcaattttctgtgatcccacttaatcacaccgtgttttctttttttagatttcagctagcaattttgcaggggttggagaccaatagcgatgtcatgctttttggttgttgttattgtctgactcgtggattcagcatttcagaatatggtactctaatcttaaggctttgaaaagaaaccatggccattttttcttcatattttacctttattaattgggctgggtcctaactggttgccagagcccagaaatccaagttctgtcttttcagggaatatgcatagctaaagagttcattgtgtttgcaaaggtgtactaggagttctcatttcctcagatgctcatgtctgtaggctgttaagctctcatttcaatttttgcagtcttttaaaacaccacacttcttttccatcttgaagaccagttaaaactacctctggccaaaaatgttagtgttactagatattatcaaggtgtgagactaaaaagttagaaggctttaagatgtaaattatataagttaatgttttctttccctaaaagttctgacccttgctgacccctcaatcaaatgtttttaattgaaaggggaaagaaaatatcagagaacttaaagatggccttcgtgactttgactcaaaatcaatgcatttcattatgtatgggtcctacaccttgcttcctcaagtggccatgaaaaaaaatctcacgaccatgcaaactgatgccaccccaaagtcatggtaacgatttgaattgctctcagtattgatgtcaaactccctcctgttgtcagcagcttattgcaaactggccattctaaacccttttacccccaccttctctcaatcttagcagttaatctcagccctcccccaccacataacagcctcgggcagaacttcccacttagacacccacacacacacacgcttccttaccttcttgccagtgcctgtcctgcccaagacgaaccccttttcctgtgccctaggacctctcccttgataaatgacttgatctagctacagcctcacactcctggcacatacagctttgcatttaaacatgttcagatactccttccttcaaacaaaagacctttcctcaaccctttgaaagcctgagtaccactaaggtatactgcccttatctgcactctgtccattctgcagtctaccgaggcagtggtttttaaccctggctgcatgttagggtcacctgggaagttttaaaaagtcctaattcctggactggaccacagaccagttaaatcagcatggggaggtggggatgggtttcagtctttaaaaagaaatgtagctgaggctgagaaccaccactctaaaacctggctgctacccttgctaccattaaaactgttcttgctggattcacccaccagtgacttctactattaaaatttagcccataggttgatttttatgacactgatgctatataaccacttccttctttggaatgctccctttcctgaccctactttcctgatttttctgccacttctttgctctttctcagtttctgtggagttgtttggtaggtcagtctagcacagactggatgccggtctctgccgccacctccgttatttcagtgaacacctgtatgccagtgagttcctttgccataccaccttaatgcaccaacttaaaagcacagattagagtggagcattcacatttattactgcaggcttctaggaaagcatattaaaggtctctggtccttctctcacctcccttgttcctcctccaagcccagtgaggtaggaggaattgctaattagattagtgagattctaaggtgggtcactcctgtttacttatgagttgctatttatgaaaagatggcctggactgtgttccctcttctgctttctcctcttccgggtcttggactggtaagggggcctgtgcccaaaaggggctcctccacctaatgctgtctttaatctgtggctttctgctgctggttaattttttaatttggcttcctcaagcctttttggccttgaacttcatgttgatttttatcaaagaactttttattggggcatcagcactagccctatgaatacagtgaaacttggggttccactttcatcagatgtgaccctgtgtgttcctgatgtctttgaatcactagtttctgattcaaaatatggggtaggtggatctgattagtagtcatatgcctgtgtcctggctaggaagtcagaatgaggttatctggaaagttgagcttcctcacacatgggaaggtacttcagatgctggacagccaataagaataacaaaggtccaccagaaccattgccccagtcactgattgaacaaacatttactgaacactgatgaagcgaagtcctcctcagggacctcttagggaagagggtaactgccctaaagcaggatactcctgggctccttagatatactatccttgaaactattaggcccctgtccagagtacctaataataataatggcaaatatgtatttggtggtctgccatttggaagcaacatctcacttattcaacaactctaaaggtaggtacttttatctccattttaaaacaatgaaatacacttacagttacagacaaacttgctcgagtcacatatctattaagtgtcagtcaagattcagattcaagtctgatgttaaagagtgtctgttcccaatcaatacctctgctgcctctttttacaaactgaactgttggagggcatgtacatatgcataagctgtgggccactgggccatgggccagtgtctgatgagacctctttattgacttgtttgtcctggtgggctgtttctctaccaggcaactgtgaatgggctcatcccttctctgtgcgtacatgattgaaaggagatagccggtttctgtgacatcctcttataacaacctagttttgttcttgagagtgaccagagcaagagaaaagtcaatgaaattttgcagatcttgcaaacctgtggcaataagaaggtattatcctttctgtaccaaggcacaactgattcctaagtgagggggatatgtgttctgagatgttaatgttagtgatagactgttttcaacaccttggtaaacatttcttttgactgttagcaaaagctgccttaacagtcttggcttttagaaatgccccttcattcattagatgtgtatggaacacatcttatgccaagcactctgctaggagctgggtatacagagaagaaaggcattcctgctctcatgatgttcatggtcttctgcggaagagaccagaaaaaaagtattacaatgtagaatgaaataagaatgacagggtattttggcagcaaggaggagggcactttaactcaaactgggcagtggaagaagtaaaaaaaaacattgaaagaaatcctgaaggataagcaggagttaagaagagtggatgaagccctccaagggtaaaagcatggtttattcagagcactgcaagtgttttagtatggcccacatgtaaagcttacagaggaacaaagagagaaaggcaagagccaggaagtgaagggtcctgtgtatactggcttacttgttgagttggagaactattgccgtattcctctgctaagctcagggtgcattcgtggaaaccctactgcaactggcccattgtgcatacaaagctggaactgagatgtgaacagatttgcattgccttgatcaccttccgtgggaaatatagctaggcccacttattggtaggagctactgacatgttaaaactaggttaaactgaattggaagtaatggtgtatttggaatcatggctgactgattccattacatgttctagcatgataccagtctgaggttattccccttgaaccaccgacttagtagagtttaatgcacaatgtgatggtcttagttccttgtactgttcttcagtgtcaaagttgttcaactaccagttaagttttttgggctttgtttctcagtagtgacaataaatttgtgttgatctatttacaccttttggactgaacaccttagcaatcattgatattttaagcctacaggaagtgcccatgggataaaaccaatctgctggctcacactaagttctgatcccatgattttggtctcattaataccgtgctataaataaagttagctaaatcttttgaaactgcataaaagtgaaataattatgagttttgggccaacatttttcctgaacagcttctgactgaccagcattttaaattaggcgatgcagtctagcttttgtacatagaaataagaaagtgacttatgttccattattaaaatagtatagggaggacaggtaaattactaatttttcattgctcatagtagagaattaaggtatattgactagtgaaatagaggattatggggatcatatgaaaatatgattaaagagattatcactagaagaaaaattcagactgctaattatgagaaaaaacatgtatgcacaaccaaacaaatcacaaaaatgaaagatgtctaaaaccatagaataggaacaaatgtacctgtcatattaataaaagtaaacttatctgtagataaaaggcaaaaatgtcagcaaacactaatttcatgttataagattcagaaaggttgagcaaaagtaaaccaagcaaacacaaacaagaaaatgagttgtagtctgcatatcaggcaaggttgaacttagggaaaaggaaccggaaaaaaaaaaaccaaaaaaaaccacgacataatgctaaagggtgtgactcacgagataatgtttctagatatctgtgtaccaaataatggaaaaccatttatgtattggaaaccataggagacacaggaagaaacaaatacaatgttagttggatattttaattcaattctgtcaattcatgacagatcaagtggataaaaaactaggacatgggatgatttaaataagatacagaagatctagttgatgcatattagactttaccctaaaagtggtaactacacttcaaagtatccatgaaacatttccccatttgactgtgtattagagcgtacagaaaacataagtttcagaacggaaaaaaggaacaacagatggcatttgctgataaaaatgcaata

SEQ ID NO: 135790 - DNA, 2123 bp, Homo sapiens
  Payload ID: 6545
  Gene Symbol: GPATCH3
  Gene Name: G patch domain containing 3
  Uniprot ID: Q96I76
  ENST ID: ENST00000361720
  CDS Start-End: 25-1602
tagctgatcatgtgacaatccaagatggcggtgcccggcgaggcggaggaggaggcgacagtttacctggtagtgagcggtatcccctccgtgttgcgctcggcccatttacggagctattttagccagttccgagaagagcgcggcggtggcttcctctgtttccactaccggcatcggcctgagcgggcccctccgcaggccgctcctaactctgccctaattcctaccgacccagccgctgagggccagcttctctctcagacttcggccaccgatgtccggcctctctccactcgagactctactccaatccagacccgcacctgctgctgcgtcatctcggtaagggggttggctcaagctcagaggcttattcgcatgtactcgggccgccggtggctggattctcacgggacttggctaccgggtcgctgtctcatccgcagacttcggctacctacggaggcatcaggtctgggctcctttcccttcaagacccggaaggaactgcagagttggaaggcagagaatgaagccttcaccctggctgacctgaagcaactgccggagctgaacccaccagtgctgatgcccagagggaatgtggggactcccctgcgggtctttttggagttgatccgggcctgccgcctaccccctcggatcatcacccagctgcagctccagttccccaagacaggttcctcccggcgctacggcaatgtgccttttgagtatgaggactcagagactgtggagcaggaagagcttgtgtatacagcagagggtgaagaaataccccaaggaacctacctggcagatataccagccagcccctgtggagagcctgaggaagaagtggggaaggaagaggaagaagagtctcactcagatgaggacgatgaccggggtgaggaatgggaacggcatgaagcgctgcatgaggacgtgaccgggcaggagcggaccactgagcagctctttgaggaggagattgagctcaagtgggagaagggtggctctggcctggtgttttatactgatgcccagttctggcaggaggaagaaggagattttgatgaacagacagccgatgactgggatgtggacatgagtgtgtactatgacagagatggtggagacaaggatgcccgagactctgtccaaatgcgtctggaacagagactccgagatggacaggaagatggctctgtgatcgaacgccaggtgggcacctttgagcgccacaccaagggcattgggcggaaggtgatggagcggcagggctgggctgagggccagggcctgggctgcaggtgctcaggggtgcctgaggccctggatagtgatggccaacaccccagatgcaagcgtggattggggtaccatggagagaagctacagccatttgggcaactgaagaggccccgtagaaatggcttggggctcatctccaccatctatgatgagcctctaccccaagaccagacggagtcactgctccgccgccagccacccaccagcatgaagtttcggacagacatggcctttgtgaggggttccagttgtgcttcagacagcccctcattgcctgactgaccgggttgggggcttcctttcatagctacatgatgaaaaccctctgccctggcctcatctaccactgaagcagaaaggagtctgggagcagcagtcttcgtggctggttcagggtgttttgttccgagcctgcctgcctgccggttctatacctcaggggcatttttacaaaaagccccctcccgtcccctccccttggatattaggggtaacgaccgcttgtctttggtctctaaccctaatctctgggcttgccctttgcctcctgcagaactttgaaaagctgggttgagtgaggctatcagcacagccttccttggggactctgaaggtgtccccacgaaggccagaaagggggaaagggacctgggcgaggagaggatttgtggtgcttggaagagccggccttgggtgggccctccaccgcctctaccctcactgggtgggactgccagcggagagtccgcgggaggtggcttgggtgtgcgacgtcacggaagaataaagacgtttactactgg

SEQ ID NO: 135791 - DNA, 546 bp, Homo sapiens
  Payload ID: 6545
  Gene Symbol: GPATCH3
  Gene Name: G patch domain containing 3
  ENST ID: ENST00000445019
  CDS Start-End: 1-230
attttgatgaacagacagccgatgactgggatgtggacatgagtgtgtactatgacagagatggtggagacaaggatgcccgagactctgtccaaatgcgtctggaacagagactccgagatggacaggaagatggctctgtgatcgaacgccaggtgggcacctttgagcgccacaccaagggcatttttacaaaaagccccctcccgtcccctccccttggatattaggggtaacgaccgcttgtctttggtctctaaccctaatctctgggcttgccctttgcctcctgcagaactttgaaaagctgggttgagtgaggctatcagcacagccttccttggggactctgaaggtgtccccacgaaggccagaaagggggaaagggacctgggcgaggagaggatttgtggtgcttggaagagccggccttgggtgggccctccaccgcctctaccctcactgggtgggactgccagcggagagtccgcgggaggtggcttgggtgtgcgacgtcacggaagaataaagacgtttactactgga

SEQ ID NO: 135792 - DNA, 521 bp, Homo sapiens
  Payload ID: 6545
  Gene Symbol: GPATCH3
  Gene Name: G patch domain containing 3
  ENST ID: ENST00000450844
  CDS Start-End: 137-521
attaaaatgaataagtcaatcttacgagggggtcctagaaacctgattcttcccccttctttgagagggacgcttccataaactgagctctgtttcctcagatggtggagacaaggatgcccgagactctgtccaaatgcgtctggaacagagactccgagatggacaggaagatggctctgtgatcgaacgccaggtgggcacctttgagcgccacaccaagggcattgggcggaaggtgatggagcggcagggctgggctgagggccagggcctgggctgcaggtgctcaggggtgcctgaggccctggatagtgatggccaacaccccagatgcaagcgtggattggggtaccatggagagaagctacagccatttgggcaactgaagaggccccgtagaaatggcttggggctcatctccaccatctatgatgagcctctaccccaagaccagacggagtcactgctccgccgccagccacccaccagcatgaagtttcggacagacatggcctttg

SEQ ID NO: 135793 - DNA, 1972 bp, Homo sapiens
  Payload ID: 6546
  Gene Symbol: GPATCH4
  Gene Name: G patch domain containing 4
  ENST ID: ENST00000368232
  CDS Start-End: 134-1246
cggcatttccgggaagatggcggcgcacaagtcaggtccggcacatgtttccgcggagcggacccagcaatgacggatgatatcacctcttcttctctggtgagagtctgaggatagagacttttttctcaccatgaatgtcaccccagaggtcaagagtcgtgggatgaagtttgctgaggagcagctgctaaagcatggatggactcaaggcaaaggcctcggccggaaggagaatggtatcactcaggctctcagggtgacactgaagcaagacactcatggggtaggacatgaccctgccaaggagttcacaaaccactggtggaatgagctcttcaacaagactgcggccaacttggtagtggaaactgggcaggatggagtacagataaggagcctttctaaggagaccacccgttataatcatcccaagcccaacttgctgtatcagaagtttgtgaagatggctacattgacttcaggtggagagaagccaaacaaagacttggagagctgcagtgatgacgacaaccaggggtccaagtccccaaagattctgactgatgagatgctgctccaagcctgtgaggggcgaacagcacacaaggctgcccgtcttgggatcacaatgaaggccaagcttgctcgcctagaggcccaggagcaggccttcctggctcgtctcaaaggccaggaccctggggcccctcaactgcagtcagagagcaagccccccaaaaaaaagaaaaagaaaaggaggcagaaagaggaggaagaagctacagcatctgaaaggaatgatgcagatgagaagcacccagaacatgctgagcagaacatcagaaaaagcaagaagaagaaaaggcgacatcaagaaggaaaggtctcagatgaaagagagggtacaactaaagggaatgagaaggaggacgctgcaggaacaagtgggcttggggaattgaatagcagagagcaaaccaatcagtccctcaggaaagggaagaaaaagaagaggtggcaccatgaagaggagaagatgggggtcttggaggaaggaggaaaaggcaaggaggctgcaggcagtgtcaggacagaggaggtagagagcagggcatatgctgacccatgcagccgaagaaagaagaggcagcaacaggaggaggaggacttgaacctagaagatagaggtgaggaaacttttaggtggtggaaccagggaagcagagagcagagcatgcagtgatggaagaagcaggaaaagcaagaagaaaagacagcagcatcaagaggaggaggacatcttggatgtaagggatgagaaggatggcggggctagggaagcagagagcagagcacacactggctcaagcagcagaggtaagaggaagaggcagcagcatcccaagaaggaaagagctggagtcagcactgtccagaaagccaaaaagaaacagaagaagagagactaaaggtctggtaaaggtagggctcaattgattgattttcaggagttgaagcctcaaagaccagggttgatgcaggtctgcaggtcttctgcacccccctcaatgaggagtccctcccagaaaggaaactgatctctgggacgtcagctgctgagaggagcaagcggtagtaccaccccttagttgagggagtcagcacagtcctttctgcagcttctaacccaggaccatgaactcaggtgcctagagaagccaggcagctaaaggacaaggaatgctgggggctgtgggaacaggaatgcagataccctttgaaggagcattcctgctaaaagaagctgaaaatgtagacctatgtgaagtgctctgatttctaaatattgtgaaggttaagaaaaacataaatttaggtctatgggctagatttagcccacagttgccagtttctagcgctaccaaatgaatgaataaacatgagcttgcgctcctagcctagagataaa

SEQ ID NO: 135794 - DNA, 1159 bp, Homo sapiens
  Payload ID: 6546
  Gene Symbol: GPATCH4
  Gene Name: G patch domain containing 4
  ENST ID: ENST00000438976
  CDS Start-End: 32-1159
aagatggcggcgcacaagtcaggtccggcacatgtttccgcggagcggacccagcaatgacgaggtcaagagtcgtgggatgaagtttgctgaggagcagctgctaaagcatggatggactcaaggcaaaggcctcggccggaaggagaatggtatcactcaggctctcagggtgacactgaagcaagacactcatggggtaggacatgaccctgccaaggagttcacaaaccactggtggaatgagctcttcaacaagactgcggccaacttggtagtggaaactgggcaggatggagtacagataaggagcctttctaaggagaccacccgttataatcatcccaagcccaacttgctgtatcagaagtttgtgaagatggctacattgacttcaggtggagagaagccaaacaaagacttggagagctgcagtgatgacgacaaccaggggtccaagtccccaaagattctgactgatgagatgctgctccaagcctgtgaggggcgaacagcacacaaggctgcccgtcttgggatcacaatgaaggccaagcttgctcgcctagaggcccaggagcaggccttcctggctcgtctcaaaggccaggaccctggggcccctcaactgcagtcagagagcaagccccccaaaaaaaagaaaaagaaaaggaggcagaaagaggaggaagaagctacagcatctgaaaggaatgatgcagatgagaagcacccagaacatgctgagcagaacatcagaaaaagcaagaagaagaaaaggcgacatcaagaaggaaaggtctcagatgaaagagagggtacaactaaagggaatgagaaggaggacgctgcaggaacaagtgggcttggggaattgaatagcagagagcaaaccaatcagtccctcaggaaagggaagaaaaagaagaggtggcaccatgaagaggagaagatgggggtcttggaggaaggaggaaaaggcaaggaggctgcaggcagtgtcaggacagaggaggtagagagcagggcatatgctgacccatgcagccgaagaaagaagaggcagcaacaggaggaggaggacttgaacctagaagatagaggtgaggaaacttttaggtggtggaaccagggaagcagagagcagagcatgcagtga

SEQ ID NO: 135795 - DNA, 934 bp, Homo sapiens
  Payload ID: 6546
  Gene Symbol: GPATCH4
  Gene Name: G patch domain containing 4
  ENST ID: ENST00000415314
  CDS Start-End: 141-934
aacaaaacggcatttccgggaagatggcggcgcacaagtcaggtccggcacatgtttccgcggagcggacccagcaatgacggatgatatcacctcttcttctctggtgagagtctgaggatagagacttttttctcaccatgaatgtcaccccagaggtcaagagtcgtgggatgaagtttgctgaggagcagctgctaaagcatggatggactcaaggcaaaggcctcggccggaaggagaatggtatcactcaggctctcagggtgacactgaagcaagacactcatggggtaggacatgaccctgccaaggagttcacaaaccactggtggaatgagctcttcaacaagactgcggccaacttggtagtggaaactgggcagatggctacattgacttcaggtggagagaagccaaacaaagacttggagagctgcagtgatgacgacaaccaggggtccaagtccccaaagattctgactgatgagatgctgctccaagcctgtgaggggcgaacagcacacaaggctgcccgtcttgggatcacaatgaaggccaagcttgctcgcctagaggcccaggagcaggccttcctggctcgtctcaaaggccaggaccctggggcccctcaactgcagtcagagagcaagccccccaaaaaaaagaaaaagaaaaggaggcagaaagaggaggaagaagctacagcatctgaaaggaatgatgcagatgagaagcacccagaacatgctgagcagaacatcagaaaaagcaagaagaagaaaaggcgacatcaagaaggaaaggtctcagatgaaagagagggtacaactaaagggaatgagaaggaggacgctgcaggaacaagtgggcttggggaattgaatagcagagagcaaaccaatcagtccctcaggaaagggaagaaaaagaa

SEQ ID NO: 135796 - DNA, 857 bp, Homo sapiens
  Payload ID: 6546
  Gene Symbol: GPATCH4
  Gene Name: G patch domain containing 4
  ENST ID: ENST00000463513
  CDS Start-End: 113-472
ggcgcacaagtcaggtccggcacatgtttccgcggagcggacccagcaatgacggatgatatcacctcttcttctctggtgagagtctgaggatagagacttttttctcaccatgaatgtcaccccagaggtcaagagtcgtgggatgaagtttgctgaggagcagctgctaaagcatggatggactcaaggcaaaggcctcggccggaaggagaatggtatcactcaggctctcagggtgacactgaagcaagacactcatggggtaggacatgaccctgccaaggagttcacaaaccactggtggaatgagctcttcaacaagactgcggccaacttggtagtggaaactgggcaggatggagtacagataaggagcctttctaaggagaccacccgttataatcatcccaagcccaacttgctgtatcagaagtttgtgaagactgcccagaccctcagcaggaattgagatcttcaggttccgtggatcctgccatctgttaagggagcagcaatagggcgtgggagatggctacattgacttcaggtggagagaagccaaacaaagacttggagagctgcagtgatgacgacaaccaggggtccaagtccccaaagattctgactgatgagatgctgctccaagcctgtgaggggcgaacagcacacaaggctgcccgtcttgggatcacaatgaaggccaagcttgctcgcctagaggcccaggagcaggccttcctggctcgtctcaaaggccaggaccctggggcccctcaactgcagtcagagagcaagccccccaaaaaaaagaaaaagaaaaggaggcagaaagaggaggaagaagctacagcatc

SEQ ID NO: 135797 - DNA, 719 bp, Homo sapiens
  Payload ID: 6546
  Gene Symbol: GPATCH4
  Gene Name: G patch domain containing 4
  ENST ID: ENST00000474904
  CDS Start-End: 121-552
aagatggcggcgcacaagtcaggtccggcacatgtttccgcggagcggacccagcaatgacggatgatatcacctcttcttctctggtgagagtctgaggatagagacttttttctcaccatgaatgtcaccccagaggtcaagagtcgtgggatgaagtttgctgaggagcagctgctaaagcatggatggactcaaggcaaaggcctcggccggaaggagaatggtatcactcaggctctcagggtgacactgaagcaagacactcatggggtaggacatgaccctgccaaggagttcacaaaccactggtggaatgagctcttcaacaagactgcggccaacttggtagtggaaactgggcaggatggagtacagataaggagcctttctaaggagaccacccgttataatcatcccaagcccaacttgctgtatcagaagtttgtgaagtgggatcctgtgaccagccttgctgttgcttacttagactgcccagaccctcagcaggaattgagatcttcaggttccgtggatcctgccatctgttaagggagcagcaatagggcgtgggagatggctacattgacttcaggtggagagaagccaaacaaagacttggagagctgcagtgatgacgacaaccaggggtccaagtccccaaagattctgactgatgagatgctgctccaagcctgtgaggggcgaacagcacacaa

SEQ ID NO: 135798 - DNA, 457 bp, Homo sapiens
  Payload ID: 6547
  Gene Symbol: GPATCH8
  Gene Name: G patch domain containing 8
  ENST ID: ENST00000592746
  CDS Start-End: 34-174
gagcgtcgtcctgagaggagtgaaggcggcaaaatggcggaccgcttctcccgcttcaacgaagaccgagactttcagggtaatcactttgatcagtatgaggaaggacacttggaaattgaacaagcgtcacttgacaagcctatagaatcgcagttggcccatattagctaagcagccatgatctggataatattggacaccgcttactccagaaacatgggtggaagctgggccagggattgggaaaatctcttcaggcattatgatcctggacttgttgtggtgatggtaatcttagcagtgggagaacagatcccattccaatcgttgtcaagtatgatgtcatgggcatgggtcgcatggaaatggagcttgattatgctgaagatgctaccgaacggcgccgtgtcctagaagtagaaaaagaagacacagaagagctgagacaaaagta

SEQ ID NO: 135799 - DNA, 686 bp, Homo sapiens
  Payload ID: 6547
  Gene Symbol: GPATCH8
  Gene Name: G patch domain containing 8
  ENST ID: ENST00000585614
  CDS Start-End: 22-686
gagaggagtgaaggcggcaaaatggcggaccgcttctcccgcttcaacgaagaccgagactttcaggataatattggacaccgcttactccagaaacatgggtggaagctgggccagggattgggaaaatctcttcaggggagaacagatcccattccaatcgttgtcaagtatgatgtcatgggcatgggtcgcatggaaatggagcttgattatgctgaagatgctaccgaacggcgccgtgtcctagaagtagaaaaagaagacacagaagagctgagacaaaagtacaaggattatgttgacaaagagaaggcaattgccaaagccttggaagacctcagagccaacttttattgtgaactgtgtgataagcaatatcagaaacatcaggaatttgataaccatatcaactcctatgatcatgcacacaagcagagattaaaagatctgaagcagagagagtttgctcgaaatgtctcttcaagatcccgcaaggatgagaaaaaacaggaaaaagcccttcggcggctccatgagttggcagagcaaagaaaacaagctgaatgtgcacctggaagtggtcccatgttcaaaccaaccacagtggctgtagatgaagaaggtggagaagatgataaagatgaatcagctacaaatagtggcacaggtgccactgcttcttg

SEQ ID NO: 135800 - DNA, 829 bp, Homo sapiens
  Payload ID: 6547
  Gene Symbol: GPATCH8
  Gene Name: G patch domain containing 8
  ENST ID: ENST00000590041
  CDS Start-End: 20-160
gaggagtgaaggcggcaaaatggcggaccgcttctcccgcttcaacgaagaccgagactttcagggtaatcactttgatcagtatgaggaaggacacttggaaattgaacaagcgtcacttgacaagcctatagaatcgcagttggcccatattagctaagcagccatgatctgtgaattgaaaacaagacaaaaaaaaaaacgaccattagtgattggacagtttcttactttgtgttacatttaactgttcttttgacagcccagtttttaaagccaggataatattggacaccgcttactccagaaacatgggtggaagctgggccagggattgggaaaatctcttcaggggagaacagatcccattccaatcgttgtcaagtatgatgtcatgggcatgggtcgcatggaaatggagcttgattatgctgaagatgctaccgaacggcgccgtgtcctagaagtagaaaaagaagacacagaagagctgagacaaaagtacaaggattatgttgacaaagagaaggcaattgccaaagccttggaagacctcagagccaacttttattgtgaactgtgtgataagcaatatcagaaacatcaggaatttgataaccatatcaactcctatgatcatgcacacaagcagagattaaaagatctgaagcagagagagtttgctcgaaatgtctcttcaagatcccgcaaggatgagaaaaaacaggaaaaagcccttcggcggctccatgagttggcagagcaaagaaaacaagctgaatgtgcacctggaagtggtcccatgttcaaaccaaccacagtggctgta

SEQ ID NO: 135801 - DNA, 4692 bp, Homo sapiens
  Payload ID: 6547
  Gene Symbol: GPATCH8
  Gene Name: G patch domain containing 8
  Uniprot ID: Q9UKJ3
  ENST ID: ENST00000591680
  CDS Start-End: 32-4540
gcgtcgtcctgagaggagtgaaggcggcaaaatggcggaccgcttctcccgcttcaacgaagaccgagactttcagggtaatcactttgatcagtatgaggaaggacacttggaaattgaacaagcgtcacttgacaagcctatagaatcggataatattggacaccgcttactccagaaacatgggtggaagctgggccagggattgggaaaatctcttcaggggagaacagatcccattccaatcgttgtcaagtatgatgtcatgggcatgggtcgcatggaaatggagcttgattatgctgaagatgctaccgaacggcgccgtgtcctagaagtagaaaaagaagacacagaagagctgagacaaaagtacaaggattatgttgacaaagagaaggcaattgccaaagccttggaagacctcagagccaacttttattgtgaactgtgtgataagcaatatcagaaacatcaggaatttgataaccatatcaactcctatgatcatgcacacaagcagagattaaaagatctgaagcagagagagtttgctcgaaatgtctcttcaagatcccgcaaggatgagaaaaaacaggaaaaagcccttcggcggctccatgagttggcagagcaaagaaaacaagctgaatgtgcacctggaagtggtcccatgttcaaaccaaccacagtggctgtagatgaagaaggtggagaagatgataaagatgaatcagctacaaatagtggcacaggtgccactgcttcttgtggcctgggatctgaattctccacagataaaggaggccctttcactgcagtacaaatcactaataccactggactggcccaggctcctgggttagcctcccaaggcatcagctttggcattaagaataatctggggaccccattgcaaaaattgggagtgtcattttcttttgccaaaaaggctcctgtcaaactcgaatcaatagcatcagttttcaaggaccatgcggaggaagggacctctgaagatggaacaaaacccgatgagaagagttctgaccaaggactgcagaaggtaggagactctgatgggagcagtaatcttgatggtaaaaaagaggatgaagaccctcaggatggagggtcccttgcctcaacattatccaaattaaaaaggatgaaacgagaagaaggagctggggctacagagcctgagtattaccactacatccccccagcacactgcaaagtaaaacctaattttccctttctactttttatgagagccagtgaacaaatggatggtgataatactacacacccaaagaatgccccagagagtaaaaaaggcagttctcccaagcctaaaagctgcatcaaggcggcagcaagccaaggagcagaaaagacagttagtgaagtctctgagcagccgaaggaaaccagcatgaccgagccctcagaaccaggaagcaaagctgaggcaaagaaggccttaggaggggatgtaagtgatcagagtttagaaagtcatagtcagaaggtttcagagacccaaatgtgtgagtccaactcttctaaagaaacctctctggccaccccagcagggaaagaaagccaagaaggacccaaacatcctactggtcccttcttcccagttttgagcaaagatgaaagcactgccctccagtggccatcagaactattaattttcaccaaggcagaaccctccatttcatacagttgtaaccctttatattttgactttaaactttcaaggaacaaagatgccagaactaaaggaacagaaaaaccaaaggatataggaagctcctcaaaggaccatctccaaggcctagatcctggtgagccaaataaaagcaaggaagtgggcggagagaaaatagtacgttcctcaggaggcagaatggacgcacctgcttcagggtctgcctgtagcggcctgaacaagcaggagcctgggggtagccatgggtctgagacagaagacacagggagaagccttcccagcaagaaagaacgatctgggaagtcccaccggcacaaaaagaaaaagaagcacaaaaaatccagcaaacacaaacgtaaacacaaggctgacacagaagagaaaagctctaaggcagagtcaggggagaaatctaagaagcgcaagaaacgaaaacgaaagaagaataagtcatcagccccagcagattctgaacgaggacccaaaccagaaccccctgggagtggcagtcccgcaccaccaagaagaaggcggagagctcaagatgactcccagcggagatccctcccagctgaagaggggagcagtggcaaaaaggatgaaggtgggggtggtagcagctcccaagaccatggtgggaggaaacacaaaggtgaacttccaccttcatcctgccagcgaagagcaggcaccaaacggagcagccggtctagccatcggagccaacccagtagtggagatgaggatagtgatgatgcttcctcacaccggctgcaccagaagtctccatcccagtacagtgaggaagaagaagaggaagattcaggcagtgagcattcccgcagccgctcaaggtctggccggcgccattcctcgcatcgttcctcccggcgttcttactcaagtagctcagatgcctcttcagaccagagctgctatagtagacagcgcagttactctgatgacagctacagtgactacagtgacagatcacgaaggcactccaagcgctcccatgactcagatgactcagactatgccagctccaaacaccgatcaaaacggcacaaatattcatcttctgatgatgactatagcctcagttgcagccagtcccgaagccgatctcggagtcataccagagagcgctcaagatcccggggccgcagccgcagcagcagttgtagtcgtagtcgaagcaagcggagaagccgtagcaccacagcccacagctggcaacggagccggagctatagccgggaccgcagccgcagcaccaggagcccttcccagagatcaggctccaggaagagatcatggggtcacgagagccctgaggagaggcattctgggcgtcgggacttcattcgttctaagatctaccgctcccagtccccccactatttccgatcaggccggggagaaggtcctgggaagaaagatgatggcagaggagatgacagtaaagcaacaggtccaccttcccagaacagcaacattggcacaggaagagggtcagaaggtgactgcagtcctgaagacaagaactctgtcactgccaaactgctactggagaagatccagtcaaggaaagtggagaggaaacctagtgtgagtgaggaggtgcaggccacccctaataaagctgggcccaagctcaaggaccccccacaaggttactttgggcccaagctccccccatctcttggcaataagcctgtccttccactgatagggaagctcccagctacccgaaagcccaataagaagtgtgaagagtctggcttggaaaggggggaagagcaagaacagtcagagacagaagaggggcccccagggagtagtgatgccctatttgggcatcagttcccttcagaggaaacaactggccccttattagacccacccccagaagagtcaaagtctggagaagctactgctgatcaccctgtggctccactaggcaccccagcacattctgactgctaccctggggacccaaccatctcccataactacctccccgaccccagtgatggggacaccctggagtccctggatagcagcagtcagccaggccctgtggagtccagcttgctgcctatagcaccagaccttgagcatttccccagttatgcacctcccagtggggatcctagtattgagtcaacagatggggctgaggatgcttcactggcccccctggaaagccagcccatcaccttcacccctgaggagatggagaagtacagcaagctccagcaggctgctcagcaacacatccagcagcagcttctggccaagcaagtaaaggcctttccagcctcagctgccctggccccagccacaccagccctgcaacccatccacattcagcagccagctacagcctctgccacctccatcacaactgttcagcatgccatcctacaacatcatgctgccgcagctgctgccgccatcggcattcaccctcacccccatccccaaccacttgcccaggtgcatcatattccccagccccatctgacccccatttctttgtcccacctcactcactcaatcatccctggccaccctgccacctttctcgctagccatcccatccacatcattcccgcctcagccatccatcctgggcccttcacctttcaccctgtcccacatgctgccctctaccccaccctacttgctccacggcctgctgcagcagctgccactgcacttcaccttcacccactacttcaccccatcttctcaggtcaggacctgcaacatccccccagccatggcacgtgagttgggggatgggatcctaggtagggccaggggaggagacccataaatgttcccttgggggtgttgagccattaataccagcaagtagaagctgggatgggcagtgtctgacagccaaagaattgagttttggcttgcaggggtgggtttag

SEQ ID NO: 135802 - DNA, 4713 bp, Homo sapiens
  Payload ID: 6547
  Gene Symbol: GPATCH8
  Gene Name: G patch domain containing 8
  Uniprot ID: Q9UKJ3
  ENST ID: ENST00000587228
  CDS Start-End: 35-166
agagcgtcgtcctgagaggagtgaaggcggcaaaatggcggaccgcttctcccgcttcaacgaagaccgagactttcagggtaatcactttgatcagtatgaggaaggacacttggaaattgaacaagcgtcacttgacaagcctatagaatcgcccagtttttaaagccaggataatattggacaccgcttactccagaaacatgggtggaagctgggccagggattgggaaaatctcttcaggggagaacagatcccattccaatcgttgtcaagtatgatgtcatgggcatgggtcgcatggaaatggagcttgattatgctgaagatgctaccgaacggcgccgtgtcctagaagtagaaaaagaagacacagaagagctgagacaaaagtacaaggattatgttgacaaagagaaggcaattgccaaagccttggaagacctcagagccaacttttattgtgaactgtgtgataagcaatatcagaaacatcaggaatttgataaccatatcaactcctatgatcatgcacacaagcagagattaaaagatctgaagcagagagagtttgctcgaaatgtctcttcaagatcccgcaaggatgagaaaaaacaggaaaaagcccttcggcggctccatgagttggcagagcaaagaaaacaagctgaatgtgcacctggaagtggtcccatgttcaaaccaaccacagtggctgtagatgaagaaggtggagaagatgataaagatgaatcagctacaaatagtggcacaggtgccactgcttcttgtggcctgggatctgaattctccacagataaaggaggccctttcactgcagtacaaatcactaataccactggactggcccaggctcctgggttagcctcccaaggcatcagctttggcattaagaataatctggggaccccattgcaaaaattgggagtgtcattttcttttgccaaaaaggctcctgtcaaactcgaatcaatagcatcagttttcaaggaccatgcggaggaagggacctctgaagatggaacaaaacccgatgagaagagttctgaccaaggactgcagaaggtaggagactctgatgggagcagtaatcttgatggtaaaaaagaggatgaagaccctcaggatggagggtcccttgcctcaacattatccaaattaaaaaggatgaaacgagaagaaggagctggggctacagagcctgagtattaccactacatccccccagcacactgcaaagtaaaacctaattttccctttctactttttatgagagccagtgaacaaatggatggtgataatactacacacccaaagaatgccccagagagtaaaaaaggcagttctcccaagcctaaaagctgcatcaaggcggcagcaagccaaggagcagaaaagacagttagtgaagtctctgagcagccgaaggaaaccagcatgaccgagccctcagaaccaggaagcaaagctgaggcaaagaaggccttaggaggggatgtaagtgatcagagtttagaaagtcatagtcagaaggtttcagagacccaaatgtgtgagtccaactcttctaaagaaacctctctggccaccccagcagggaaagaaagccaagaaggacccaaacatcctactggtcccttcttcccagttttgagcaaagatgaaagcactgccctccagtggccatcagaactattaattttcaccaaggcagaaccctccatttcatacagttgtaaccctttatattttgactttaaactttcaaggaacaaagatgccagaactaaaggaacagaaaaaccaaaggatataggaagctcctcaaaggaccatctccaaggcctagatcctggtgagccaaataaaagcaaggaagtgggcggagagaaaatagtacgttcctcaggaggcagaatggacgcacctgcttcagggtctgcctgtagcggcctgaacaagcaggagcctgggggtagccatgggtctgagacagaagacacagggagaagccttcccagcaagaaagaacgatctgggaagtcccaccggcacaaaaagaaaaagaagcacaaaaaatccagcaaacacaaacgtaaacacaaggctgacacagaagagaaaagctctaaggcagagtcaggggagaaatctaagaagcgcaagaaacgaaaacgaaagaagaataagtcatcagccccagcagattctgaacgaggacccaaaccagaaccccctgggagtggcagtcccgcaccaccaagaagaaggcggagagctcaagatgactcccagcggagatccctcccagctgaagaggggagcagtggcaaaaaggatgaaggtgggggtggtagcagctcccaagaccatggtgggaggaaacacaaaggtgaacttccaccttcatcctgccagcgaagagcaggcaccaaacggagcagccggtctagccatcggagccaacccagtagtggagatgaggatagtgatgatgcttcctcacaccggctgcaccagaagtctccatcccagtacagtgaggaagaagaagaggaagattcaggcagtgagcattcccgcagccgctcaaggtctggccggcgccattcctcgcatcgttcctcccggcgttcttactcaagtagctcagatgcctcttcagaccagagctgctatagtagacagcgcagttactctgatgacagctacagtgactacagtgacagatcacgaaggcactccaagcgctcccatgactcagatgactcagactatgccagctccaaacaccgatcaaaacggcacaaatattcatcttctgatgatgactatagcctcagttgcagccagtcccgaagccgatctcggagtcataccagagagcgctcaagatcccggggccgcagccgcagcagcagttgtagtcgtagtcgaagcaagcggagaagccgtagcaccacagcccacagctggcaacggagccggagctatagccgggaccgcagccgcagcaccaggagcccttcccagagatcaggctccaggaagagatcatggggtcacgagagccctgaggagaggcattctgggcgtcgggacttcattcgttctaagatctaccgctcccagtccccccactatttccgatcaggccggggagaaggtcctgggaagaaagatgatggcagaggagatgacagtaaagcaacaggtccaccttcccagaacagcaacattggcacaggaagagggtcagaaggtgactgcagtcctgaagacaagaactctgtcactgccaaactgctactggagaagatccagtcaaggaaagtggagaggaaacctagtgtgagtgaggaggtgcaggccacccctaataaagctgggcccaagctcaaggaccccccacaaggttactttgggcccaagctccccccatctcttggcaataagcctgtccttccactgatagggaagctcccagctacccgaaagcccaataagaagtgtgaagagtctggcttggaaaggggggaagagcaagaacagtcagagacagaagaggggcccccagggagtagtgatgccctatttgggcatcagttcccttcagaggaaacaactggccccttattagacccacccccagaagagtcaaagtctggagaagctactgctgatcaccctgtggctccactaggcaccccagcacattctgactgctaccctggggacccaaccatctcccataactacctccccgaccccagtgatggggacaccctggagtccctggatagcagcagtcagccaggccctgtggagtccagcttgctgcctatagcaccagaccttgagcatttccccagttatgcacctcccagtggggatcctagtattgagtcaacagatggggctgaggatgcttcactggcccccctggaaagccagcccatcaccttcacccctgaggagatggagaagtacagcaagctccagcaggctgctcagcaacacatccagcagcagcttctggccaagcaagtaaaggcctttccagcctcagctgccctggccccagccacaccagccctgcaacccatccacattcagcagccagctacagcctctgccacctccatcacaactgttcagcatgccatcctacaacatcatgctgccgcagctgctgccgccatcggcattcaccctcacccccatccccaaccacttgcccaggtgcatcatattccccagccccatctgacccccatttctttgtcccacctcactcactcaatcatccctggccaccctgccacctttctcgctagccatcccatccacatcattcccgcctcagccatccatcctgggcccttcacctttcaccctgtcccacatgctgccctctaccccaccctacttgctccacggcctgctgcagcagctgccactgcacttcaccttcacccactacttcaccccatcttctcaggtcaggacctgcaacatccccccagccatggcacgtgagttgggggatgggatcctaggtagggccaggggaggagacccataaatgttcccttgggggtgttgagccattaataccagcaagtagaagctgggatgggcagtgtctgacagccaaagaattgagttttggcttgcaggggtgggtttag

SEQ ID NO: 135803 - DNA, 345 bp, Homo sapiens
  Payload ID: 6547
  Gene Symbol: GPATCH8
  Gene Name: G patch domain containing 8
  ENST ID: ENST00000586037
  CDS Start-End: 34-174
gagcgtcgtcctgagaggagtgaaggcggcaaaatggcggaccgcttctcccgcttcaacgaagaccgagactttcagggtaatcactttgatcagtatgaggaaggacacttggaaattgaacaagcgtcacttgacaagcctatagaatcgcagttggcccatattagctaagcagccatgatctggataatattggacaccgcttactccagaaacatgggtggaagctgggccagggattgggaaaatctcttcaggcattatgatcctggacttgttgtggtgatggtaatcttagcagtgggagaacagatcccattccaatcgttgtcaagtatgatg

SEQ ID NO: 135804 - DNA, 1842 bp, Homo sapiens
  Payload ID: 6548
  Gene Symbol: GPS1
  Gene Name: G protein pathway suppressor 1
  Uniprot ID: Q13098
  ENST ID: ENST00000306823
  CDS Start-End: 24-1499
cgccgcggcggggtgggtgcaagatgccgctgccggttcaggtgtttaacttgcagggggccgtggagcccatgcagatcgacgtggacccccaggaagacccgcagaatgcacctgacgtcaactacgtggtggagaaccccagcctggatctggaacagtacgcggccagctacagcggcctgatgcgcatcgaacggctgcagttcattgctgatcactgccccacgctgcgggtggaggccctgaagatggccctctccttcgtgcagagaacctttaacgtggacatgtacgaggagatccaccgcaagctctcagaggccaccaggtcctctctcagggagctgcagaacgcacccgacgccatccctgagagcggcgtggagcccccagccctggacacggcctgggtggaggccacgcggaagaaggcgctgctgaagctggagaagctggacacagacctgaagaactacaagggcaactccatcaaagagagcatccggcgcggccacgacgacctgggcgaccactacctggactgtggggacctcagcaacgccctcaagtgctattcccgggcccgggactactgcaccagcgccaaacacgtcatcaacatgtgcctcaatgtcatcaaggtcagcgtctacttgcagaattggtctcatgtgctcagctacgtcagcaaggctgagtccaccccagagattgccgagcagcgaggagagcgtgacagccagacccaggccatcctcaccaagctcaagtgtgccgcaggcttggcagagctggccgccaggaagtacaagcaggctgccaagtgcctcctgctggcttcctttgatcactgtgacttccctgagctgctgtcccccagcaacgtggccatctacggtggcctgtgcgccttggctacctttgaccggcaggagctgcagcgcaatgtcatctccagcagctccttcaagttgttcttggagctggagccacaggtccgagacatcatcttcaaattctacgagtccaagtacgcctcatgtctcaagatgctggacgagatgaaggacaacctgctcctggacatgtatctggccccccatgtcaggaccctgtacacccagattcgcaaccgtgccctcatccagtatttcagcccctacgtgtcagccgacatgcataggatggcggcagccttcaataccacggtggccgccctggaggacgagctgacgcagctaatcctggaggggctgatcagtgcccgtgtggactcacacagcaagatcctatacgcccgggacgtggatcagcgcagcaccacctttgagaagtctctgttgatgggcaaggagttccagcgccgcgccaaggccatgatgctgcgggcagctgtgctccgcaaccagatccatgtcaagtccccgcccagagaagggagccagggggagctgactccagccaacagccagtcccggatgagcaccaacatgtgaggggtgaaccttggcctccaggacatctgcaccccctccccacctccacggacctcggacctccaggcggctcagtgctgcctgcggcccagctaaggggcctggccactgggtgccacccagcctgtgtgccctccctggggctgaggaggcaggcggctgctagttgtggcccttcctggaaggagaggcctgcagggctcgaccctgtgggtttctgtccccagggagcagactgtgcggcacccaggcccagtggcaccatttcccagacccctcctgttcccgcctcagtcaggtgcagacaagtgggcggtgtccattaaagagcagactcagcgtt

SEQ ID NO: 135805 - DNA, 1949 bp, Homo sapiens
  Payload ID: 6548
  Gene Symbol: GPS1
  Gene Name: G protein pathway suppressor 1
  ENST ID: ENST00000320548
  CDS Start-End: 191-1606
agcgacggcttcgctgccccggaagtggacggcacgccgcggcggggtgggtgcaagatgccgctgccggttcaggtgtttaacttgcagcagtaggtcagacctcgtcctgcccggcacggccggggacttcagcctgagcgccagcctgtcggcctgtacgctgctctacgagggggccgtggagcccatgcagatcgacgtggacccccaggaagacccgcagaatgcacctgacgtcaactacgtggtggagaaccccagcctggatctggaacagtacgcggccagctacagcggcctgatgcgcatcgaacggctgcagttcattgctgatcactgccccacgctgcgggtggaggccctgaagatggccctctccttcgtgcagagaacctttaacgtggacatgtacgaggagatccaccgcaagctctcagaggccaccagggagctgcagaacgcacccgacgccatccctgagagcggcgtggagcccccagccctggacacggcctgggtggaggccacgcggaagaaggcgctgctgaagctggagaagctggacacagacctgaagaactacaagggcaactccatcaaagagagcatccggcgcggccacgacgacctgggcgaccactacctggactgtggggacctcagcaacgccctcaagtgctattcccgggcccgggactactgcaccagcgccaaacacgtcatcaacatgtgcctcaatgtcatcaaggtcagcgtctacttgcagaattggtctcatgtgctcagctacgtcagcaaggctgagtccaccccagagattgccgagcagcgaggagagcgtgacagccagacccaggccatcctcaccaagctcaagtgtgccgcaggcttggcagagctggccgccaggaagtacaagcaggctgccaagtgcctcctgctggcttcctttgatcactgtgacttccctgagctgctgtcccccagcaacgtggccatctacggtggcctgtgcgccttggctacctttgaccggcaggagctgcagcgcaatgtcatctccagcagctccttcaagttgttcttggagctggagccacaggtccgagacatcatcttcaaattctacgagtccaagtacgcctcatgtctcaagatgctggacgagatgaaggacaacctgctcctggacatgtatctggccccccatgtcaggaccctgtacacccagattcgcaaccgtgccctcatccagtatttcagcccctacgtgtcagccgacatgcataggatggcggcagccttcaataccacggtggccgccctggaggacgagctgacgcagctaatcctggaggggctgatcagtgcccgtgtggactcacacagcaagatcctatacgcccgggacgtggatcagcgcagcaccacctttgagaagtctctgttgatgggcaaggagttccagcgccgcgccaaggccatgatgctgcgggcagctgtgctccgcaaccagatccatgtcaagtccccgcccagagaagggagccagggggagctgactccagccaacagccagtcccggatgagcaccaacatgtgaggggtgaaccttggcctccaggacatctgcaccccctccccacctccacggacctcggacctccaggcggctcagtgctgcctgcggcccagctaaggggcctggccactgggtgccacccagcctgtgtgccctccctggggctgaggaggcaggcggctgctagttgtggcccttcctggaaggagaggcctgcagggctcgaccctgtgggtttctgtccccagggagcagactgtgcggcacccaggcccagtggcaccatttcccagacccctcctgttcccgcctcagtcaggtgcagacaagtgggcggtgtccattaaagagcagactcagcgtt

SEQ ID NO: 135806 - DNA, 2276 bp, Homo sapiens
  Payload ID: 6548
  Gene Symbol: GPS1
  Gene Name: G protein pathway suppressor 1
  Uniprot ID: Q13098
  ENST ID: ENST00000392358
  CDS Start-End: 350-1933
cttgcaggtaacgagccgaggccgccccgggcctccgcgcccccgcgccccccgccactggggccgggctgaggtcgagcaggggcgcggggcctgcgccaggagtcggtcgggcacgctccgtgccgggcctccgcgggcagcgcgcgtcgggggctgcagggccgagggcgcgtctccgccgtggctgcgcgctgcgatcgggggccgccgggccgcgcccgccccgcctcccctcccagcagctcacgggagaggttcccggccgccccgacgctaacgctctttctcccttcagcagccagccagctctgtgtcagggtcggggggtgcagaaagtcaggacagaatgagggatagctcggcccccagctcggcctcctcgtcagtgacagatctgtactgcacccctcacagcagtaggtcagacctcgtcctgcccggcacggccggggacttcagcctgagcgccagcctgtcggcctgtacgctgctctacgagggggccgtggagcccatgcagatcgacgtggacccccaggaagacccgcagaatgcacctgacgtcaactacgtggtggagaaccccagcctggatctggaacagtacgcggccagctacagcggcctgatgcgcatcgaacggctgcagttcattgctgatcactgccccacgctgcgggtggaggccctgaagatggccctctccttcgtgcagagaacctttaacgtggacatgtacgaggagatccaccgcaagctctcagaggccaccagggagctgcagaacgcacccgacgccatccctgagagcggcgtggagcccccagccctggacacggcctgggtggaggccacgcggaagaaggcgctgctgaagctggagaagctggacacagacctgaagaactacaagggcaactccatcaaagagagcatccggcgcggccacgacgacctgggcgaccactacctggactgtggggacctcagcaacgccctcaagtgctattcccgggcccgggactactgcaccagcgccaaacacgtcatcaacatgtgcctcaatgtcatcaaggtcagcgtctacttgcagaattggtctcatgtgctcagctacgtcagcaaggctgagtccaccccagagattgccgagcagcgaggagagcgtgacagccagacccaggccatcctcaccaagctcaagtgtgccgcaggcttggcagagctggccgccaggaagtacaagcaggctgccaagtgcctcctgctggcttcctttgatcactgtgacttccctgagctgctgtcccccagcaacgtggccatctacggtggcctgtgcgccttggctacctttgaccggcaggagctgcagcgcaatgtcatctccagcagctccttcaagttgttcttggagctggagccacaggtccgagacatcatcttcaaattctacgagtccaagtacgcctcatgtctcaagatgctggacgagatgaaggacaacctgctcctggacatgtatctggccccccatgtcaggaccctgtacacccagattcgcaaccgtgccctcatccagtatttcagcccctacgtgtcagccgacatgcataggatggcggcagccttcaataccacggtggccgccctggaggacgagctgacgcagctaatcctggaggggctgatcagtgcccgtgtggactcacacagcaagatcctatacgcccgggacgtggatcagcgcagcaccacctttgagaagtctctgttgatgggcaaggagttccagcgccgcgccaaggccatgatgctgcgggcagctgtgctccgcaaccagatccatgtcaagtccccgcccagagaagggagccagggggagctgactccagccaacagccagtcccggatgagcaccaacatgtgaggggtgaaccttggcctccaggacatctgcaccccctccccacctccacggacctcggacctccaggcggctcagtgctgcctgcggcccagctaaggggcctggccactgggtgccacccagcctgtgtgccctccctggggctgaggaggcaggcggctgctagttgtggcccttcctggaaggagaggcctgcagggctcgaccctgtgggtttctgtccccagggagcagactgtgcggcacccaggcccagtggcaccatttcccagacccctcctgttcccgcctcagtcaggtgcagacaagtgggcggtgtccattaaagagcagactcagcgtt

SEQ ID NO: 135807 - DNA, 594 bp, Homo sapiens
  Payload ID: 6548
  Gene Symbol: GPS1
  Gene Name: G protein pathway suppressor 1
  ENST ID: ENST00000583885
  CDS Start-End: 36-594
aagtggacggcacgccgcggcggggtgggtgcaagatgccgctgccggttcaggtgtttaacttgcagccagccagctctgtgtcagggtcggggggtgcagaaagtcaggacagaatgagggatagctcggcccccagctcggcctcctcgtcagtgacagatctgtactgcacccctcacagcagtaggtcagacctcgtcctgcccggcacggccggggacttcagcctgagcgccagcctgtcggcctgtacgctgctctacgagggggccgtggagcccatgcagatcgacgtggacccccaggaagacccgcagaatgcacctgacgtcaactacgtggtggagaaccccagcctggatctggaacagtacgcggccagctacagcggcctgatgcgcatcgaacggctgcagttcattgctgatcactgccccacgctgcgggtggaggccctgaagatggccctctccttcgtgcagagaacctttaacgtggacatgtacgaggagatccaccgcaagctctcagaggccaccagggagctgcagaacgcacccgacgccatccctgagagcggcgtggagcccc

SEQ ID NO: 135808 - DNA, 795 bp, Homo sapiens
  Payload ID: 6548
  Gene Symbol: GPS1
  Gene Name: G protein pathway suppressor 1
  ENST ID: ENST00000583641
  CDS Start-End: 36-795
aagtggacggcacgccgcggcggggtgggtgcaagatgccgctgccggttcaggtgtttaacttgcagcagccagccagctctgtgtcagggtcggggggtgcagaaagtcaggacagaatgagggatagctcggcccccagctcggcctcctcgtcagtgacagatctgtactgcacccctcacagcagtaggtcagacctcgtcctgcccggcacggccggggacttcagcctgagcgccagcctgtcggcctgtacgctgctctacgagggggccgtggagcccatgcagatcgacgtggacccccaggaagacccgcagaatgcacctgacgtcaactacgtggtggagaaccccagcctggatctggaacagtacgcggccagctacagcggcctgatgcgcatcgaacggctgcagttcattgctgatcactgccccacgctgcgggtggaggccctgaagatggccctctccttcgtgcagagaacctttaacgtggacatgtacgaggagatccaccgcaagctctcagaggccaccagggagctgcagaacgcacccgacgccatccctgagagcggcgtggagcccccagccctggacacggcctgggtggaggccacgcggaagaaggcgctgctgaagctggagaagctggacacagacctgaagaactacaagggcaactccatcaaagagagcatccggcgcggccacgacgacctgggcgaccactacctggactgtggggacctcagcaacgccctcaagtgctattcccgggcccggg

SEQ ID NO: 135809 - DNA, 594 bp, Homo sapiens
  Payload ID: 6548
  Gene Symbol: GPS1
  Gene Name: G protein pathway suppressor 1
  ENST ID: ENST00000580723
  CDS Start-End: 6-140
gcaagatgccgctgccggttcaggtgtttaacttgcagtccccaggacgaggtgccaggtgcctggcccatgttgcagggggccgtggagcccatgcagatcgacgtggacccccaggaagacccgcagaatgcacctgacgtcaactacgtggtggagaaccccagcctggatctggaacagtacgcggccagctacagcggcctgatgcgcatcgaacggctgcagttcattgctgatcactgccccacgctgcgggtggaggccctgaagatggccctctccttcgtgcagagaacctttaacgtggacatgtacgaggagatccaccgcaagctctcagaggccaccaggtcctctctcagggagctgcagaacgcacccgacgccatccctgagagcggcgtggagcccccagccctggacacggcctgggtggaggccacgcggaagaaggcgctgctgaagctggagaagctggacacagacctgaagaactacaagggcaactccatcaaagagagcatccggcgcggccacgacgacctgggcgaccactacctggactgtggggacctcagcaacgccctcaag

SEQ ID NO: 135810 - DNA, 1874 bp, Homo sapiens
  Payload ID: 6548
  Gene Symbol: GPS1
  Gene Name: G protein pathway suppressor 1
  Uniprot ID: Q13098
  ENST ID: ENST00000578552
  CDS Start-End: 68-1531
gcgccccggaagcgacggcttcgctgccccggaagtggacggcacgccgcggcggggtgggtgcaagatgccgctgccggttcaggtgtttaacttgcagggggccgtggagcccatgcagatcgacgtggacccccaggaagacccgcagaatgcacctgacgtcaactacgtggtggagaaccccagcctggatctggaacagtacgcggccagctacagcggcctgatgcgcatcgaacggctgcagttcattgctgatcactgccccacgctgcgggtggaggccctgaagatggccctctccttcgtgcagagaacctttaacgtggacatgtacgaggagatccaccgcaagctctcagaggccaccagggagctgcagaacgcacccgacgccatccctgagagcggcgtggagcccccagccctggacacggcctgggtggaggccacgcggaagaaggcgctgctgaagctggagaagctggacacagacctgaagaactacaagggcaactccatcaaagagagcatccggcgcggccacgacgacctgggcgaccactacctggactgtggggacctcagcaacgccctcaagtgctattcccgggcccgggactactgcaccagcgccaaacacgtcatcaacatgtgcctcaatgtcatcaaggtcagcgtctacttgcagaattggtctcatgtgctcagctacgtcagcaaggctgagtccaccccagagattgccgagcagcgaggagagcgtgacagccagacccaggccatcctcaccaagctcaagtgtgccgcaggcttggcagagctggccgccaggaagtacaagcaggctgccaagtgcctcctgctggcttcctttgatcactgtgacttccctgagctgctgtcccccagcaacgtggccatctacggtggcctgtgcgccttggctacctttgaccggcaggagctgcagcgcaatgtcatctccagcagctccttcaagttgttcttggagctggagccacaggtccgagacatcatcttcaaattctacgagtccaagtacgcctcatgtctcaagatgctggacgagatgaaggacaacctgctcctggacatgtatctggccccccatgtcaggaccctgtacacccagattcgcaaccgtgccctcatccagtatttcagcccctacgtgtcagccgacatgcataggatggcggcagccttcaataccacggtggccgccctggaggacgagctgacgcagctaatcctggaggggctgatcagtgcccgtgtggactcacacagcaagatcctatacgcccgggacgtggatcagcgcagcaccacctttgagaagtctctgttgatgggcaaggagttccagcgccgcgccaaggccatgatgctgcgggcagctgtgctccgcaaccagatccatgtcaagtccccgcccagagaagggagccagggggagctgactccagccaacagccagtcccggatgagcaccaacatgtgaggggtgaaccttggcctccaggacatctgcaccccctccccacctccacggacctcggacctccaggcggctcagtgctgcctgcggcccagctaaggggcctggccactgggtgccacccagcctgtgtgccctccctggggctgaggaggcaggcggctgctagttgtggcccttcctggaaggagaggcctgcagggctcgaccctgtgggtttctgtccccagggagcagactgtgcggcacccaggcccagtggcaccatttcccagacccctcctgttcccgcctcagtcaggtgcagacaagtgggcggtgtccattaaagagcagactcagcgtt

SEQ ID NO: 135811 - DNA, 1855 bp, Homo sapiens
  Payload ID: 6548
  Gene Symbol: GPS1
  Gene Name: G protein pathway suppressor 1
  ENST ID: ENST00000584460
  CDS Start-End: 4-138
aagatgccgctgccggttcaggtgtttaacttgcagtccccaggacgaggtgccaggtgcctggcccatgttgcagggggccgtggagcccatgcagatcgacgtggacccccaggaagacccgcagaatgcacctgacgtcaactacgtggtggagaaccccagcctggatctggaacagtacgcggccagctacagcggcctgatgcgcatcgaacggctgcagttcattgctgatcactgccccacgctgcgggtggaggccctgaagatggccctctccttcgtgcagagaacctttaacgtggacatgtacgaggagatccaccgcaagctctcagaggccaccaggtcctctctcagggagctgcagaacgcacccgacgccatccctgagagcggcgtggagcccccagccctggacacggcctgggtggaggccacgcggaagaaggcgctgctgaagctggagaagctggacacagacctgaagaactacaagggcaactccatcaaagagagcatccggcgcggccacgacgacctgggcgaccactacctggactgtggggacctcagcaacgccctcaagtgctattcccgggcccgggactactgcaccagcgccaaacacgtcatcaacatgtgcctcaatgtcatcaaggtcagcgtctacttgcagaattggtctcatgtgctcagctacgtcagcaaggctgagtccaccccagagattgccgagcagcgaggagagcgtgacagccagacccaggccatcctcaccaagctcaagtgtgccgcaggcttggcagagctggccgccaggaagtacaagcaggctgccaagtgcctcctgctggcttcctttgatcactgtgacttccctgagctgctgtcccccagcaacgtggccatctacggtggcctgtgcgccttggctacctttgaccggcaggagctgcagcgcaatgtcatctccagcagctccttcaagttgttcttggagctggagccacaggtccgagacatcatcttcaaattctacgagtccaagtacgcctcatgtctcaagatgctggacgagatgaaggacaacctgctcctggacatgtatctggccccccatgtcaggaccctgtacacccagattcgcaaccgtgccctcatccagtatttcagcccctacgtgtcagccgacatgcataggatggcggcagccttcaataccacggtggccgccctggaggacgagctgacgcagctaatcctggaggggctgatcagtgcccgtgtggactcacacagcaagatcctatacgcccgggacgtggatcagcgcagcaccacctttgagaagtctctgttgatgggcaaggagttccagcgccgcgccaaggccatgatgctgcgggcagctgtgctccgcaaccagatccatgtcaagtccccgcccagagaagggagccagggggagctgactccagccaacagccagtcccggatgagcaccaacatgtgaggggtgaaccttggcctccaggacatctgcaccccctccccacctccacggacctcggacctccaggcggctcagtgctgcctgcggcccagctaaggggcctggccactgggtgccacccagcctgtgtgccctccctggggctgaggaggcaggcggctgctagttgtggcccttcctggaaggagaggcctgcagggctcgaccctgtgggtttctgtccccagggagcagactgtgcggcacccaggcccagtggcaccatttcccagacccctcctgttcccgcctcagtcaggtgcagacaagtgggcggtgtccattaaagagcagact

SEQ ID NO: 135812 - DNA, 997 bp, Homo sapiens
  Payload ID: 6548
  Gene Symbol: GPS1
  Gene Name: G protein pathway suppressor 1
  ENST ID: ENST00000585084
  CDS Start-End: 366-997
ccgggcctcgggagcctgggcagagaaaggcacccacagcagcgaaggggccgtggcttcggagcgagaaaggctcggggggcagatcccgcgggcgccggggagtgggggacactcaccgccctggagctcgagctcagggtcgtccccgtcggtgaagataaacgtctgggggagaaacaatctatgaggcttctggggcgctgcccaggccggagaccgacccgccccgcgcggagcctccgggggcctgggccgggcctagaccctgggaggcggggcgggtgggcgtggggctcgccgtcggggtcggggtccggcgcacctgctggcgggcccgggagatccagggggccgtggagcccatgcagatcgacgtggacccccaggaagacccgcagaatgcacctgacgtcaactacgtggtggagaaccccagcctggatctggaacagtacgcggccagctacagcggcctgatgcgcatcgaacggctgcagttcattgctgatcactgccccacgctgcgggtggaggccctgaagatggccctctccttcgtgcagagaacctttaacgtggacatgtacgaggagatccaccgcaagctctcagaggccaccagggagctgcagaacgcacccgacgccatccctgagagcggcgtggagcccccagccctggacacggcctgggtggaggccacgcggaagaaggcgctgctgaagctggagaagctggacacagacctgaagaactacaagggcaactccatcaaagagagcatccggcgcggccacgacgacctgggcgaccactacctggactgtggggacctcagcaacgccctcaagtgctattcccgggcccgggactactgcaccagcgccaaacacgtcatcaacatgtgcctcaatgtcatcaaggtcagcgtctacttgcagaattggtctcatgtgctcagctacgtcagcaaggctgagtccaccccagagat

SEQ ID NO: 135813 - DNA, 552 bp, Homo sapiens
  Payload ID: 6548
  Gene Symbol: GPS1
  Gene Name: G protein pathway suppressor 1
  ENST ID: ENST00000578392
  CDS Start-End: 25-306
acgccgcggcggggtgggtgcaagatgccgctgccggttcaggtgtttaacttgcagcagccagccagctctgtgtcagggtcggggggtgcagaaagtcaggacagaatgagggatagctcggcccccagctcggcctcctcgtcagtgacagatctgtactgcacccctcacagcagtaggtcagacctcgtcctgcccggcacggccggggacttcagcctgagcgccagcctgtcggcctggggccgtggagcccatgcagatcgacgtggacccccaggaagacccgcagaatgcacctgacgtcaactacgtggtggagaaccccagcctggatctggaacagtacgcggccagctacagcggcctgatgcgcatcgaacggctgcagttcattgctgatcactgccccacgctgcgggtggaggccctgaagatggccctctccttcgtgcagagaacctttaacgtggacatgtacgaggagatccaccgcaagctctcagaggccaccagggagctgcagaacgcacccgacgccatccctga

SEQ ID NO: 135814 - DNA, 580 bp, Homo sapiens
  Payload ID: 6548
  Gene Symbol: GPS1
  Gene Name: G protein pathway suppressor 1
  ENST ID: ENST00000581418
  CDS Start-End: 162-580
ggacggcacgccgcggcggggtgggtgcaagatgccgctgccggttcaggtgtttaacttgcagtaggtcagacctcgtcctgcccggcacggccggggacttcagcctgagcgccagcctgtcggcctgtacgctgctctacgagggggccgtggagcccatgcagatcgacgtggacccccaggaagacccgcagaatgcacctgacgtcaactacgtggtggagaaccccagcctggatctggaacagtacgcggccagctacagcggcctgatgcgcatcgaacggctgcagttcattgctgatcactgccccacgctgcgggtggaggccctgaagatggccctctccttcgtgcagagaacctttaacgtggacatgtacgaggagatccaccgcaagctctcagaggccaccagggagctgcagaacgcacccgacgccatccctgagagcggcgtggagcccccagccctggacacggcctgggtggaggccacgcggaagaaggcgctgctgaagctggagaagctggacacagacctgaagaactacaagggcaactccatcaaagagag

SEQ ID NO: 135815 - DNA, 581 bp, Homo sapiens
  Payload ID: 6548
  Gene Symbol: GPS1
  Gene Name: G protein pathway suppressor 1
  ENST ID: ENST00000583961
  CDS Start-End: 77-581
ctgctggcgggcccgggagatccagcagccagccagctctgtgtcagggtcggggggtgcagaaagtcaggacagaatgagggatagctcggcccccagctcggcctcctcgtcagtgacagatctgtactgcacccctcacagcagtaggtcagacctcgtcctgcccggcacggccggggacttcagcctgagcgccagcctgtcggcctgtacgctgctctacgagggggccgtggagcccatgcagatcgacgtggacccccaggaagacccgcagaatgcacctgacgtcaactacgtggtggagaaccccagcctggatctggaacagtacgcggccagctacagcggcctgatgcgcatcgaacggctgcagttcattgctgatcactgccccacgctgcgggtggaggccctgaagatggccctctccttcgtgcagagaacctttaacgtggacatgtacgaggagatccaccgcaagctctcagaggccaccagggagctgcagaacgcacccgacgccatccctgagagcggcgtggagcccccagccctggacacggcctgggtggagg

SEQ ID NO: 135816 - DNA, 574 bp, Homo sapiens
  Payload ID: 6548
  Gene Symbol: GPS1
  Gene Name: G protein pathway suppressor 1
  ENST ID: ENST00000583009
  CDS Start-End: 75-574
gctaacgctctttctcccttcagcagccagccagctctgtgtcagggtcggggggtgcagaaagtcaggacagaatgagggatagctcggcccccagctcggcctcctcgtcagtgacagatctgtactgcacccctcacagcagtaggtcagacctcgtcctgcccggcacggccggggacttcagcctgagcgccagcctgtcggcctgtacgctgctctacgagggggccgtggagcccatgcagatcgacgtggacccccaggaagacccgcagaatgcacctgacgtcaactacgtggtggagaaccccagcctggatctggaacagtacgcggccagctacagcggcctgatgcgcatcgaacggctgcagttcattgctgatcactgccccacgctgcgggtggaggccctgaagatggccctctccttcgtgcagagaacctttaacgtggacatgtacgaggagatccaccgcaagctctcagaggccaccaggtcctctctcagggagctgcagaacgcacccgacgccatccctgagagcggcgtggagcccccagccctgga

SEQ ID NO: 135817 - DNA, 567 bp, Homo sapiens
  Payload ID: 6548
  Gene Symbol: GPS1
  Gene Name: G protein pathway suppressor 1
  ENST ID: ENST00000580716
  CDS Start-End: 64-567
gtcggggtcggggtccggcgcacctgctggcgggcccgggagatccagggggccgtggagcccatgcagatcgacgtggacccccaggaagacccgcagaatgcacctgacgtcaactacgtggtggagaaccccagcctggatctggaacagtacgcggccagctacagcggcctgatgcgcatcgaacggctgcagttcattgctgatcactgccccacgctgcgggtggaggccctgaagatggccctctccttcgtgcagagaacctttaacgtggacatgtacgaggagatccaccgcaagctctcagaggccaccaggtcctctctcagggagctgcagaacgcacccgacgccatccctgagagcggcgtggagcccccagccctggacacggcctgggtggaggccacgcggaagaaggcgctgctgaagctggagaagctggacacagacctgaagaactacaagggcaactccatcaaagagagcatccggcgcggccacgacgacctgggcgaccactacctggactgtggggacctcagcaacgccctcaagtgc

SEQ ID NO: 135818 - DNA, 543 bp, Homo sapiens
  Payload ID: 6548
  Gene Symbol: GPS1
  Gene Name: G protein pathway suppressor 1
  ENST ID: ENST00000580627
  CDS Start-End: 31-213
gacggcacgccgcggcggggtgggtgcaagatgccgctgccggttcaggtgtttaacttgcaggtgcctggcccatgttgcagggggccgtggagcccatgcagatcgacgtggacccccaggaagacccgcagaatgcacctgacgtcaactacgtggtggagaaccccagcctggatctggaacagtacgcggccagctacagcggcctgatgcgcatcgaacggctgcagttcattgctgatcactgccccacgctgcgggtggaggccctgaagatggccctctccttcgtgcagagaacctttaacgtggacatgtacgaggagatccaccgcaagctctcagaggccaccaggtcctctctcagggagctgcagaacgcacccgacgccatccctgagagcggcgtggagcccccagccctggacacggcctgggtggaggccacgcggaagaaggcgctgctgaagctggagaagctggacacagacctgaagaactacaagggcaactccatcaaagagagcatccggcgcggcc

SEQ ID NO: 135819 - DNA, 583 bp, Homo sapiens
  Payload ID: 6548
  Gene Symbol: GPS1
  Gene Name: G protein pathway suppressor 1
  ENST ID: ENST00000578168
  CDS Start-End: 1-240
cagattcgcaaccgtgccctcatccagtatttcagcccctacgtgtcagccgacatgcataggatggcggcagccttcaataccacggtggccgccctggaggacgagctgacgcagctaatcctggaggggctgatcagtgcccgtgtggactcacacagcaagtccccgcccagagaagggagccagggggagctgactccagccaacagccagtcccggatgagcaccaacatgtgaggggtgaaccttggcctccaggacatctgcaccccctccccacctccacggacctcggacctccaggcggctcagtgctgcctgcggcccagctaaggggcctggccactgggtgccacccagcctgtgtgccctccctggggctgaggaggcaggcggctgctagttgtggcccttcctggaaggagaggcctgcagggctcgaccctgtgggtttctgtccccagggagcagactgtgcggcacccaggcccagtggcaccatttcccagacccctcctgttcccgcctcagtcaggtgcagacaagtgggcggtgtccattaaagagcagactcagcgtt

SEQ ID NO: 135820 - DNA, 924 bp, Homo sapiens
  Payload ID: 6548
  Gene Symbol: GPS1
  Gene Name: G protein pathway suppressor 1
  ENST ID: ENST00000580141
  CDS Start-End: 32-166
ggacggcacgccgcggcggggtgggtgcaagatgccgctgccggttcaggtgtttaacttgcagtccccaggacgaggtgccaggtgcctggcccatgttgcagggggccgtggagcccatgcagatcgacgtggacccccaggaagacccgcagaatgcacctgacgtcaactacgtggtggagaaccccagcctggatctggaacagtacgcggccagctacagcggcctgatgcgcatcgaacggctgcagttcattgctgatcactgccccacgctgcgggtggaggccctgaagatggccctctccttcgtgcagagaacctttaacgtggacatgtacgaggagatccaccgcaagctctcagaggccaccagggagctgcagaacgcacccgacgccatccctgagagcggcgtggagcccccagccctggacacggcctgggtggaggccacgcggaagaaggcgctgctgaagctggagaagctggacacagacctgaagaactacaagggcaactccatcaaagagagcatccggcgcggccacgacgacctgggcgaccactacctggactgtggggacctcagcaacgccctcaagtgctattcccgggcccgggactactgcaccagcgccaaacacgtcatcaacatgtgcctcaatgtcatcaaggtcagcgtctacttgcagaattggtctcatgtgctcagctacgtcagcaaggctgagtccaccccagagattgccgagcagcgaggagagcgtgacagccagacccaggccatcctcaccaagctcaagtgtgccgcaggcttggcagagctggccgccaggaagtacaagcaggctgccaagtgcctcctgctggcttcctttgatcactgtgacttccctgagctgctgtcccccagcaacg

SEQ ID NO: 135821 - DNA, 470 bp, Homo sapiens
  Payload ID: 6548
  Gene Symbol: GPS1
  Gene Name: G protein pathway suppressor 1
  ENST ID: ENST00000581578
  CDS Start-End: 166-470
aagtggacggcacgccgcggcggggtgggtgcaagatgccgctgccggttcaggtgtttaacttgcagtaggtcagacctcgtcctgcccggcacggccggggacttcagcctgagcgccagcctgtcggcctgtacgctgctctacgagggggccgtggagcccatgcagatcgacgtggacccccaggaagacccgcagaatgcacctgacgtcaactacgtggtggagaaccccagcctggatctggaacagtacgcggccagctacagcggcctgatgcgcatcgaacggctgcagttcattgctgatcactgccccacgctgcgggtggaggccctgaagatggccctctccttcgtgcagagaacctttaacgtggacatgtacgaggagatccaccgcaagctctcagaggccaccaggtcctctctcagggagctgcagaacgcacccgacgccatccctga

SEQ ID NO: 135822 - DNA, 561 bp, Homo sapiens
  Payload ID: 6548
  Gene Symbol: GPS1
  Gene Name: G protein pathway suppressor 1
  ENST ID: ENST00000582327
  CDS Start-End: 160-561
gaagcaggcggccatcggttgggatctcttgagtggaaacaggacggaggcagctcgccctgacctggcctggaagggcggattccctgctggcgcttcttcaggggacgtggcactagccccacgccccgggaagcggctagtggggccgtggagcccatgcagatcgacgtggacccccaggaagacccgcagaatgcacctgacgtcaactacgtggtggagaaccccagcctggatctggaacagtacgcggccagctacagcggcctgatgcgcatcgaacggctgcagttcattgctgatcactgccccacgctgcgggtggaggccctgaagatggccctctccttcgtgcagagaacctttaacgtggacatgtacgaggagatccaccgcaagctctcagaggccaccagggagctgcagaacgcacccgacgccatccctgagagcggcgtggagcccccagccctggacacggcctgggtggaggccacgcggaagaaggcgctgctgaagctggagaagctggacacagacctgaagaactacaagggc

SEQ ID NO: 135823 - DNA, 1943 bp, Homo sapiens
  Payload ID: 6548
  Gene Symbol: GPS1
  Gene Name: G protein pathway suppressor 1
  ENST ID: ENST00000623761
  CDS Start-End: 66-1646
ctttctcccttcagcagccagccagctctgtgtcagggtcggggggtgcagaaagtcaggacagaatgagggatagctcggcccccagctcggcctcctcgtcagtgacagatctgtactgcacccctcacagcagtaggtcagacctcgtcctgcccggcacggccggggacttcagcctgagcgccagcctgtcggcctgtacgctgctctacgagggggccgtggagcccatgcagatcgacgtggacccccaggaagacccgcagaatgcacctgacgtcaactacgtggtggagaaccccagcctggatctggaacagtacgcggccagctacagcggcctgatgcgcatcgaacggctgcagttcattgctgatcactgccccacgctgcgggtggaggccctgaagatggccctctccttcgtgcagagaacctttaacgtggacatgtacgaggagatccaccgcaagctctcagaggccaccagggagctgcagaacgcacccgacgccatccctgagagcggcgtggagcccccagccctggacacggcctgggtggaggccacgcggaagaaggcgctgctgaagctggagaagctggacacagacctgaagaactacaagggcaactccatcaaagagagcatccggcgcggccacgacgacctgggcgaccactacctggactgtggggacctcagcaacgccctcaagtgctattcccgggcccgggactactgcaccagcgccaaacacgtcatcaacatgtgcctcaatgtcatcaaggtcagcgtctacttgcagaattggtctcatgtgctcagctacgtcagcaaggctgagtccaccccagagattgccgagcgaggagagcgtgacagccagacccaggccatcctcaccaagctcaagtgtgccgcaggcttggcagagctggccgccaggaagtacaagcaggctgccaagtgcctcctgctggcttcctttgatcactgtgacttccctgagctgctgtcccccagcaacgtggccatctacggtggcctgtgcgccttggctacctttgaccggcaggagctgcagcgcaatgtcatctccagcagctccttcaagttgttcttggagctggagccacaggtccgagacatcatcttcaaattctacgagtccaagtacgcctcatgtctcaagatgctggacgagatgaaggacaacctgctcctggacatgtatctggccccccatgtcaggaccctgtacacccagattcgcaaccgtgccctcatccagtatttcagcccctacgtgtcagccgacatgcataggatggcggcagccttcaataccacggtggccgccctggaggacgagctgacgcagctaatcctggaggggctgatcagtgcccgtgtggactcacacagcaagatcctatacgcccgggacgtggatcagcgcagcaccacctttgagaagtctctgttgatgggcaaggagttccagcgccgcgccaaggccatgatgctgcgggcagctgtgctccgcaaccagatccatgtcaagtccccgcccagagaagggagccagggggagctgactccagccaacagccagtcccggatgagcaccaacatgtgaggggtgaaccttggcctccaggacatctgcaccccctccccacctccacggacctcggacctccaggcggctcagtgctgcctgcggcccagctaaggggcctggccactgggtgccacccagcctgtgtgccctccctggggctgaggaggcaggcggctgctagttgtggcccttcctggaaggagaggcctgcagggctcgaccctgtgggtttctgtccccagggagcagactgtgcggcacccaggcccagtggcaccatttcccagacccctcctgttcccgcctcagtca

SEQ ID NO: 135824 - DNA, 1839 bp, Homo sapiens
  Payload ID: 6548
  Gene Symbol: GPS1
  Gene Name: G protein pathway suppressor 1
  ENST ID: ENST00000623691
  CDS Start-End: 36-1496
aagtggacggcacgccgcggcggggtgggtgcaagatgccgctgccggttcaggtgtttaacttgcagggggccgtggagcccatgcagatcgacgtggacccccaggaagacccgcagaatgcacctgacgtcaactacgtggtggagaaccccagcctggatctggaacagtacgcggccagctacagcggcctgatgcgcatcgaacggctgcagttcattgctgatcactgccccacgctgcgggtggaggccctgaagatggccctctccttcgtgcagagaacctttaacgtggacatgtacgaggagatccaccgcaagctctcagaggccaccagggagctgcagaacgcacccgacgccatccctgagagcggcgtggagcccccagccctggacacggcctgggtggaggccacgcggaagaaggcgctgctgaagctggagaagctggacacagacctgaagaactacaagggcaactccatcaaagagagcatccggcgcggccacgacgacctgggcgaccactacctggactgtggggacctcagcaacgccctcaagtgctattcccgggcccgggactactgcaccagcgccaaacacgtcatcaacatgtgcctcaatgtcatcaaggtcagcgtctacttgcagaattggtctcatgtgctcagctacgtcagcaaggctgagtccaccccagagattgccgagcgaggagagcgtgacagccagacccaggccatcctcaccaagctcaagtgtgccgcaggcttggcagagctggccgccaggaagtacaagcaggctgccaagtgcctcctgctggcttcctttgatcactgtgacttccctgagctgctgtcccccagcaacgtggccatctacggtggcctgtgcgccttggctacctttgaccggcaggagctgcagcgcaatgtcatctccagcagctccttcaagttgttcttggagctggagccacaggtccgagacatcatcttcaaattctacgagtccaagtacgcctcatgtctcaagatgctggacgagatgaaggacaacctgctcctggacatgtatctggccccccatgtcaggaccctgtacacccagattcgcaaccgtgccctcatccagtatttcagcccctacgtgtcagccgacatgcataggatggcggcagccttcaataccacggtggccgccctggaggacgagctgacgcagctaatcctggaggggctgatcagtgcccgtgtggactcacacagcaagatcctatacgcccgggacgtggatcagcgcagcaccacctttgagaagtctctgttgatgggcaaggagttccagcgccgcgccaaggccatgatgctgcgggcagctgtgctccgcaaccagatccatgtcaagtccccgcccagagaagggagccagggggagctgactccagccaacagccagtcccggatgagcaccaacatgtgaggggtgaaccttggcctccaggacatctgcaccccctccccacctccacggacctcggacctccaggcggctcagtgctgcctgcggcccagctaaggggcctggccactgggtgccacccagcctgtgtgccctccctggggctgaggaggcaggcggctgctagttgtggcccttcctggaaggagaggcctgcagggctcgaccctgtgggtttctgtccccagggagcagactgtgcggcacccaggcccagtggcaccatttcccagacccctcctgttcccgcctcagtcaggtgcagacaagtgggcggtgtccattaaagagcagactcagcgtt

SEQ ID NO: 135825 - DNA, 1825 bp, Homo sapiens
  Payload ID: 6548
  Gene Symbol: GPS1
  Gene Name: G protein pathway suppressor 1
  ENST ID: ENST00000624957
  CDS Start-End: 40-1512
ccggaagtggacggcacgccgcggcggggtgggtgcaagatgccgctgccggttcaggtgtttaacttgcagggggccgtggagcccatgcagatcgacgtggacccccaggaagacccgcagaatgcacctgacgtcaactacgtggtggagaaccccagcctggatctggaacagtacgcggccagctacagcggcctgatgcgcatcgaacggctgcagttcattgctgatcactgccccacgctgcgggtggaggccctgaagatggccctctccttcgtgcagagaacctttaacgtggacatgtacgaggagatccaccgcaagctctcagaggccaccaggtcctctctcagggagctgcagaacgcacccgacgccatccctgagagcggcgtggagcccccagccctggacacggcctgggtggaggccacgcggaagaaggcgctgctgaagctggagaagctggacacagacctgaagaactacaagggcaactccatcaaagagagcatccggcgcggccacgacgacctgggcgaccactacctggactgtggggacctcagcaacgccctcaagtgctattcccgggcccgggactactgcaccagcgccaaacacgtcatcaacatgtgcctcaatgtcatcaaggtcagcgtctacttgcagaattggtctcatgtgctcagctacgtcagcaaggctgagtccaccccagagattgccgagcgaggagagcgtgacagccagacccaggccatcctcaccaagctcaagtgtgccgcaggcttggcagagctggccgccaggaagtacaagcaggctgccaagtgcctcctgctggcttcctttgatcactgtgacttccctgagctgctgtcccccagcaacgtggccatctacggtggcctgtgcgccttggctacctttgaccggcaggagctgcagcgcaatgtcatctccagcagctccttcaagttgttcttggagctggagccacaggtccgagacatcatcttcaaattctacgagtccaagtacgcctcatgtctcaagatgctggacgagatgaaggacaacctgctcctggacatgtatctggccccccatgtcaggaccctgtacacccagattcgcaaccgtgccctcatccagtatttcagcccctacgtgtcagccgacatgcataggatggcggcagccttcaataccacggtggccgccctggaggacgagctgacgcagctaatcctggaggggctgatcagtgcccgtgtggactcacacagcaagatcctatacgcccgggacgtggatcagcgcagcaccacctttgagaagtctctgttgatgggcaaggagttccagcgccgcgccaaggccatgatgctgcgggcagctgtgctccgcaaccagatccatgtcaagtccccgcccagagaagggagccagggggagctgactccagccaacagccagtcccggatgagcaccaacatgtgaggggtgaaccttggcctccaggacatctgcaccccctccccacctccacggacctcggacctccaggcggctcagtgctgcctgcggcccagctaaggggcctggccactgggtgccacccagcctgtgtgccctccctggggctgaggaggcaggcggctgctagttgtggcccttcctggaaggagaggcctgcagggctcgaccctgtgggtttctgtccccagggagcagactgtgcggcacccaggcccagtggcaccatttcccagacccctcctgttcccgcctcagtcaggtgcagacaagtggg

SEQ ID NO: 135826 - DNA, 1379 bp, Homo sapiens
  Payload ID: 6549
  Gene Symbol: GPS2
  Gene Name: G protein pathway suppressor 2
  Uniprot ID: Q13227
  ENST ID: ENST00000380728
  CDS Start-End: 302-1285
gggcccgcgaaattaaagagagctgaggatgccaaggccagtctgcagccgtcgtcgctcacgttcccggcgacggggtttgtacgccgcgggcacccgtcgcagcgcgcttccgccttctttcacctgtgaggtcggccgccgccgtgactccggaaggactcggccgggccgccggatgtgacgcaggggccagggcgcgtcggagccgctgagaaagcgcagagaaggcgggccccgtctgaggtctggcagtcagagacagccgggcgcccacggcccgagcgcccacggcagcaccatgcccgcactcctggagcgccccaagctttccaacgccatggccagggcgctgcaccggcacattatgatggagcgggagcgcaagcggcaggaggaagaagaggtggataagatgatggaacagaagatgaaggaagaacaggagagaaggaagaaaaaggagatggaagagagaatgtcattagaggagaccaaggaacaaattctgaagttggaggagaagcttttggctctacaggaagagaagcaccagcttttcctgcagctcaagaaagttttacatgaggaagaaaaacggaggcgaaaggaacagagtgacctgaccaccctaacatcagctgcataccagcagagcctgactgttcacacaggaactcatctcctcagcatgcaggggagccctggaggacacaatcgcccaggcaccctcatggcagctgacagagccaaacaaatgtttggaccccaagtgcttacgacccggcactacgtgggctcagcagctgcttttgcagggacaccagagcatggacaattccaaggcagtcctggtggtgcctatgggactgctcagcccccacctcactatgggcccacacagccagcttatagtcctagtcagcagctcagagctccttcggcattccctgcagtgcagtacctatctcagccacagccacagccctatgctgtgcatggccactttcagcccactcagacaggtttcctccagcctggtggtgccctgtccttgcaaaagcagatggaacatgctaaccagcagactggcttctccgactcatcctctctgcgccccatgcacccccaggctctgcatccagcccctggactccttgcttccccccagctccctgtgcagatgcagccagcaggaaagtcgggctttgcagctaccagccaacctggccctcggctccccttcatccaacacagccagaacccgcgattctaccacaagtgaccatcagattatatcttcaacaccacaccccccaccccatcgtgggtgagggtatcccctgtgtgtcccaggccaataaaatctacctgccact

SEQ ID NO: 135827 - DNA, 1371 bp, Homo sapiens
  Payload ID: 6549
  Gene Symbol: GPS2
  Gene Name: G protein pathway suppressor 2
  Uniprot ID: Q13227
  ENST ID: ENST00000389167
  CDS Start-End: 292-1275
gcagagaaggcgggtaggaagggcagtcgtccgcgctggctgggcagggagcggcagcagcgagccggggaccccggcgccgcccgcgcgcggtgggactggggctgcggtcccggccgggtggcgggctcctgggacacgtgaccggggcggcgagcgggccgggcggacgggcttccgcctgggccgggcgcggccccctctgagcgcccgcctccccgcaggccccgtctgaggtctggcagtcagagacagccgggcgcccacggcccgagcgcccacggcagcaccatgcccgcactcctggagcgccccaagctttccaacgccatggccagggcgctgcaccggcacattatgatggagcgggagcgcaagcggcaggaggaagaagaggtggataagatgatggaacagaagatgaaggaagaacaggagagaaggaagaaaaaggagatggaagagagaatgtcattagaggagaccaaggaacaaattctgaagttggaggagaagcttttggctctacaggaagagaagcaccagcttttcctgcagctcaagaaagttttacatgaggaagaaaaacggaggcgaaaggaacagagtgacctgaccaccctaacatcagctgcataccagcagagcctgactgttcacacaggaactcatctcctcagcatgcaggggagccctggaggacacaatcgcccaggcaccctcatggcagctgacagagccaaacaaatgtttggaccccaagtgcttacgacccggcactacgtgggctcagcagctgcttttgcagggacaccagagcatggacaattccaaggcagtcctggtggtgcctatgggactgctcagcccccacctcactatgggcccacacagccagcttatagtcctagtcagcagctcagagctccttcggcattccctgcagtgcagtacctatctcagccacagccacagccctatgctgtgcatggccactttcagcccactcagacaggtttcctccagcctggtggtgccctgtccttgcaaaagcagatggaacatgctaaccagcagactggcttctccgactcatcctctctgcgccccatgcacccccaggctctgcatccagcccctggactccttgcttccccccagctccctgtgcagatgcagccagcaggaaagtcgggctttgcagctaccagccaacctggccctcggctccccttcatccaacacagccagaacccgcgattctaccacaagtgaccatcagattatatcttcaacaccacaccccccaccccatcgtgggtgagggtatcccctgtgtgtcccaggccaataaaatctacctgccactgc

SEQ ID NO: 135828 - DNA, 573 bp, Homo sapiens
  Payload ID: 6549
  Gene Symbol: GPS2
  Gene Name: G protein pathway suppressor 2
  ENST ID: ENST00000573684
  CDS Start-End: 1-477
acccggcactacgtgggctcagcagctgcttttgcagggacaccagagcatggacaattccaaggcagtcctggtggtgcctatgggactgctcagcccccacctcactatgggcccacacagccagcttatagtcctagtcagcagctcagagctccttcggcattccctgcagtgcagtacctatctcagccacagccacagccctatgctgtgcatggccactttcagcccactcagacaggtttcctccagcctggtggtgccctgtccttgcaaaagcagatggaacatgctaaccagcagactggcttctccgactcagctctgcatccagcccctggactccttgcttccccccagctccctgtgcagatgcagccagcaggaaagtcgggctttgcagctaccagccaacctggccctcggctccccttcatccaacacagccagaacccgcgattctaccacaagtgaccatcagattatatcttcaacaccacaccccccaccccatcgtgggtgagggtatcccctgtgtgtcccaggccaataaaatctacctgccactgc

SEQ ID NO: 135829 - DNA, 523 bp, Homo sapiens
  Payload ID: 6549
  Gene Symbol: GPS2
  Gene Name: G protein pathway suppressor 2
  ENST ID: ENST00000574458
  CDS Start-End: 1-221
ccctgtccttgcaaaagcagatggaacatgctaaccagcagactggcttctccgactcatcctctctgcgccccatgcacccccaggctctgcatccagcccctggactccttgcttccccccagctccctgtgcagatgcagccagcaggaaaggtaagaatggtaatagaatttacctgtcagaatccctacactagggatccggaaaagcaggattaggtaggacaggtggcccacatcatctggtttttccttcctctttgggggtggttatcagtagggtattaagtggaagggagagtatgcccagtgacaaagccctcttttcatcaccaccaccagtcgggctttgcagctaccagccaacctggccctcggctccccttcatccaacacagccagaacccgcgattctaccacaagtgaccatcagattatatcttcaacaccacaccccccaccccatcgtgggtgagggtatcccctgtgtgtcccaggccaataaaatctacctgccactg

SEQ ID NO: 135830 - DNA, 1238 bp, Homo sapiens
  Payload ID: 6549
  Gene Symbol: GPS2
  Gene Name: G protein pathway suppressor 2
  ENST ID: ENST00000570780
  CDS Start-End: 1-983
gcaggccccgtctgaggtctggcagtcagagacagccgggcgcccacggcccgagcgcccacggcagcaccatgcccgcactcctggagcgccccaagctttccaacgccatggccagggcgctgcaccggcacattatgatggagcgggagcgcaagcggcaggaggaagaagaggtggataagatgatggaacagaagatgaaggaagaacaggagagaaggaagaaaaaggagatggaagagagaatgtcattagaggagaccaaggaacaaattctgaagttggaggagaagcttttggctctacaggaagagaagcaccagcttttcctgcagctcaagaaagttttacatgaggaagaaaaacggaggcgaaaggaacagagtgacctgaccaccctaacatcagctgcataccagcagagcctgactgttcacacaggaactcatctcctcagcatgcaggggagccctggaggacacaatcgcccaggcaccctcatggcagctgacagagccaaacaaatgtttggaccccaagtgcttacgacccggcactacgtgggctcagcagctgcttttgcagggacaccagagcatggacaattccaaggcagtcctggtggtgcctatgggactgctcagcccccacctcactatgggcccacacagccagcttatagtcctagtcagcagctcagagctccttcggcattccctgcagtgcagtacctatctcagccacagccacagccctatgctgtgcatggccactttcagcccactcagacaggtttcctccagcctggtggtgccctgtccttgcaaaagcagatggaacatgctaaccagcagactggcttctccgactcatcctctctgcgccccatgcacccccaggctctgcatccagcccctggactccttgcttccccccagctccctgtgcagatgcagccagcaggaaagacagcaccgtgatctggagaagcaagagggatagccaagagatgtctgagctcaggaagaaacgtacagaacaaagctgagcacagaagcagggagggaggcaccataccaggatctcttctccacagtcgtacttctgctcaatctccttgccaaggtctccctcagggagacgaaggtcctctcgtacctccccgctgtcctggagcagtgataggtacccatcctggatgccaatcagctgggggcagatagggaaggaggctg

SEQ ID NO: 135831 - DNA, 916 bp, Homo sapiens
  Payload ID: 6549
  Gene Symbol: GPS2
  Gene Name: G protein pathway suppressor 2
  ENST ID: ENST00000577040
  CDS Start-End: 139-916
ggcagtcgtccgcgctggctgggcagggagcggcagcagcgagccggggaccccggcgccgcccgcgcgcggccccgtctgaggtctggcagtcagagacagccgggcgcccacggcccgagcgcccacggcagcaccatgcccgcactcctggagcgccccaagctttccaacgccatggccagggcgctgcaccggcacattatgatggagcgggagcgcaagcggcaggaggaagaagaggtggataagatgatggaacagaagatgaaggaagaacaggagagaaggaagaaaaaggagatggaagagagaatgtcattagaggagaccaaggaacaaattctgaagttggaggagaagcttttggctctacaggaagagaagcaccagcttttcctgcagctcaagaaagttttacatgaggaagaaaaacggaggcgaaaggaacagagtgacctgaccaccctaacatcagctgcataccagcagagcctgactgttcacacaggaactcatctcctcagcatgcaggggagccctggaggacacaatcgcccaggcaccctcatggcagctgacagagccaaacaaatgtttggaccccaagtgcttacgacccggcactacgtgggctcagcagctgcttttgcagggacaccagagcatggacaattccaaggcagtcctggtggtgcctatgggactgctcagcccccacctcactatgggcccacacagccagcttatagtcctagtcagcagctcagagctccttcggcattccctgcagtgcagtacctatctcagccacagccacagccctatgctgtgcatggccactttcagcccactcagacaggtttcctccagcctggtggtgccctgtccttgcaaaagcagatggaacatgcta

SEQ ID NO: 135832 - DNA, 4211 bp, Homo sapiens
  Payload ID: 6550
  Gene Symbol: GPRIN1
  Gene Name: G protein regulated inducer of neurite outgrowth 1
  Uniprot ID: Q7Z2K8
  ENST ID: ENST00000303991
  CDS Start-End: 179-3205
gggacggcggcgccgagtctgcgggtcctcccgccagcccggccggaggcagccgaggccgctcgggcggcggcggcggcggcggcgggagccggagcgcatctcgcccaggagccggagcagcggcactgcctgaaccagacagcagccttgggtgcaggcgtggtcatgagggcagatggacactgctgaagacccggcctggctccagctgcttcaaaaggattccagccccccaggaccccgacccacagccttcttctgcccacaggatgggagcctgggggctggcagctcggctatgagggattactgcccctcccagcaaaaggcaagccctgcaccccccaggcacacccctgaccaaagcccaggcatggagtctagacacagaagccccagtggggctggggaaggggcctcctgctctgacggccccagagggagcctggcctgcccctccccaacctgcttctctccccaggagtcaccctccaaggagacattggaggcacatggagcctccatctcagggacaccagaagccaccacgtctgggaagccagagcctgtgtcctccgtgaaaactgagcccaaatcctcagatgacagaaatcccatgttcttagagaagatggatttcaagtcctcaaagcaggccgattccacttccataggaaaggaggatcctgggtcctcacggaaggcagatcccatgtttacaggaaaggcagagcctgaaatcttgggaaagggggatcctgtggctcctggaaggatggatcccatgactgtaagaaaggaagatcttggatccctgggaaaagtagatcctttgtgctccagcaagacgtatacagtgtcaccgaggaaggaggatcctgggtctttgagaaaggtggatcctgtgtcctcagacaaagtggaccctgtattcccaagaaaggaggagcccaggtattcaggaaaagagcatcctgtgtcctcagaaaaggtcgctcctacatctgcagaaaaggtagatcttgtattgtcgggaaagagagatcctgggccctcgggaaaggcagatcccatgcccttggaaagcatggattctgcgtccacaggaaagacagagccggggctcctgggcaagctgattccaggctcatcaggcaagaatgggcctgtatcctctgggaccggggctcctgggtccttgggaaggctggatcccacatgcttggggatggcagatcccgcatctgtgggaaatgtagaaactgtgcctgccacaaaagaggactcccggttcctgggaaagatggaccctgcctcctcaggagaggggcgtcctgtgtctggccacacggatactacggcttcagcaaagacagatctcacatctttgaaaaatgtggatcccatgtcttcaggcaaggtggatccagtttctctgggaaagatggaccccatgtgctcaggaaagccagagctcttgtctcctggacaggcagagcgtgtgtctgtgggaaaggcaggaactgtatccccaggaaaagaggacccggtgtcctccagaagggaggaccccatatctgctggaagtagaaagacatcatctgaaaaagtgaatcctgagtcttcaggaaagacaaaccctgtgtcttcaggtccaggcgatcccaggtccttggggacagcaggtcccccatctgcagtaaaggctgagccagcgacggggggaaaaggagatcccctgtcctcggagaaggcaggtctggtggcctctggaaaggcggctcccacagcctcagggaaggccgagcccctcgcggtgggcaaggaggaccctgtgagcaagggaaaggcagacgctggcccctctggacaaggggactctgtgtctataggtaaagtggtctcaactccaggaaaaacagtcccggtgccctcggggaaggtggatcccgtgtccctgggaaaagcagaagctatcccagagggaaaagtgggttctctgcctctagagaaggggagtcctgttaccaccacaaaggcggatcccagggcctcggggaaagcacagccgcagtctggtggcaaagcagaaacaaagctccctgggcaagagggcgctgcagcaccaggggaagcaggggctgtgtgtttgaaaaaggagacaccacaggcctcagagaaggtggatcctggatcctgcagaaaagcagagccccttgcctcagggaagggagagcctgtgtccctggggaaagccgactctgcaccttccagaaaaacggagtccccatccttggggaaggtggtccccctgagtctggagaagaccaagccgtcctcctcctccaggcagttagaccgcaaagccctcggctcagcccggtctcccgagggtgccaggggcagtgaaggccgcgtggagccgaaggccgagcccgtgtccagcaccgaggcctccagtctcggccagaaagacctggaagccgctggggccgagagaagcccctgcccagaggccgcagcgcccccgccggggccgcggactcgcgacaacttcaccaaggcgccgtcgtgggaggcgagcgccccgccgccgccgcgcgaggacgcgggcactcaggcgggcgcgcaggcctgcgtctcagtggccgtgagccccatgtctccgcaggacggcgctgggggctcggccttcagcttccaggcggcgccgcgcgcgcccagcccgccctcgcgccgagatgcgggcctgcaggtgtcgctgggcgccgccgagacgcgctccgtggccactgggcccatgacacctcaagccgccgcgccgcccgccttccccgaagtgcgggtgcggcccggctcagcgctggcggccgctgtagcgcccccggagccggctgagcccgtgcgagacgtgagctgggacgagaagggcatgacgtgggaggtatacggcgccgccatggaggtggaggtgctgggcatggccatccagaagcatctggagcgacagatcgaggagcacggccgccaaggggcgcccgcgccgccgcccgccgcccgtgccggccccggccgttcgggctcggtgcgcaccgcgcccccagatggcgccgccaagcgtccgcccggcctgttccgcgcgctgctgcagagtgtgcgccggccgcggtgctgctcgcgggcgggacccacggccgagtgatctgcccccattttgtacgcccgagtttccgaccttctcaggctcccttcttgatcacaggcccctagaaggggtcccctctgcgtgccacaggcctccgaggggttgtgcagcctctagggctgttgcgtccccgtctttccagcccctcccatcacaaatacagaagaaccccttctaccaagctccctcgtggccacgaggccacgaacccggccagccctgacgccccactgtcccctcacagccctcagctctactcccggtcacactgggcgaccacgggggcctgctcagcaccctcacctcccaccccctgagagctggggcaggctcctgagatgtctagactggtgcgttgtggtctccggtggggccagatccccagaacagggagagactgcatacaagtctgagtggcagaagcttcaagtgggtgaggatcggtgtgtgagacccgcgagtgggcacgtctctgaatgtgaggtctcgggcagcacgtgaggtagaacgagtgtgagcgtctccacgcagtggctggccccgtggccggggcgtctcttgcatgctgttggtggtccttccccagttcctatctcccacccgcctggttccagccccatcccctctcccactgagtcacaggtttgagattcccagagaggccaaagacagctacaggaagtaccctgggggctcagctgagagagagtcacagaaaggccagagggtctcaggaaggtctggaggtcacagctgggctcacagaagctcttgggccctggcatcctgggtgaccggtgttcttgggtattggggacaggacagagagctcattctataaccacagttgtcttttaaaggccaccctctccagccccttgtcccccctgtgctgtgagcccaagtcccttgtgaccactcagtgtcccgtccccacccctccagccgcagtttttggctacaaactgtcacagtatacattggtaataaaatatttccccaa

SEQ ID NO: 135833 - DNA, 1696 bp, Homo sapiens
  Payload ID: 6551
  Gene Symbol: GPRIN2
  Gene Name: G protein regulated inducer of neurite outgrowth 2
  Uniprot ID: O60269
  ENST ID: ENST00000374314
  CDS Start-End: 9-1385
aggcagccatgagctccagccgccccgagccgggtccctgggcacccctgagcccccgccttcagcccctgtcccagagctcttccagcctgctgggtgaaggccgggaacagaggccagagctccgcaagactgccagcagcaccgtgtggcaggcccagctgggcgaggccagcaccagaccccaggccccggaggaagaggggaacccgcctgagagcatgaagccagcacgggcctctggccccaaggcgcgacccagtgctggaggccactggtggagcagcactgtgggcaatgtgtccaccatgggcggcagtgacctgtgtcgcctgcgggcccctagtgctgctgctatgcagaggagccattcagacctggtccgtagcacccagatgcggggacacagtggtgctcggaaggccagtctcagctgctcagcccttggcagcagccctgtccacagggctcagctgcagccaggtggtacttctggccagggtggccaggcccctgcaggcctggaaagggacctggctcctgaggatgagacttctaactcagcctggatgctgggggcgagtcagttgtcagtgccaccactagacctgggggacacaactgcccacagcagcagtgcccaggctgagcccaaagctgctgaacagctggctaccaccacctgccatgctctgcccccagctgctctactctgtggcatgagggaggtgagggctggtggctgctgccatgccctacctgccacagggatcctggcctttcccaaactagtggcgtcagtgagcgagtctgggctgcaggctcagcatggggtgaagatccactgtaggttgtctggggggctccctgggcattcccattgctgtgcccacctttggggtcccgctgggttagtcccagagcctggctctaggaccaaagatgtgtggaccatgacctcagccaatgacttggcccctgcagaggcatccccgctgtcagcccaggatgctggtgtgcaggcggccccagtggcggcctgcaaggctgtggccaccagtccgtccctggaagcgcctgcagccctgcatgtgttcccagaggtaactctggggtccagcctggaggaggtgccgtcccctgtgcgggatgtgcgatgggatgctgagggcatgacatgggaggtgtacggagctgcggtggacctggaggtgctcggtgtggccatccagaagcacctggagatgcagtttgagcagctgcagcgggcgcccgccagcgaggacagcctgtctgtggagggccggagggggccactgcgggctgtcatgcagtccctgcggcgccccagctgctgcggctgctccggcgcggcccccgagtgaggagctgtggcccttggagctggcctgggcccactgacttagtcctagacctgggccagggacggtgggggctccgtgccccctggacccaccggcagctgggcacatctctcacctgaatattggctgcctccagaccacaggactgcagcctggggcttccggccctacacagctgggctgttttcttaagggcttgatttccaagggccacatctctgcaccttccgggctctgaactttgagacagggctttagcactgtgcagaggggagatcctgagttttctgtaaaaaatgaccttttgttca

SEQ ID NO: 135834 - DNA, 1966 bp, Homo sapiens
  Payload ID: 6551
  Gene Symbol: GPRIN2
  Gene Name: G protein regulated inducer of neurite outgrowth 2
  Uniprot ID: O60269
  ENST ID: ENST00000374317
  CDS Start-End: 274-1650
ggaatgctgcctgctgctttgcccagagttggccctgagtgttcctatcaggccccgttcactctggggtggattaaaccacctcctggagggtgctgtatccccactgtgcaatgggggtttgtgctgtgtgcattcctgcctggtccttgagagttgctgacaggtggaacctgaggcagcaggacagcctggcattggccacgggacatcggccacaaccatagcaacttcggcatcaaatggggcaggagagagaacattaaggcagccatgagctccagccgccccgagccgggtccctgggcacccctgagcccccgccttcagcccctgtcccagagctcttccagcctgctgggtgaaggccgggaacagaggccagagctccgcaagactgccagcagcaccgtgtggcaggcccagctgggcgaggccagcaccagaccccaggccccggaggaagaggggaacccgcctgagagcatgaagccagcacgggcctctggccccaaggcgcgacccagtgctggaggccactggtggagcagcactgtgggcaatgtgtccaccatgggcggcagtgacctgtgtcgcctgcgggcccctagtgctgctgctatgcagaggagccattcagacctggtccgtagcacccagatgcggggacacagtggtgctcggaaggccagtctcagctgctcagcccttggcagcagccctgtccacagggctcagctgcagccaggtggtacttctggccagggtggccaggcccctgcaggcctggaaagggacctggctcctgaggatgagacttctaactcagcctggatgctgggggcgagtcagttgtcagtgccaccactagacctgggggacacaactgcccacagcagcagtgcccaggctgagcccaaagctgctgaacagctggctaccaccacctgccatgctctgcccccagctgctctactctgtggcatgagggaggtgagggctggtggctgctgccatgccctacctgccacagggatcctggcctttcccaaactagtggcgtcagtgagcgagtctgggctgcaggctcagcatggggtgaagatccactgtaggttgtctggggggctccctgggcattcccattgctgtgcccacctttggggtcccgctgggttagtcccagagcctggctctaggaccaaagatgtgtggaccatgacctcagccaatgacttggcccctgcagaggcatccccgctgtcagcccaggatgctggtgtgcaggcggccccagtggcggcctgcaaggctgtggccaccagtccgtccctggaagcgcctgcagccctgcatgtgttcccagaggtaactctggggtccagcctggaggaggtgccgtcccctgtgcgggatgtgcgatgggatgctgagggcatgacatgggaggtgtacggagctgcggtggacctggaggtgctcggtgtggccatccagaagcacctggagatgcagtttgagcagctgcagcgggcgcccgccagcgaggacagcctgtctgtggagggccggagggggccactgcgggctgtcatgcagtccctgcggcgccccagctgctgcggctgctccggcgcggcccccgagtgaggagctgtggcccttggagctggcctgggcccactgacttagtcctagacctgggccagggacggtgggggctccgtgccccctggacccaccggcagctgggcacatctctcacctgaatattggctgcctccagaccacaggactgcagcctggggcttccggccctacacagctgggctgttttcttaagggcttgatttccaagggccacatctctgcaccttccgggctctgaactttgagacagggctttagcactgtgcagaggggagatcctgagttttctgtaaaaaatgaccttttgttcactcca

SEQ ID NO: 135835 - DNA, 1465 bp, Homo sapiens
  Payload ID: 6552
  Gene Symbol: GPBAR1
  Gene Name: G protein-coupled bile acid receptor 1
  Uniprot ID: Q8TDU6
  ENST ID: ENST00000521462
  CDS Start-End: 342-1334
gcctgggtaggagagcctggccccgctgtccccactgggtggagacaccatgcacttggtccacttgtgctcttcagccaggacaccagacatggtccaaaccgctgcagggctggctgcagcaactccctgacactcaggaaggcccaggctgggcaggcaatacctgctcccaacagccatcgaacatgatacagcccacagcctgcgggtctgcgcccctggattaacatgctgccctgccaggaggacacgacctgcagccccatcctaactctggccaccccatcctgcaggcatgccggctgccgctccaggactcccctgtccccaggaccaagatgacgcccaacagcactggcgaggtgcccagccccattcccaagggggctttggggctctccctggccctggcaagcctcatcatcaccgcgaacctgctcctagccctgggcatcgcctgggaccgccgcctgcgcagcccacctgctggctgcttcttcctgagcctactgctggctgggctgctcacgggtctggcattgcccacattgccagggctgtggaaccagagtcgccggggttactggtcctgcctcctcgtctacttggctcccaacttctccttcctctccctgcttgccaacctcttgctggtgcacggggagcgctacatggcagtcctgaggccactccagccccctgggagcattcggctggccctgctcctcacctgggctggtcccctgctctttgccagtctgcccgctctggggtggaaccactggacccctggtgccaactgcagctcccaggctatcttcccagccccctacctgtacctcgaagtctatgggctcctgctgcccgccgtgggtgctgctgccttcctctctgtccgcgtgctggccactgcccaccgccagctgcaggacatctgccggctggagcgggcagtgtgccgcgatgagccctccgccctggcccgggcccttacctggaggcaggcaagggcacaggctggagccatgctgctcttcgggctgtgctgggggccctacgtggccacactgctcctctcagtcctggcctatgagcagcgcccgccactggggcctgggacactgttgtccctcctctccctaggaagtgccagtgcagcggcagtgcccgtagccatggggctgggcgatcagcgctacacagccccctggagggcagccgcccaaaggtgcctgcaggggctgtggggaagagcctcccgggacagtcccggccccagcattgcctaccacccaagcagccaaagcagtgtcgacctggacttgaactaaaggaagggcctctgctgactcctaccagagcatccgtccagctcagccatccagcctgtctctaccgggccccacttctctggatcagagaccctgcctctgtttgaccccgcactgactgaataaagctc

SEQ ID NO: 135836 - DNA, 1382 bp, Homo sapiens
  Payload ID: 6552
  Gene Symbol: GPBAR1
  Gene Name: G protein-coupled bile acid receptor 1
  Uniprot ID: Q8TDU6
  ENST ID: ENST00000519574
  CDS Start-End: 248-1240
gagaacccagacgggcagagcctgggtaggagagcctggccccgctgtccccactgggtggagacaccatgcacttggtccacttgtgctcttcagccaggacaccagacatggtccaaaccgctgcagggctggctgcagcaactccctgacactcaggaaggcccaggctgggcaggcaatacctgctcccaacagccatgcatgccggctgccgctccaggactcccctgtccccaggaccaagatgacgcccaacagcactggcgaggtgcccagccccattcccaagggggctttggggctctccctggccctggcaagcctcatcatcaccgcgaacctgctcctagccctgggcatcgcctgggaccgccgcctgcgcagcccacctgctggctgcttcttcctgagcctactgctggctgggctgctcacgggtctggcattgcccacattgccagggctgtggaaccagagtcgccggggttactggtcctgcctcctcgtctacttggctcccaacttctccttcctctccctgcttgccaacctcttgctggtgcacggggagcgctacatggcagtcctgaggccactccagccccctgggagcattcggctggccctgctcctcacctgggctggtcccctgctctttgccagtctgcccgctctggggtggaaccactggacccctggtgccaactgcagctcccaggctatcttcccagccccctacctgtacctcgaagtctatgggctcctgctgcccgccgtgggtgctgctgccttcctctctgtccgcgtgctggccactgcccaccgccagctgcaggacatctgccggctggagcgggcagtgtgccgcgatgagccctccgccctggcccgggcccttacctggaggcaggcaagggcacaggctggagccatgctgctcttcgggctgtgctgggggccctacgtggccacactgctcctctcagtcctggcctatgagcagcgcccgccactggggcctgggacactgttgtccctcctctccctaggaagtgccagtgcagcggcagtgcccgtagccatggggctgggcgatcagcgctacacagccccctggagggcagccgcccaaaggtgcctgcaggggctgtggggaagagcctcccgggacagtcccggccccagcattgcctaccacccaagcagccaaagcagtgtcgacctggacttgaactaaaggaagggcctctgctgactcctaccagagcatccgtccagctcagccatccagcctgtctctaccgggccccacttctctggatcagagaccctgcctctgtttgaccccgcactgactgaataaagctcctctggccgtt

SEQ ID NO: 135837 - DNA, 1869 bp, Homo sapiens
  Payload ID: 6552
  Gene Symbol: GPBAR1
  Gene Name: G protein-coupled bile acid receptor 1
  Uniprot ID: Q8TDU6
  ENST ID: ENST00000479077
  CDS Start-End: 735-1727
cccgaccagatcccgtggttctgaggaccggccctggaaccctgcgtccttccgacccaccagctccctcgaggatggacttgaggctggatgctttcctcttcccactttttgtcccaacagaagtccctgatctccaggatccctgactggctgtgcagagctggcacagccacactccacgggcttccagcccttcaggcccagctctcccggagagcaccagagtccctttgctccatttacttgcgctcttcagccagcaagtgtttcctaatgtctcacccccagtcccagctttcctgctgcaatttccgcctgttccctcccatttcaggccttaagggagtgtggctgggcttctctcctccccctcactccaaagccgcacttgatacaaggtggaaatcaaagcaccacttctggcttcccagccttgaacttgcccttccctctcaatgtatctggtttcctcagcttccctgtgcagcaagagtgtcactcccctcttgcttttcccaagctccccatgcgcccctctcagcagatctgtcttagaggggccaggtgcagagaaaggcagaaatcctaataatgttcccagcgatcgctgcctgtcgcggagtgctgaagggccaagtgttgatctgagtcctcatcacacgggacttcatttagtctcacgataggcatgccggctgccgctccaggactcccctgtccccaggaccaagatgacgcccaacagcactggcgaggtgcccagccccattcccaagggggctttggggctctccctggccctggcaagcctcatcatcaccgcgaacctgctcctagccctgggcatcgcctgggaccgccgcctgcgcagcccacctgctggctgcttcttcctgagcctactgctggctgggctgctcacgggtctggcattgcccacattgccagggctgtggaaccagagtcgccggggttactggtcctgcctcctcgtctacttggctcccaacttctccttcctctccctgcttgccaacctcttgctggtgcacggggagcgctacatggcagtcctgaggccactccagccccctgggagcattcggctggccctgctcctcacctgggctggtcccctgctctttgccagtctgcccgctctggggtggaaccactggacccctggtgccaactgcagctcccaggctatcttcccagccccctacctgtacctcgaagtctatgggctcctgctgcccgccgtgggtgctgctgccttcctctctgtccgcgtgctggccactgcccaccgccagctgcaggacatctgccggctggagcgggcagtgtgccgcgatgagccctccgccctggcccgggcccttacctggaggcaggcaagggcacaggctggagccatgctgctcttcgggctgtgctgggggccctacgtggccacactgctcctctcagtcctggcctatgagcagcgcccgccactggggcctgggacactgttgtccctcctctccctaggaagtgccagtgcagcggcagtgcccgtagccatggggctgggcgatcagcgctacacagccccctggagggcagccgcccaaaggtgcctgcaggggctgtggggaagagcctcccgggacagtcccggccccagcattgcctaccacccaagcagccaaagcagtgtcgacctggacttgaactaaaggaagggcctctgctgactcctaccagagcatccgtccagctcagccatccagcctgtctctaccgggccccacttctctggatcagagaccctgcctctgtttgaccccgcactgactgaataaagctcctctggccgtt

SEQ ID NO: 135838 - DNA, 2003 bp, Homo sapiens
  Payload ID: 6552
  Gene Symbol: GPBAR1
  Gene Name: G protein-coupled bile acid receptor 1
  Uniprot ID: Q8TDU6
  ENST ID: ENST00000522678
  CDS Start-End: 869-1861
gagaacccagacgggcagagcctgggtaggagagcctggccccgctgtccccactgggtggagacaccatgcacttggtccacttgtgctcttcagccaggacaccagacatggtccaaaccgctgcagggctggctgcagcaactccctgacactcaggaaggcccaggctgggcaggcaatacctgctcccaacagccatctcccaggaaggaccctgttgctagtgtggagcaaagacgagtcaagtttatgggctggaagtcctacccggaggctgctcactgagctgtgatggctacaaggacagatggggggaagggtgcagggtgcccgagacctggcccgctggagcctgtcacctaatggctggctggaagaccactacacaccagccagccctggtccattctctcatttagaggcctccccggtggaggcagggatacacaaaatgctttggggctggatgggcccgcctttcagtctaaacaagagacctcaacacagctgcccagaaaaggcagataccagaaatggataaagctggctgggtggggactgtccgaagggcagccagcagtgagctccggctggttgctaccacacaggacatatgtgttgccagacctgaattttcaatagaaaccaaagatagttttttatataaatgtttaattggcaattaattgaaaaattctgtgtatcagcgaacatgatacagcccacagcctgcgggtctgcgcccctggattaacatgctgccctgccaggaggacacgacctgcagccccatcctaactctggccaccccatcctgcaggcatgccggctgccgctccaggactcccctgtccccaggaccaagatgacgcccaacagcactggcgaggtgcccagccccattcccaagggggctttggggctctccctggccctggcaagcctcatcatcaccgcgaacctgctcctagccctgggcatcgcctgggaccgccgcctgcgcagcccacctgctggctgcttcttcctgagcctactgctggctgggctgctcacgggtctggcattgcccacattgccagggctgtggaaccagagtcgccggggttactggtcctgcctcctcgtctacttggctcccaacttctccttcctctccctgcttgccaacctcttgctggtgcacggggagcgctacatggcagtcctgaggccactccagccccctgggagcattcggctggccctgctcctcacctgggctggtcccctgctctttgccagtctgcccgctctggggtggaaccactggacccctggtgccaactgcagctcccaggctatcttcccagccccctacctgtacctcgaagtctatgggctcctgctgcccgccgtgggtgctgctgccttcctctctgtccgcgtgctggccactgcccaccgccagctgcaggacatctgccggctggagcgggcagtgtgccgcgatgagccctccgccctggcccgggcccttacctggaggcaggcaagggcacaggctggagccatgctgctcttcgggctgtgctgggggccctacgtggccacactgctcctctcagtcctggcctatgagcagcgcccgccactggggcctgggacactgttgtccctcctctccctaggaagtgccagtgcagcggcagtgcccgtagccatggggctgggcgatcagcgctacacagccccctggagggcagccgcccaaaggtgcctgcaggggctgtggggaagagcctcccgggacagtcccggccccagcattgcctaccacccaagcagccaaagcagtgtcgacctggacttgaactaaaggaagggcctctgctgactcctaccagagcatccgtccagctcagccatccagcctgtctctaccgggccccacttctctggatcagagaccctgcctctgtttgaccccgcactgactgaataaagctcctctggccgtt

SEQ ID NO: 135839 - DNA, 2778 bp, Homo sapiens
  Payload ID: 6553
  Gene Symbol: GPER1
  Gene Name: G protein-coupled estrogen receptor 1
  Uniprot ID: Q99527
  ENST ID: ENST00000297469
  CDS Start-End: 692-1819
ggaaaacgacacctagaagtaggagtgagattcgctgaagttcccttctgaggaagacccacccctccgcctggagagccggggctggcggtgcctgaggaccccttcggcctggacagcccacgcgggcttggggggcctcgctctgccctcatggggcggccatcggttcccgaagcggcgagtgaaaattcaaatggccagtagggggcgcactcggaagtggccgccccgcatgaggcagttcagcggccccgagagtccggggagggaggtttattctccgcctgcacgagactgtgaaatccgcaaccatgagcaggagaggcggccctggtggggaagaggccaccaacatctggacggcaggtacccagagagtgagcagctccacgcgggactgtgcacggtggccgacacccgcagggacgcccgccggacgagcacgcggagggccctcgcctccacggatgcaccatgccggtgtgaggagcatctgttcttcccactctctgcagttaacaaacccaacccaaaccaccacaggtgctcctcctggggagtttcctgtctgacaaatgccaggctcacttcaaggagaatcacgcttctttctaaagatggattcaccatttaaaacagagctctgggagcctttcggcaaatcttgaaagctgcacggtgcagagacatggatgtgacttcccaagcccggggcgtgggcctggagatgtacccaggcaccgcgcagcctgcggcccccaacaccacctcccccgagctcaacctgtcccacccgctcctgggcaccgccctggccaatgggacaggtgagctctcggagcaccagcagtacgtgatcggcctgttcctctcgtgcctctacaccatcttcctcttccccatcggctttgtgggcaacatcctgatcctggtggtgaacatcagcttccgcgagaagatgaccatccccgacctgtacttcatcaacctggcggtggcggacctcatcctggtggccgactccctcattgaggtgttcaacctgcacgagcggtactacgacatcgccgtcctgtgcaccttcatgtcgctcttcctgcaggtcaacatgtacagcagcgtcttcttcctcacctggatgagcttcgaccgctacatcgccctggccagggccatgcgctgcagcctgttccgcaccaagcaccacgcccggctgagctgtggcctcatctggatggcatccgtgtcagccacgctggtgcccttcaccgccgtgcacctgcagcacaccgacgaggcctgcttctgtttcgcggatgtccgggaggtgcagtggctcgaggtcacgctgggcttcatcgtgcccttcgccatcatcggcctgtgctactccctcattgtccgggtgctggtcagggcgcaccggcaccgtgggctgcggccccggcggcagaaggcgctccgcatgatcctcgcggtggtgctggtcttcttcgtctgctggctgccggagaacgtcttcatcagcgtgcacctcctgcagcggacgcagcctggggccgctccctgcaagcagtctttccgccatgcccaccccctcacgggccacattgtcaacctcgccgccttctccaacagctgcctaaaccccctcatctacagctttctcggggagaccttcagggacaagctgaggctgtacattgagcagaaaacaaatttgccggccctgaaccgcttctgtcacgctgccctgaaggccgtcattccagacagcaccgagcagtcggatgtgaggttcagcagtgccgtgtagacagccttggccgcataggcccagccagggtgtgactcgggagctgcacacacctgggtggacacaaggcacggccacgtcatgtctctaaactgcggtcagatgtggcttctggctcctcggggcctcgcgagggtcacgcttgcctggtcaccctggggctgcttaggaaacctcacgactggtcaccttgcactcctcacacagaattgctacaatcccaaagcgctcgccccgcagggtccaaaggccagcggtgaccagcctgtcacccagctcctccccgccaaccctgcctgccgctgcacctgcctgccgctgcaggaaacatttctgacaccgtcgaccaggaaagccacacggagaggccactgtgggtgaagcgcctcagttacacaggaaccctaaagcaaatctgccaccgtgggggaactgacgctggagatgcaaggtgctggtgggtctgagctggacgtcgcggtgtgtcctctgtgcccacggtctgagctagctagcgcaccgccgagttaaagaggagaaggaaaacatgctgctctggtgcacgcctgagcgtcctccatcttccaggatggcagcaatggcgctgtgcggcctcaccaggcccacgaggagcagcagcgctcggcccggagcagcaggaaggcccctctgtggagcgcccgccgtctgctccggggtggttcagtcactgcttgttgacatcaacatggcaattgcactcatgtggactgggaccgtgcgagctgccgtgtgggttagtcgggtgccaggacaatgaaatactccagcacctgtggctgacgaatttgtttctacagaaataacagctggggacaactgcggtgatgatgtaaaaaccttcccataaaatgtaagaaaagctgatgaggctggtgacgttcagcctttgtcaataaacctgtcatgtgcggatcctt

SEQ ID NO: 135840 - DNA, 2639 bp, Homo sapiens
  Payload ID: 6553
  Gene Symbol: GPER1
  Gene Name: G protein-coupled estrogen receptor 1
  Uniprot ID: Q99527
  ENST ID: ENST00000397088
  CDS Start-End: 558-1685
aaagccctgtgccaaggggcagactcactggctcagagggaggacgcacccgccagccagccgggaaccttccctcgcgggctcccagggcgggtctcttcctctctctagccctgctcaggcattcggcaggtccagcagaggtacacctcctgcagcgggttccaagtgcacctccagcctgatgggcctgaccaaggaggcttccaggagcacagaaggggctgcaacccaggtacccagagagtgagcagctccacgcgggactgtgcacggtggccgacacccgcagggacgcccgccggacgagcacgcggagggccctcgcctccacggatgcaccatgccggtgtgaggagcatctgttcttcccactctctgcagttaacaaacccaacccaaaccaccacaggtgctcctcctggggagtttcctgtctgacaaatgccaggctcacttcaaggagaatcacgcttctttctaaagatggattcaccatttaaaacagagctctgggagcctttcggcaaatcttgaaagctgcacggtgcagagacatggatgtgacttcccaagcccggggcgtgggcctggagatgtacccaggcaccgcgcagcctgcggcccccaacaccacctcccccgagctcaacctgtcccacccgctcctgggcaccgccctggccaatgggacaggtgagctctcggagcaccagcagtacgtgatcggcctgttcctctcgtgcctctacaccatcttcctcttccccatcggctttgtgggcaacatcctgatcctggtggtgaacatcagcttccgcgagaagatgaccatccccgacctgtacttcatcaacctggcggtggcggacctcatcctggtggccgactccctcattgaggtgttcaacctgcacgagcggtactacgacatcgccgtcctgtgcaccttcatgtcgctcttcctgcaggtcaacatgtacagcagcgtcttcttcctcacctggatgagcttcgaccgctacatcgccctggccagggccatgcgctgcagcctgttccgcaccaagcaccacgcccggctgagctgtggcctcatctggatggcatccgtgtcagccacgctggtgcccttcaccgccgtgcacctgcagcacaccgacgaggcctgcttctgtttcgcggatgtccgggaggtgcagtggctcgaggtcacgctgggcttcatcgtgcccttcgccatcatcggcctgtgctactccctcattgtccgggtgctggtcagggcgcaccggcaccgtgggctgcggccccggcggcagaaggcgctccgcatgatcctcgcggtggtgctggtcttcttcgtctgctggctgccggagaacgtcttcatcagcgtgcacctcctgcagcggacgcagcctggggccgctccctgcaagcagtctttccgccatgcccaccccctcacgggccacattgtcaacctcgccgccttctccaacagctgcctaaaccccctcatctacagctttctcggggagaccttcagggacaagctgaggctgtacattgagcagaaaacaaatttgccggccctgaaccgcttctgtcacgctgccctgaaggccgtcattccagacagcaccgagcagtcggatgtgaggttcagcagtgccgtgtagacagccttggccgcataggcccagccagggtgtgactcgggagctgcacacacctgggtggacacaaggcacggccacgtcatgtctctaaactgcggtcagatgtggcttctggctcctcggggcctcgcgagggtcacgcttgcctggtcaccctggggctgcttaggaaacctcacgactggtcaccttgcactcctcacacagaattgctacaatcccaaagcgctcgccccgcagggtccaaaggccagcggtgaccagcctgtcacccagctcctccccgccaaccctgcctgccgctgcacctgcctgccgctgcaggaaacatttctgacaccgtcgaccaggaaagccacacggagaggccactgtgggtgaagcgcctcagttacacaggaaccctaaagcaaatctgccaccgtgggggaactgacgctggagatgcaaggtgctggtgggtctgagctggacgtcgcggtgtgtcctctgtgcccacggtctgagctagctagcgcaccgccgagttaaagaggagaaggaaaacatgctgctctggtgcacgcctgagcgtcctccatcttccaggatggcagcaatggcgctgtgcggcctcaccaggcccacgaggagcagcagcgctcggcccggagcagcaggaaggcccctctgtggagcgcccgccgtctgctccggggtggttcagtcactgcttgttgacatcaacatggcaattgcactcatgtggactgggaccgtgcgagctgccgtgtgggttagtcgggtgccaggacaatgaaatactccagcacctgtggctgacgaatttgtttctacagaaataacagctggggacaactgcggtgatgatgtaaaaaccttcccataaaatgtaagaaaagctgatgaggctggtgacgttcagcctttgtcaataaacctgtcatgtgcgga

SEQ ID NO: 135841 - DNA, 2971 bp, Homo sapiens
  Payload ID: 6553
  Gene Symbol: GPER1
  Gene Name: G protein-coupled estrogen receptor 1
  Uniprot ID: Q99527
  ENST ID: ENST00000397092
  CDS Start-End: 885-2012
gcattactcatactcagcggacaaaggatcactcagcattcaatctcaccacttcaaaacattacagagggaaaacgacacctagaagtaggagtgagattcgctgaagttcccttctgaggaagacccacccctccgcctggagagccggggctggcggtgcctgaggaccccttcggcctggacagcccacgcgggcttggggggcctcgctctgccctcatggggcggccatcggttcccgaagcggcgagtgaaaattcaaatggccagtagggggcgcactcggaagtggccgccccgcatgaggcagttcagcggccccgagagtccggggagggaggtttattctccgcctgcacgagactgtgaaatccgcaaccatgagcaggagaggcggccctggtggggaagaggccaccaacatctggacggcagccctgctcaggcattcggcaggtccagcagaggtacacctcctgcagcgggttccaagtgcacctccagcctgatgggcctgaccaaggaggcttccaggagcacagaaggggctgcaacccaggtacccagagagtgagcagctccacgcgggactgtgcacggtggccgacacccgcagggacgcccgccggacgagcacgcggagggccctcgcctccacggatgcaccatgccggtgtgaggagcatctgttcttcccactctctgcagttaacaaacccaacccaaaccaccacaggtgctcctcctggggagtttcctgtctgacaaatgccaggctcacttcaaggagaatcacgcttctttctaaagatggattcaccatttaaaacagagctctgggagcctttcggcaaatcttgaaagctgcacggtgcagagacatggatgtgacttcccaagcccggggcgtgggcctggagatgtacccaggcaccgcgcagcctgcggcccccaacaccacctcccccgagctcaacctgtcccacccgctcctgggcaccgccctggccaatgggacaggtgagctctcggagcaccagcagtacgtgatcggcctgttcctctcgtgcctctacaccatcttcctcttccccatcggctttgtgggcaacatcctgatcctggtggtgaacatcagcttccgcgagaagatgaccatccccgacctgtacttcatcaacctggcggtggcggacctcatcctggtggccgactccctcattgaggtgttcaacctgcacgagcggtactacgacatcgccgtcctgtgcaccttcatgtcgctcttcctgcaggtcaacatgtacagcagcgtcttcttcctcacctggatgagcttcgaccgctacatcgccctggccagggccatgcgctgcagcctgttccgcaccaagcaccacgcccggctgagctgtggcctcatctggatggcatccgtgtcagccacgctggtgcccttcaccgccgtgcacctgcagcacaccgacgaggcctgcttctgtttcgcggatgtccgggaggtgcagtggctcgaggtcacgctgggcttcatcgtgcccttcgccatcatcggcctgtgctactccctcattgtccgggtgctggtcagggcgcaccggcaccgtgggctgcggccccggcggcagaaggcgctccgcatgatcctcgcggtggtgctggtcttcttcgtctgctggctgccggagaacgtcttcatcagcgtgcacctcctgcagcggacgcagcctggggccgctccctgcaagcagtctttccgccatgcccaccccctcacgggccacattgtcaacctcgccgccttctccaacagctgcctaaaccccctcatctacagctttctcggggagaccttcagggacaagctgaggctgtacattgagcagaaaacaaatttgccggccctgaaccgcttctgtcacgctgccctgaaggccgtcattccagacagcaccgagcagtcggatgtgaggttcagcagtgccgtgtagacagccttggccgcataggcccagccagggtgtgactcgggagctgcacacacctgggtggacacaaggcacggccacgtcatgtctctaaactgcggtcagatgtggcttctggctcctcggggcctcgcgagggtcacgcttgcctggtcaccctggggctgcttaggaaacctcacgactggtcaccttgcactcctcacacagaattgctacaatcccaaagcgctcgccccgcagggtccaaaggccagcggtgaccagcctgtcacccagctcctccccgccaaccctgcctgccgctgcacctgcctgccgctgcaggaaacatttctgacaccgtcgaccaggaaagccacacggagaggccactgtgggtgaagcgcctcagttacacaggaaccctaaagcaaatctgccaccgtgggggaactgacgctggagatgcaaggtgctggtgggtctgagctggacgtcgcggtgtgtcctctgtgcccacggtctgagctagctagcgcaccgccgagttaaagaggagaaggaaaacatgctgctctggtgcacgcctgagcgtcctccatcttccaggatggcagcaatggcgctgtgcggcctcaccaggcccacgaggagcagcagcgctcggcccggagcagcaggaaggcccctctgtggagcgcccgccgtctgctccggggtggttcagtcactgcttgttgacatcaacatggcaattgcactcatgtggactgggaccgtgcgagctgccgtgtgggttagtcgggtgccaggacaatgaaatactccagcacctgtggctgacgaatttgtttctacagaaataacagctggggacaactgcggtgatgatgtaaaaaccttcccataaaatgtaagaaaagctgatgaggctggtgacgttcagcctttgtcaataaacctgtcatgtgcggatcctt

SEQ ID NO: 135842 - DNA, 1542 bp, Homo sapiens
  Payload ID: 6553
  Gene Symbol: GPER1
  Gene Name: G protein-coupled estrogen receptor 1
  Uniprot ID: Q99527
  ENST ID: ENST00000401670
  CDS Start-End: 390-1517
attccatggtactcggagtcctgggaaccactcatcactgtcgggtgcaggtggacgtcccctcacggtacccagagagtgagcagctccacgcgggactgtgcacggtggccgacacccgcagggacgcccgccggacgagcacgcggagggccctcgcctccacggatgcaccatgccggtgtgaggagcatctgttcttcccactctctgcagttaacaaacccaacccaaaccaccacaggtgctcctcctggggagtttcctgtctgacaaatgccaggctcacttcaaggagaatcacgcttctttctaaagatggattcaccatttaaaacagagctctgggagcctttcggcaaatcttgaaagctgcacggtgcagagacatggatgtgacttcccaagcccggggcgtgggcctggagatgtacccaggcaccgcgcagcctgcggcccccaacaccacctcccccgagctcaacctgtcccacccgctcctgggcaccgccctggccaatgggacaggtgagctctcggagcaccagcagtacgtgatcggcctgttcctctcgtgcctctacaccatcttcctcttccccatcggctttgtgggcaacatcctgatcctggtggtgaacatcagcttccgcgagaagatgaccatccccgacctgtacttcatcaacctggcggtggcggacctcatcctggtggccgactccctcattgaggtgttcaacctgcacgagcggtactacgacatcgccgtcctgtgcaccttcatgtcgctcttcctgcaggtcaacatgtacagcagcgtcttcttcctcacctggatgagcttcgaccgctacatcgccctggccagggccatgcgctgcagcctgttccgcaccaagcaccacgcccggctgagctgtggcctcatctggatggcatccgtgtcagccacgctggtgcccttcaccgccgtgcacctgcagcacaccgacgaggcctgcttctgtttcgcggatgtccgggaggtgcagtggctcgaggtcacgctgggcttcatcgtgcccttcgccatcatcggcctgtgctactccctcattgtccgggtgctggtcagggcgcaccggcaccgtgggctgcggccccggcggcagaaggcgctccgcatgatcctcgcggtggtgctggtcttcttcgtctgctggctgccggagaacgtcttcatcagcgtgcacctcctgcagcggacgcagcctggggccgctccctgcaagcagtctttccgccatgcccaccccctcacgggccacattgtcaacctcgccgccttctccaacagctgcctaaaccccctcatctacagctttctcggggagaccttcagggacaagctgaggctgtacattgagcagaaaacaaatttgccggccctgaaccgcttctgtcacgctgccctgaaggccgtcattccagacagcaccgagcagtcggatgtgaggttcagcagtgccgtgtagacagccttggccgcataggcccagc

SEQ ID NO: 135843 - DNA, 1105 bp, Homo sapiens
  Payload ID: 6553
  Gene Symbol: GPER1
  Gene Name: G protein-coupled estrogen receptor 1
  ENST ID: ENST00000413368
  CDS Start-End: 885-1105
gcattactcatactcagcggacaaaggatcactcagcattcaatctcaccacttcaaaacattacagagggaaaacgacacctagaagtaggagtgagattcgctgaagttcccttctgaggaagacccacccctccgcctggagagccggggctggcggtgcctgaggaccccttcggcctggacagcccacgcgggcttggggggcctcgctctgccctcatggggcggccatcggttcccgaagcggcgagtgaaaattcaaatggccagtagggggcgcactcggaagtggccgccccgcatgaggcagttcagcggccccgagagtccggggagggaggtttattctccgcctgcacgagactgtgaaatccgcaaccatgagcaggagaggcggccctggtggggaagaggccaccaacatctggacggcagccctgctcaggcattcggcaggtccagcagaggtacacctcctgcagcgggttccaagtgcacctccagcctgatgggcctgaccaaggaggcttccaggagcacagaaggggctgcaacccaggtacccagagagtgagcagctccacgcgggactgtgcacggtggccgacacccgcagggacgcccgccggacgagcacgcggagggccctcgcctccacggatgcaccatgccggtgtgaggagcatctgttcttcccactctctgcagttaacaaacccaacccaaaccaccacaggtgctcctcctggggagtttcctgtctgacaaatgccaggctcacttcaaggagaatcacgcttctttctaaagatggattcaccatttaaaacagagctctgggagcctttcggcaaatcttgaaagctgcacggtgcagagacatggatgtgacttcccaagcccggggcgtgggcctggagatgtacccaggcaccgcgcagcctgcggcccccaacaccacctcccccgagctcaacctgtcccacccgctcctgggcaccgccctggccaatgggacaggtgagctctcggagcaccagcagtacgtgatcggcctgttcctctcgtgcctctacaccatcttcctcttccccatcggctt

SEQ ID NO: 135844 - DNA, 1900 bp, Homo sapiens
  Payload ID: 6553
  Gene Symbol: GPER1
  Gene Name: G protein-coupled estrogen receptor 1
  ENST ID: ENST00000617001
  CDS Start-End: 102-1328
cttcaaggagaatcacgcttctttctaaagatggattcaccatttaaaacagagctctgggagcctttcggcaaatcttgaaagctgcacggtgcagagacatggatgtgacttcccaagcccggggcgtgggcctggagatgtacccaggcaccgcgcagcctgcggcccccaacaccacctcccccgagctcaacctgtcccacccgctcctgggcaccgccctggccaatgggacaggtgagctctcggagcaccagcagtacgtgatcggcctgttcctctcgtgcctctacaccatcttcctcttccccatcggctttgtgggcaacatcctgatcctggtggtgaacatcagcttccgcgagaagatgaccatccccgacctgtacttcatcaacctggcggtggcggacctcatcctggtggccgactccctcattgaggtgttcaacctgcacgagcggtactacgacatcgccgtcctgtgcaccttcatgtcgctcttcctgcaggtcaacatgtacagcagcgtcttcttcctcacctggatgagcttcgaccgctacatcgccctggccagggccatgcgctgcagcctgttccgcaccaagcaccacgcccggctgagctgtggcctcatctggatggcatccgtgtcagccacgctggtgcccttcaccgccgtgcacctgcagcacaccgacgaggcctgcttctgtttcgcggatgtccgggaggtgcagtggctcgaggtcacgctgggcttcatcgtgcccttcgccatcatcggcctgtgctactccctcattgtccgggtgctggtcagggcgcaccggcaccgtgggctgcggccccggcggcagaaggcgctccgcatgatcctcgcggtggtgctggtcttcttcgtctgctggctgccggagaacgtcttcatcagcgtgcacctcctgcagcggacgcagcctggggccgctccctgcaagcagtctttccgccatgcccaccccctcacgcacggccacgtcatgtctctaaactgcggtcagatgtggcttctggctcctcggggcctcgcgagggtcacgcttgcctggtcaccctggggctgcttaggaaacctcacgactggtcaccttgcactcctcacacagaattgctacaatcccaaagcgctcgccccgcagggtccaaaggccagcggtgaccagcctgtcacccagctcctccccgccaaccctgcctgccgctgcacctgcctgccgctgcaggaaacatttctgacaccgtcgaccaggaaagccacacggagaggccactgtgggtgaagcgcctcagttacacaggaaccctaaagcaaatctgccaccgtgggggaactgacgctggagatgcaaggtgctggtgggtctgagctggacgtcgcggtgtgtcctctgtgcccacggtctgagctagctagcgcaccgccgagttaaagaggagaaggaaaacatgctgctctggtgcacgcctgagcgtcctccatcttccaggatggcagcaatggcgctgtgcggcctcaccaggcccacgaggagcagcagcgctcggcccggagcagcaggaaggcccctctgtggagcgcccgccgtctgctccggggtggttcagtcactgcttgttgacatcaacatggcaattgcactcatgtggactgggaccgtgcgagctgccgtgtgggttagtcgggtgccaggacaatgaaatactccagcacctgtggctgacgaatttgtttctacagaaataacagctggggacaactgcggtgatgatgtaaaaaccttcccataaaatgtaagaaaagctgatgaggctggtgacgttcagcctttgtcaataaacctgtcatgtgcgg

SEQ ID NO: 135845 - DNA, 571 bp, Homo sapiens
  Payload ID: 6553
  Gene Symbol: GPER1
  Gene Name: G protein-coupled estrogen receptor 1
  ENST ID: ENST00000619052
  CDS Start-End: 1-531
atgtctctaaactgcggtcagatgtggcttctggctcctcggggcctcgcgagggtcacgcttgcctggtcaccctggggctgcttaggaaacctcacgactggtcaccttgcactcctcacacagaattgctacaatcccaaagcgctcgccccgcagggtccaaaggccagcggtgaccagcctgtcacccagctcctccccgccaaccctgcctgccgctgcacctgcctgccgctgcaggaaacatttctgagcgtcctccatcttccaggatggcagcaatggcgctgtgcggcctcaccaggcccacgaggagcagcagcgctcggcccggagcagcaggaaggcccctctgtggagcgcccgccgtctgctccggggtggttcagtcactgcttgttgacatcaacatggcaattgcactcatgtggactgggaccgtgcgagctgccgtgtgggttagtcgggtgccaggacaatgaaatactccagcacctgtggctgacgaatttgtttctacagaaataacagctggggacaactgcggtgatgatgtaaaaaccttccc

SEQ ID NO: 135846 - DNA, 2295 bp, Homo sapiens
  Payload ID: 6554
  Gene Symbol: GPR1
  Gene Name: G protein-coupled receptor 1
  Uniprot ID: P46091
  ENST ID: ENST00000407325
  CDS Start-End: 364-1431
aaaccacatttccttttccagggcaataacttaaaatattatgtatttccctttgttgcaaagagaggaaatacttcttcctagactcagggcagctgtgacccgtcctcccagagaaatcattaaaccacaaggattcagacagagcccagagccctgaaaactttggccacgcactttcccgcagcagccacaggcaccggcaacttcagagagccagataaaagtggaatgaggaatgcagccgttctgaacaccaccctccatttcattctggaaccgggaaggtacacccaggcatgacaatagcttctctcctcacagaaatttaactgatttcttcattctccatttagcaaggtcatggaagatttggaggaaacattatttgaagaatttgaaaactattcctatgacctagactattactctctggagtctgatttggaggagaaagtccagctgggagttgttcactgggtctccctggtgttatattgtttggcttttgttctgggaattccaggaaatgccatcgtcatttggttcacggggttcaagtggaagaagacagtcaccactctgtggttcctcaatctagccattgcggatttcatttttcttctctttctgcccctgtacatctcctatgtggccatgaatttccactggccctttggcatctggctgtgcaaagccaattccttcactgcccagttgaacatgtttgccagtgtttttttcctgacagtgatcagcctggaccactatatccacttgatccatcctgtcttatctcatcggcatcgaaccctcaagaactctctgattgtcattatattcatctggcttttggcttctctaattggcggtcctgccctgtacttccgggacactgtggagttcaataatcatactctttgctataacaattttcagaagcatgatcctgacctcactttgatcaggcaccatgttctgacttgggtgaaatttatcattggctatctcttccctttgctaacaatgagtatttgctacttgtgtctcatcttcaaggtgaagaagcgaagcatcctgatctccagtaggcatttctggacaattctggttgtggttgtggcctttgtggtttgctggactccttatcacctgtttagcatttgggagctcaccattcaccacaatagctattcccaccatgtgatgcaggctggaatccccctctccactggtttggcattcctcaatagttgcttgaaccccatcctttatgtcctaattagtaagaagttccaagctcgcttccggtcctcagttgctgagatactcaagtacacactgtgggaagtcagctgttctggcacagtgagtgaacagctcaggaactcagaaaccaagaatctgtgtctcctggaaacagctcaataagttattacttttccacaaatcagtatatggctttttatgtgggtcctctgactgatgctttcagattaaaattgtttccaagatagagagccgactccactttcatagttattgtttctggtcactatataggcatcacatttttgtgtggatatgaaacttaggaaggatcctcttgactccttgtgatgtggcaataaattttttttaaaaaactgaaaatacttaggaaggatccgcataatttttttctgcaacttaaatgaaatgcatcattcttgttaattataccatggtgaattaatcacttttgaagcaatatcagttattttttgaataataacttttctaaagccttaagtcttaatattaaatatatgattagccaggcacggtggctgacacctgtaatcccagcactttgggaggccaaggtggggggattacccgaggtcaggaattcgagaccagcctgaccaacatggagaaaccccgtctctactaaaaatacaaaattagccggtcatggtggtgcatgtctgcaaacccagctactcgggaggctgaagcaggagaatcacttgaacctgggaggcagaggttgtggtgagccaacatcacaccattgcactccagcctgggcaacaagagtaaaactctgtctcaaaaataaataaataaaatagataaataaatatatgattaactaattttaaaaatgttaaaatgtattcttaaattcattttaattttgtacaataacctgctagacacatttttaaaatgcaacatgtgtacttaatttctttatgtaatctatgtatatacatttatgaattaaagtaattgttggttatcttaaaa

SEQ ID NO: 135847 - DNA, 756 bp, Homo sapiens
  Payload ID: 6554
  Gene Symbol: GPR1
  Gene Name: G protein-coupled receptor 1
  ENST ID: ENST00000451790
  CDS Start-End: 222-756
agctagtagcagtggtttccattcaaaaaacaaacttcttacacaaacataggctggtcgaaagaattaatttgtacaataaaagtggaatgaggaatgcagccgttctgaacaccaccctccatttcattctggaaccgggaaggtacacccaggcatgacaatagcttctctcctcacagaaatttaactgatttcttcattctccatttagcaaggtcatggaagatttggaggaaacattatttgaagaatttgaaaactattcctatgacctagactattactctctggagtctgatttggaggagaaagtccagctgggagttgttcactgggtctccctggtgttatattgtttggcttttgttctgggaattccaggaaatgccatcgtcatttggttcacggggttcaagtggaagaagacagtcaccactctgtggttcctcaatctagccattgcggatttcatttttcttctctttctgcccctgtacatctcctatgtggccatgaatttccactggccctttggcatctggctgtgcaaagccaattccttcactgcccagttgaacatgtttgccagtgtttttttcctgacagtgatcagcctggaccactatatccacttgatccatcctgtcttatctcatcggcatcgaaccctcaagaactctctgattgtcattatattcatctggcttttggcttctctaattggcggtcctgccctgtacttccgggacactg

SEQ ID NO: 135848 - DNA, 1557 bp, Homo sapiens
  Payload ID: 6554
  Gene Symbol: GPR1
  Gene Name: G protein-coupled receptor 1
  Uniprot ID: P46091
  ENST ID: ENST00000437420
  CDS Start-End: 490-1557
attaaaccacaaggattcagacagagcccagagccctgaaaactttggccacgcactttcccgcagcagccacaggcaccggcaacttcagagaggtaattagaacttcggaaatcttagtggaaaagatggagaactaagtcctccgcagactttcccactaagtatcctcaagaatcactttctgcatcgggcaaaacagaattagaagcaagaatctagacaaggcttcgtcctcatttagaagcctttaagaattctctgctttaagtggatgaaaacgtccctgtatggctgggttgccatggttcctcgctgtgacccccagggctactgagcctgccatataaaagtggaatgaggaatgcagccgttctgaacaccaccctccatttcattctggaaccgggaaggtacacccaggcatgacaatagcttctctcctcacagaaatttaactgatttcttcattctccatttagcaaggtcatggaagatttggaggaaacattatttgaagaatttgaaaactattcctatgacctagactattactctctggagtctgatttggaggagaaagtccagctgggagttgttcactgggtctccctggtgttatattgtttggcttttgttctgggaattccaggaaatgccatcgtcatttggttcacggggttcaagtggaagaagacagtcaccactctgtggttcctcaatctagccattgcggatttcatttttcttctctttctgcccctgtacatctcctatgtggccatgaatttccactggccctttggcatctggctgtgcaaagccaattccttcactgcccagttgaacatgtttgccagtgtttttttcctgacagtgatcagcctggaccactatatccacttgatccatcctgtcttatctcatcggcatcgaaccctcaagaactctctgattgtcattatattcatctggcttttggcttctctaattggcggtcctgccctgtacttccgggacactgtggagttcaataatcatactctttgctataacaattttcagaagcatgatcctgacctcactttgatcaggcaccatgttctgacttgggtgaaatttatcattggctatctcttccctttgctaacaatgagtatttgctacttgtgtctcatcttcaaggtgaagaagcgaagcatcctgatctccagtaggcatttctggacaattctggttgtggttgtggcctttgtggtttgctggactccttatcacctgtttagcatttgggagctcaccattcaccacaatagctattcccaccatgtgatgcaggctggaatccccctctccactggtttggcattcctcaatagttgcttgaaccccatcctttatgtcctaattagtaagaagttccaagctcgcttccggtcctcagttgctgagatactcaagtacacactgtgggaagtcagctgttctggcacagtgagtgaacagctcaggaactcagaaaccaagaatctgtgtctcctggaaacagctcaataa

SEQ ID NO: 135849 - DNA, 603 bp, Homo sapiens
  Payload ID: 6554
  Gene Symbol: GPR1
  Gene Name: G protein-coupled receptor 1
  ENST ID: ENST00000411719
  CDS Start-End: 383-603
aacagatttacttaaccactggcaaaccacatttccttttccagggcaataacttaaaatattatgtatttccctttgttgcaaagagaggaaatacttcttcctagactcagggcagctgtgacccgtcctcccagagaaatcattaaaccacaaggattcagacagagcccagagccctgaaaactttggccacgcactttcccgcagcagccacaggcaccggcaacttcagagagataaaagtggaatgaggaatgcagccgttctgaacaccaccctccatttcattctggaaccgggaaggtacacccaggcatgacaatagcttctctcctcacagaaatttaactgatttcttcattctccatttagcaaggtcatggaagatttggaggaaacattatttgaagaatttgaaaactattcctatgacctagactattactctctggagtctgatttggaggagaaagtccagctgggagttgttcactgggtctccctggtgttatattgtttggcttttgttctgggaattccaggaaatgccatcgtcatttggttcacggggttcaagtggaagaagacagtcaccactct

SEQ ID NO: 135850 - DNA, 592 bp, Homo sapiens
  Payload ID: 6554
  Gene Symbol: GPR1
  Gene Name: G protein-coupled receptor 1
  ENST ID: ENST00000439932
  CDS Start-End: 345-592
attcgaagaacattccatctctgctaatttaacttgccttttcataagcaaaagcctacccagacaaaggagggctgggtgacccccatccattaccgattttcagtctgcagcagaacagctagtagcagtggtttccattcaaaaaacaaacttcttacacaaacataggctggtcgaaagaattaatttgtacaccagataaaagtggaatgaggaatgcagccgttctgaacaccaccctccatttcattctggaaccgggaaggtacacccaggcatgacaatagcttctctcctcacagaaatttaactgatttcttcattctccatttagcaaggtcatggaagatttggaggaaacattatttgaagaatttgaaaactattcctatgacctagactattactctctggagtctgatttggaggagaaagtccagctgggagttgttcactgggtctccctggtgttatattgtttggcttttgttctgggaattccaggaaatgccatcgtcatttggttcacggggttcaagtggaagaagacagtcaccactctgtggttcctcaatctagccattgcgga

SEQ ID NO: 135851 - DNA, 572 bp, Homo sapiens
  Payload ID: 6554
  Gene Symbol: GPR1
  Gene Name: G protein-coupled receptor 1
  ENST ID: ENST00000447845
  CDS Start-End: 161-572
gtcatttcaaaagccagataaaagtggaatgaggaatgcagccgttctgaacaccaccctccatttcattctggaaccgggaaggtacacccaggcatgacaatagcttctctcctcacagaaatttaactgatttcttcattctccatttagcaaggtcatggaagatttggaggaaacattatttgaagaatttgaaaactattcctatgacctagactattactctctggagtctgatttggaggagaaagtccagctgggagttgttcactgggtctccctggtgttatattgtttggcttttgttctgggaattccaggaaatgccatcgtcatttggttcacggggttcaagtggaagaagacagtcaccactctgtggttcctcaatctagccattgcggatttcatttttcttctctttctgcccctgtacatctcctatgtggccatgaatttccactggccctttggcatctggctgtgcaaagccaattccttcactgcccagttgaacatgtttgccagtgtttttttcctgacagtgatcagcctggaccactatatcc

SEQ ID NO: 135852 - DNA, 830 bp, Homo sapiens
  Payload ID: 6554
  Gene Symbol: GPR1
  Gene Name: G protein-coupled receptor 1
  ENST ID: ENST00000442134
  CDS Start-End: 149-830
attctggaaccgggaaggtacacccaggcatgacaatagcttctctcctcacagaaatttaactgttccctatatcatcgatgaaggaacaggagctgattgtaccaaaacacttatatgatttcttcattctccatttagcaaggtcatggaagatttggaggaaacattatttgaagaatttgaaaactattcctatgacctagactattactctctggagtctgatttggaggagaaagtccagctgggagttgttcactgggtctccctggtgttatattgtttggcttttgttctgggaattccaggaaatgccatcgtcatttggttcacggggttcaagtggaagaagacagtcaccactctgtggttcctcaatctagccattgcggatttcatttttcttctctttctgcccctgtacatctcctatgtggccatgaatttccactggccctttggcatctggctgtgcaaagccaattccttcactgcccagttgaacatgtttgccagtgtttttttcctgacagtgatcagcctggaccactatatccacttgatccatcctgtcttatctcatcggcatcgaaccctcaagaactctctgattgtcattatattcatctggcttttggcttctctaattggcggtcctgccctgtacttccgggacactgtggagttcaataatcatactctttgctataacaattttcagaagcatgatcctgacctcactttgatcaggcaccatgttctgacttgggtgaaatttatcattggctatctcttccctttgctaacaatgagtatttgctacttgt

SEQ ID NO: 135853 - DNA, 547 bp, Homo sapiens
  Payload ID: 6554
  Gene Symbol: GPR1
  Gene Name: G protein-coupled receptor 1
  ENST ID: ENST00000458440
  CDS Start-End: 491-547
aaaccacaaggattcagacagagcccagagccctgaaaactttggccacgcactttcccgcagcagccacaggcaccggcaacttcagagaggtaattagaacttcggaaatcttagtggaaaagatggagaactaagtcctccgcagactttcccactaagtatcctcaagaatcactttctgcatcgggcaaaacagaattagaagcaagaatctagacaaggcttcgtcctcatttagaagcctttaagaattctctgctttaagtggatgaaaacgtccctgtatggctgggttgccatggttcctcgctgtgacccccagggctactgagcctgccatccagataaaagtggaatgaggaatgcagccgttctgaacaccaccctccatttcattctggaaccgggaaggtacacccaggcatgacaatagcttctctcctcacagaaatttaactgatttcttcattctccatttagcaaggtcatggaagatttggaggaaacattatttgaagaatttgaaaactattcctatgaccta

SEQ ID NO: 135854 - DNA, 2565 bp, Homo sapiens
  Payload ID: 6554
  Gene Symbol: GPR1
  Gene Name: G protein-coupled receptor 1
  Uniprot ID: P46091
  ENST ID: ENST00000612892
  CDS Start-End: 638-1705
aacagatttacttaaccactggcaaaccacatttccttttccagggcaataacttaaaatattatgtatttccctttgttgcaaagagaggaaatacttcttcctagactcagggcagctgtgacccgtcctcccagagaaatcattaaaccacaaggattcagacagagcccagagccctgaaaactttggccacgcactttcccgcagcagccacaggcaccggcaacttcagagaggtaattagaacttcggaaatcttagtggaaaagatggagaactaagtcctccgcagactttcccactaagtatcctcaagaatcactttctgcatcgggcaaaacagaattagaagcaagaatctagacaaggcttcgtcctcatttagaagcctttaagaattctctgctttaagtggatgaaaacgtccctgtatggctgggttgccatggttcctcgctgtgacccccagggctactgagcctgccatccagataaaagtggaatgaggaatgcagccgttctgaacaccaccctccatttcattctggaaccgggaaggtacacccaggcatgacaatagcttctctcctcacagaaatttaactgatttcttcattctccatttagcaaggtcatggaagatttggaggaaacattatttgaagaatttgaaaactattcctatgacctagactattactctctggagtctgatttggaggagaaagtccagctgggagttgttcactgggtctccctggtgttatattgtttggcttttgttctgggaattccaggaaatgccatcgtcatttggttcacggggttcaagtggaagaagacagtcaccactctgtggttcctcaatctagccattgcggatttcatttttcttctctttctgcccctgtacatctcctatgtggccatgaatttccactggccctttggcatctggctgtgcaaagccaattccttcactgcccagttgaacatgtttgccagtgtttttttcctgacagtgatcagcctggaccactatatccacttgatccatcctgtcttatctcatcggcatcgaaccctcaagaactctctgattgtcattatattcatctggcttttggcttctctaattggcggtcctgccctgtacttccgggacactgtggagttcaataatcatactctttgctataacaattttcagaagcatgatcctgacctcactttgatcaggcaccatgttctgacttgggtgaaatttatcattggctatctcttccctttgctaacaatgagtatttgctacttgtgtctcatcttcaaggtgaagaagcgaagcatcctgatctccagtaggcatttctggacaattctggttgtggttgtggcctttgtggtttgctggactccttatcacctgtttagcatttgggagctcaccattcaccacaatagctattcccaccatgtgatgcaggctggaatccccctctccactggtttggcattcctcaatagttgcttgaaccccatcctttatgtcctaattagtaagaagttccaagctcgcttccggtcctcagttgctgagatactcaagtacacactgtgggaagtcagctgttctggcacagtgagtgaacagctcaggaactcagaaaccaagaatctgtgtctcctggaaacagctcaataagttattacttttccacaaatcagtatatggctttttatgtgggtcctctgactgatgctttcagattaaaattgtttccaagatagagagccgactccactttcatagttattgtttctggtcactatataggcatcacatttttgtgtggatatgaaacttaggaaggatcctcttgactccttgtgatgtggcaataaattttttttaaaaaactgaaaatacttaggaaggatccgcataatttttttctgcaacttaaatgaaatgcatcattcttgttaattataccatggtgaattaatcacttttgaagcaatatcagttattttttgaataataacttttctaaagccttaagtcttaatattaaatatatgattagccaggcacggtggctgacacctgtaatcccagcactttgggaggccaaggtggggggattacccgaggtcaggaattcgagaccagcctgaccaacatggagaaaccccgtctctactaaaaatacaaaattagccggtcatggtggtgcatgtctgcaaacccagctactcgggaggctgaagcaggagaatcacttgaacctgggaggcagaggttgtggtgagccaacatcacaccattgcactccagcctgggcaacaagagtaaaactctgtctcaaaaataaataaataaaatagataaataaatatatgattaactaattttaaaaatgttaaaatgtattcttaaattcattttaattttgtacaataacctgctagacacatttttaaaatgcaacatgtgtacttaatttctttatgtaatctatgtatatacatttatgaattaaagtaattgttggttatctt

SEQ ID NO: 135855 - DNA, 2156 bp, Homo sapiens
  Payload ID: 6554
  Gene Symbol: GPR1
  Gene Name: G protein-coupled receptor 1
  Uniprot ID: P46091
  ENST ID: ENST00000621141
  CDS Start-End: 229-1296
aacagctagtagcagtggtttccattcaaaaaacaaacttcttacacaaacataggctggtcgaaagaattaatttgtacaccagataaaagtggaatgaggaatgcagccgttctgaacaccaccctccatttcattctggaaccgggaaggtacacccaggcatgacaatagcttctctcctcacagaaatttaactgatttcttcattctccatttagcaaggtcatggaagatttggaggaaacattatttgaagaatttgaaaactattcctatgacctagactattactctctggagtctgatttggaggagaaagtccagctgggagttgttcactgggtctccctggtgttatattgtttggcttttgttctgggaattccaggaaatgccatcgtcatttggttcacggggttcaagtggaagaagacagtcaccactctgtggttcctcaatctagccattgcggatttcatttttcttctctttctgcccctgtacatctcctatgtggccatgaatttccactggccctttggcatctggctgtgcaaagccaattccttcactgcccagttgaacatgtttgccagtgtttttttcctgacagtgatcagcctggaccactatatccacttgatccatcctgtcttatctcatcggcatcgaaccctcaagaactctctgattgtcattatattcatctggcttttggcttctctaattggcggtcctgccctgtacttccgggacactgtggagttcaataatcatactctttgctataacaattttcagaagcatgatcctgacctcactttgatcaggcaccatgttctgacttgggtgaaatttatcattggctatctcttccctttgctaacaatgagtatttgctacttgtgtctcatcttcaaggtgaagaagcgaagcatcctgatctccagtaggcatttctggacaattctggttgtggttgtggcctttgtggtttgctggactccttatcacctgtttagcatttgggagctcaccattcaccacaatagctattcccaccatgtgatgcaggctggaatccccctctccactggtttggcattcctcaatagttgcttgaaccccatcctttatgtcctaattagtaagaagttccaagctcgcttccggtcctcagttgctgagatactcaagtacacactgtgggaagtcagctgttctggcacagtgagtgaacagctcaggaactcagaaaccaagaatctgtgtctcctggaaacagctcaataagttattacttttccacaaatcagtatatggctttttatgtgggtcctctgactgatgctttcagattaaaattgtttccaagatagagagccgactccactttcatagttattgtttctggtcactatataggcatcacatttttgtgtggatatgaaacttaggaaggatcctcttgactccttgtgatgtggcaataaattttttttaaaaaactgaaaatacttaggaaggatccgcataatttttttctgcaacttaaatgaaatgcatcattcttgttaattataccatggtgaattaatcacttttgaagcaatatcagttattttttgaataataacttttctaaagccttaagtcttaatattaaatatatgattagccaggcacggtggctgacacctgtaatcccagcactttgggaggccaaggtggggggattacccgaggtcaggaattcgagaccagcctgaccaacatggagaaaccccgtctctactaaaaatacaaaattagccggtcatggtggtgcatgtctgcaaacccagctactcgggaggctgaagcaggagaatcacttgaacctgggaggcagaggttgtggtgagccaacatcacaccattgcactccagcctgggcaacaagagtaaaactctgtctcaaaaataaataaataaaatagataaataaatatatgattaactaattttaaaaatgttaaaatgtattcttaaattcattttaattttgtacaataacctgctagacacatttttaaaatgcaacatgtgtacttaatttctttatgtaatctatgtatatacatttatgaattaaagtaattgttggttatctt

SEQ ID NO: 135856 - DNA, 1527 bp, Homo sapiens
  Payload ID: 6555
  Gene Symbol: GPR101
  Gene Name: G protein-coupled receptor 101
  Uniprot ID: Q96P66
  ENST ID: ENST00000298110
  CDS Start-End: 1-1527
atgacgtccacctgcaccaacagcacgcgcgagagtaacagcagccacacgtgcatgcccctctccaaaatgcccatcagcctggcccacggcatcatccgctcaaccgtgctggttatcttcctcgccgcctctttcgtcggcaacatagtgctggcgctagtgttgcagcgcaagccgcagctgctgcaggtgaccaaccgttttatctttaacctcctcgtcaccgacctgctgcagatttcgctcgtggccccctgggtggtggccacctctgtgcctctcttctggcccctcaacagccacttctgcacggccctggttagcctcacccacctgttcgccttcgccagcgtcaacaccattgtcgtggtgtcagtggatcgctacttgtccatcatccaccctctctcctacccgtccaagatgacccagcgccgcggttacctgctcctctatggcacctggattgtggccatcctgcagagcactcctccactctacggctggggccaggctgcctttgatgagcgcaatgctctctgctccatgatctggggggccagccccagctacactattctcagcgtggtgtccttcatcgtcattccactgattgtcatgattgcctgctactccgtggtgttctgtgcagcccggaggcagcatgctctgctgtacaatgtcaagagacacagcttggaagtgcgagtcaaggactgtgtggagaatgaggatgaagagggagcagagaagaaggaggagttccaggatgagagtgagtttcgccgccagcatgaaggtgaggtcaaggccaaggagggcagaatggaagccaaggacggcagcctgaaggccaaggaaggaagcacggggaccagtgagagtagtgtagaggccaggggcagcgaggaggtcagagagagcagcacggtggccagcgacggcagcatggagggtaaggaaggcagcaccaaagttgaggagaacagcatgaaggcagacaagggtcgcacagaggtcaaccagtgcagcattgacttgggtgaagatgacatggagtttggtgaagacgacatcaatttcagtgaggatgacgtcgaggcagtgaacatcccggagagcctcccacccagtcgtcgtaacagcaacagcaaccctcctctgcccaggtgctaccagtgcaaagctgctaaagtgatcttcatcatcattttctcctatgtgctatccctggggccctactgctttttagcagtcctggccgtgtgggtggatgtcgaaacccaggtaccccagtgggtgatcaccataatcatctggcttttcttcctgcagtgctgcatccacccctatgtctatggctacatgcacaagaccattaagaaggaaatccaggacatgctgaagaagttcttctgcaaggaaaagcccccgaaagaagatagccacccagacctgcccggaacagagggtgggactgaaggcaagattgtcccttcctacgattctgctacttttccttga

SEQ ID NO: 135857 - DNA, 7209 bp, Homo sapiens
  Payload ID: 6556
  Gene Symbol: GPR107
  Gene Name: G protein-coupled receptor 107
  Uniprot ID: Q5VW38
  ENST ID: ENST00000347136
  CDS Start-End: 508-2166
attattgcaaccatttcgcttgtatttgagtgtgaagcgcctagaaaaccacaggacccctacggcgagccgggaatttttagatattttcctccgagtcaacgctcagtgaaatcagttcaatcagtggcccgacaccgtgcggctgacacagcttatcccccgaccctgagatcaggggtccccggagcccaaggtcgcttccaaagctcagcgaggcggaggtgcggcccgggctggtctggttcggccaccgttgttatggcaaccgccaataggttggcttcatctctaactgaaagtctgcacaggagcggccgatcgaagggccccgaggtgggcagcacaggctcctcgacgacttcctaggtcgcaatctccaggaaaacgaccacagggtcagcggagctagccgccgagccccgctccccgggcccttccggcggctgcgccctttcaccccggacgtgggcgggagaggaagcggctggtgatgctggaacaaacatggccgctctggcgcccgtcggctcccccgcctcccgcggtcctaggctggccgcgggcctccggctgctcccaatgctgggtttgctgcagttgctggccgagcctggcctgggccgcgtccatcacctggcactcaaggatgatgtgaggcataaagttcatctgaacacctttggcttcttcaaggatgggtacatggtggtgaatgtcagtagcctctcactgaatgagcctgaagacaaggatgtgactattggatttagcctagaccgtacaaagaatgatggcttttcttcttacctggatgaagatgtgaattactgtattttaaagaaacagtctgtctctgtcacccttttaatcctagacatctccagaagtgaggtaagagtaaagtctccaccagaagctggtacccagttaccaaagatcatcttcagcagggatgagaaagtccttggtcagagccaggagcctaatgttaaccctgcttcagcaggcaaccagacccagaagacacaagatggtggaaagtctaaaagaagtacagtggattcaaaggccatgggagagaaatccttttctgttcataataatggtggggcagtgtcatttcagtttttctttaacatcagcactgatgaccaagaaggcctttacagtctttattttcataaatgccttggaaaagaattgccaagtgacaagtttacattcagccttgatattgagatcacagagaagaatcctgacagctacctctcagcaggagaaattcctctccccaaattatacatctcaatggcctttttcttctttctttctgggaccatctggattcatatccttcgaaaacgacggaatgatgtatttaaaatccactggctgatggcggcccttcctttcaccaagtctctttccttggtgttccatgcaattgactaccactacatctcctcccagggcttccctatcgaaggctgggctgttgtgtactacataactcaccttttgaaaggggcgctactcttcatcaccattgcactcattggcactggctgggctttcattaagcacatcctttctgataaagacaaaaagatcttcatgattgtcattccactccaggtcctggcaaatgtagcctacatcatcatagagtccaccgaggagggcacgactgaatatggcttgtggaaggactctctatttctggtcgacctgttgtgttgtggtgccatcctcttcccagtggtgtggtcaatcagacatttacaagaagcatcagcaacagatggaaaagctgctattaacttagcaaagctgaaacttttcagacattattacgtcttgattgtgtgttacatatacttcactaggatcattgcatttctcctcaaactcgctgttccattccagtggaagtggctctaccagctcctggatgaaacggccacactggtcttctttgttctaacggggtataaattccgtccggcttcagataacccctacctacaactttctcaggaagaagaagacttggaaatggagtccgttgtgacaacatctggggtgatggaaagtatgaagaaagtcaagaaggtgaccaacggctccgtggagccccagggcgagtgggaaggcgccgtgtgacagagccgaccctgaggatggcactgtccaaggaaactgttaacttattcatagtcctattggacagcaggagcagctcctacagtgaactattggcaccaccgacagtgacaccagggcacatggctggagcacagtgccgcggaaacctgattttgtactctcttttatggaaacgatctgtggctgtttagaggcagctggatcctctttcaggcgggaatgggagggcgggcacagggaggaggagaggaagagaaaaggaagaattcatttttaatttaggtttctttttttcttcttcatttcggagctctaaggtgtatgcagttgtgaccccatgtgtggggaagtgtagcaaggacggctggtggagggggaaggagggtgcgaggtgtctgtctgatgctttaggaaatgtctactgaggaccctgggacttaagaagaagggcggggagagtgccattgcctgtttgggagacaaaaatgaacgaaaacaggtgactttggaaagcaaagtcaaaacccagtttaggatgtagcacctgccccaggattcctgccctcggctttgccccagacccttattccagatgctgagagtgaccaggacagcagctcctgaggcccagtggtcttctttccaacaggaaaagaaggctgtgatgtcgctgtcaggatcatgccctgtggcacagcacaggtggtgggaggtggttttctgactgagatgttgcctgatggatggaaagaaatgtatttttaagttcaaaaagcattatcctgtggcgttgcctggacatccactccctgacagcccagagcagcactgtctggcttcccttcatgcttgtggctttgttgtgtttgatcagaattttgggggaaatggaaagttttcctcaaggagcagctgggggcagaataggtagtatttaagcaaatacttaagtccaagcaaatcatccccattaaaaagcttttcctgtaggctagtaggatttctaaatagatgaattcaacagacttggtccccatagtccaagagtatgtatgtgaagaaagtgagcatgattcaacagtttcactctcagggattttaggatggcaaaatacttcacagaaactcaatgattaagttcccttccacacttccagagcttgaatgaacacaggtagccacctaaattgagcagtattgcaactcagagagaaaatcatctgaatagtaggacaagctcagaaggtacattgtgactgagggcttaaaaggagaccaaaacatggccccatcagggaagcttcttaatgcttggggggccagctaggtagggttgcttccaaaagctggagcccacccctgcctaggggttgtcagagagccacacctgcaggggaacaggtacctccgagggtgagagtcgtggtctctgggagttgttttctcacctctggcttagaagggtcaggcagaaaccacaggatgtggggtcacactcactgtcccaagtttgggaacctgaaaaagtctccattcagaacatggttgttctccctgtcccatgctatcttatcttcctaaatgactaatgaggaagcgggtgttctttttctgcactttgattcgccatctgggttctgtagggtgctctgaaggtgtgatctgccttctggctgatgtggaggaagagcaagcgccttcccaggccacagctgctcacctctcggcagatattttaggcaagcatccgtgtgtcttcccatcttcaggagaaaggtaaatgcaccctaagtgttcacttctggacctttttcaagttcacttgggactgtgtgacagaagggagttggagggaggatgggaatatttttaacactttgttttcctgtgcagaaacataataccagttttcgcagaaatgtgtctcaatctgtgactaccaaagccctcctcagtccttccctcagagggacacatttgctgtttctcccgcaagcagatgttgtggatgaggcgatagactccttggcaagaacgaaaggtgtgatgaaacctccctgctcggaagggtctccgtggaggtgtcctcatttcacatgctgggttttgcaagcgaggaagccaggcagtggaggaactagagagaggcaggcgtgtgtgtggacaagcgctggagccgcagccctcagactggcacgggaacgccagcgttgggtgttcagattccacgcgtatgtctgggctcactcacagcatggccgagtgtctgcagtgctggtcctgacccttccagagcagcagtggacagatgagataagactgtttcagaaacaaagatggccacagccttcctaacaagcaggtcatctggccatgtctgtattgtaactggtaaaaggcttcaagtcagattgatgatcaagaaaagtcaaaaccccagcccaagattgggaaagcaggtggtggttccaagcttttaaaaaattattgaagctctccatcctgttctgtgagtgtgtcttctctttctccttcacgtcatagccgtgacccaccgttcatctctgctcttgcgtaaagatgaccgatggagtccaaagccaagtggcttcaccagctgacaagccaccctcctgcagcctgagtttcacagtccactgggttcgttgtcatgcggtgtttgaatggttaagcccttgcagtatttcagatcgggcaaaaaatatcggatgcacatagcagaaccattggtggtatttatagctttgctttgtactcctcactgtttctgcctacgcaaaatatccatgtttcctctgagaaatctgttgtggactgaaagcgctgctggctgtgaaatttaataaagtgtgtatgctttgctagaaaattatttcttggacaataggaacagtcattgatctgtaaatcctggctcttaacagtgagtggccaaggacttgatcagcccatttcttggtccctcagtgctttaaaatttaagtagcactgcattttgtaatgttgaatatgactctagtgacttgtaggaggcacttgtgaggagatgcttgcttcagtgtaaaagatgctcatggcctgagtcagttgagttttctttcaagaaaccacttcagagtgaaatatccagggtttccccgccctggacatgtccagcctgcccaggcagcacacagccctgtaagtccacctcgtgtgggtgagatttcctcctgcgtgatgacctcatcgccatctctgctgtctcattccacagcctccctccctcttctctcctcctctgccctcgcccttcccccttccccatcccctccccctcctcctctgccctcgcccttacccctcccccttccccttccgctcctcctccctcctccacctctttctcctcctccttccctcctcctccctcctcttcccttctctgccatctttctccccgtgcctattgatcccacataggctcattctgggtacaccggctaaaggctttggtgcattgcagcgttttctcccagcagctgtgtgaaagatgcattttctaagctaaggagaattttctcaagagtggcatactcatgccaaatattattgctctgggccatataggctggtcttcctccacactaaaatgggtgtcttgttttggtacttaaaacagtctactccaggcatccagtccttacagaccaaggaagagcatagcgatgcctgttggaattgcagatgcattctggccttctcccccgtcctgaaacattttctttgaggaaggctcttagaacattagatagtctgctgaggttgttggcccagctccatacacccagtagaacagtggaacaactcatgcttcatgctgccaagctgctgtacttcaaaggaaacagatctagcacactgctgcacccctgcttccacactccacacttcaccccgctgcttttctctgacccgcccctggccttgtaagactcacgtaagctaagtccaggatgcctgtggcctgcggcttgattcttccctttaggattcagcaagttaatggcttcctcgctatagaagtgagactttgacttgatgcctcttggtatatcaaaaagatattcatccagaaagtaccaaatgttctgaaagacccgctcttcactccagttttccctagggtgtttctggcagggcgtttttaaaaggcatctacctgagttgacgctaatacttgtcaccacctggaacgtagttatcggtcggcaggctgaacatactccagattccccagaggccacttctgtagcccagcgatgcatctgagcctctctgcgtggtttatgcttgaaaaatagataatgcttttagatggttcactgccaggccatgggccccacacatctcaggccctgtgtgagggagcacactgagatggtgcaggagtgaatgggcatggcttggcctcgctacctcggggacctgttggagttctggcagcagggtgtctgcaggtgggacggcgttctgggcagagtcagaatggtcagaatgaaacagaacagccaactcacccacaggacagcttattttgaggcaaggttttggattttggaggaagcagccagatgaggcggtgagcctccagaaggtcagcctttggagcacgtaagatactgttacagggtccagaaatcgtgttcacatgggggctttgactcttcaaacagcttttgcagatcgtaaattgcatttgcctagtcgtgtgacctcaaaagaagtcagacatatttaatccagaaatagtttcgtttgagggagggcttgcaggtctgtaaatagcatttgctttcctggttagagattgggatgcagaaggagttttcagtattttttttaaaacactaatgatcattgaagagtatttatgtaaacatacaacgtataatgggtgggggatccgatcatggtgatgtacggggtgaattctcttgccgtgttgcaaatgtgtaaaataaagattatctggcagaa

SEQ ID NO: 135858 - DNA, 7353 bp, Homo sapiens
  Payload ID: 6556
  Gene Symbol: GPR107
  Gene Name: G protein-coupled receptor 107
  Uniprot ID: Q5VW38
  ENST ID: ENST00000372406
  CDS Start-End: 508-2310
attattgcaaccatttcgcttgtatttgagtgtgaagcgcctagaaaaccacaggacccctacggcgagccgggaatttttagatattttcctccgagtcaacgctcagtgaaatcagttcaatcagtggcccgacaccgtgcggctgacacagcttatcccccgaccctgagatcaggggtccccggagcccaaggtcgcttccaaagctcagcgaggcggaggtgcggcccgggctggtctggttcggccaccgttgttatggcaaccgccaataggttggcttcatctctaactgaaagtctgcacaggagcggccgatcgaagggccccgaggtgggcagcacaggctcctcgacgacttcctaggtcgcaatctccaggaaaacgaccacagggtcagcggagctagccgccgagccccgctccccgggcccttccggcggctgcgccctttcaccccggacgtgggcgggagaggaagcggctggtgatgctggaacaaacatggccgctctggcgcccgtcggctcccccgcctcccgcggtcctaggctggccgcgggcctccggctgctcccaatgctgggtttgctgcagttgctggccgagcctggcctgggccgcgtccatcacctggcactcaaggatgatgtgaggcataaagttcatctgaacacctttggcttcttcaaggatgggtacatggtggtgaatgtcagtagcctctcactgaatgagcctgaagacaaggatgtgactattggatttagcctagaccgtacaaagaatgatggcttttcttcttacctggatgaagatgtgaattactgtattttaaagaaacagtctgtctctgtcacccttttaatcctagacatctccagaagtgaggtaagagtaaagtctccaccagaagctggtacccagttaccaaagatcatcttcagcagggatgagaaagtccttggtcagagccaggagcctaatgttaaccctgcttcagcaggcaaccagacccagaagacacaagatggtggaaagtctaaaagaagtacagtggattcaaaggccatgggagagaaatccttttctgttcataataatggtggggcagtgtcatttcagtttttctttaacatcagcactgatgaccaagaaggcctttacagtctttattttcataaatgccttggaaaagaattgccaagtgacaagtttacattcagccttgatattgagatcacagagaagaatcctgacagctacctctcagcaggagaaattcctctccccaaattatacatctcaatggcctttttcttctttctttctgggaccatctggattcatatccttcgaaaacgacggaatgatgtatttaaaatccactggctgatggcggcccttcctttcaccaagtctctttccttggtgttccatgcaattgactaccactacatctcctcccagggcttccctatcgaaggctgggctgttgtgtactacataactcaccttttgaaaggggcgctactcttcatcaccattgcactcattggcactggctgggctttcattaagcacatcctttctgataaagacaaaaagatcttcatgattgtcattccactccaggtcctggcaaatgtagcctacatcatcatagagtccaccgaggagggcacgactgaatatggcttgtggaaggactctctatttctggtcgacctgttgtgttgtggtgccatcctcttcccagtggtgtggtcaatcagacatttacaagaagcatcagcaacagatggaaaaggtgacagcatgggacctcttcagcagagagcgaatctaagagcaggaagtcgcatagagtctcaccattttgcccaggctgatcttgaactcctggcctctagctgtcctcctgcctcagtctcccaaagggctgggattacagctgctattaacttagcaaagctgaaacttttcagacattattacgtcttgattgtgtgttacatatacttcactaggatcattgcatttctcctcaaactcgctgttccattccagtggaagtggctctaccagctcctggatgaaacggccacactggtcttctttgttctaacggggtataaattccgtccggcttcagataacccctacctacaactttctcaggaagaagaagacttggaaatggagtccgttgtgacaacatctggggtgatggaaagtatgaagaaagtcaagaaggtgaccaacggctccgtggagccccagggcgagtgggaaggcgccgtgtgacagagccgaccctgaggatggcactgtccaaggaaactgttaacttattcatagtcctattggacagcaggagcagctcctacagtgaactattggcaccaccgacagtgacaccagggcacatggctggagcacagtgccgcggaaacctgattttgtactctcttttatggaaacgatctgtggctgtttagaggcagctggatcctctttcaggcgggaatgggagggcgggcacagggaggaggagaggaagagaaaaggaagaattcatttttaatttaggtttctttttttcttcttcatttcggagctctaaggtgtatgcagttgtgaccccatgtgtggggaagtgtagcaaggacggctggtggagggggaaggagggtgcgaggtgtctgtctgatgctttaggaaatgtctactgaggaccctgggacttaagaagaagggcggggagagtgccattgcctgtttgggagacaaaaatgaacgaaaacaggtgactttggaaagcaaagtcaaaacccagtttaggatgtagcacctgccccaggattcctgccctcggctttgccccagacccttattccagatgctgagagtgaccaggacagcagctcctgaggcccagtggtcttctttccaacaggaaaagaaggctgtgatgtcgctgtcaggatcatgccctgtggcacagcacaggtggtgggaggtggttttctgactgagatgttgcctgatggatggaaagaaatgtatttttaagttcaaaaagcattatcctgtggcgttgcctggacatccactccctgacagcccagagcagcactgtctggcttcccttcatgcttgtggctttgttgtgtttgatcagaattttgggggaaatggaaagttttcctcaaggagcagctgggggcagaataggtagtatttaagcaaatacttaagtccaagcaaatcatccccattaaaaagcttttcctgtaggctagtaggatttctaaatagatgaattcaacagacttggtccccatagtccaagagtatgtatgtgaagaaagtgagcatgattcaacagtttcactctcagggattttaggatggcaaaatacttcacagaaactcaatgattaagttcccttccacacttccagagcttgaatgaacacaggtagccacctaaattgagcagtattgcaactcagagagaaaatcatctgaatagtaggacaagctcagaaggtacattgtgactgagggcttaaaaggagaccaaaacatggccccatcagggaagcttcttaatgcttggggggccagctaggtagggttgcttccaaaagctggagcccacccctgcctaggggttgtcagagagccacacctgcaggggaacaggtacctccgagggtgagagtcgtggtctctgggagttgttttctcacctctggcttagaagggtcaggcagaaaccacaggatgtggggtcacactcactgtcccaagtttgggaacctgaaaaagtctccattcagaacatggttgttctccctgtcccatgctatcttatcttcctaaatgactaatgaggaagcgggtgttctttttctgcactttgattcgccatctgggttctgtagggtgctctgaaggtgtgatctgccttctggctgatgtggaggaagagcaagcgccttcccaggccacagctgctcacctctcggcagatattttaggcaagcatccgtgtgtcttcccatcttcaggagaaaggtaaatgcaccctaagtgttcacttctggacctttttcaagttcacttgggactgtgtgacagaagggagttggagggaggatgggaatatttttaacactttgttttcctgtgcagaaacataataccagttttcgcagaaatgtgtctcaatctgtgactaccaaagccctcctcagtccttccctcagagggacacatttgctgtttctcccgcaagcagatgttgtggatgaggcgatagactccttggcaagaacgaaaggtgtgatgaaacctccctgctcggaagggtctccgtggaggtgtcctcatttcacatgctgggttttgcaagcgaggaagccaggcagtggaggaactagagagaggcaggcgtgtgtgtggacaagcgctggagccgcagccctcagactggcacgggaacgccagcgttgggtgttcagattccacgcgtatgtctgggctcactcacagcatggccgagtgtctgcagtgctggtcctgacccttccagagcagcagtggacagatgagataagactgtttcagaaacaaagatggccacagccttcctaacaagcaggtcatctggccatgtctgtattgtaactggtaaaaggcttcaagtcagattgatgatcaagaaaagtcaaaaccccagcccaagattgggaaagcaggtggtggttccaagcttttaaaaaattattgaagctctccatcctgttctgtgagtgtgtcttctctttctccttcacgtcatagccgtgacccaccgttcatctctgctcttgcgtaaagatgaccgatggagtccaaagccaagtggcttcaccagctgacaagccaccctcctgcagcctgagtttcacagtccactgggttcgttgtcatgcggtgtttgaatggttaagcccttgcagtatttcagatcgggcaaaaaatatcggatgcacatagcagaaccattggtggtatttatagctttgctttgtactcctcactgtttctgcctacgcaaaatatccatgtttcctctgagaaatctgttgtggactgaaagcgctgctggctgtgaaatttaataaagtgtgtatgctttgctagaaaattatttcttggacaataggaacagtcattgatctgtaaatcctggctcttaacagtgagtggccaaggacttgatcagcccatttcttggtccctcagtgctttaaaatttaagtagcactgcattttgtaatgttgaatatgactctagtgacttgtaggaggcacttgtgaggagatgcttgcttcagtgtaaaagatgctcatggcctgagtcagttgagttttctttcaagaaaccacttcagagtgaaatatccagggtttccccgccctggacatgtccagcctgcccaggcagcacacagccctgtaagtccacctcgtgtgggtgagatttcctcctgcgtgatgacctcatcgccatctctgctgtctcattccacagcctccctccctcttctctcctcctctgccctcgcccttcccccttccccatcccctccccctcctcctctgccctcgcccttacccctcccccttccccttccgctcctcctccctcctccacctctttctcctcctccttccctcctcctccctcctcttcccttctctgccatctttctccccgtgcctattgatcccacataggctcattctgggtacaccggctaaaggctttggtgcattgcagcgttttctcccagcagctgtgtgaaagatgcattttctaagctaaggagaattttctcaagagtggcatactcatgccaaatattattgctctgggccatataggctggtcttcctccacactaaaatgggtgtcttgttttggtacttaaaacagtctactccaggcatccagtccttacagaccaaggaagagcatagcgatgcctgttggaattgcagatgcattctggccttctcccccgtcctgaaacattttctttgaggaaggctcttagaacattagatagtctgctgaggttgttggcccagctccatacacccagtagaacagtggaacaactcatgcttcatgctgccaagctgctgtacttcaaaggaaacagatctagcacactgctgcacccctgcttccacactccacacttcaccccgctgcttttctctgacccgcccctggccttgtaagactcacgtaagctaagtccaggatgcctgtggcctgcggcttgattcttccctttaggattcagcaagttaatggcttcctcgctatagaagtgagactttgacttgatgcctcttggtatatcaaaaagatattcatccagaaagtaccaaatgttctgaaagacccgctcttcactccagttttccctagggtgtttctggcagggcgtttttaaaaggcatctacctgagttgacgctaatacttgtcaccacctggaacgtagttatcggtcggcaggctgaacatactccagattccccagaggccacttctgtagcccagcgatgcatctgagcctctctgcgtggtttatgcttgaaaaatagataatgcttttagatggttcactgccaggccatgggccccacacatctcaggccctgtgtgagggagcacactgagatggtgcaggagtgaatgggcatggcttggcctcgctacctcggggacctgttggagttctggcagcagggtgtctgcaggtgggacggcgttctgggcagagtcagaatggtcagaatgaaacagaacagccaactcacccacaggacagcttattttgaggcaaggttttggattttggaggaagcagccagatgaggcggtgagcctccagaaggtcagcctttggagcacgtaagatactgttacagggtccagaaatcgtgttcacatgggggctttgactcttcaaacagcttttgcagatcgtaaattgcatttgcctagtcgtgtgacctcaaaagaagtcagacatatttaatccagaaatagtttcgtttgagggagggcttgcaggtctgtaaatagcatttgctttcctggttagagattgggatgcagaaggagttttcagtattttttttaaaacactaatgatcattgaagagtatttatgtaaacatacaacgtataatgggtgggggatccgatcatggtgatgtacggggtgaattctcttgccgtgttgcaaatgtgtaaaataaagattatctggcagaa

SEQ ID NO: 135859 - DNA, 6991 bp, Homo sapiens
  Payload ID: 6556
  Gene Symbol: GPR107
  Gene Name: G protein-coupled receptor 107
  ENST ID: ENST00000372410
  CDS Start-End: 228-1943
tggcttcatctctaactgaaagtctgcacaggagcggccgatcgaagggccccgaggtgggcagcacaggctcctcgacgacttcctaggtcgcaatctccaggaaaacgaccacagggtcagcggagctagccgccgagccccgctccccgggcccttccggcggctgcgccctttcaccccggacgtgggcgggagaggaagcggctggtgatgctggaacaaacatggccgctctggcgcccgtcggctcccccgcctcccgcggtcctaggctggccgcgggcctccggctgctcccaatgctgggtttgctgcagttgctggccgagcctggcctgggccgcgtccatcacctggcactcaaggatgatgtgaggcataaagttcatctgaacacctttggcttcttcaaggatgggtacatggtggtgaatgtcagtagcctctcactgaatgagcctgaagacaaggatgtgactattggatttagcctagaccgtacaaagaatgatggcttttcttcttacctggatgaagatgtgaattactgtattttaaagaaacagtctgtctctgtcacccttttaatcctagacatctccagaagtgaggtaagagtaaagtctccaccagaagctggtacccagttaccaaagatcatcttcagcagggatgagaaagtccttggtcagagccaggagcctaatgttaaccctgcttcagcaggcaaccagacccagaagacacaagatggtggaaagtctaaaagaagtacagtggattcaaaggccatgggagagaaatccttttctgttcataataatggtggggcagtgtcatttcagtttttctttaacatcagcactgatgaccaagaaggcctttacagtctttattttcataaatgccttggaaaagaattgccaagtgacaagtttacattcagccttgatattgagatcacagagaagaatcctgacagctacctctcagcaggagaaattcctctccccaaattatacatctcaatggcctttttcttctttctttctgggaccatctggattcatatccttcgaaaacgacggaatgatgtatttaaaatccactggctgatggcggcccttcctttcaccaagtctctttccttggtgttccatgcaattgactaccactacatctcctcccagggcttccctatcgaaggctgggctgttgtgtactacataactcaccttttgaaaggggcgctactcttcatcaccattgcactcattggcactggctgggctttcattaagcacatcctttctgataaagacaaaaagatcttcatgattgtcattccactccaggtcctggcaaatgtagcctacatcatcatagagtccaccgaggagggcacgactgaatatggcttgtggaaggactctctatttctggtcgacctgttgtgttgtggtgccatcctcttcccagtggtgtggtcaatcagacatttacaagaagcatcagcaacagatggaaaaggtgacagcatgggacctcttcagcagagagcgaatctaagagcaggaagtcgcatagctgctattaacttagcaaagctgaaacttttcagacattattacgtcttgattgtgtgttacatatacttcactaggatcattgcatttctcctcaaactcgctgttccattccagtggaagtggctctaccagctcctggatgaaacggccacactggtcttctttgttctaacggggtataaattccgtccggcttcagataacccctacctacaactttctcaggaagaagaagacttggaaatggagtccgttgtgacaacatctggggtgatggaaagtatgaagaaagtcaagaaggtgaccaacggctccgtggagccccagggcgagtgggaaggcgccgtgtgacagagccgaccctgaggatggcactgtccaaggaaactgttaacttattcatagtcctattggacagcaggagcagctcctacagtgaactattggcaccaccgacagtgacaccagggcacatggctggagcacagtgccgcggaaacctgattttgtactctcttttatggaaacgatctgtggctgtttagaggcagctggatcctctttcaggcgggaatgggagggcgggcacagggaggaggagaggaagagaaaaggaagaattcatttttaatttaggtttctttttttcttcttcatttcggagctctaaggtgtatgcagttgtgaccccatgtgtggggaagtgtagcaaggacggctggtggagggggaaggagggtgcgaggtgtctgtctgatgctttaggaaatgtctactgaggaccctgggacttaagaagaagggcggggagagtgccattgcctgtttgggagacaaaaatgaacgaaaacaggtgactttggaaagcaaagtcaaaacccagtttaggatgtagcacctgccccaggattcctgccctcggctttgccccagacccttattccagatgctgagagtgaccaggacagcagctcctgaggcccagtggtcttctttccaacaggaaaagaaggctgtgatgtcgctgtcaggatcatgccctgtggcacagcacaggtggtgggaggtggttttctgactgagatgttgcctgatggatggaaagaaatgtatttttaagttcaaaaagcattatcctgtggcgttgcctggacatccactccctgacagcccagagcagcactgtctggcttcccttcatgcttgtggctttgttgtgtttgatcagaattttgggggaaatggaaagttttcctcaaggagcagctgggggcagaataggtagtatttaagcaaatacttaagtccaagcaaatcatccccattaaaaagcttttcctgtaggctagtaggatttctaaatagatgaattcaacagacttggtccccatagtccaagagtatgtatgtgaagaaagtgagcatgattcaacagtttcactctcagggattttaggatggcaaaatacttcacagaaactcaatgattaagttcccttccacacttccagagcttgaatgaacacaggtagccacctaaattgagcagtattgcaactcagagagaaaatcatctgaatagtaggacaagctcagaaggtacattgtgactgagggcttaaaaggagaccaaaacatggccccatcagggaagcttcttaatgcttggggggccagctaggtagggttgcttccaaaagctggagcccacccctgcctaggggttgtcagagagccacacctgcaggggaacaggtacctccgagggtgagagtcgtggtctctgggagttgttttctcacctctggcttagaagggtcaggcagaaaccacaggatgtggggtcacactcactgtcccaagtttgggaacctgaaaaagtctccattcagaacatggttgttctccctgtcccatgctatcttatcttcctaaatgactaatgaggaagcgggtgttctttttctgcactttgattcgccatctgggttctgtagggtgctctgaaggtgtgatctgccttctggctgatgtggaggaagagcaagcgccttcccaggccacagctgctcacctctcggcagatattttaggcaagcatccgtgtgtcttcccatcttcaggagaaaggtaaatgcaccctaagtgttcacttctggacctttttcaagttcacttgggactgtgtgacagaagggagttggagggaggatgggaatatttttaacactttgttttcctgtgcagaaacataataccagttttcgcagaaatgtgtctcaatctgtgactaccaaagccctcctcagtccttccctcagagggacacatttgctgtttctcccgcaagcagatgttgtggatgaggcgatagactccttggcaagaacgaaaggtgtgatgaaacctccctgctcggaagggtctccgtggaggtgtcctcatttcacatgctgggttttgcaagcgaggaagccaggcagtggaggaactagagagaggcaggcgtgtgtgtggacaagcgctggagccgcagccctcagactggcacgggaacgccagcgttgggtgttcagattccacgcgtatgtctgggctcactcacagcatggccgagtgtctgcagtgctggtcctgacccttccagagcagcagtggacagatgagataagactgtttcagaaacaaagatggccacagccttcctaacaagcaggtcatctggccatgtctgtattgtaactggtaaaaggcttcaagtcagattgatgatcaagaaaagtcaaaaccccagcccaagattgggaaagcaggtggtggttccaagcttttaaaaaattattgaagctctccatcctgttctgtgagtgtgtcttctctttctccttcacgtcatagccgtgacccaccgttcatctctgctcttgcgtaaagatgaccgatggagtccaaagccaagtggcttcaccagctgacaagccaccctcctgcagcctgagtttcacagtccactgggttcgttgtcatgcggtgtttgaatggttaagcccttgcagtatttcagatcgggcaaaaaatatcggatgcacatagcagaaccattggtggtatttatagctttgctttgtactcctcactgtttctgcctacgcaaaatatccatgtttcctctgagaaatctgttgtggactgaaagcgctgctggctgtgaaatttaataaagtgtgtatgctttgctagaaaattatttcttggacaataggaacagtcattgatctgtaaatcctggctcttaacagtgagtggccaaggacttgatcagcccatttcttggtccctcagtgctttaaaatttaagtagcactgcattttgtaatgttgaatatgactctagtgacttgtaggaggcacttgtgaggagatgcttgcttcagtgtaaaagatgctcatggcctgagtcagttgagttttctttcaagaaaccacttcagagtgaaatatccagggtttccccgccctggacatgtccagcctgcccaggcagcacacagccctgtaagtccacctcgtgtgggtgagatttcctcctgcgtgatgacctcatcgccatctctgctgtctcattccacagcctccctccctcttctctcctcctctgccctcgcccttcccccttccccatcccctccccctcctcctctgccctcgcccttacccctcccccttccccttccgctcctcctccctcctccacctctttctcctcctccttccctcctcctccctcctcttcccttctctgccatctttctccccgtgcctattgatcccacataggctcattctgggtacaccggctaaaggctttggtgcattgcagcgttttctcccagcagctgtgtgaaagatgcattttctaagctaaggagaattttctcaagagtggcatactcatgccaaatattattgctctgggccatataggctggtcttcctccacactaaaatgggtgtcttgttttggtacttaaaacagtctactccaggcatccagtccttacagaccaaggaagagcatagcgatgcctgttggaattgcagatgcattctggccttctcccccgtcctgaaacattttctttgaggaaggctcttagaacattagatagtctgctgaggttgttggcccagctccatacacccagtagaacagtggaacaactcatgcttcatgctgccaagctgctgtacttcaaaggaaacagatctagcacactgctgcacccctgcttccacactccacacttcaccccgctgcttttctctgacccgcccctggccttgtaagactcacgtaagctaagtccaggatgcctgtggcctgcggcttgattcttccctttaggattcagcaagttaatggcttcctcgctatagaagtgagactttgacttgatgcctcttggtatatcaaaaagatattcatccagaaagtaccaaatgttctgaaagacccgctcttcactccagttttccctagggtgtttctggcagggcgtttttaaaaggcatctacctgagttgacgctaatacttgtcaccacctggaacgtagttatcggtcggcaggctgaacatactccagattccccagaggccacttctgtagcccagcgatgcatctgagcctctctgcgtggtttatgcttgaaaaatagataatgcttttagatggttcactgccaggccatgggccccacacatctcaggccctgtgtgagggagcacactgagatggtgcaggagtgaatgggcatggcttggcctcgctacctcggggacctgttggagttctggcagcagggtgtctgcaggtgggacggcgttctgggcagagtcagaatggtcagaatgaaacagaacagccaactcacccacaggacagcttattttgaggcaaggttttggattttggaggaagcagccagatgaggcggtgagcctccagaaggtcagcctttggagcacgtaagatactgttacagggtccagaaatcgtgttcacatgggggctttgactcttcaaacagcttttgcagatcgtaaattgcatttgcctagtcgtgtgacctcaaaagaagtcagacatatttaatccagaaatagtttcgtttgagggagggcttgcaggtctgtaaatagcatttgctttcctggttagagattgggatgcagaaggagttttcagtattttttttaaaacactaatgatcattgaagagtatttatgtaaacatacaacgtataatgggtgggggatccgatcatggtgatgtacggggtgaattctcttgccgtgttgcaaatgtgtaaaataaagattatctggcagaaccgtg

SEQ ID NO: 135860 - DNA, 2833 bp, Homo sapiens
  Payload ID: 6556
  Gene Symbol: GPR107
  Gene Name: G protein-coupled receptor 107
  ENST ID: ENST00000493417
  CDS Start-End: 13-399
gctggaacaaacatggccgctctggcgcccgtcggctcccccgcctcccgcggtcctaggctggccgcgggcctccggctgctcccaatgctgggtttgctgcagttgctggccgagcctggcctgggccgcgtccatcacctggcactcaaggatgatgtgaggcataaagttcatctgaacacctttggcttcttcaaggatgggtacatggtggtgaatgtcagtagcctctcactgaatgagcctgaagacaaggatgtgactattggatttagcctagaccgtacaaagaatgatggcttttcttcttacctggatgaagatgtgaattactgtattttaaagaaacagtctgtctctgtcacccttttaatcctagacatctccagaaggtaagagtaaagtctccaccagaagctggtacccagttaccaaagatcatcttcagcagggatgagaaagtccttggtcagagccaggagcctaatgttaaccctgcttcagcaggcaaccagacccagaagacacaagatggtggaaagtctaaaagaagtacagtggattcaaaggccatgggagagaaatccttttctgttcataataatggtggggcagtgtcatttcagtttttctttaacatcagcactgatgaccaagaaggcctttacagtctttattttcataaatgccttggaaaagaattgccaagtgacaagtttacattcagccttgatattgagatcacagagaagaatcctgacagctacctctcagcaggagaaattcctctccccaaattatacatctcaatggcctttttcttctttctttctgggaccatctggattcatatccttcgaaaacgacggaatgatgtatttaaaatccactggctgatggcggcccttcctttcaccaagtctctttccttggtgttccatgcaattgactaccactacatctcctcccagggcttccctatcgaaggctgggctgttgtgtactacataactcaccttttgaaaggggcgctactcttcatcaccattgcactcattggcactggctgggctttcattaagcacatcctttctgataaagacaaaaagatcttcatgattgtcattccactccaggtcctggcaaatgtagcctacatcatcatagagtccaccgaggagggcacgactgaatatggcttgtggaaggactctctatttctggtcgacctgttgtgttgtggtgccatcctcttcccagtggtgtggtcaatcagacatttacaagaagcatcagcaacagatggaaaagctgctattaacttagcaaagctgaaacttttcagacattattacgtcttgattgtgtgttacatatacttcactaggatcattgcatttctcctcaaactcgctgttccattccagtggaagtggctctaccagctcctggatgaaacggccacactggtcttctttgttctaacggggtataaattccgtccggcttcagataacccctacctacaactttctcaggaagaagaagacttggaaatggagtccgtgtaagaaatctttcttccctcttccttagccctgacccctttgcctaacacaaagcagcacagtgtgaatcgggtcggctgctctcagcatttcgtggctgcaggggtggttcctctatttttagcagaaggaagcggacactggagccccaggctgtctgatctggtttgaagtacagtatctgccaaacctagctgggtcttgtcagggaagatggaacttgccgttccactaagcatcattggagcctgctttcaagaactcagtggcaagaacttaggaatatacgtggccagttcacgagggagaacagggggccgactttctgtcaggcccgccatcaggcgcttacgtctgaaaatggaatcttctgagtcatctctaagtctgctaatgatcctcagacatcctctatcgtcagataactgcgtggcttttcacagcacaatgactttgacctatatctgagcactaataggggcttttctgagtcacacagtgaatgactctagggtcctattttctgggaaagggccatcattgtctagaaaaatgagtagtgattaagcatatttgcttgttaactgaaatttgataagccaggtcaatgctgtgtttgatgattagcctaaggcagagttttcccttcttggttcactggtatcaagtgttctgcccccagccctggcagcctttgaattcttcccaattcagaggctgagactcggcccatgctaagctctgcttggctgtcagcgggtcaggcagcatgggacagctctctctgctcagctccacggcaacagtaaaggaaggcaggtcctgccagcgggcgccaaacagcatctccccatgcagaggaagaaacacctccttctaaacagtggagaggagtgcaggaggcccatcagctgtgcctttcccagaagtggcaggatctgagcaagtgtctgttggttgaagaggcacacatgtcaggctggcaaccagcagcatcaggaaataacctaagacgcggtgtgtttatcattcccctgctgggagcctttggcttggtccgtccgcataacacggggttctttgggtaggcagctagaagccgagcggccgggtcgcagcatcgtctcctttactgcattgtactccacagtcgtaatgggaggttcccgcttcccacatcctttccctcagccgttacatcttggagcctggatgcattatgaaggtatttttgtttcgtggcaacaatttttttaaaattt

SEQ ID NO: 135861 - DNA, 2813 bp, Homo sapiens
  Payload ID: 6556
  Gene Symbol: GPR107
  Gene Name: G protein-coupled receptor 107
  Uniprot ID: Q5VW38
  ENST ID: ENST00000610997
  CDS Start-End: 9-1811
gaacaaacatggccgctctggcgcccgtcggctcccccgcctcccgcggtcctaggctggccgcgggcctccggctgctcccaatgctgggtttgctgcagttgctggccgagcctggcctgggccgcgtccatcacctggcactcaaggatgatgtgaggcataaagttcatctgaacacctttggcttcttcaaggatgggtacatggtggtgaatgtcagtagcctctcactgaatgagcctgaagacaaggatgtgactattggatttagcctagaccgtacaaagaatgatggcttttcttcttacctggatgaagatgtgaattactgtattttaaagaaacagtctgtctctgtcacccttttaatcctagacatctccagaagtgaggtaagagtaaagtctccaccagaagctggtacccagttaccaaagatcatcttcagcagggatgagaaagtccttggtcagagccaggagcctaatgttaaccctgcttcagcaggcaaccagacccagaagacacaagatggtggaaagtctaaaagaagtacagtggattcaaaggccatgggagagaaatccttttctgttcataataatggtggggcagtgtcatttcagtttttctttaacatcagcactgatgaccaagaaggcctttacagtctttattttcataaatgccttggaaaagaattgccaagtgacaagtttacattcagccttgatattgagatcacagagaagaatcctgacagctacctctcagcaggagaaattcctctccccaaattatacatctcaatggcctttttcttctttctttctgggaccatctggattcatatccttcgaaaacgacggaatgatgtatttaaaatccactggctgatggcggcccttcctttcaccaagtctctttccttggtgttccatgcaattgactaccactacatctcctcccagggcttccctatcgaaggctgggctgttgtgtactacataactcaccttttgaaaggggcgctactcttcatcaccattgcactcattggcactggctgggctttcattaagcacatcctttctgataaagacaaaaagatcttcatgattgtcattccactccaggtcctggcaaatgtagcctacatcatcatagagtccaccgaggagggcacgactgaatatggcttgtggaaggactctctatttctggtcgacctgttgtgttgtggtgccatcctcttcccagtggtgtggtcaatcagacatttacaagaagcatcagcaacagatggaaaaggtgacagcatgggacctcttcagcagagagcgaatctaagagcaggaagtcgcatagagtctcaccattttgcccaggctgatcttgaactcctggcctctagctgtcctcctgcctcagtctcccaaagggctgggattacagctgctattaacttagcaaagctgaaacttttcagacattattacgtcttgattgtgtgttacatatacttcactaggatcattgcatttctcctcaaactcgctgttccattccagtggaagtggctctaccagctcctggatgaaacggccacactggtcttctttgttctaacggggtataaattccgtccggcttcagataacccctacctacaactttctcaggaagaagaagacttggaaatggagtccgttgtgacaacatctggggtgatggaaagtatgaagaaagtcaagaaggtgaccaacggctccgtggagccccagggcgagtgggaaggcgccgtgtgacagagccgaccctgaggatggcactgtccaaggaaactgttaacttattcatagtcctattggacagcaggagcagctcctacagtgaactattggcaccaccgacagtgacaccagggcacatggctggagcacagtgccgcggaaacctgattttgtactctcttttatggaaacgatctgtggctgtttagaggcagctggatcctctttcaggcgggaatgggagggcgggcacagggaggaggagaggaagagaaaaggaagaattcatttttaatttaggtttctttttttcttcttcatttcggagctctaaggtgtatgcagttgtgaccccatgtgtggggaagtgtagcaaggacggctggtggagggggaaggagggtgcgaggtgtctgtctgatgctttaggaaatgtctactgaggaccctgggacttaagaagaagggcggggagagtgccattgcctgtttgggagacaaaaatgaacgaaaacaggtgactttggaaagcaaagtcaaaacccagtttaggatgtagcacctgccccaggattcctgccctcggctttgccccagacccttattccagatgctgagagtgaccaggacagcagctcctgaggcccagtggtcttctttccaacaggaaaagaaggctgtgatgtcgctgtcaggatcatgccctgtggcacagcacaggtggtgggaggtggttttctgactgagatgttgcctgatggatggaaagaaatgtatttttaagttcaaaaagcattatcctgtggcgttgcctggacatccactccctgacagcccagagcagcactgtctggcttcccttcatgcttgtggctttgttgtgtttgatcagaattttgggggaaatggaaagttttcctcaaggagcagctgggggcagaataggtagtatttaagcaaatacttaagtccaagcaaatcatccccattaaaaagcttttcctgtaggctagtagg

SEQ ID NO: 135862 - DNA, 2057 bp, Homo sapiens
  Payload ID: 6557
  Gene Symbol: GPR108
  Gene Name: G protein-coupled receptor 108
  Uniprot ID: Q9NPR9
  ENST ID: ENST00000264080
  CDS Start-End: 28-1659
ggagtcggggaggaggtggctccagagatggcagtgagcgagaggagggggctcggccgcgggagccccgcggagtgggggcagcggctacttctggtgctgctgctgggtggctgctccgggcgcatccaccagctggcgctgacgggggagaagcgagcggacatccagctgaacagcttcggtttctacaccaatggctctctggaggtggagttgagcgtcctgcggctgggcctccgggaggcagaagagaagtccctgctggtggggttcagtctcagccgggttcggtctggcagagttcgctcctattcaacccgggatttccaggactgccctctccagaaaaacagtagcagtttcctggtcctgttcctcatcaacaccaaggatctgcaggtccaggtgcggaagtatggagagcagaagacgttgtttatctttcccgggctcctcccggaagcaccctccaaaccagggctcccgaagccacaggccacagtcccccgcaaggtggatggcggagggacctctgcagccagcaagcccaagtcaacacccgcagtgattcagggtcctagtgggaaggacaaggacctggtgttgggcctgagccacctcaacaactcctacaacttcagtttccacgtggtgatcggctctcaggcggaagaaggccagtacagcctgaacttccacaactgcaacaattcagtgccaggaaaggagcatccattcgacatcacggtgatgatccgggagaagaaccccgatggcttcctgtcggcagcggagatgccccttttcaagctctacatggtcatgtccgcctgcttcctggccgctggcatcttctgggtgtccatcctctgcaggaacacgtacagcgtcttcaagatccactggctcatggcggccttggccttcaccaagagcatctctctcctcttccacagcatcaactactacttcatcaacagccagggccaccccatcgaaggccttgccgtcatgtactacatcgcacacctgctgaagggcgccctcctcttcatcaccatcgccctgattggctcaggctgggccttcatcaagtacgtcctgtcggataaggagaagaaggtctttgggatcgtgatccccatgcaggtcctggccaacgtggcctacatcatcatcgagtcccgcgaggaaggcgccagcgactacgtgctgtggaaggagattttgttcctggtggacctcatctgctgtggtgccatcctgttccccgtagtctggtccatccggcatctccaggatgcgtctggcacagacgggaaggtggcagtgaacctggccaagctgaagctgttccggcattactatgtcatggtcatctgctacgtctacttcacccgcatcatcgccatcctgctgcaggtggctgtgccctttcagtggcagtggctgtaccagctcttggtggagggctccaccctggccttcttcgtgctcacgggctacaagttccagcccacaggaaacaacccgtacctgcagctgccccaggaggacgaggaggatgttcagatggagcaagtaatgacggactctgggttccgggaaggcctctccaaagtcaacaaaacagccagcgggcgggaactgttatgatcacctccacatctcagaccaaagggtcgtcctcccccagcatttctcactcctgcccttcttccacagcgtatgtggggaggtggagggggtccatgtggaccaggcgcccagctccccgggaccccggttcccggacaagcccatttggaagaagagtcccttcctccccccaaatattgggcagccctgtccttaccccgggaccacccctcccttccagctatgtgtacaataatgaccaatctgtttggctacgccgttgtcttgcctttttgggggttggggtctacacggaggttgtgtttacaatgtagaaacctgttttcgctgtgtgtggcgggggcgcgggcacagggtccgtgtctttgtatattcaataaatattcattcagtaa

SEQ ID NO: 135863 - DNA, 2009 bp, Homo sapiens
  Payload ID: 6557
  Gene Symbol: GPR108
  Gene Name: G protein-coupled receptor 108
  ENST ID: ENST00000430424
  CDS Start-End: 878-1783
tcgctggggtcggccccctcccttcgggggcgaggctccatctcttggggactacaccccccttccccccaactgggtcttagtcctttaaattcttggaatcacttttggggcgctagagaccctggagccgcacagcggggtcctggggggctatagagtggggtcctctgggcacttaatgggatttggggggttctgttgaaatattgctgggagctcaactggaatgtaaaagttcttcgggaaggtgaaggtcaggcacgccgagggggagaagcgagcggacatccagctgaacagcttcggtttctacaccaatggctctctggaggtggagttgagcgtcctgcggctgggcctccgggaggcagaagagaagtccctgctggtggggttcagtctcagccgggttcggtctggcagagttcgctcctattcaacccgggatttccaggactgccctctccagaaaaacagtagcagtttcctggtcctgttcctcatcaacaccaaggatctgcaggtccaggtgcggaagtatggagagcagaagacgttgtttatctttcccgggctcctcccggaagcaccctccaaaccagggctcccgaagccacaggccacagtcccccgcaaggtggatggcggagggacctctgcagccagcaagcccaagtcaacacccgcagtgattcagggtcctagtgggaaggacaaggacctggtgttgggcctgagccacctcaacaactcctacaacttcagtttccacgtggtgatcggctctcaggcggaagaaggccagtacagcctgaacttccacaactgcaacaattcagtgccaggaaaggagcatccattcgacatcacggtgatgatccgggagaagaaccccgatggcttcctgtcggcagcggagatgccccttttcaagctctacatggtcatgtccgcctgcttcctggccgctggcatcttctgggtgtccatcctctgcaggaacacgtacagcgtcttcaagatccactggctcatggcggccttggccttcaccaagagcatctctctcctcttccacagcatcaactactacttcatcaacagccagggccaccccatcgaaggccttgccgtcatgtactacatcgcacacctgctgaagggcgccctcctcttcatcaccatcgccctgattggctcaggctgggccttcatcaagtacgtcctgtcggataaggagaagaaggtctttgggatcgtgatccccatgcaggtcctggccaacgtggcctacatcatcatcgagtcccgcgaggaaggcgccagcgactacgtgctgtggaaggagattttgttcctggtggacctcatctgctgtggtgccatcctgttccccgtagtctggtccatccggcatctccaggatgcgtctggcacagacgggaaggtggcagtgaacctggccaagctgaagctgttccggcattactatgtcatggtcatctgctacgtctacttcacccgcatcatcgccatcctgctgcaggtggctgtgccctttcagtggcagtggctgtaccagctcttggtggagggctccaccctggccttcttcgtgctcacgggctacaagttccagcccacaggaaacaacccgtacctgcagctgccccaggaggacgaggaggatgttcagatggagcaagtaatgacggactctgggttccgggaaggcctctccaaagtcaacaaaacagccagcgggcgggaactgttatgatcacctccacatctcagaccaaagggtcgtcctcccccagcatttctcactcctgcccttcttccacagcgtatgtggggaggtggagggggtccatgtggaccaggcgcccagctccccgggaccccggttcccggacaagcccatttggaagaagagtcccttcctccccccaaatattgggcagccctgtccttaccccgggaccacccctcccttccagcta

SEQ ID NO: 135864 - DNA, 670 bp, Homo sapiens
  Payload ID: 6557
  Gene Symbol: GPR108
  Gene Name: G protein-coupled receptor 108
  ENST ID: ENST00000601716
  CDS Start-End: 1-670
ggcagtgagcgagaggagggggctcggccgcgggagccccgcggagtgggggcagcggctacttctggtgctgctgctgggtggctgctccgggcgcatccaccagctggcgctgacgggggagaagcgagcggacatccagctgaacagcttcggtttctacaccaatggctctctggaggtggagttgagcgtcctgcggctgggcctccgggaggcagaagagaagtccctgctgacccgggatttccaggactgccctctccagaaaaacagtagcagtttcctggtcctgttcctcatcaacaccaaggatctgcaggtccaggtgcggaagtatggagagcagaagacgttgtttatctttcccgggctcctcccggaagcaccctccaaaccagggctcccgaagccacaggccacagtcccccgcaaggtggatggcggagggacctctgcagccagcaagcccaagtcaacacccgcagtgattcagggtcctagtgggaaggacaaggacctggtgttgggcctgagccacctcaacaactcctacaacttcagtttccacgtggtgatcggctctcaggcggaagaaggccagtacagcctgaacttccacaactgcaacaattcagtgccaggaaaggagcatccattcgacatcacg

SEQ ID NO: 135865 - DNA, 765 bp, Homo sapiens
  Payload ID: 6557
  Gene Symbol: GPR108
  Gene Name: G protein-coupled receptor 108
  ENST ID: ENST00000597298
  CDS Start-End: 657-765
gagtggtctcgtcccgggatccccttcggtcctccggatggagttgccggggggagaagcgagcggacatccagctgaacagcttcggtttctacaccaatggctctctggaggtggagttgagcgtcctgcggctgggcctccgggaggcagaagagaagtccctgctggtggggttcagtctcagccgggttcggtctggcagagttcgctcctattcaacccgggatttccaggactgccctctccagaaaaacagtagcagtttcctggtcctgttcctcatcaacaccaaggatctgcaggtccaggtgcggaagtatggagagcagaagacgttgtttatctttcccgggctcctcccggaagcaccctccaaaccagggctcccgaagccacaggccacagtcccccgcaaggtggatggcggagggacctctgcagccagcaagcccaagtcaacacccgcagtgattcagggtcctagtgggaaggacaaggacctggtgttgggcctgagccacctcaacaactcctacaacttcagtttccacgtggtgatcggctctcaggcggaagaaggccagtacagcctgaacttccacaactgcaacaattcagtgccaggaaaggagcatccattcgacatcacggtgatgatccgggagaagaaccccgatggcttcctgtcggcagcggagatgccccttttcaagctctacatggtcatgtccgcctgcttcctggccgctggcatcttctggg

SEQ ID NO: 135866 - DNA, 778 bp, Homo sapiens
  Payload ID: 6557
  Gene Symbol: GPR108
  Gene Name: G protein-coupled receptor 108
  ENST ID: ENST00000594034
  CDS Start-End: 1-534
tcaggctgggccttcatcaagtacgtcctgtcggataaggagaagaaggtctttgggatcgtgatccccatgcaggtcctggccaacgtggcctacatcatcatcgagtcccgcgaggaaggcgccagcgactacgtgctgtggaaggagattttgttcctggtggacctcatctgctgtggtgccatcctgttccccgtagtctggtccatccggcatctccaggatgcgtctggcacagacgggaaggtggcagtgaacctggccaagctgaagctgttccggcattactatgtcatggtggctgtgccctttcagtggcagtggctgtaccagctcttggtggagggctccaccctggccttcttcgtgctcacgggctacaagttccagcccacaggaaacaacccgtacctgcagctgccccaggaggacgaggaggatgttcagatggagcaagtaatgacggactctgggttccgggaaggcctctccaaagtcaacaaaacagccagcgggcgggaactgttatgatcacctccacatctcagaccaaagggtcgtcctcccccagcatttctcactcctgcccttcttccacagcgtatgtggggaggtggagggggtccatgtggaccaggcgcccagctccccgggaccccggttcccggacaagcccatttggaagaagagtcccttcctccccccaaatattgggcagccctgtccttaccccgggaccacccctcccttccagctatgtgtacaataatgacca

SEQ ID NO: 135867 - DNA, 1750 bp, Homo sapiens
  Payload ID: 6557
  Gene Symbol: GPR108
  Gene Name: G protein-coupled receptor 108
  ENST ID: ENST00000595908
  CDS Start-End: 1-311
tggtgctgctgctgggtggctgctccgggcgcatccaccagctggcgctgacgggggagaagcgagcggacatccagctgaacagcttcggtttctacaccaatggctctctggaggtggagttgagcgtcctgcggctgggcctccgggaggcagaagagaagtccctgctggtggggttcagtctcagccgggttcggtctggcagagttcgctcctattcaacccgggatttccaggactgccctctccagaaaaacagtagcagtttcctggtcctgttcctcatcaacaccaaggatctgcagtgagttggggaccgggggctcgctcagatccttcgtctgcgtttccctggtgtgatgcccacacgcacctgggctgatcagggtccaggtgcggaagtatggagagcagaagacgttgtttatctttcccgggctcctcccggaagcaccctccaaaccagggctcccgaagccacaggccacagtcccccgcaaggtggatggcggagggacctctgcagccagcaagcccaagtcaacacccgcagtgattcagggtcctagtgggaaggacaaggacctggtgttgggcctgagccacctcaacaactcctacaacttcagtttccacgtggtgatcggctctcaggcggaagaaggccagtacagcctgaacttccacaactgcaacaattcagtgccaggaaaggagcatccattcgacatcacggtgatgatccgggagaagaaccccgatggcttcctgtcggcagcggagatgccccttttcaagctctacatggtcatgtccgcctgcttcctggccgctggcatcttctgggtgtccatcctctgcaggaacacatcaactactacttcatcaacagccagggccaccccatcgaaggccttgccgtcatgtactacatcgcacacctgctgaagggcgccctcctcttcatcaccatcgccctgattggctcaggctgggccttcatcaagtacgtcctgtcggataaggagaagaaggtctttgggatcgtgatccccatgcaggtcctggccaacgtggcctacatcatcatcgagtcccgcgaggaaggcgccagcgactacgtgctgtggaaggagattttgttcctggtggacctcatctgctgtggtgccatcctgttccccgtagtctggtccatccggcatctccaggatgcgtctggcacagacgggaaggtggcagtgaacctggccaagctgaagctgttccggcattactatgtcatggtggctgtgccctttcagtggcagtggctgtaccagctcttggtggagggctccaccctggccttcttcgtgctcacgggctacaagttccagcccacaggaaacaacccgtacctgcagctgccccaggaggacgaggaggatgttcagatggagcaagtaatgacggactctgggttccgggaaggcctctccaaagtcaacaaaacagccagcgggcgggaactgttatgatcacctccacatctcagaccaaagggtcgtcctcccccagcatttctcactcctgcccttcttccacagcgtatgtggggaggtggagggggtccatgtggaccaggcgcccagctccccgggaccccggttcccggacaagcccatttggaagaagagtcccttcctccccccaaatattgggcagccctgtccttaccccgggaccacccctcccttccagctat

SEQ ID NO: 135868 - DNA, 1834 bp, Homo sapiens
  Payload ID: 6557
  Gene Symbol: GPR108
  Gene Name: G protein-coupled receptor 108
  ENST ID: ENST00000597706
  CDS Start-End: 1-995
ggagggggctcggccgcgggagccccgcggagtgggggcagcggctacttctggtgctgctgctgggtggctgctccgggcgcatccaccagctggcgctgacgggggagaagcgagcggacatccagctgaacagcttcggtttctacaccaatggctctctggaggtggagttgagcgtcctgcggctgggcctccgggaggcagaagagaagtccctgctggtggggttcagtctcagccgggttcggtctggcagagttcgctcctattcaacccgggatttccaggactgccctctccagaaaaacagtagcagtttcctggtcctgttcctcatcaacaccaaggatctgcaggtccaggtgcggaagtatggagagcagaagacgttgtttatctttcccgggctcctcccggaagcaccctccaaaccagggctcccgaagccacaggccacagtcccccgcaaggtggatggcggagggacctctgcagccagcaagcccaagtcaacacccgcagtgattcagggtcctagtgggaaggacaaggacctggtgttgggcctgagccacctcaacaactcctacaacttcagtttccacgtggtgatcggctctcaggcggaagaaggccagtacagcctgaacttccacaactgcaacaattcagtgccaggaaaggagcatccattcgacatcacggtgatgatccgggagaagaaccccgatggcttcctgtcggcagcggagatgccccttttcaagctctacatggtcatgtccgcctgcttcctggccgctggcatcttctgggtgtccatcctctgcaggaacacgtacagcgtcttcaagatccactggctcatggcggccttggccttcaccaagagcatctctctcctcttccacagcatcaactactacttcatcaacagccagggccaccccatcgaaggccttgccgtcatgtactacatcgcacacctgtgagctgaagggcgccctcctcttcatcaccatcgccctgattggctcaggctgggccttcatcaagtacgtcctgtcggataaggagaagaaggtctttgggatcgtgatccccatgcaggtcctggccaacgtggcctacatcatcatcgagtcccgcgaggaaggcgccagcgactacgtgctgtggaaggagattttgttcctggtggacctcatctgctgtggtgccatcctgttccccgtagtctggtccatccggcatctccaggatgcgtctggcacagacgggaaggtggcagtgaacctggccaagctgaagctgttccggcattactatgtcatggtcatctgctacgtctacttcacccgcatcatcgccatcctgctgcaggtggctgtgccctttcagtggcagtggctgtaccagctcttggtggagggctccaccctggccttcttcgtgctcacgggctacaagttccagcccacaggaaacaacccgtacctgcagctgccccaggaggacgaggaggatgttcagatggagcaagtaatgacggactctgggttccgggaaggcctctccaaagtcaacaaaacagccagcgggcgggaactgttatgatcacctccacatctcagaccaaagggtcgtcctcccccagcatttctcactcctgcccttcttccacagcgtatgtggggaggtggagggggtccatgtggaccaggcgcccagctccccgggaccccggttcccggacaagcccatttggaagaagagtcccttcctccccccaaatattgggcagccctgtccttaccccgggaccacccct

SEQ ID NO: 135869 - DNA, 671 bp, Homo sapiens
  Payload ID: 6557
  Gene Symbol: GPR108
  Gene Name: G protein-coupled receptor 108
  ENST ID: ENST00000598052
  CDS Start-End: 1-437
gccccgcggagtgggggcagcggctacttctggtgctgctgctgggtggctgctccgggcgcatccaccagctggcgctgacgggggagaagcgagcggacatccagctgaacagcttcggtttctacaccaatggctctctggaggtggagttgagcgtcctgcggctgggcctccgggaggcagaagagaagtccctgctggtggggttcagtctcagccgggttcggtctggcagagttcgctcctattcaggtccaggtgcggaagtatggagagcagaagacgttgtttatctttcccgggctcctcccggaagcaccctccaaaccagggctcccgaagccacaggccacagtcccccgcaaggtggatggcggagggacctctgcagccagcaagcccaagtcaacacccgcagtgattcagggtcctagtgggaaggacaaggacctggtgttgggcctgagccacctcaacaactcctacaacttcagtttccacgtggtgatcggctctcaggcggaagaaggccagtacagcctgaacttccacaactgcaacaattcagtgccaggaaaggagcatccattcgacatcacggtgatgatccgggagaagaaccccgatggcttcctgtcggcagcggagatgccccttttcaagctcta

SEQ ID NO: 135870 - DNA, 523 bp, Homo sapiens
  Payload ID: 6557
  Gene Symbol: GPR108
  Gene Name: G protein-coupled receptor 108
  ENST ID: ENST00000594500
  CDS Start-End: 1-504
tgctgtggtgccatcctgttccccgtagtctggtccatccggcatctccaggatgcgtctggcacagacgggaaggtggcagtgaacctggccaagctgaagctgttccggcattactatgtcatggtcatctgctacgtctacttcacccgcatcatcgccatcctgctgcaggtggctgtgccctttcagtggcagtggctgtaccagctcttggtggagggctccaccctggccttcttcgtgctcacgggctacaagttccagcccacaggaaacaacccgtacctgcagctgccccaggaggacgaggaggatgttcagatggagcaagtcgtatgtggggaggtggagggggtccatgtggaccaggcgcccagctccccgggaccccggttcccggacaagcccatttggaagaagagtcccttcctccccccaaatattgggcagccctgtccttaccccgggaccacccctcccttccagctatgtgtacaataatgaccaatctgtttggcta

SEQ ID NO: 135871 - DNA, 581 bp, Homo sapiens
  Payload ID: 6557
  Gene Symbol: GPR108
  Gene Name: G protein-coupled receptor 108
  ENST ID: ENST00000598955
  CDS Start-End: 1-581
gtgatgatccgggagaagaaccccgatggcttcctgtcggcagcggagatgccccttttcaagctctacatggtcatgtccgcctgcttcctggccgctggcatcttctgggtgtccatcctctgcaggaacacatcaactactacttcatcaacagccagggccaccccatcgaaggccttgccgtcatgtactacatcgcacacctgctgaagggcgccctcctcttcatcaccatcgccctgattggctcaggctgggccttcatcaagtacgtcctgtcggataaggagaagaaggtctttgggatcgtgatccccatgcaggtcctggccaacgtggcctacatcatcatcgagtcccgcgaggaaggcgccagcgactacgtgctgtggaaggagattttgttcctggtggacctcatctgctgtggtgccatcctgttccccgtagtctggtccatccggcatctccaggatgcgtctggcacagacgggaaggtggcagtgaacctggccaagctgaagctgttccggcattactatgtcatggtcatctgctacgtctacttcacccgcatc

SEQ ID NO: 135872 - DNA, 1008 bp, Homo sapiens
  Payload ID: 6558
  Gene Symbol: GPR119
  Gene Name: G protein-coupled receptor 119
  Uniprot ID: Q8TDV5
  ENST ID: ENST00000276218
  CDS Start-End: 1-1008
atggaatcatctttctcatttggagtgatccttgctgtcctggcctccctcatcattgctactaacacactagtggctgtggctgtgctgctgttgatccacaagaatgatggtgtcagtctctgcttcaccttgaatctggctgtggctgacaccttgattggtgtggccatctctggcctactcacagaccagctctccagcccttctcggcccacacagaagaccctgtgcagcctgcggatggcatttgtcacttcctccgcagctgcctctgtcctcacggtcatgctgatcacctttgacaggtaccttgccatcaagcagcccttccgctacttgaagatcatgagtgggttcgtggccggggcctgcattgccgggctgtggttagtgtcttacctcattggcttcctcccactcggaatccccatgttccagcagactgcctacaaagggcagtgcagcttctttgctgtatttcaccctcacttcgtgctgaccctctcctgcgttggcttcttcccagccatgctcctctttgtcttcttctactgcgacatgctcaagattgcctccatgcacagccagcagattcgaaagatggaacatgcaggagccatggctggaggttatcgatccccacggactcccagcgacttcaaagctctccgtactgtgtctgttctcattgggagctttgctctatcctggacccccttccttatcactggcattgtgcaggtggcctgccaggagtgtcacctctacctagtgctggaacggtacctgtggctgctcggcgtgggcaactccctgctcaacccactcatctatgcctattggcagaaggaggtgcgactgcagctctaccacatggccctaggagtgaagaaggtgctcacctcattcctcctctttctctcggccaggaattgtggcccagagaggcccagggaaagttcctgtcacatcgtcactatctccagctcagagtttgatggctaa

SEQ ID NO: 135873 - DNA, 1981 bp, Homo sapiens
  Payload ID: 6559
  Gene Symbol: GPR12
  Gene Name: G protein-coupled receptor 12
  Uniprot ID: P47775
  ENST ID: ENST00000381436
  CDS Start-End: 464-1468
ggaaataggcgatttaaatattccatcgaggatggcggcccctggctcgagacctgccgctgccgcgtggttttctcggcagcagcccagatgtcaaacagttgttcgttttcagcatgcaagatgtgattttccaatgtgcattcccagcgctgttgcaaacagaccgccgcgagtccgtgtgtgcctgcctcgctcacgctggtgttttgaagtcctaccctgtgttttccccaatgccaaacggcatttttgttgtggggtttaaaccacagagactttggcttttgtttcatttcccaacagttcctcattcccgaagcttgtggcatttggtactggtatctgagcaggggctggctttctgtttgtctgtgtgttttttgcatgatcttggattgtcaccctgctgtatttaaacattaaaaagcctgtcttttcgttgaagaggacaggggttaaaatgaatgaagacctgaaggtcaatttaagcgggctgcctcgggattatttagatgccgctgctgcggagaacatctcggctgctgtctcctcccgggttcctgccgtagagccagagcctgagctcgtagtcaacccctgggacattgtcttgtgtacctcgggaaccctcatctcctgtgaaaatgccattgtggtccttatcatcttccacaaccccagcctgcgagcacccatgttcctgctaataggcagcctggctcttgcagacctgctggccggcattggactcatcaccaattttgtttttgcctacctgcttcagtcagaagccaccaagctggtcacgatcggcctcattgtcgcctctttctctgcctctgtctgcagcttgctggctatcactgttgaccgctacctctcactgtactacgctctgacgtaccattcggagaggacggtcacgtttacctatgtcatgctcgtcatgctctgggggacctccatctgcctggggctgctgcccgtcatgggctggaactgcctccgagacgagtccacctgcagcgtggtcagaccgctcaccaagaacaacgcggccatcctctcggtgtccttcctcttcatgtttgcgctcatgcttcagctctacatccagatctgtaagattgtgatgaggcacgcccatcagatagccctgcagcaccacttcctggccacgtcgcactatgtgaccacccggaaaggggtctccaccctggctatcatcctggggacgtttgctgcttgctggatgcctttcaccctctattccttgatagcggattacacctacccctccatctatacctacgccaccctcctgcccgccacctacaattccatcatcaaccctgtcatatatgctttcagaaaccaagagatccagaaagcgctctgtctcatttgctgcggctgcatcccgtccagtctcgcccagagagcgcgctcgcccagtgatgtgtagcacccttgcacccaggaggactctgcatttaccaagcacttccactgcctggccaaggtttgagatgcttcccttgaattccttgcattggattccctctcaagccacaggagcacttagcattcgtgaaacaatgacatcgttcagatgagttaagtgattgaagtgaaaataatgttaccagtgttttcaccattaaaaaaaattgttgagctctccactcaacattattttgttttgcttgggggcaagggtttccttttatactttgtttggagggctgactgggggtaggaaaggaagggatatgatacgcccatgatgttattagaagtaaatgagtttcagagtttttacctggactttaaaataaatttgagtgattgaggaaaattgagaaagacttactttttccagactattttttttttttacatgatggtagattttttaatgctgcatgtatgtaacagaatatgacccctttcaatccaatacaaatagtttacataa

SEQ ID NO: 135874 - DNA, 4850 bp, Homo sapiens
  Payload ID: 6559
  Gene Symbol: GPR12
  Gene Name: G protein-coupled receptor 12
  Uniprot ID: P47775
  ENST ID: ENST00000405846
  CDS Start-End: 223-1227
aaagctgggcgcgcgagccgaggctgctgctcacctgcagccgcgccgctcacctgccgcggagtgcgcgccccgcgccctcccggcccgctccggagcccggccgccccccccttgccacagcgggcaactgcgccgacatgcgacacgagtagcccacgcgcttcggaagcaccggaggagccccctcggcctgggcgagccaagaggacaggggttaaaatgaatgaagacctgaaggtcaatttaagcgggctgcctcgggattatttagatgccgctgctgcggagaacatctcggctgctgtctcctcccgggttcctgccgtagagccagagcctgagctcgtagtcaacccctgggacattgtcttgtgtacctcgggaaccctcatctcctgtgaaaatgccattgtggtccttatcatcttccacaaccccagcctgcgagcacccatgttcctgctaataggcagcctggctcttgcagacctgctggccggcattggactcatcaccaattttgtttttgcctacctgcttcagtcagaagccaccaagctggtcacgatcggcctcattgtcgcctctttctctgcctctgtctgcagcttgctggctatcactgttgaccgctacctctcactgtactacgctctgacgtaccattcggagaggacggtcacgtttacctatgtcatgctcgtcatgctctgggggacctccatctgcctggggctgctgcccgtcatgggctggaactgcctccgagacgagtccacctgcagcgtggtcagaccgctcaccaagaacaacgcggccatcctctcggtgtccttcctcttcatgtttgcgctcatgcttcagctctacatccagatctgtaagattgtgatgaggcacgcccatcagatagccctgcagcaccacttcctggccacgtcgcactatgtgaccacccggaaaggggtctccaccctggctatcatcctggggacgtttgctgcttgctggatgcctttcaccctctattccttgatagcggattacacctacccctccatctatacctacgccaccctcctgcccgccacctacaattccatcatcaaccctgtcatatatgctttcagaaaccaagagatccagaaagcgctctgtctcatttgctgcggctgcatcccgtccagtctcgcccagagagcgcgctcgcccagtgatgtgtagcacccttgcacccaggaggactctgcatttaccaagcacttccactgcctggccaaggtttgagatgcttcccttgaattccttgcattggattccctctcaagccacaggagcacttagcattcgtgaaacaatgacatcgttcagatgagttaagtgattgaagtgaaaataatgttaccagtgttttcaccattaaaaaaaattgttgagctctccactcaacattattttgttttgcttgggggcaagggtttccttttatactttgtttggagggctgactgggggtaggaaaggaagggatatgatacgcccatgatgttattagaagtaaatgagtttcagagtttttacctggactttaaaataaatttgagtgattgaggaaaattgagaaagacttactttttccagactattttttttttttacatgatggtagattttttaatgctgcatgtatgtaacagaatatgacccctttcaatccaatacaaatagtttacataattgtgtttggaagggacctgattttgctaacatgaactcagtaatgtcaccgacactgaaaccgtgaacccattcttatccattctttctttcctttcggcaattactgttcacgagaattccttcggtatttctataaatgttgcaactccttctgcatggtcgactgtgttagctagaccacttgtttcaaatgttgccatgtcaatctagattccaacgggtcatttttcaatatagttttccaatatgtactttctaaaatgaatcctgaagtaggttttgatcttcatatgaagtaggattgattagatccaccattgtagtttcttaagctattgtctgattgttttcagaaaacaaaaggaaaaaatattagcaattgagagtagattaaatttattttaatatattctgaaaaaaactaatgtgacattatcatgaaatgaaaaaaatcacctttcctctctctctgagaatatactaatggttattcttgattgagataattagaataaatattataggccaagtttttctggttcatactgtctgtggtgcataatgcatttgaaacaggcagtcccctattttaatgattaggtttgtttgtcagtgcacagcgtccatctatgactgtgacatataccagctatatcctgtaaggtcataaacagaatgaccattggctgttgatgaaaagttaagtttgaaatcttttaactccttttcaccaaaaaccaatttatacacaataaaaatcacattgcctgttttcagagaacaagaatgtagtcaggaaattgcaaagaagaattcactttaaacacattgtaaaatcgatgtgtctcaggtttcttttctgttcatgcagacaaatgtagacgcaggtaccttccctccatttgcaatggatttatagttatgtctatataatcagtggaaaaaattcttggcagcacattaattgagcccattcagatggcagcaaaagcagtatttcagggtcattggggaatcatttgtaataaattaacctcatcggtttgtcccagatgtgatgcccagggtgctctcaagaccattctgggagcctgcatgctgatgccttctctccagagcatcttctaatgtagcacacgtgtgaaaaaatcctctacttgaatctgtgtctcctccctgaggttacttatggaagcaggagagggactgaaatacttaagaagtgggaaagaattttcaatacataccactgtatgatcaatctaataaaactgatgcctttaaaacatttcttttgaacatttgatggagttagtaggttgaacatgatgagtctgttcgtttttaattaattaaaattgaatagcaccaccataggagacttgacaaaggtaagttggttttgagaggggctaggaaatatccgtaatgaggttttaaaggaataaatgatgattttataaaaatagtggctccatttgcatatctccaatagtcagaattataaagagaataatatgtacttgttgtgaccacatgtgtgccaggccccatgctgcgtgttttactataatcacaaaactactacttttataggtgagaaaactaagactaagagaggcgaggataaaaaatgtgcccgaggccacaaagcacaaggatagagtcagaatttgaagccagcttttccaaagtctaagtcttgctccttccctgtaccttgcaagctttcatccctcagtggataccagggctgaggaaactgatttgtaacacgttcctgtcacagagttttggctctacatttaagacataaaacttggcctggcgcagtggctcacgcctgtaatcccagcactttggggggccaaggcaggtggatcacctgaggtcaggagttcgaaaccagcctgaccaatatggcaaaaccctgtctctactaaaaataaaatttagccgggcgtggtggcgggtgcctgtaatcccagctactcaggaggctgaggcaggagaactgcttgaagacaggaggcagaggtagcagtgaacaaagatcgcaccactgcactccagcctgggtgacagagcaagactccatctcaaaaaaaaaaggacataaaatttcctgtttaaagttacactagttacgtggttgcttttggcccatgtttttaaaacatatagtttcagctaagagatttttcagttcaactaacaacatgcctttaccgtttaaattgtgaaaaatgttggatatttatgtggttttctacaaggtttcttttttcctgtggagctaattatttttaaatgtgcacacatctcaatgtacatatgtgtatgtatgtatttatgcatacgtatacccaataatattaactttgcaacaggaccaaagacctcatggaaaactgtcttatttccaacagtcctgaggtagcagataatcttttactccacataattaaaatttctagctaccaaggaattgatatttttccagtagaaacagttatccttgtaactaggacagttccattactttaccagaatcctgaattagtcaaaactagtcatcgaagttatgactatctagggttttgtttccttttattcctttaactctgtatttctttctatcagtgaagtttgtttttaaaggtacctggggcagggaagcagggtggagatagagcccctccttgcctggagcctacagtaaggagccaggttcaggaggagtggattccttggttgacttggccatgcagaaatagtcttagactcccccaggatttaaaataggattgaaacaagaagtttaaaagagcagaggaggaatagagatacttagtgccaataaaaatatcatggagacttcttcggctttttaaaaaaaatgcttaatccattattaaaataatgattgactttattttatagtaatatgtgataatatgaagttaggatgacttgccatttcagatttaaaatacatattaattaagtgactactatgttgtgattttgaataatgtttaagtttctatattgattgtatgcctggtataataaaggaaaagactgccttattgtcccctttaaaa

SEQ ID NO: 135875 - DNA, 3660 bp, Homo sapiens
  Payload ID: 6560
  Gene Symbol: GPR132
  Gene Name: G protein-coupled receptor 132
  Uniprot ID: Q9UNW8
  ENST ID: ENST00000329797
  CDS Start-End: 913-2055
agctaggactgcagggaggggtgcgaggctagccacgcaggcggggccctgggtcattttaaactctcagagtgaacgtcttgataggaccgacaagacgcatgacatgtacttagaaagcttatcttagagccacactgagattggaacccgcaaaatatgccagggaggaaggtgagcaagggacacgacactcacccggagaaacccagcaagcgcagcgaggctgtggggagaccggagccctgcacaccgccgggggaaggtgggccagcgccaccaccgtggagaacagcgcggaggcaccccacgagatgagacggaactgccgtgagatccagcaatgccaactgtgggtctgacccaggagaacggaaagcagggacgtgaacagccctcctcatgttcttgacaccgtcattctcagcagctcagctaaggcacagaggcagccgagcgtctgtcagcggagtcgtggctgagcagaacacgccacacgccacacgccacacgccacacgtgcaggattgctcaagatggaagggcacagtggaatatatatatatatttatatttttggcgagaccctggaggacacactgaatacaatggaataccatcccgcctttgaaaggaagggaaatcctggcacacgctgcaacaggagggagcttgaggacactgtggtgagtggagcacgtgagacacggaaggacacacgctgaagacacgcagagatgcccacccacgtggggaggtgacaggggagcccagcgcacagagacaaagtggaatggaggcctgggggctgggagcaaatgcggagcgagtgcttcctggggcagagtctccgtttgggaagatgagaaggttctgccgacggatgctggcgatggttgcagaagaatgtgaatgtgcccaatgctactgaaaaacggttacaatggaaacgccaccccagtgaccaccactgccccgtgggcctccctgggcctctccgccaagacctgcaacaacgtgtccttcgaagagagcaggatagtcctggtcgtggtgtacagcgcggtgtgcacgctgggggtgccggccaactgcctgactgcgtggctggcgctgctgcaggtactgcagggcaacgtgctggccgtctacctgctctgcctggcactctgcgagctgctgtacacaggcacgctgccactctgggtcatctatatccgcaaccagcaccgctggaccctaggcctgctggcctgcaaggtgaccgcctacatcttcttctgcaacatctacgtcagcatcctcttcctgtgctgcatctcctgcgaccgcttcgtggccgtggtgtacgcgctggagagtcggggccgccgccgccggaggaccgccatcctcatctccgcctgcatcttcatcctcgtcgggatcgttcactacccggtgttccagacggaagacaaggagacctgctttgacatgctgcagatggacagcaggattgccgggtactactacgccaggttcaccgttggctttgccatccctctctccatcatcgccttcaccaaccaccggattttcaggagcatcaagcagagcatgggcttaagcgctgcccagaaggccaaggtgaagcactcggccatcgcggtggttgtcatcttcctagtctgcttcgccccgtaccacctggttctcctcgtcaaagccgctgccttttcctactacagaggagacaggaacgccatgtgcggcttggaggaaaggctgtacacagcctctgtggtgtttctgtgcctgtccacggtgaacggcgtggctgaccccattatctacgtgctggccacggaccattcccgccaagaagtgtccagaatccataaggggtggaaagagtggtccatgaagacagacgtcaccaggctcacccacagcagggacaccgaggagctgcagtcgcccgtggcccttgcagaccactacaccttctccaggcccgtgcacccaccagggtcaccatgccctgcaaagaggctgattgaggagtcctgctgagcccactgtgtggcagggggatggcaggttgggggtcctggggccagcaatgtggttcctgtgcactgagcccaccagccacagtgcccatgtcccctctggaagacaaactaccaatttctcgttcctgaagccactccctccgtgaccactggccccaggctttcccacatggaaggtggctgcatgccaaggggaggagcgacacctccaggcttccgggagcccagagagcatgtggcaggcagtggggcctcttcatcagcagcctgcctggctggctcccttggctgtgggcaggtagcacgcctgctggcagaggtacctggtggctgccctgttcgcatcagtggcgatgactttatttgcggagcatttctgcaagcgttgcctggatgcggtggtgcattgtgggccctctgggctcctgcctcagaatgtcagtgagcaccatgctggaggtcacccagcactgtggcagcgcccaggagggcatagggcagcctaccacctccaagggggcaggcgccctcatctggggttgggtctgtgctgagctggagggcctctagggaaccgtggggcagggtggccagctgctggctcccagagcgcagcccaggcgtcctcaacggggagccccaaatgtccacgcccagaacaacagttggcaggacaggtgtgacacagccacagcagaggcaaggggtgccaggagtccccagcggcatcctcggggagatgctggtgaggggtccgtacagggtggggtccccacccctagccccttactgaggggggagtgcagcagttggcctgcttgtctggcggagaaagccagctccctgcaccctcggggctgagtcagatctgggtctgccgcaaaggccttgcctagaccaggtcacactgatgccctggtttccctatctgtaaaatggggccaatgacacctacctcactgggtcaccatcgagatcaatcctcctccctgccccgacacctcgggcacatcgcatgcactcagagcacagagccgggcagacgcagcacctgcatggggagcccagtgcccggcacagcacaggggcttccagggaggccgcgcagggccgtggggctgagccacgctctcgttttgtcaggcagctatgcagttgctcttccttgtttttgttttgtttttgtttttgtttttaatatttatttttttagagacagggccttgctctgttgcctgggctggagaacagtggcaccatcatagctcactgcagcctcaaactcctgggctcaagcgatcctccccgctcagcctcctgagtagctgggactacaggtgtgcaccaccacacccagccaaaacagccatcctccccttgagagtcatcagaaaaatacattaggaaaatgtgtttagaaataaaagcacaaggcagggcagtgctcacgcctgtcatcccagcactttgggaggccgagacgggaggatcagttgaggtcaggagtttgagaccagcctcggcaacatggcaaaatcttgtctcttttttttggtattaaaaaaatcataaaaataaaagaaataatgcaatttaaccttca

SEQ ID NO: 135876 - DNA, 2887 bp, Homo sapiens
  Payload ID: 6560
  Gene Symbol: GPR132
  Gene Name: G protein-coupled receptor 132
  Uniprot ID: Q9UNW8
  ENST ID: ENST00000392585
  CDS Start-End: 175-1290
acttcctgaaacctcagctaggactgcagggaggggtgcgaggctagccacgcaggcggggccctgggtcattttaaactctcagagtgaacgtcttgataggaccgacaagacgcatgacatgtacttagaaagcttatcttagagccacactgagattggaacccgcaaaatatgccaggaaacgccaccccagtgaccaccactgccccgtgggcctccctgggcctctccgccaagacctgcaacaacgtgtccttcgaagagagcaggatagtcctggtcgtggtgtacagcgcggtgtgcacgctgggggtgccggccaactgcctgactgcgtggctggcgctgctgcaggtactgcagggcaacgtgctggccgtctacctgctctgcctggcactctgcgagctgctgtacacaggcacgctgccactctgggtcatctatatccgcaaccagcaccgctggaccctaggcctgctggcctgcaaggtgaccgcctacatcttcttctgcaacatctacgtcagcatcctcttcctgtgctgcatctcctgcgaccgcttcgtggccgtggtgtacgcgctggagagtcggggccgccgccgccggaggaccgccatcctcatctccgcctgcatcttcatcctcgtcgggatcgttcactacccggtgttccagacggaagacaaggagacctgctttgacatgctgcagatggacagcaggattgccgggtactactacgccaggttcaccgttggctttgccatccctctctccatcatcgccttcaccaaccaccggattttcaggagcatcaagcagagcatgggcttaagcgctgcccagaaggccaaggtgaagcactcggccatcgcggtggttgtcatcttcctagtctgcttcgccccgtaccacctggttctcctcgtcaaagccgctgccttttcctactacagaggagacaggaacgccatgtgcggcttggaggaaaggctgtacacagcctctgtggtgtttctgtgcctgtccacggtgaacggcgtggctgaccccattatctacgtgctggccacggaccattcccgccaagaagtgtccagaatccataaggggtggaaagagtggtccatgaagacagacgtcaccaggctcacccacagcagggacaccgaggagctgcagtcgcccgtggcccttgcagaccactacaccttctccaggcccgtgcacccaccagggtcaccatgccctgcaaagaggctgattgaggagtcctgctgagcccactgtgtggcagggggatggcaggttgggggtcctggggccagcaatgtggttcctgtgcactgagcccaccagccacagtgcccatgtcccctctggaagacaaactaccaatttctcgttcctgaagccactccctccgtgaccactggccccaggctttcccacatggaaggtggctgcatgccaaggggaggagcgacacctccaggcttccgggagcccagagagcatgtggcaggcagtggggcctcttcatcagcagcctgcctggctggctcccttggctgtgggcaggtagcacgcctgctggcagaggtacctggtggctgccctgttcgcatcagtggcgatgactttatttgcggagcatttctgcaagcgttgcctggatgcggtggtgcattgtgggccctctgggctcctgcctcagaatgtcagtgagcaccatgctggaggtcacccagcactgtggcagcgcccaggagggcatagggcagcctaccacctccaagggggcaggcgccctcatctggggttgggtctgtgctgagctggagggcctctagggaaccgtggggcagggtggccagctgctggctcccagagcgcagcccaggcgtcctcaacggggagccccaaatgtccacgcccagaacaacagttggcaggacaggtgtgacacagccacagcagaggcaaggggtgccaggagtccccagcggcatcctcggggagatgctggtgaggggtccgtacagggtggggtccccacccctagccccttactgaggggggagtgcagcagttggcctgcttgtctggcggagaaagccagctccctgcaccctcggggctgagtcagatctgggtctgccgcaaaggccttgcctagaccaggtcacactgatgccctggtttccctatctgtaaaatggggccaatgacacctacctcactgggtcaccatcgagatcaatcctcctccctgccccgacacctcgggcacatcgcatgcactcagagcacagagccgggcagacgcagcacctgcatggggagcccagtgcccggcacagcacaggggcttccagggaggccgcgcagggccgtggggctgagccacgctctcgttttgtcaggcagctatgcagttgctcttccttgtttttgttttgtttttgtttttgtttttaatatttatttttttagagacagggccttgctctgttgcctgggctggagaacagtggcaccatcatagctcactgcagcctcaaactcctgggctcaagcgatcctccccgctcagcctcctgagtagctgggactacaggtgtgcaccaccacacccagccaaaacagccatcctccccttgagagtcatcagaaaaatacattaggaaaatgtgtttagaaataaaagcacaaggcagggcagtgctcacgcctgtcatcccagcactttgggaggccgagacgggaggatcagttgaggtcaggagtttgagaccagcctcggcaacatggcaaaatcttgtctcttttttttggtattaaaaaaatcataaaaataaaagaaataatgcaattt

SEQ ID NO: 135877 - DNA, 2779 bp, Homo sapiens
  Payload ID: 6560
  Gene Symbol: GPR132
  Gene Name: G protein-coupled receptor 132
  Uniprot ID: Q9UNW8
  ENST ID: ENST00000539291
  CDS Start-End: 1003-2145
agctaggactgcagggaggggtgcgaggctagccacgcaggcggggccctggctttataaaggtataattgacaaacaagaagagtacctaggccaggtgcggtggcttacgcctgtaatcccagcactttgggaggccgaggtcattttaaactctcagagtgaacgtcttgataggaccgacaagacgcatgacatgtacttagaaagcttatcttagagccacactgagattggaacccgcaaaatatgccagggaggaaggtgagcaagggacacgacactcacccggagaaacccagcaagcgcagcgaggctgtggggagaccggagccctgcacaccgccgggggaaggtgggccagcgccaccaccgtggagaacagcgcggaggcaccccacgagatgagacggaactgccgtgagatccagcaatgccaactgtgggtctgacccaggagaacggaaagcagggacgtgaacagccctcctcatgttcttgacaccgtcattctcagcagctcagctaaggcacagaggcagccgagcgtctgtcagcggagtcgtggctgagcagaacacgccacacgccacacgccacacgccacacgtgcaggattgctcaagatggaagggcacagtggaatatatatatatatttatatttttggcgagaccctggaggacacactgaatacaatggaataccatcccgcctttgaaaggaagggaaatcctggcacacgctgcaacaggagggagcttgaggacactgtggtgagtggagcacgtgagacacggaaggacacacgctgaagacacgcagagatgcccacccacgtggggaggtgacaggggagcccagcgcacagagacaaagtggaatggaggcctgggggctgggagcaaatgcggagcgagtgcttcctggggcagagtctccgtttgggaagatgagaaggttctgccgacggatgctggcgatggttgcagaagaatgtgaatgtgcccaatgctactgaaaaacggttacaatggaaacgccaccccagtgaccaccactgccccgtgggcctccctgggcctctccgccaagacctgcaacaacgtgtccttcgaagagagcaggatagtcctggtcgtggtgtacagcgcggtgtgcacgctgggggtgccggccaactgcctgactgcgtggctggcgctgctgcaggtactgcagggcaacgtgctggccgtctacctgctctgcctggcactctgcgagctgctgtacacaggcacgctgccactctgggtcatctatatccgcaaccagcaccgctggaccctaggcctgctggcctgcaaggtgaccgcctacatcttcttctgcaacatctacgtcagcatcctcttcctgtgctgcatctcctgcgaccgcttcgtggccgtggtgtacgcgctggagagtcggggccgccgccgccggaggaccgccatcctcatctccgcctgcatcttcatcctcgtcgggatcgttcactacccggtgttccagacggaagacaaggagacctgctttgacatgctgcagatggacagcaggattgccgggtactactacgccaggttcaccgttggctttgccatccctctctccatcatcgccttcaccaaccaccggattttcaggagcatcaagcagagcatgggcttaagcgctgcccagaaggccaaggtgaagcactcggccatcgcggtggttgtcatcttcctagtctgcttcgccccgtaccacctggttctcctcgtcaaagccgctgccttttcctactacagaggagacaggaacgccatgtgcggcttggaggaaaggctgtacacagcctctgtggtgtttctgtgcctgtccacggtgaacggcgtggctgaccccattatctacgtgctggccacggaccattcccgccaagaagtgtccagaatccataaggggtggaaagagtggtccatgaagacagacgtcaccaggctcacccacagcagggacaccgaggagctgcagtcgcccgtggcccttgcagaccactacaccttctccaggcccgtgcacccaccagggtcaccatgccctgcaaagaggctgattgaggagtcctgctgagcccactgtgtggcagggggatggcaggttgggggtcctggggccagcaatgtggttcctgtgcactgagcccaccagccacagtgcccatgtcccctctggaagacaaactaccaatttctcgttcctgaagccactccctccgtgaccactggccccaggctttcccacatggaaggtggctgcatgccaaggggaggagcgacacctccaggcttccgggagcccagagagcatgtggcaggcagtggggcctcttcatcagcagcctgcctggctggctcccttggctgtgggcaggtagcacgcctgctggcagaggtacctggtggctgccctgttcgcatcagtggcgatgactttatttgcggagcatttctgcaagcgttgcctggatgcggtggtgcattgtgggccctctgggctcctgcctcagaatgtcagtgagcaccatgctggaggtcacccagcactgtggcagcgcccaggagggcatagggcagcctaccacctccaagggggcaggcgccctcatctggggttgggtctgtgctgagctggagggcctctagggaaccgtggggcagggtggccagctgctggctcccagagcgcagcccaggcgtcctcaacg

SEQ ID NO: 135878 - DNA, 3341 bp, Homo sapiens
  Payload ID: 6560
  Gene Symbol: GPR132
  Gene Name: G protein-coupled receptor 132
  ENST ID: ENST00000551869
  CDS Start-End: 372-578
agggcacagtggaatatatatatatatttatatttttggcgagaccctggaggacacactgaatacaatggaataccatcccgcctttgaaaggaagggaaatcctggcacacgctgcaacaggagggagcttgaggacactgtggtgagtggagcacgtgagacacggaaggacacacgctgaagacacgcagagatgcccacccacgtggggaggtgacaggggagcccagcgcacagagacaaagtggaatggaggcctgggggctgggagcaaatgcggagcgagtgcttcctggggcagagtctccgtttgggaagatgagaaggttctgccgacggatgctggcgatggttgcagaagaatgtgaatgtgcccaatgctactgaaaaacggttacaatggtgctgaggccaggtctgtctgcggcttcctgctgacctggaggtgggactccatgatctgtaaccacagaaggcccagaagcatgaactcagccagagtgggcagccaggacactggagctggtggcgctggcagagcttggggaagtcacaccactgcacaccctgcgtgacctctagcaaccccctggctggaaaggatgagtttctgacctcggagagctgtgtttgaggaaacgccaccccagtgaccaccactgccccgtgggcctccctgggcctctccgccaagacctgcaacaacgtgtccttcgaagagagcaggatagtcctggtcgtggtgtacagcgcggtgtgcacgctgggggtgccggccaactgcctgactgcgtggctggcgctgctgcaggtactgcagggcaacgtgctggccgtctacctgctctgcctggcactctgcgagctgctgtacacaggcacgctgccactctgggtcatctatatccgcaaccagcaccgctggaccctaggcctgctggcctgcaaggtgaccgcctacatcttcttctgcaacatctacgtcagcatcctcttcctgtgctgcatctcctgcgaccgcttcgtggccgtggtgtacgcgctggagagtcggggccgccgccgccggaggaccgccatcctcatctccgcctgcatcttcatcctcgtcgggatcgttcactacccggtgttccagacggaagacaaggagacctgctttgacatgctgcagatggacagcaggattgccgggtactactacgccaggttcaccgttggctttgccatccctctctccatcatcgccttcaccaaccaccggattttcaggagcatcaagcagagcatgggcttaagcgctgcccagaaggccaaggtgaagcactcggccatcgcggtggttgtcatcttcctagtctgcttcgccccgtaccacctggttctcctcgtcaaagccgctgccttttcctactacagaggagacaggaacgccatgtgcggcttggaggaaaggctgtacacagcctctgtggtgtttctgtgcctgtccacggtgaacggcgtggctgaccccattatctacgtgctggccacggaccattcccgccaagaagtgtccagaatccataaggggtggaaagagtggtccatgaagacagacgtcaccaggctcacccacagcagggacaccgaggagctgcagtcgcccgtggcccttgcagaccactacaccttctccaggcccgtgcacccaccagggtcaccatgccctgcaaagaggctgattgaggagtcctgctgagcccactgtgtggcagggggatggcaggttgggggtcctggggccagcaatgtggttcctgtgcactgagcccaccagccacagtgcccatgtcccctctggaagacaaactaccaatttctcgttcctgaagccactccctccgtgaccactggccccaggctttcccacatggaaggtggctgcatgccaaggggaggagcgacacctccaggcttccgggagcccagagagcatgtggcaggcagtggggcctcttcatcagcagcctgcctggctggctcccttggctgtgggcaggtagcacgcctgctggcagaggtacctggtggctgccctgttcgcatcagtggcgatgactttatttgcggagcatttctgcaagcgttgcctggatgcggtggtgcattgtgggccctctgggctcctgcctcagaatgtcagtgagcaccatgctggaggtcacccagcactgtggcagcgcccaggagggcatagggcagcctaccacctccaagggggcaggcgccctcatctggggttgggtctgtgctgagctggagggcctctagggaaccgtggggcagggtggccagctgctggctcccagagcgcagcccaggcgtcctcaacggggagccccaaatgtccacgcccagaacaacagttggcaggacaggtgtgacacagccacagcagaggcaaggggtgccaggagtccccagcggcatcctcggggagatgctggtgaggggtccgtacagggtggggtccccacccctagccccttactgaggggggagtgcagcagttggcctgcttgtctggcggagaaagccagctccctgcaccctcggggctgagtcagatctgggtctgccgcaaaggccttgcctagaccaggtcacactgatgccctggtttccctatctgtaaaatggggccaatgacacctacctcactgggtcaccatcgagatcaatcctcctccctgccccgacacctcgggcacatcgcatgcactcagagcacagagccgggcagacgcagcacctgcatggggagcccagtgcccggcacagcacaggggcttccagggaggccgcgcagggccgtggggctgagccacgctctcgttttgtcaggcagctatgcagttgctcttccttgtttttgttttgtttttgtttttgtttttaatatttatttttttagagacagggccttgctctgttgcctgggctggagaacagtggcaccatcatagctcactgcagcctcaaactcctgggctcaagcgatcctccccgctcagcctcctgagtagctgggactacaggtgtgcaccaccacacccagccaaaacagccatcctccccttgagagtcatcagaaaaatacattaggaaaatgtgtttagaaataaaagcacaaggcagggcagtgctcacgcctgtcatcccagcactttgggaggccgagacgggaggatcagttgaggtcaggagtttgagaccagcctcggcaacatggcaaaatcttgtctcttttttttggtattaaaaaaatcataaaaataaaagaaataatgcaa

SEQ ID NO: 135879 - DNA, 1092 bp, Homo sapiens
  Payload ID: 6560
  Gene Symbol: GPR132
  Gene Name: G protein-coupled receptor 132
  ENST ID: ENST00000549990
  CDS Start-End: 1063-1092
gacgttttgatgcctgttggcttggagccttgcttgtgtttctcatgtgggatgcaacggcagattctcaacatttaaaaaacacctacgaatcaacgggccacttagtaaattagtaaatactcactagccgtttgtcaatgggttaacttgtgactcaatctgatttccctaaaacaatttcaacctactctttttccaggtcattttaaactctcagagtgaacgtcttgataggaccgacaagacgcatgacatgtacttagaaagcttatcttagagccacactgagattggaacccgcaaaatatgccagggaggaaggtgagcaagggacacgacactcacccggagaaacccagcaagcgcagcgaggctgtggggagaccggagccctgcacaccgccgggggaaggtgggccagcgccaccaccgtggagaacagcgcggaggcaccccacgagatgagacggaactgccgtgagatccagcaatgccaactgtgggtctgacccaggagaacggaaagcagggacgtgaacagccctcctcatgttcttgacaccgtcattctcagcagctcagctaaggcacagaggcagccgagcgtctgtcagcggagtcgtggctgagcagaacacgccacacgccacacgccacacgccacacgtgcaggattgctcaagatggaagggcacagtggaatatatatatatatttatatttttggcgagaccctggaggacacactgaatacaatggaataccatcccgcctttgaaaggaagggaaatcctggcacacgctgcaacaggagggagcttgaggacactgtggtgagtggagcacgtgagacacggaaggacacacgctgaagacacgcagagatgcccacccacgtggggaggtgacaggggagcccagcgcacagagacaaagtggaatggaggcctgggggctgggagcaaatgcggagcgagtgcttcctggggcagagtctccgtttgggaagatgagaaggttctgccgacggatgctggcgatggttgcagaagaatgtgaatgtgcccaatgctactgaaaaacggttac

SEQ ID NO: 135880 - DNA, 4578 bp, Homo sapiens
  Payload ID: 6561
  Gene Symbol: GPR135
  Gene Name: G protein-coupled receptor 135
  Uniprot ID: Q8IZ08
  ENST ID: ENST00000395116
  CDS Start-End: 117-1601
ggccgagcccagctccccgcggcggccgctagcccccggccccgagccaccactccgacctagcggccgccgcccccggtgcgggatgaggagatccgcggccgccactgggccccatggaggagccgcagccgccccgcccaccagcgagcatggccttactgggcagccagcactccggcgccccctccgcggccggcccacctggcgggacttcctccgcggccacggcggccgtgctctccttcagcaccgtggcgaccgcggcgctggggaacctgagcgacgcaagcggaggcggcacagctgccgctcccggtggcggcggccttggcgggtccggggcagcgcgggaggcgggggcggcggtgaggcggccgctaggcccggaggcggcgccgctgctgtcgcacggagctgcagtggcggcccaggcgctcgtcctcctgctcatcttcctgctgtctagccttggcaactgcgcggtgatgggggtgattgtgaagcaccggcagctccgcaccgtcaccaacgccttcatcctgtcgctgtccctatcggatctgctcacggcgctgctctgcctgcccgccgccttcctggacctcttcactccgcccgggggttcggcgcctgccgccgccgcggggccctggcgcggcttctgcgccgccagccgcttcttcagctcgtgcttcggcatcgtgtccacgctcagcgtggcgctcatctcgttggaccgttactgcgctatcgtgcggccgccgcgggagaagatcggccgccgccgcgcgctgcagctgctggcgggcgcctggctgacggccctgggcttctccttgccctgggagctgctcggggcgccccgggaactcgcggcggcgcagagcttccacggctgcctctaccggacctccccggaccccgcgcagctgggcgcggccttcagcgtggggctggtggtggcctgctacctgctgcccttcctgctcatgtgcttctgccactaccacatctgcaagacggtgcgcctgtcggacgtgcgcgtgcggccggtgaacacctacgcgcgcgtgctgcgcttcttcagcgaggtgcgcacggccaccaccgtcctcatcatgatcgtcttcgtcatctgctgctgggggccctactgcttcctggtgctgctggccgccgcccggcaggcccagaccatgcaggccccctcgctcctcagcgtggtggccgtctggctgacctgggccaatggggccatcaaccctgtcatctacgccatccgcaatcccaacatttcgatgctcctagggcgcaaccgcgaggagggctaccggactaggaatgtggacgctttcctgcccagccagggcccgggtctgcaagccagaagccgcagtcgccttcgaaaccgctatgccaaccggctgggggcctgcaacaggatgtcctcttccaacccggccagcggagtggcaggggacgtggccatgtgggcccgcaaaaatccagttgtacttttctgccgagagggaccaccagagccggtgacggcagtgaccaaacagcctaaatccgaagctggggataccagcctctaagacggttggaatggccagcttatgaaggcaaatttccactcgcattatttaatgatggaagattctgggggagagttgtggatttcataaagccaaacatttaaagctagagacgggggaggcttaccactttccccaaacaacataaaagacaatgtcccttcttcaaaagtgccaaaaggaatgtaaaatgcaaaaattaaaacaatcttaaaccacataaccaagcattgtgaactgtaagtgccaaaaatgacaaaaataacattcactataactgaaaagctcatattataggaccacactgtgaaacaaacaaaacattgaatgcaaccagtattgttcaactacacagaatttcaggaatgaatggagaccttcagagctgcttgaaagcccctctaaatcgctaccatccaacaaaactttagcttctagagcttgcacctctgacatgctttgggtgcttagattgcaagtggaaaagtcttatccttacacacattggtgcacctcctcaccccaccccctaataacctttgtggaaaatttttaattcataacccatttaaaatcattttaggattttgaaaagctggttattattagataaaattcaaccatctgaaggacaaatagaagtatgaacataaagaaatgtgtcttttaaatgttttccaagattatatgtaaaaattaacattccttccacccgcgtcatacctccaaaatgatcttccttggaaaactttgaagttttatccttactctaacctgttacttttatttctgataaattttggaatgctgctctcagaatgctttcacatttaaaaaaatattttcattgtagaaaatttttgtcttttgaggtaaatttgatttttggatatagccaaaaatgtaatttgaagtcaagttgattgaataaggtgagtgatgccactttatttaaatttttattattttttaaaatgagacctctataaaacaacaaggttgggtttcctacgtggcttttagctaactgaaaacgattccaaagagaaattctaaaactattttgagaagcagcctcttggaattagcgtagacttttccaaatagatcataccctcctacatttagaaatttggtatattttgtattttttaaaatagctgatggttgctttatagctatgacttgtcgaagataatgtatttattaaagggagaataggtgtgggactatatgtaacggtattaaaacacaggcataaagttggagaagaacttcaagcaaactgaaaatatctttagaaatatgcaaatcaaagatgctttttaaatttctatcttagcagaaaagatggttttacaataattcaaaagcgtatgtgaactttctaatgttaaatacgactatacacagaatcatttactcagaatttttttaaatattatttttccctttcttttcctccatcctgccccttttcttcagtatttcatagccttaattgaacaagttatttacagtagatatgaaaagacattagctgtcgtatgaagatttcaatgtgaaatagccagcattttcttcctgtaaagtatttaaatatgtttttaagtatttctttgtttgacaggtgggtacatgtcattattttgtaatcaaaggtggaaatatatgagtcatgtcagagctaaagatgttttaattttttctgcttctcagggtatcatcacaaatcagaagtttgtaaattgtatatattttgctacactcaatgtagtacaaagtagatgagataatccctcccctctagcccttattttataaagcatatacagacttcatgcagctggactaacaaaaacaggtgtctgcggtatttgcctgttaaaggcaaaaaattgtgtattttttggcaccgagtcacttttgggatttagagagaaatgataaagtcttcaattataaaagacatcatagaatagaagtacagttgtgaataaagggcagagggttagagatcttagagtaaggaggtgagcgtgttgcaaaatagtgtgttgcctgagaagaagaattgaaggaaggcattgaaaaataaatgtgatatagaataaacctacctggtgagtgaagggaaaatctgagagattggaagtgacaaggtgatggcatgaaggactttaaggaagaaaaggaattccagccctaccttttcggtggcaggaagttttaggaaaggcatggcttgtgaaagaggccattctgttagtggctccgagagtcatggtaggcaagaattggaggggaaaaagagaaaattgttcataaattactgaacaatttacaatgctctaaattgtttgtttttaatccaaggctatccaactatttagtggtagaactaggatttgaactgcagtctgtttggcctcagaactccatgtttgtttctctctatccccacagaagtctacaggtaaggaaatcaatcatgatcaattatggtactgtcatcattatcatcatcgtgatcatcatctaccatttttgtttcctactttatataagggcaacttcctgggagctaaggctactaaaaggtagaagccacagtactcatctgcagagggcttacagcctcagcaaggaccttgtggctttgtaacaacaatcagccataacaagtttacttgtggaaaagaaaaggtgtagcactttcagaagaggctatcaaagaaaagagatgaacttggaagcaagagatacgcaggtataagtcagccacccatttgacccagtgtaaatacttagacaatcaatacctcaaaaggtgaagaaagaatgattctcaaaataatctaagacttcgacctttcgttgtgcttactatgagtatgcaattatagtgacttcatgggaaaacgagaaagaaaagctatgaaatattggaatggattaaatattgagtactatgtaa

SEQ ID NO: 135881 - DNA, 2540 bp, Homo sapiens
  Payload ID: 6561
  Gene Symbol: GPR135
  Gene Name: G protein-coupled receptor 135
  Uniprot ID: Q8IZ08
  ENST ID: ENST00000481661
  CDS Start-End: 116-1600
gccgagcccagctccccgcggcggccgctagcccccggccccgagccaccactccgacctagcggccgccgcccccggtgcgggatgaggagatccgcggccgccactgggccccatggaggagccgcagccgccccgcccaccagcgagcatggccttactgggcagccagcactccggcgccccctccgcggccggcccacctggcgggacttcctccgcggccacggcggccgtgctctccttcagcaccgtggcgaccgcggcgctggggaacctgagcgacgcaagcggaggcggcacagctgccgctcccggtggcggcggccttggcgggtccggggcagcgcgggaggcgggggcggcggtgaggcggccgctaggcccggaggcggcgccgctgctgtcgcacggagctgcagtggcggcccaggcgctcgtcctcctgctcatcttcctgctgtctagccttggcaactgcgcggtgatgggggtgattgtgaagcaccggcagctccgcaccgtcaccaacgccttcatcctgtcgctgtccctatcggatctgctcacggcgctgctctgcctgcccgccgccttcctggacctcttcactccgcccgggggttcggcgcctgccgccgccgcggggccctggcgcggcttctgcgccgccagccgcttcttcagctcgtgcttcggcatcgtgtccacgctcagcgtggcgctcatctcgttggaccgttactgcgctatcgtgcggccgccgcgggagaagatcggccgccgccgcgcgctgcagctgctggcgggcgcctggctgacggccctgggcttctccttgccctgggagctgctcggggcgccccgggaactcgcggcggcgcagagcttccacggctgcctctaccggacctccccggaccccgcgcagctgggcgcggccttcagcgtggggctggtggtggcctgctacctgctgcccttcctgctcatgtgcttctgccactaccacatctgcaagacggtgcgcctgtcggacgtgcgcgtgcggccggtgaacacctacgcgcgcgtgctgcgcttcttcagcgaggtgcgcacggccaccaccgtcctcatcatgatcgtcttcgtcatctgctgctgggggccctactgcttcctggtgctgctggccgccgcccggcaggcccagaccatgcaggccccctcgctcctcagcgtggtggccgtctggctgacctgggccaatggggccatcaaccctgtcatctacgccatccgcaatcccaacatttcgatgctcctagggcgcaaccgcgaggagggctaccggactaggaatgtggacgctttcctgcccagccagggcccgggtctgcaagccagaagccgcagtcgccttcgaaaccgctatgccaaccggctgggggcctgcaacaggatgtcctcttccaacccggccagcggagtggcaggggacgtggccatgtgggcccgcaaaaatccagttgtacttttctgccgagagggaccaccagagccggtgacggcagtgaccaaacagcctaaatccgaagctggggataccagcctctaagacggttggaatggccagcttatgaaggcaaatttccactcgcattatttaatgatggaagattctgggggagagttgtggatttcataaagccaaacatttaaagctagagacgggggaggcttaccactttccccaaacaacataaaagacaatgtcccttcttcaaaagtgccaaaaggaatgtaaaatgcaaaaattaaaacaatcttaaaccacataaccaagcattgtgaactgctatccaactatttagtggtagaactaggatttgaactgcagtctgtttggcctcagaactccatgtttgtttctctctatccccacagaagtctacagggcaacttcctgggagctaaggctactaaaaggtagaagccacagtactcatctgcagagggcttacagcctcagcaaggaccttgtggctttgtaacaacaatcagccataacaagtttacttgtggaaaagaaaaggtgtagcactttcagaagaggctatcaaagaaaagagatgaacttggaagcaagagatacgcagctcagcatgacagagactccattccaggtggaaaaagcacatggctctttcttctccgagatcccaggactatcttattttcctcagaggggcaggttacaagaacttcacatctctcaggctacatgttgcaaaggttaaattccaggttgtacgatttttcacttccaccatcaagttatgagtgtgattgtttccctgcagttttgccaatagagtgattttagactatttacatcgtgggttacaaccaatgtcagttattctggggaaacccaactgccatgttgtgaggacactcaagcagccctatggaggagcccacatggtgagtgaataactacaagctgactctaattttaaaaaataaaaattttatctctcaccaattttaaaatg

SEQ ID NO: 135882 - DNA, 1485 bp, Homo sapiens
  Payload ID: 6562
  Gene Symbol: GPR137
  Gene Name: G protein-coupled receptor 137
  Uniprot ID: Q96N19
  ENST ID: ENST00000313074
  CDS Start-End: 106-1359
ctccctctctgcaccctgcaattcccacccctccgtatttatttccctggtcccgccgacagtccctccttgtctgtctccgggattcaggcctccctccctgacatggagagtaacctgtctggcctggtgcctgctgccgggctggtgcctgcgctgccacctgctgtgaccctggggctgacagctgcctacaccaccctgtatgccctgctcttcttctccgtctatgcccagctctggctggtgcttctgtatgggcacaagcgtctcagctatcagacggtgttcctggccctctgtctgctctgggccgccttgcgtaccaccctcttctccttctacttccgagatactccccgcgccaaccgcctggggcccttgcccttctggcttctctactgctgccccgtctgcctgcagttcttcaccttgacgcttatgaacctctactttgcccaggtggtgttcaaggccaaggtgaagcgtcggccggagatgagccgaggcttgctcgctgtccgaggggcctttgtgggggcctcgctgctctttctgctggtgaacgtgctgtgtgctgtgctctcccatcggcgccgggcacagccctgggccctgctgcttgtccgcgtcctggtgagcgactccctgttcgtcatctgcgcgctgtctcttgctgcctgcctctgcctcgtcgccaggcgggcgccctccactagcatctacctggaggccaaggggaccagtgtgtgccaggcggccgcgatgggtggcgccatggtcctgctctatgccagccgggcctgctacaacctgacagcactggccttggccccccagagccggctggacaccttcgattacgactggtacaatgtgtctgaccaggcggacctggtgaatgacctggggaacaaaggctacctggtatttggcctcatcctcttcgtgtgggagctactgcccaccaccctgctggtgggcttcttccgggtgcaccggcccccacaggacctgagcaccagccacatcctcaatgggcaggtctttgcctctcggtcctacttctttgaccgggctgggcactgtgaagatgagggctgctcctgggagcacagccggggtgagagcaccaggtgccaggaccaggcggccaccaccacagtctctactccaccccacagacgtgatccccctccctcccccacagaatacccaggccccagtccccctcaccctaggcccctgtgccaagtttgtctgccgcttcttgcccaggatcctgggggtcgtggctaccccctcctctggccggctccttgctgctcctgtcatagtgagcttgtgccgtccccctaggatggggggcatggccctggctgccagatgcccacagcaccctggcatgacctgccacctctgcttccacaccggagccagctacctctcctgtgcctgccactcaataaacagtgtctgcgcccc

SEQ ID NO: 135883 - DNA, 1478 bp, Homo sapiens
  Payload ID: 6562
  Gene Symbol: GPR137
  Gene Name: G protein-coupled receptor 137
  Uniprot ID: Q96N19
  ENST ID: ENST00000377702
  CDS Start-End: 140-1180
gataaggaaaggaacctcctccctggctgggatggctgcccgggcgcgggaggagggccggggacccggtgagggaggaccgtagggcccgtgggggcttcacgcctggcaggcggccggccaggcctccctccctgacatggagagtaacctgtctggcctggtgcctgctgccgggctggtgcctgcgctgccacctgctgtgaccctggggctgacagctgcctacaccaccctgtatgccctgctcttcttctccgtctatgcccagctctggctggtgcttctgtatgggcacaagcgtctcagctatcagacggtgttcctggccctctgtctgctctgggccgccttgcgtaccaccctcttctccttctacttccgagatactccccgcgccaaccgcctggggcccttgcccttctggcttctctactgctgccccgtctgcctgcagttcttcaccttgacgcttatgaacctctactttgcccaggtggtgttcaaggccaaggtgaagcgtcggccggagatgagccgaggcttgctcgctgtccgaggggcctttgtgggggcctcgctgctctttctgctggtgaacgtgctgtgtgctgtgctctcccatcggcgccgggcacagccctgggccctgctgcttgtccgcgtcctggtgagcgactccctgttcgtcatctgcgcgctgtctcttgctgcctgcctctgcctcgtcgccaggcgggcgccctccactagcatctacctggaggccaaggcggacctggtgaatgacctggggaacaaaggctacctggtatttggcctcatcctcttcgtgtgggagctactgcccaccaccctgctggtgggcttcttccgggtgcaccggcccccacaggacctgagcaccagccacatcctcaatgggcaggtctttgcctctcggtcctacttctttgaccgggctgggcactgtgaagatgagggctgctcctgggagcacagccggggtgagagcaccagtatgtcgggcagtctaggctctgggagctggtatggtgccatcgggcgtgagccgggctggtatgggggcagccagacgaagaccactcctctgctcttctcccaggtgccaggaccaggcggccaccaccacagtctctactccaccccacagacgtgatccccctccctcccccacagaatacccaggccccagtccccctcaccctaggcccctgtgccaagtttgtctgccgcttcttgcccaggatcctgggggtcgtggctaccccctcctctggccggctccttgctgctcctgtcatagtgagcttgtgccgtccccctaggatggggggcatggccctggctgccagatgcccacagcaccctggcatgacctgccacctctgcttccacaccggagccagctacctctcctgtgcctgccactcaataaacagtgtctgcgccccaca

SEQ ID NO: 135884 - DNA, 1495 bp, Homo sapiens
  Payload ID: 6562
  Gene Symbol: GPR137
  Gene Name: G protein-coupled receptor 137
  Uniprot ID: Q96N19
  ENST ID: ENST00000411458
  CDS Start-End: 29-1456
actcggctcaaactctgggatctggaacatgctctgggctgtgaggacaagatgttacgtagtcaaggcacagctggggccaacggtggccctggaaggcagagcaccccgggctccgggccctagttgcttgggcaacgggaactgtcagcgacctggcccaatcacctctcggaacgtcactcgggcctccctccctgacatggagagtaacctgtctggcctggtgcctgctgccgggctggtgcctgcgctgccacctgctgtgaccctggggctgacagctgcctacaccaccctgtatgccctgctcttcttctccgtctatgcccagctctggctggtgcttctgtatgggcacaagcgtctcagctatcagacggtgttcctggccctctgtctgctctgggccgccttgcgtaccaccctcttctccttctacttccgagatactccccgcgccaaccgcctggggcccttgcccttctggcttctctactgctgccccgtctgcctgcagttcttcaccttgacgcttatgaacctctactttgcccaggtggtgttcaaggccaaggtgaagcgtcggccggagatgagccgaggcttgctcgctgtccgaggggcctttgtgggggcctcgctgctctttctgctggtgaacgtgctgtgtgctgtgctctcccatcggcgccgggcacagccctgggccctgctgcttgtccgcgtcctggtgagcgactccctgttcgtcatctgcgcgctgtctcttgctgcctgcctctgcctcgtcgccaggcgggcgccctccactagcatctacctggaggccaaggggaccagtgtgtgccaggcggccgcgatgggtggcgccatggtcctgctctatgccagccgggcctgctacaacctgacagcactggccttggccccccagagccggctggacaccttcgattacgactggtacaatgtgtctgaccaggcggacctggtgaatgacctggggaacaaaggctacctggtatttggcctcatcctcttcgtgtgggagctactgcccaccaccctgctggtgggcttcttccgggtgcaccggcccccacaggacctgagcaccagccacatcctcaatgggcaggtctttgcctctcggtcctacttctttgaccgggctgggcactgtgaagatgagggctgctcctgggagcacagccggggtgagagcaccaggtgccaggaccaggcggccaccaccacagtctctactccaccccacagacgtgatccccctccctcccccacagaatacccaggccccagtccccctcaccctaggcccctgtgccaagtttgtctgccgcttcttgcccaggatcctgggggtcgtggctaccccctcctctggccggctccttgctgctcctgtcatagtgagcttgtgccgtccccctaggatggggggcatggccctggctgccagatgcccacagca

SEQ ID NO: 135885 - DNA, 1596 bp, Homo sapiens
  Payload ID: 6562
  Gene Symbol: GPR137
  Gene Name: G protein-coupled receptor 137
  Uniprot ID: Q96N19
  ENST ID: ENST00000438980
  CDS Start-End: 108-1298
atctccctctctgcaccctgcaattcccacccctccgtatttatttccctggtcccgccgacagtccctccttgtctgtctccgggattcaggcctccctccctgacatggagagtaacctgtctggcctggtgcctgctgccgggctggtgcctgcgctgccacctgctgtgaccctggggctgacagctgcctacaccaccctgtatgccctgctcttcttctccgtctatgcccagctctggctggtgcttctgtatgggcacaagcgtctcagctatcagacggtgttcctggccctctgtctgctctgggccgccttgcgtaccaccctcttctccttctacttccgagatactccccgcgccaaccgcctggggcccttgcccttctggcttctctactgctgccccgtctgcctgcagttcttcaccttgacgcttatgaacctctactttgcccaggtggtgttcaaggccaaggtgaagcgtcggccggagatgagccgaggcttgctcgctgtccgaggggcctttgtgggggcctcgctgctctttctgctggtgaacgtgctgtgtgctgtgctctcccatcggcgccgggcacagccctgggccctgctgcttgtccgcgtcctggtgagcgactccctgttcgtcatctgcgcgctgtctcttgctgcctgcctctgcctcgtcgccaggcgggcgccctccactagcatctacctggaggccaaggggaccagtgtgtgccaggcggccgcgatgggtggcgccatggtcctgctctatgccagccgggcctgctacaacctgacagcactggccttggccccccagagccggctggacaccttcgattacgactggtacaatgtgtctgaccaggcggacctggtgaatgacctggggaacaaaggctacctggtatttggcctcatcctcttcgtgtgggagctactgcccaccaccctgctggtgggcttcttccgggtgcaccggcccccacaggacctgagcaccagccacatcctcaatgggcaggtctttgcctctcggtcctacttctttgaccgggctgggcactgtgaagatgagggctgctcctgggagcacagccggggtgagagcaccagtatgtcgggcagtctaggctctgggagctggtatggtgccatcgggcgtgagccgggctggtatgggggcagccagacgaagaccactcctctgctcttctcccaggtgccaggaccaggcggccaccaccacagtctctactccaccccacagacgtgatccccctccctcccccacagaatacccaggccccagtccccctcaccctaggcccctgtgccaagtttgtctgccgcttcttgcccaggatcctgggggtcgtggctaccccctcctctggccggctccttgctgctcctgtcatagtgagcttgtgccgtccccctaggatggggggcatggccctggctgccagatgcccacagcaccctggcatgacctgccacctctgcttccacaccggagccagctacctctcctgtgcctgccactcaataaacagtgtctgcgccccaca

SEQ ID NO: 135886 - DNA, 790 bp, Homo sapiens
  Payload ID: 6562
  Gene Symbol: GPR137
  Gene Name: G protein-coupled receptor 137
  ENST ID: ENST00000546201
  CDS Start-End: 143-562
ggagataaggaaaggaacctcctccctggctgggatggctgcccgggcgcgggaggagggccggggacccggtgagggaggaccgtagggcccgtgggggcttcacgcctggcaggcggccggccaggcctccctccctgacatggagagtaacctgtctggcctggtgcctgctgccgggctggtgcctgcgctgccacctgctgtgaccctggggctgacagctgcctacaccaccctgtatgccctgctcttcttctccgtctatgcccagctctggctggtgcttctgtatgggcacaagcgtctcagctatcagacggtgttcctggccctctgtctgctctgggccgccttgcgtaccaccctcttctccttctacttccgagatactccccgcgccaaccgcctggggcccttgcccttctggcttctctactgctgccccgtctgcctgcagttcttcaccttgacgcttatgaacctctactttgcccaggtggtgttcaaggccaaggtgaagcgtcggccggagatgagccgaggcttgcggacctggtgaatgacctggggaacaaaggctacctggtatttggcctcatcctcttcgtgtgggagctactgcccaccaccctgctggtgggcttcttccgggtgcaccggcccccacaggacctgagcaccagccacatcctcaatgggcaggtctttgcctctcggtcctacttctttgaccgggctgggcactgtgaagatgagggctgctcctgggagcacagccggggtgaga

SEQ ID NO: 135887 - DNA, 998 bp, Homo sapiens
  Payload ID: 6562
  Gene Symbol: GPR137
  Gene Name: G protein-coupled receptor 137
  ENST ID: ENST00000539833
  CDS Start-End: 340-998
gattactgcgggcgaaggcgcttggcacagccacaactgaagctcagccgtcggatgtgattattgttgctattgttaccgctccgcctggactgggtgcccggtcggaaagtcccgctccccgctcctcctcccaggcgcggaagcttcgcgccgcccgcctcgggggacacctcccgcgccatctcgggggcactggagataaggaaaggaacctcctccctggctgggatggctgcccgggcgcgggaggagggccggggacccggtgagggaggaccgtagggcccgtgggggcttcacgcctggcaggcggccggccaggcctccctccctgacatggagagtaacctgtctggcctggtgcctgctgccgggctggtgcctgcgctgccacctgctgtgaccctggggctgacagctgcctacaccaccctgtatgccctgctcttcttctccgtctatgcccagctctggctggtgcttctgtatgggcacaagcgtctcagctatcagacggtgttcctggccctctgtctgctctgggccgccttgcgtaccaccctcttctccttctacttccgagatactccccgcgccaaccgcctggggcccttgcccttctggcttctctactgctgccccgtctgcctgcagttcttcaccttgacgcttatgaacctctactttgcccaggtggtgttcaaggccaaggtgaagcgtcggccggagatgagccgaggcttgctcgctgtccgaggggcctttgtgggggcctcgctgctctttctgctggtgaacgtgctgtgtgctgtgctctcccatcggcgccgggcacagccctgggccctgctgcttgtccgcgtcctggtgagcgactccctgttcgtcatctgcgcgctgtctcttgctgcctgcctctgcctcgtcgccaggcgggcgccctccactagcatctacctggaggccaaggggaccagtgtgtgccaggcggccgc

SEQ ID NO: 135888 - DNA, 800 bp, Homo sapiens
  Payload ID: 6562
  Gene Symbol: GPR137
  Gene Name: G protein-coupled receptor 137
  ENST ID: ENST00000536667
  CDS Start-End: 706-800
ctcacaccttgggcgtgtgtgggagcaggagagggattctctggggtccccatttggaacctggagacccacttctgccaacaagtccttcagcccctctgggccttagtttccccccagtgaagtggggatagtgacagctcccccgggagccagtgaaaactttgtgaagggagtgattactgcgggcgaaggcgcttggcacagccacaactgaagctcagccgtcggatgtgattattgttgctattgttaccgctccgcctggactgggtgcccggtcggaaagtcccgctccccgctcctcctcccaggcgcggaagcttcgcgccgcccgcctcgggggacacctcccgcgccatctcgggggcactggagataaggaaaggaacctcctccctggctgggatggctgcccgggcgcgggaggagggccggggacccggtgagggaggaccgtagggcccgtgggggcttcacgcctggcaggcggccggccagctctggctggtgcttctgtatgggcacaagcgtctcagctatcagacggtgttcctggccctctgtctgctctgggccgccttgcgtaccaccctcttctccttctacttccgagatactccccgcgccaaccgcctggggcccttgcccttctggcttctctactgctgccccgtctgcctgcagttcttcaccttgacgcttatgaacctctactttgcccaggtggtgttcaaggccaaggtgaagcgtcggccggagatgagccgaggcttgctcgctgtccgaggggcctttgt

SEQ ID NO: 135889 - DNA, 805 bp, Homo sapiens
  Payload ID: 6562
  Gene Symbol: GPR137
  Gene Name: G protein-coupled receptor 137
  ENST ID: ENST00000543383
  CDS Start-End: 86-805
agttttcttcagagaccgagggacgggaatccgttgccgcccccggccgggcggcacgaccccgatttgggcctccctccctgacatggagagtaacctgtctggcctggtgcctgctgccgggctggtgcctgcgctgccacctgctgtgaccctggggctgacagctgcctacaccaccctgtatgccctgctcttcttctccgtctatgcccagctctggctggtgcttctgtatgggcacaagcgtctcagctatcagacggtgttcctggccctctgtctgctctgggccgccttgcgtaccaccctcttctccttctacttccgagatactccccgcgccaaccgcctggggcccttgcccttctggcttctctactgctgccccgtctgcctgcagttcttcaccttgacgcttatgaacctctactttgcccaggtggtgttcaaggccaaggtgaagcgtcggccggagatgagccgaggcttgctcgctgtccgaggggcctttgtgggggcctcgctgctctttctgctggtgaacgtgctgtgtgctgtgctctcccatcggcgccgggcacagccctgggccctgctgcttgtccgcgtcctggtgagcgactccctgttcgtcatctgcgcgctgtctcttgctgcctgcctctgcctcgtcgccaggcgggcgccctccactagcatctacctggaggccaaggggaccagtgtgtgccaggcggccgcgatgggtggcgccatggtcctgctctatgccagccgggcctgctacaacctgacagcactg

SEQ ID NO: 135890 - DNA, 431 bp, Homo sapiens
  Payload ID: 6562
  Gene Symbol: GPR137
  Gene Name: G protein-coupled receptor 137
  ENST ID: ENST00000542190
  CDS Start-End: 14-431
ctccctccctgacatggagagtaacctgtctggcctggtgcctgctgccgggctggtgcctgcgctgccacctgctgtgaccctggggctgacagctgcctacaccaccctgtatgccctgctcttcttctccgtctatgcccagctctggctggtgcttctgtatgggcacaagcgtctcagctatcagacggtgttcctggccctctgtctgctctgggccgccttgcgtaccaccctcttctccttctacttccgagatactccccgcgccaaccgcctggggcccttgcccttctggcttctctactgctgccccgtctgcctgcagttcttcaccttgacgcttatgaacctctactttgcccaggtggtgttcaaggccaaggtgaagcgtcggccggagatgagccgaggcttcggttctcagg

SEQ ID NO: 135891 - DNA, 350 bp, Homo sapiens
  Payload ID: 6562
  Gene Symbol: GPR137
  Gene Name: G protein-coupled receptor 137
  ENST ID: ENST00000538244
  CDS Start-End: 162-350
tctcctccactagctctgagtggggccacaggaccactacgcttgccggacacaaggccccacaggtggaagagggagtcttgctttgtcacccaggctggagtacagtgatgtgatcttggctcactgcaacctctgctcaccaggcctccctccctgacatggagagtaacctgtctggcctggtgcctgctgccgggctggtgcctgcgctgccacctgctgtgaccctggggctgacagctgcctacaccaccctgtatgccctgctcttcttctccgtctatgcccagctctggctggtgcttctgtatgggcacaagcgtctcagctatcagacggtgttcctg

SEQ ID NO: 135892 - DNA, 1843 bp, Homo sapiens
  Payload ID: 6562
  Gene Symbol: GPR137
  Gene Name: G protein-coupled receptor 137
  Uniprot ID: Q96N19
  ENST ID: ENST00000539851
  CDS Start-End: 468-1430
ggatccaaggctcctcgtccgcatcctttttcctccctccttcggccccggggctcacatcctcgctgcctcacaccttgggcgtgtgtgggagcaggagagggattctctggggtccccatttggaacctggagacccacttctgccaacaagtccttcagcccctctgggccttagtttccccccagtgaagtggggatagtgacagctcccccgggagccagtgaaaactttgtgaagggagtgattactgcgggcgaaggcgcttggcacagccacaactgaagctcagccgtcggatgtgattattgttgctattgttaccgctccgcctggactgggtgcccggtcggaaagtcccgctccccgctcctcctcccaggcgcggaagcttcgcgccgcccgcctcgggggacacctcccgcgccatctcgggggcactggagataaggcctccctccctgacatggagagtaacctgtctggcctggtgcctgctgccgggctggtgcctgcgctgccacctgctgtgaccctggggctgacagctgcctacaccaccctgtatgccctgctcttcttctccgtctatgcccagctctggctggtgcttctgtatgggcacaagcgtctcagctatcagacggtgttcctggccctctgtctgctctgggccgccttgcgtaccaccctcttctccttctacttccgagatactccccgcgccaaccgcctggggcccttgcccttctggcttctctactgctgccccgtctgcctgcagttcttcaccttgacgcttatgaacctctactttgcccaggtggtgttcaaggccaaggtgaagcgtcggccggagatgagccgaggcttgctcgctgtccgaggggcctttgtgggggcctcgctgctctttctgctggtgaacgtgctgtgtgctgtgctctcccatcggcgccgggcacagccctgggccctgctgcttgtccgcgtcctggtgagcgactccctgttcgtcatctgcgcgctgtctcttgctgcctgcctctgcctcgtcgccaggcgggcgccctccactagcatctacctggaggccaaggggaccagtgtgtgccaggcggccgcgatgggtggcgccatggtcctgctctatgccagccgggcctgctacaacctgacagcactggccttggccccccagagccggctggacaccttcgattacgactggtacaatgtgtctgaccaggcggacctggtgaatgacctggggaacaaaggctacctggtatttggcctcatcctcttcgtgtgggagctactgcccaccaccctgctggtgggcttcttccgggtgcaccggcccccacaggacctgtatgtcgggcagtctaggctctgggagctggtatggtgccatcgggcgtgagccgggctggtatgggggcagccagacgaagaccactcctctgctcttctcccaggtgccaggaccaggcggccaccaccacagtctctactccaccccacagacgtgatccccctccctcccccacagaatacccaggccccagtccccctcaccctaggcccctgtgccaagtttgtctgccgcttcttgcccaggatcctgggggtcgtggctaccccctcctctggccggctccttgctgctcctgtcatagtgagcttgtgccgtccccctaggatggggggcatggccctggctgccagatgcccacagcaccctggcatgacctgccacctctgcttccacaccggagccagctacctctcctgtgcctgccactcaataaacagtgtctgcgccccacagttgtg

SEQ ID NO: 135893 - DNA, 473 bp, Homo sapiens
  Payload ID: 6562
  Gene Symbol: GPR137
  Gene Name: G protein-coupled receptor 137
  ENST ID: ENST00000541952
  CDS Start-End: 5-473
tgacatggagagtaacctgtctggcctggtgcctgctgccgggctggtgcctgcgctgccacctgctgtgaccctggggctgacagctgcctacaccaccctgtatgccctgctcttcttctccgtctatgcccagctctggctggtgcttctgtatgggcacaagcgtctcagctatcagacggtgttcctggccctctgtctgctctgggccgccttgcgtaccaccctcttctccttctacttccgagatactccccgcgccaaccgcctggggcccttgcccttctggcttctctactgctgccccgtctgcctgcagttcttcaccttgacgcttatgaacctctactttgcccaggtggtgttcaaggccaaggtgaagcgtcggccggagatgagccgaggcttgcgggcgccctccactagcatctacctggaggccaaggggaccagtgtgtgccaggcggccg

SEQ ID NO: 135894 - DNA, 362 bp, Homo sapiens
  Payload ID: 6562
  Gene Symbol: GPR137
  Gene Name: G protein-coupled receptor 137
  ENST ID: ENST00000536282
  CDS Start-End: 1-266
gaacaaaggctacctggtatttggcctcatcctcttcgtgtgggagctactgcccaccaccctgctggtgggcttcttccgggtgcaccggcccccacaggacctgtatgtcgggcagtctaggctctgggagctggtatggtgccatcgggcgtgagccgggctggtatgggggcagccagacgaagaccactcctctgctcttctcccaggtgccaggaccaggcggccaccaccacagtctctactccaccccacagacgtgatccccctccctcccccacagaatacccaggccccagtccccctcaccctaggcccctgtgccaagtttgtctgccgcttcttgcccaggatcctgg

SEQ ID NO: 135895 - DNA, 560 bp, Homo sapiens
  Payload ID: 6562
  Gene Symbol: GPR137
  Gene Name: G protein-coupled receptor 137
  ENST ID: ENST00000538032
  CDS Start-End: 60-560
gtaaccccgggcgcccgccagcggcgcagctcgcgccaattctcgcctccctccctgacatggagagtaacctgtctggcctggtgcctgctgccgggctggtgcctgcgctgccacctgctgtgaccctggggctgacagctgcctacaccaccctgtatgccctgctcttcttctccgtctatgcccagctctggctggtgcttctgtatgggcacaagcgtctcagctatcagacggtgttcctggccctctgtctgctctgggccgccttgcgtaccaccctcttctccttctacttccgagatactccccgcgccaaccgcctggggcccttgcccttctggcttctctactgctgccccgtctgcctgcagttcttcaccttgacgcttatgaacctctactttgcccaggtggtgttcaaggccaaggtgaagcgtcggccggagatgagccgaggcttgctcgctgtccgaggggcctttgtgggggcctcgctgctctttctgctggtgaacgtgctgtgtgctgtgctctcccatcggcgccgggcacag

SEQ ID NO: 135896 - DNA, 1274 bp, Homo sapiens
  Payload ID: 6562
  Gene Symbol: GPR137
  Gene Name: G protein-coupled receptor 137
  ENST ID: ENST00000546139
  CDS Start-End: 598-1274
ggaagggaatctgggtcagccctccctccaaaggagacagcacggatcctctttttgcataggcctgagggaagtacttccgcccatattcaagatggctgcccagggcagtgggaacgggtggagtttcgggatgtggagcgaaggtcactgggagggggcggagcttcccctgcccaagttccgatcccaccaggactggaagactcgcgtccagctggagctttgccgcatctgcgttgctgtgcccgcgctcttcgggcgaggaagtcccttctggtggagggagaaaagggttacatgagttagattaccatggcagctcgagccaggctctccacttccgtgagccttcctctaagtgagatcgggggggagataatgaaggccacaactcccaggaggctccacgccgggcggtcagggacgctcgcgaggacgcatgggcccccaggaatgggaactggttagatcccaggaactccgtgccggagacgggaagagaggatgcctagggccctaaatggaaaggccagagctggagacctagcacccagaagatgagaccgcaattcgagaatcaaagggccgggagcgatggcctccctccctgacatggagagtaacctgtctggcctggtgcctgctgccgggctggtgcctgcgctgccacctgctgtgaccctggggctgacagctgcctacaccaccctgtatgccctgctcttcttctccgtctatgcccagctctggctggtgcttctgtatgggcacaagcgtctcagctatcagacggtgttcctggccctctgtctgctctgggccgccttgcgtaccaccctcttctccttctacttccgagatactccccgcgccaaccgcctggggcccttgcccttctggcttctctactgctgccccgtctgcctgcagttcttcaccttgacgcttatgaacctctactttgcccaggtggtgttcaaggccaaggtgaagcgtcggccggagatgagccgaggcttgctcgctgtccgaggggcctttgtgggggcctcgctgctctttctgctggtgaacgtgctgtgtgctgtgctctcccatcggcgccgggcacagccctgggccctgctgcttgtccgcgtcctggtgagcgactccctgttcgtcatctgcgcgctgtctcttgctgcctgcctctgcctcgtcgccaggcgggcgccctccactagcatctacctggaggccaaggggaccagtgtgtgccaggcggccgc

SEQ ID NO: 135897 - DNA, 542 bp, Homo sapiens
  Payload ID: 6562
  Gene Symbol: GPR137
  Gene Name: G protein-coupled receptor 137
  ENST ID: ENST00000535675
  CDS Start-End: 147-542
atcttggctatgggcggaagttttcttcagagaccgagggacgggaatccgttgccgcccccggccgggcggcacgaccccgatttgggtataggagagaggagcgtgggaactggcggacccccatacaagcctccctccctgacatggagagtaacctgtctggcctggtgcctgctgccgggctggtgcctgcgctgccacctgctgtgaccctggggctgacagctgcctacaccaccctgtatgccctgctcttcttctccgtctatgcccagctctggctggtgcttctgtatgggcacaagcgtctcagctatcagacggtgttcctggccctctgtctgctctgggccgccttgcgtaccaccctcttctccttctacttccgagatactccccgcgccaaccgcctggggcccttgcccttctggcttctctactgctgccccgtctgcctgcagttcttcaccttgacgcttatgaacctctactttgcccaggtggtgttcaaggccaaggtgaagcgtcggccggagatg

SEQ ID NO: 135898 - DNA, 527 bp, Homo sapiens
  Payload ID: 6562
  Gene Symbol: GPR137
  Gene Name: G protein-coupled receptor 137
  ENST ID: ENST00000540370
  CDS Start-End: 292-527
agccggggagccggagccccgggtccccacgacctgagccggctctcccatcagcggcctgaggacctggcgtccgcctcctccctccccttgaggctggagcgtggacgcggtgggggagggtggggcgggggcagctttcgagaattacgaggacaggaggcagaggccctccccatccgcattattggaggagagagagcctcccccagcttggggagggggagagcggggcattgggcgcccctcgcagcggccgctgccctgacccgacgggcctccctccctgacatggagagtaacctgtctggcctggtgcctgctgccgggctggtgcctgcgctgccacctgctgtgaccctggggctgacagctgcctacaccaccctgtatgccctgctcttcttctccgtctatgcccagctctggctggtgcttctgtatgggcacaagcgtctcagctatcagacggtgttcctggccctctgtctgctctgggccgccttgcgtaccaccctcttctcctt

SEQ ID NO: 135899 - DNA, 1114 bp, Homo sapiens
  Payload ID: 6562
  Gene Symbol: GPR137
  Gene Name: G protein-coupled receptor 137
  ENST ID: ENST00000621779
  CDS Start-End: 416-1051
agcggccgctgccctgacccgacgggtatcagccggctctccccctccacccaggacgacatgaacgaccgaggccagggagtcctctccttgggcctctgcatccccccatccttggctctggggtaggcccagggaggagacacccccaacccctatccggtctgtcctggagaaaagagactgcccttccatgcccctgagtgaggggcctggggcccaggctgcctgtgttccccaagggcaagggtctctctgttgaggaggaggggcctgtcagccacaacttctttcctcctgagcgccccatctccctctctgcaccctgcaattcccacccctccgtatttatttccctggtcccgccgacagtccctccttgtctgtctccgggattcaggcctccctccctgacatggagagtaacctgtctggcctggtgcctgctgccgggctggtgcctgcgctgccacctgctgtgaccctggggctgacagctgcctacaccaccctgtatgccctgctcttcttctccgtctatgcccagctctggctggtgcttctgtatgggcacaagcgtctcagctatcagacggtgttcctggccctctgtctgctctgggccgccttgcgtaccaccctcttctccttctacttccgagatactccccgcgccaaccgcctggggcccttgcccttctggcttctctactgctgccccgtctgcctgcagttcttcaccttgacgcttatgaacctctactttgcccaggtggtgttcaaggccaaggtgaagcgtcggccggagatgagccgaggcttgctcgctgtccgaggggcctttgtgggggcctcgctgctctttctgctggtgaacgtgctgtgtgctgtgctctcccatcggcgccgggcacagccctgggccctgctgcttgtccgcgtcctggtgagcgactccctgttcgtcatctgcgcgctgtctcttgctgcctgcctctgcctcgtcgccggcgggcgccctccactagcatctacctggaggccaaggtagggctgcagcactgatgcccaggtgtcttttgggtctctcggcagcggttctcagggtgtagag

SEQ ID NO: 135900 - DNA, 2042 bp, Homo sapiens
  Payload ID: 6563
  Gene Symbol: GPR137B
  Gene Name: G protein-coupled receptor 137B
  Uniprot ID: O60478
  ENST ID: ENST00000366592
  CDS Start-End: 92-1291
gcggcttgttttctttcctccagtctcggggctgcaggctgagcgcgatgcgcggagacccccgcgggggcggcggcggccgtgagccccgatgaggcccgagcgtccccggccgcgcggcagcgcccccggcccgatggagaccccgccgtgggacccagcccgcaacgactcgctgccgcccacgctgaccccggccgtgcccccctacgtgaagcttggcctcaccgtcgtctacaccgtgttctacgcgctgctcttcgtgttcatctacgtgcagctctggctggtgctgcgttaccgccacaagcggctcagctaccagagcgtcttcctctttctctgcctcttctgggcctccctgcggaccgtcctcttctccttctacttcaaagacttcgtggcggccaattcgctcagccccttcgtcttctggctgctctactgcttccctgtgtgcctgcagtttttcaccctcacgctgatgaacttgtacttcacgcaggtgattttcaaagccaagtcaaaatattctccagaattactcaaataccggttgcccctctacctggcctccctcttcatcagccttgttttcctgttggtgaatttaacctgtgctgtgctggtaaagacgggaaattgggagaggaaggttatcgtctctgtgcgagtggccattaatgacacgctcttcgtgctgtgtgccgtctctctctccatctgtctctacaaaatctctaagatgtccttagccaacatttacttggagtccaagggctcctccgtgtgtcaagtgactgccatcggtgtcaccgtgatactgctttacacctctcgggcctgctacaacctgttcatcctgtcattttctcagaacaagagcgtccattcctttgattatgactggtacaatgtatcagaccaggcagatttgaagaatcagctgggagatgctggatacgtattatttggagtggtgttatttgtttgggaactcttacctaccaccttagtcgtttatttcttccgagttagaaatcctacaaaggaccttaccaaccctggaatggtccccagccatggattcagtcccagatcttatttctttgacaaccctcgaagatatgacagtgatgatgaccttgcctggaacattgcccctcagggacttcagggaggttttgctccagattactatgattggggacaacaaactaacagcttcctggcacaagcaggaactttgcaagactcaactttggatcctgacaaaccaagccttgggtagcatcagttaacagttttatggacgattcctcagatgaaaagcttcagaaaagcatagtgacagctgaatttttagggcacttttccttaagaaatagaacttgatttttatttgttacaggtttccaatggccccataggaataagcaataatgtagactgataaacccttattttagtactaaagagggagccttgctatttcagtgggtataatttaaactttttaaagaaaatctgtacttttataaagatgtattttgtataacttaaataataatgctaaagtatactagggtttttttttcttgagaatgttactgcaatcatgttgtagtttgcacagacttttatgcataattcactttaaaaatatagaatatatggtctaatagttttttaaagcttttggactaaagtattccacaaatcttacctctttaggtcactgatggtcactccgattctgagtgccacattggtagactcctaaaatacagttgacaacttagccaattgcaactccagtgttgataattaaaatgaaatggtaaagcagcagactgtaaggtctttagagattttttttttaaggttcaggccgtaggttcctcaaggaatctcttaagttttgcccaaagactggtacttcctttcagtagggcgctaatgtatacacattaatgataagttgataacattaaaaatgtagctgacttatcctattaaacctcctctgctatgttcacaga

SEQ ID NO: 135901 - DNA, 1104 bp, Homo sapiens
  Payload ID: 6563
  Gene Symbol: GPR137B
  Gene Name: G protein-coupled receptor 137B
  ENST ID: ENST00000454895
  CDS Start-End: 1-692
tgcaggtgattttcaaagccaagtcaaaatattctccagaattactcaaataccggttgcccctctacctggcctccctcttcatcagccttgttttcctgttggtgaatttaacctgtgctgtgctggtaaagacgggaaattgggagaggaaggttatcgtctctgtgcgagtggccattaatgacacgctcttcgtgctgtgtgccgtctctctctccatctgtctctacaaaatctctaagatgtccttagccaacatttacttggagtccaagggctcctccgtgtgtcaagtgactgccatcggtgtcaccgtgatactgctttacacctctcgggcctgctacaacctgttcatcctgtcattttctcagaacaagagcgtccattcctttgattatgactggtacaatgtatcagaccaggcagatttgaagaatcagctgggagatgctggatacgtattatttggagtggtgttatttgtttgggaactcttacctaccaccttagtcgtttatttcttccgagttagaaatcctacaaaggaccttaccaaccctggaatggtccccagccatggattcagtcccagatcttatttctttgacaaccctcgaagatatgacagtgatgatgaccttgcctggaacattgcccctcagggacttcagggaggattactatgattggggacaacaaactaacagcttcctggcacaagcaggaactttgcaagactcaactttggatcctgacaaaccaagccttgggtagcatcagttaacagttttatggacgattcctcagatgaaaagcttcagaaaagcatagtgacagctgaatttttagggcacttttccttaagaaatagaacttgatttttatttgttacaggtttccaatggccccataggaataagcaataatgtagactgataaacccttattttagtactaaagagggagccttgctatttcagtgggtataatttaaactttttaaagaaaatctgtacttttataaagatgtattttgtataacttaaataataatgctaaagtatactagggtttttttttcttgagaatgttactgca

SEQ ID NO: 135902 - DNA, 1107 bp, Homo sapiens
  Payload ID: 6563
  Gene Symbol: GPR137B
  Gene Name: G protein-coupled receptor 137B
  ENST ID: ENST00000419162
  CDS Start-End: 119-661
gaatcatgtggtgccgggggaggaagtgcggcttgttttctttcctccagtctcggggctgcaggctgagcgcgatgcgcggagacccccgcgggggcggcggcggccgtgagccccgatgaggcccgagcgtccccggccgcgcggcagcgcccccggcccgatggagaccccgccgtgggacccagcccgcaacgactcgctgccgcccacgctgaccccggccgtgcccccctacgtgaagcttggcctcaccgtcgtctacaccgtgttctacgcgctgctcttcgtgttcatctacgtgcagctctggctggtgctgcgttaccgccacaagcggctcagctaccagagcgtcttcctctttctctgcctcttctgggcctccctgcggaccgtcctcttctccttctacttcaaagacttcgtggcggccaattcgctcagccccttcgtcttctggctgctctactgcttccctgtgtgcctgcagtttttcaccctcacgctgatgaacttgtacttcacgcaggttgcccctctacctggcctccctcttcatcagccttgttttcctgttggtgaatttaacctgtgctgtgctggtaaagacgggaaattgggagaggaaggttatcgtctctgtgcgagtggccattaatgacacgctcttcgtgctgtgtgccgtctctctctccatctgtctctacaaaatctctaagatgtccttagccaacatttacttggagtccaagggctcctccgtgtgtcaagtgactgccatcggtgtcaccgtgatactgctttacacctctcgggcctgctacaacctgttcatcctgtcattttctcagaacaagagcgtccattcctttgattatgactggtacaatgtatcagaccaggcagatttgaagaatcagctgggagatgctggatacgtattatttggagtggtgttatttgtttgggaactcttacctaccaccttagtcgtttatttcttccgagttagaaatcctacaaaggaccttaccaaccctggaatggtccccagccatggattcagtcccagatcttatttctttgacaaccctcgaagatatg

SEQ ID NO: 135903 - DNA, 3888 bp, Homo sapiens
  Payload ID: 6564
  Gene Symbol: GPR137C
  Gene Name: G protein-coupled receptor 137C
  Uniprot ID: Q8N3F9
  ENST ID: ENST00000321662
  CDS Start-End: 1-1290
atgagggtgtccgtgccgggtccggcggccgctgccgcccccgcagccggccgcgagccctccacgcccggcgggggcagcggaggcggaggcgccgtcgctgcagcctcaggcgccgcggtgccgggctccgtgcagttggcgctgagcgtcctgcacgccctgctctacgccgcgctgttcgcctttgcctacctgcagctgtggcggctgctcctgtaccgcgagcggcggctgagttaccagagcctctgcctcttcctctgtctcctgtgggcagcgctcaggaccaccctcttctccgccgccttctcgctcagcggctccctgcccttgctccggccgcccgctcacctgcacttcttcccccactggctgctctactgcttcccctcctgtctccagttctccacgctctgtctcctcaacctctacctggcggaggttatatgtaaagtcagatgtgccactgaacttgacagacacaaaattctactgcatttgggctttataatggcaagcctgctctttttagtggtgaacttgacttgcgcaatgctagttcatggagatgtcccagaaaatcagttgaagtggactgtgtttgttcgagcattaattaatgatagcctgtttattctttgtgccatctctttagtgtgttacatatgcaaaattacaaaaatgtcatcagctaatgtctacctcgaatcaaagggtatgtctctgtgccagactgtcgtcgtgggctctgtagtcattcttctgtactcttccagagcttgttataatttggtggtggtcaccatatctcaggatacattagaaagtccatttaattatggctgggataatctttcagataaggctcatgtagaagacataagtggagaagagtatatagtatttggaatggtcctctttctgtgggaacatgtgccagcatggtcggtggtactgtttttccgggcacagagattaaaccagaatttggcacctgctggcatgataaatagtcacagttatagttccagagcttactttttcgacaatccaagacgatatgatagtgatgatgacctgccaagactgggaagttcaagagaaggaagtttaccaaattcgcaaagtttgggctggtatggcaccatgactgggtgtggcagcagcagttacacagtcactccccacctgaatggacctatgacagatactgctcctttgctctttacttgtagtaatttagatttgaacaatcatcatagcttatatgtgacaccacaaaactgacagcatcaccaagtcatgattcttgagttgtttttcataaatgtgtatattcaatgtgtttaaattccatctacataaacattccattatctgttgcaactgaaaacaaaatctggaagtgtggctgtgtttggtaaataacacagctattatttttgacctcttcatagtaaaatgaagtaaaatggaaagtttggagtaggagaaaagagagattagatcttaaggcacttgatggcctccaaaaatcctgactttggaacatcaaatgcatatgtgcacttttatctttgttctgagtcactgcagtccccaaagtcatatgccaatgttcacactgaaatactgtattgtacaccaaactggaaggcaattttcctatgaaaatcaaagccggtatattcattggtatgctctatacagatatcttaataaaaattttatagtgtgaacagtgcacagagttaaggcataaaaatgtatcattctttataaaaatctactgaaaatgtgtaatcattgaagacagttcttttaagcatgattttaaaatagcaactgaaattcaatcattttaaacaaatgatggtagtaatccattagttatggccagcagtgttctttggagagccacaataatttcaagaggaaaatataccagtgaaaattgtgtggctattttgagtagaattggtcagttgattattttgtgtaattgagatatatgtagtagtttaagcatgattcttgaagaaagcaatagtgacttttgcatagggagattttggtagaaacttcttgggactaaacaagtttagagatgcatttaagaattattcacaaaatgtgtaattctaaattaaaacataaatatattttcaaaagcatttgatttctctgaagcatgatatagctggtcttacctagtgaatcaggattgtcctcaggtaaatgaaatcatgatacattattgcagtgaactcaagtgcaatactttgtaagacatataattcctatgattttcacatttttatatcttatatatgggaaaagccaaattaaattgaattcagattaattccagcattagactaaatgagcaaacttaagtaaatgtacaaactaggtaagtataaaaccacaggttaacaatattggagtacttttagaattacattaaaactgtcttaaatgtcctatcccaaatctaaaaaaaaagaaaatggcaggctgagataatacagaattttaaaatgcactttgtaccagtgtctatatggaaagaagtagatgctgaatacctcaagatgccaagggaacaagcaacattgggaagttgtcacaacatgctcaaagacaaactacaattgtctgctagctatttcttcagaactggaactaatacgactatccttttctgttttatactttgattagaatgttatttcctcgcttacttaaaatgtacttcaactttttaacaactgatacaataacttcataaaagtataacactaggttgaaaccttaaggaaaaattgaaattgttaatgctttcgatcttttgggaggccagtacacagacaaataaatttcttctttttatgatacaaaatgactttgtattcaatcagaagcatatacttatgttattttgggtttgtttataattctctcattgtaaccaaattattttaaaatgtatagtataaaaagttacccgtggtattaagtgacaaaagcgtacttttattacaactccagttgttagattgcttctcagaatgctaactgtttattttgctaataatgttaggcatctaatcatctagagctgtccaaaaagatatgttgtctttgttaatccttggggttcaaggtgataaagtttttctagtaaggctcccctcgataatgttcctatttgaccaaactaacaaagattactttttaaaaatttttcagataaaataacttggttctttctgctgcattagttgattgttccaaatttgaggtttgtaagtttattcttatcactgactagggtacccaaattcttgcatttgtctccttatacacatctaacatatcaccaaagacaaataaagatacactctggcccaatctttgcttaaaaattccaaagcactaggagcactttaagtttggtctcgaaaggagttgtttataaaatcaaagggctaccgattccctgttcatcctgcactgaagcacatgatgacagtatcaaaccttcatttttgttcattaaaaagtgaatttcattacttaagtgtgtaattctatagtgattagcagtatttgttttcatcatttcacttgggtggccattaattttgaaacctttaccactcattgtagttggttgtagttttatggaaaatgtaatttatagctaaagtggcttttttatgcatagctgccttttttattgtttaacagtgtttctcagctatataatcagtttcaaactggttgtaaaagtatagctgtggccaatgaatgtatttatttgttgtttcactaaattgtaacaaaacactactattaaaaataaaagtgtttgtgctttta

SEQ ID NO: 135904 - DNA, 2808 bp, Homo sapiens
  Payload ID: 6564
  Gene Symbol: GPR137C
  Gene Name: G protein-coupled receptor 137C
  ENST ID: ENST00000542169
  CDS Start-End: 1-1198
ggcgctgagcgtcctgcacgccctgctctacgccgcgctgttcgcctttgcctacctgcagctgtggcggctgctcctgtaccgcgagcggcggctgagttaccagagcctctgcctcttcctctgtctcctgtgggcagcgctcaggaccaccctcttctccgccgccttctcgctcagcggctccctgcccttgctccggccgcccgctcacctgcacttcttcccccactggctgctctactgcttcccctcctgtctccagttctccacgctctgtctcctcaacctctacctggcggaggttatatgtaaagtcagatgtgccactgaacttgacagacacaaaattctactgcatttgggctttataatggcaagcctgctctttttagtggtgaacttgacttgcgcaatgctagttcatggagatgtcccagaaaatcagttgaagtggactgtgtttgttcgagcattaattaatgatagcctgtttattctttgtgccatctctttagtgtgttacatatgcaaaattacaaaaatgtcatcagctaatgtctacctcgaatcaaagattacaggatctcattctttcttatggctgaatagtactccattgtgtggtatgtctctgtgccagactgtcgtcgtgggctctgtagtcattcttctgtactcttccagagcttgttataatttggtggtggtcaccatatctcaggatacattagaaagtccatttaattatggctgggataatctttcagataaggctcatgtagaagacataagtggagaagagtatatagtatttggaatggtcctctttctgtgggaacatgtgccagcatggtcggtggtactgtttttccgggcacagagattaaaccagaatttggcacctgctggcatgataaatagtcacagttatagttccagagcttactttttcgacaatccaagacgatatgatagtgatgatgacctgccaagactgggaagttcaagagaaggaagtttaccaaattcgcaaagtttgggctggtatggcaccatgactgggtgtggcagcagcagttacacagtcactccccacctgaatggacctatgacagatactgctcctttgctctttacttgtagtaatttagatttgaacaatcatcatagcttatatgtgacaccacaaaactgacagcatcaccaagtcatgattcttgagttgtttttcataaatgtgtatattcaatgtgtttaaattccatctacataaacattccattatctgttgcaactgaaaacaaaatctggaagtgtggctgtgtttggtaaataacacagctattatttttgacctcttcatagtaaaatgaagtaaaatggaaagtttggagtaggagaaaagagagattagatcttaaggcacttgatggcctccaaaaatcctgactttggaacatcaaatgcatatgtgcacttttatctttgttctgagtcactgcagtccccaaagtcatatgccaatgttcacactgaaatactgtattgtacaccaaactggaaggcaattttcctatgaaaatcaaagccggtatattcattggtatgctctatacagatatcttaataaaaattttatagtgtgaacagtgcacagagttaaggcataaaaatgtatcattctttataaaaatctactgaaaatgtgtaatcattgaagacagttcttttaagcatgattttaaaatagcaactgaaattcaatcattttaaacaaatgatggtagtaatccattagttatggccagcagtgttctttggagagccacaataatttcaagaggaaaatataccagtgaaaattgtgtggctattttgagtagaattggtcagttgattattttgtgtaattgagatatatgtagtagtttaagcatgattcttgaagaaagcaatagtgacttttgcatagggagattttggtagaaacttcttgggactaaacaagtttagagatgcatttaagaattattcacaaaatgtgtaattctaaattaaaacataaatatattttcaaaagcatttgatttctctgaagcatgatatagctggtcttacctagtgaatcaggattgtcctcaggtaaatgaaatcatgatacattattgcagtgaactcaagtgcaatactttgtaagacatataattcctatgattttcacatttttatatcttatatatgggaaaagccaaattaaattgaattcagattaattccagcattagactaaatgagcaaacttaagtaaatgtacaaactaggtaagtataaaaccacaggttaacaatattggagtacttttagaattacattaaaactgtcttaaatgtcctatcccaaatctaaaaaaaaagaaaatggcaggctgagataatacagaattttaaaatgcactttgtaccagtgtctatatggaaagaagtagatgctgaatacctcaagatgccaagggaacaagcaacattgggaagttgtcacaacatgctcaaagacaaactacaattgtctgctagctatttcttcagaactggaactaatacgactatccttttctgttttatactttgattagaatgttatttcctcgcttacttaaaatgtacttcaactttttaacaactgatacaataacttcataaaagtataacactaggttgaaaccttaaggaaaaattgaaattgttaatgctttcgatcttttgggaggccagtacacagacaaataaatttcttctttttatgata

SEQ ID NO: 135905 - DNA, 613 bp, Homo sapiens
  Payload ID: 6564
  Gene Symbol: GPR137C
  Gene Name: G protein-coupled receptor 137C
  ENST ID: ENST00000555622
  CDS Start-End: 1-613
tgtgggcagcgctcaggaccaccctcttctccgccgccttctcgctcagcggctccctgcccttgctccggccgcccgctcacctgcacttcttcccccactggctgctctactgcttcccctcctgtctccagttctccacgctctgtctcctcaacctctacctggcggaggtgctgcagactggagctgttcctatttggccatcttggaaggaacccatcttatatctccaaatggttatatgtaaagtcagatgtgccactgaacttgacagacacaaaattctactgcatttgggctttataatggcaagcctgctctttttagtggtgaacttgacttgcgcaatgctagttcatggagatgtcccagaaaatcagttgaagtggactgtgtttgttcgagcattaattaatgatagcctgtttattctttgtgccatctctttagtgtgttacatatgcaaaattacaaaaatgtcatcagctaatgtctacctcgaatcaaagggtatgtctctgtgccagactgtcgtcgtgggctctgtagtcattcttctgtactcttccagagcttgttataatttggtggtggtcaccatatctcagga

SEQ ID NO: 135906 - DNA, 1388 bp, Homo sapiens
  Payload ID: 6565
  Gene Symbol: GPR139
  Gene Name: G protein-coupled receptor 139
  ENST ID: ENST00000326571
  CDS Start-End: 152-304
atcacggccaagggtaggagccagtcctgcggggagagaggcgctgctgctccagctgccgctgcctccgccgccgccaccaccgagccggcgaccagagtcgggctggcaggccgggcgcgaagcggcaaggggagcgaggggcgcgctcatggagcacacgcacgcccacctcgcagccaacagctcgctgtcttggtggtcccccggctcggcctgcggcttgggtttcgtgcccgtggtctactacagcctcttgctgtgcctcggtttaccagatatcatgaagccgatcaagttgtaaggagggcggtctgcttgctcagccccaccagtgaccagaggagggactgagatacacagaagaaagcattcagcaaatatcttgacagtgatcatcctctcccagctggtggcaagaagacagaagtcctcctacaactatctcttggcactcgctgctgccgacatcttggtcctctttttcatagtgtttgtggacttcctgttggaagatttcatcttgaacatgcagatgcctcaggtccccgacaagatcatagaagtgctggaattctcatccatccacacctccatatggattactgtaccgttaaccattgacaggtatatcgctgtctgccacccgctcaagtaccacacggtctcatacccagcccgcacccggaaagtcattgtaagtgtttacatcacctgcttcctgaccagcatcccctattactggtggcccaacatctggactgaagactacatcagcacctctgtgcatcacgtcctcatctggatccactgcttcaccgtctacctggtgccctgctccatcttcttcatcttgaactcaatcattgtgtacaagctcaggaggaagagcaattttcgtctccgtggctactccacggggaagaccaccgccatcttgttcaccattacctccatctttgccacactttgggccccccgcatcatcatgattctttaccacctctatggggcgcccatccagaaccgctggctggtacacatcatgtccgacattgccaacatgctagcccttctgaacacagccatcaacttcttcctctactgcttcatcagcaagcggttccgcaccatggcagccgccacgctcaaggctttcttcaagtgccagaagcaacctgtacagttctacaccaatcataacttttccataacaagtagcccctggatctcgccggcaaactcacactgcatcaagatgctggtgtaccagtatgacaaaaatggaaaacctataaaagtatccccgtgattccataggtgtggcaactactgcctctgtctaatccatttccagatgggaaggtgtcccatcctatggctgagca

SEQ ID NO: 135907 - DNA, 1613 bp, Homo sapiens
  Payload ID: 6565
  Gene Symbol: GPR139
  Gene Name: G protein-coupled receptor 139
  Uniprot ID: Q6DWJ6
  ENST ID: ENST00000570682
  CDS Start-End: 302-1363
gtggagcgggtccgaggtgggaggcgcacagacgggctccgggagcccctcccgaggccccgcgcagcgcgccccgcaccctgcgccccgcgccctgcgggagggctgagccaagactccaggcgggcaggtgcggagcgagcagaggggatcacggccaagggtaggagccagtcctgcggggagagaggcgctgctgctccagctgccgctgcctccgccgccgccaccaccgagccggcgaccagagtcgggctggcaggccgggcgcgaagcggcaaggggagcgaggggcgcgctcatggagcacacgcacgcccacctcgcagccaacagctcgctgtcttggtggtcccccggctcggcctgcggcttgggtttcgtgcccgtggtctactacagcctcttgctgtgcctcggtttaccagcaaatatcttgacagtgatcatcctctcccagctggtggcaagaagacagaagtcctcctacaactatctcttggcactcgctgctgccgacatcttggtcctctttttcatagtgtttgtggacttcctgttggaagatttcatcttgaacatgcagatgcctcaggtccccgacaagatcatagaagtgctggaattctcatccatccacacctccatatggattactgtaccgttaaccattgacaggtatatcgctgtctgccacccgctcaagtaccacacggtctcatacccagcccgcacccggaaagtcattgtaagtgtttacatcacctgcttcctgaccagcatcccctattactggtggcccaacatctggactgaagactacatcagcacctctgtgcatcacgtcctcatctggatccactgcttcaccgtctacctggtgccctgctccatcttcttcatcttgaactcaatcattgtgtacaagctcaggaggaagagcaattttcgtctccgtggctactccacggggaagaccaccgccatcttgttcaccattacctccatctttgccacactttgggccccccgcatcatcatgattctttaccacctctatggggcgcccatccagaaccgctggctggtacacatcatgtccgacattgccaacatgctagcccttctgaacacagccatcaacttcttcctctactgcttcatcagcaagcggttccgcaccatggcagccgccacgctcaaggctttcttcaagtgccagaagcaacctgtacagttctacaccaatcataacttttccataacaagtagcccctggatctcgccggcaaactcacactgcatcaagatgctggtgtaccagtatgacaaaaatggaaaacctataaaagtatccccgtgattccataggtgtggcaactactgcctctgtctaatccatttccagatgggaaggtgtcccatcctatggctgagcagctctccttaagagtgctaatccgatttcctgtctcccgcagactgggcaattctcagactggtagatgagaagagatggaagagaagaaaggagagcatgaagcttgtttttacttatgcatttatttccacagagtcgtaatgacagcaaaagctcctaccagtttgaagat

SEQ ID NO: 135908 - DNA, 918 bp, Homo sapiens
  Payload ID: 6566
  Gene Symbol: GPR141
  Gene Name: G protein-coupled receptor 141
  Uniprot ID: Q7Z602
  ENST ID: ENST00000334425
  CDS Start-End: 1-918
atgcctggccacaatacctccaggaattcctcttgcgatcctatagtgacaccccacttaatcagcctctacttcatagtgcttattggcgggctggtgggtgtcatttccattcttttcctcctggtgaaaatgaacacccggtcagtgaccaccatggcggtcattaacttggtggtggtccacagcgtttttctgctgacagtgccatttcgcttgacctacctcatcaagaagacttggatgtttgggctgcccttctgcaaatttgtgagtgccatgctgcacatccacatgtacctcacgttcctattctatgtggtgatcctggtcaccagatacctcatcttcttcaagtgcaaagacaaagtggaattctacagaaaactgcatgctgtggctgccagtgctggcatgtggacgctggtgattgtcattgtggtacccctggttgtctcccggtatggaatccatgaggaatacaatgaggagcactgttttaaatttcacaaagagcttgcttacacatatgtgaaaatcatcaactatatgatagtcatttttgtcatagccgttgctgtgattctgttggtcttccaggtcttcatcattatgttgatggtgcagaagctacgccactctttactatcccaccaggagttctgggctcagctgaaaaacctattttttataggggtcatccttgtttgtttccttccctaccagttctttaggatctattacttgaatgttgtgacgcattccaatgcctgtaacagcaaggttgcattttataacgaaatcttcttgagtgtaacagcaattagctgctatgatttgcttctctttgtctttgggggaagccattggtttaagcaaaagataattggcttatggaattgtgttttgtgccgttag

SEQ ID NO: 135909 - DNA, 1270 bp, Homo sapiens
  Payload ID: 6566
  Gene Symbol: GPR141
  Gene Name: G protein-coupled receptor 141
  Uniprot ID: Q7Z602
  ENST ID: ENST00000447769
  CDS Start-End: 290-1207
gtagccatcactgagaaatctggattttcaagcaatgattttcaacaattataaaatggaagttgtagactggataagagatgctcagctaagggagttcctggatggtctttagattgatacaccaatcctctgaaattgcatgcaaaaatgttttcctgggatcagctgcactccttagcaaaagtatattggagaatcaactgagaaagtaactgagacatttcaatcatttctaggtgtaaagaaagaccagatcccaggaaaatattacggtgacttcccaagtatgcctggccacaatacctccaggaattcctcttgcgatcctatagtgacaccccacttaatcagcctctacttcatagtgcttattggcgggctggtgggtgtcatttccattcttttcctcctggtgaaaatgaacacccggtcagtgaccaccatggcggtcattaacttggtggtggtccacagcgtttttctgctgacagtgccatttcgcttgacctacctcatcaagaagacttggatgtttgggctgcccttctgcaaatttgtgagtgccatgctgcacatccacatgtacctcacgttcctattctatgtggtgatcctggtcaccagatacctcatcttcttcaagtgcaaagacaaagtggaattctacagaaaactgcatgctgtggctgccagtgctggcatgtggacgctggtgattgtcattgtggtacccctggttgtctcccggtatggaatccatgaggaatacaatgaggagcactgttttaaatttcacaaagagcttgcttacacatatgtgaaaatcatcaactatatgatagtcatttttgtcatagccgttgctgtgattctgttggtcttccaggtcttcatcattatgttgatggtgcagaagctacgccactctttactatcccaccaggagttctgggctcagctgaaaaacctattttttataggggtcatccttgtttgtttccttccctaccagttctttaggatctattacttgaatgttgtgacgcattccaatgcctgtaacagcaaggttgcattttataacgaaatcttcttgagtgtaacagcaattagctgctatgatttgcttctctttgtctttgggggaagccattggtttaagcaaaagataattggcttatggaattgtgttttgtgccgttagccacaaactacagtattcatatttgcttcctttatattgggaataaaaatgggtataggggag

SEQ ID NO: 135910 - DNA, 677 bp, Homo sapiens
  Payload ID: 6566
  Gene Symbol: GPR141
  Gene Name: G protein-coupled receptor 141
  ENST ID: ENST00000450180
  CDS Start-End: 366-677
gagcatggaaatgacccagctgccctgctgttgaaacagaatcctatttggaaggcagacatgtggcccatctctgtagccatcactgagaaatctggattttcaagcaatgattttcaacaattataaaatggaagttgtagactggataagagatgctcagctaagggagttcctggatggtctttagattgatacaccaatcctctgaaattgcatgcaaaaatggcctttctctctgttgcccaggctggagtttagcgactcaatcatggctcactgactgcagcatcgacctccggggctcaagtgatcctttcatctcagcctcctcagtagctgagactacaggtgacttcccaagtatgcctggccacaatacctccaggaattcctcttgcgatcctatagtgacaccccacttaatcagcctctacttcatagtgcttattggcgggctggtgggtgtcatttccattcttttcctcctggtgaaaatgaacacccggtcagtgaccaccatggcggtcattaacttggtggtggtccacagcgtttttctgctgacagtgccatttcgcttgacctacctcatcaagaagacttggatgtttgggctgcccttctgcaaatttgtgagtgccatgctgcacatccacatgtacctcacgttccta

SEQ ID NO: 135911 - DNA, 1437 bp, Homo sapiens
  Payload ID: 6567
  Gene Symbol: GPR142
  Gene Name: G protein-coupled receptor 142
  Uniprot ID: Q7Z601
  ENST ID: ENST00000335666
  CDS Start-End: 49-1437
catctccaggctccatctcttgaaccatggatcccagcgttgttagcaatgagtattatgatgttgcccatggagcaaaagatccagtgggtccccacttccctgcaggacatcactgctgtcctgggtacagaagcatatactgaggaagacaaatcaatggtgtcccatgcacagaaaagccagcattcttgtctcagccattccaggtggctgaggtctccacaggtcacagggggaagctgggacctccgaataaggccatccaaggactccagcagtttccgccaggctcagtgtctgcgtaaggatcctggggcaaacaaccacttggagagccaaggggtgagaggtacagctggcgatgctgacagggagctgcggggaccctcagaaaaagccacagctggccagccacgagtgaccctgctgcccacgccccacgtcagcgggctgagccaggagtttgaaagccactggccagagatcgcagagaggtccccgtgtgtggctggcgtcatccctgtcatctactacagtgtcctgctgggcttggggctgcctgtcagcctcctgaccgcagtggccctggcgcgccttgccaccaggaccaggaggccctcctactactaccttctggcgctcacagcctcggatatcatcatccaggtggtcatcgtgttcgcgggcttcctcctgcagggagcagtgctggcccgccaggtgccccaggctgtggtgcgcacggccaacatcctggagtttgctgccaaccacgcctcagtctggatcgccatcctgctcacggttgaccgctacactgccctgtgccaccccctgcaccatcgggccgcctcgtccccaggccggacccgccgggccattgctgctgtcctgagtgctgccctgttgaccggcatccccttctactggtggctggacatgtggagagacaccgactcacccagaacactggacgaggtcctcaagtgggctcactgtctcactgtctatttcatcccttgtggcgtgttcctggtcaccaactcggccatcatccaccggctacggaggaggggccggagtgggctgcagccccgggtgggcaagagcacagccatcctcctgggcatcaccacactgttcaccctcctgtgggcgccccgggtcttcgtcatgctctaccacatgtacgtggcccctgtccaccgggactggagggtccacctggccttggatgtggccaatatggtggccatgctccacacggcagccaacttcggcctctactgctttgtcagcaagactttccgggccactgtccgacaggtcatccacgatgcctacctgccctgcactttggcatcacagccagagggcatggcggcgaagcctgtgatggagcctccgggactccccacaggggcagaagtgtag

SEQ ID NO: 135912 - DNA, 729 bp, Homo sapiens
  Payload ID: 6567
  Gene Symbol: GPR142
  Gene Name: G protein-coupled receptor 142
  ENST ID: ENST00000585308
  CDS Start-End: 49-444
catctccaggctccatctcttgaaccatggatcccagcgttgttagcaatgagtattatgatgttgcccatggagcaaaagatccagtgggtccccacttccctgcaggacatcactgctgtcctgggtacagaagcatatactgaggaagacaaatcaatggtgtcccatgcacagaaaagccagcattcttgtctcagccattccaggtggctgaggtctccacaggtcacagggggaagctgggacctccgaataaggccatccaaggactccagcagtttccgccaggctcagtgtctgcgtaaggatcctggggcaaacaaccacttggagagccaaggggtgagaggtacagctggcgatgctgacagggagctgcggggaccctcagaaaaagccacaggtgacccaggactcagggccccagagcatggggcttgagggacgagagacagctggccagccacgagtgaccctgctgcccacgccccacgtcagcgggctgagccaggagtttgaaagccactggccagagatcgcagagaggtccccgtgtgtggctggcgtcatccctgtcatctactacagtgtcctgctgggcttggggctgcctgtcagcctcctgaccgcagtggccctggcgcgccttgccaccaggaccaggaggccctcctactactaccttctggcgctcacagcctcggatatcatcatccaggtggtcat

SEQ ID NO: 135913 - DNA, 1608 bp, Homo sapiens
  Payload ID: 6567
  Gene Symbol: GPR142
  Gene Name: G protein-coupled receptor 142
  ENST ID: ENST00000582579
  CDS Start-End: 100-405
tggctgatgacgtggttgccctgtcctgtctgctgctgccactgagctggacatctccaggctccatctcttgaaccatggatcccagcgttgttagcaatgagtattatgatgttgcccatggagcaaaagatccagtgggtccccacttccctgcaggacatcactgctgtcctgggtacagaagcatatactgaggaagacaaatcaatggtgtcccatgcacagaaaagccagcattcttgtctcagccattccaggtggctgaggtctccacaggtcacagggggaagctgggacctccgaataaggccatccaaggactccagcagtttccgccaggtgaatccagctgcctcccagaacaggccttctatggggtgggatggctcagtgtctgcgtaaggatcctggggcaaacaaccacttggagagccaaggggtgagaggtacagctggcgatgctgacagggagctgcggggaccctcagaaaaagccacaggtgacccaggactcagggccccagagcatggggcttgagggacgagagacagctggccagccacgagtgaccctgctgcccacgccccacgtcagcgggctgagccaggagtttgaaagccactggccagagatcgcagagaggtccccgtgtgtggctggcgtcatccctgtcatctactacagtgtcctgctgggcttggggctgcctgtcagcctcctgaccgcagtggccctggcgcgccttgccaccaggaccaggaggccctcctactactaccttctggcgctcacagcctcggatatcatcatccaggtggtcatcgtgttcgcgggcttcctcctgcagggagcagtgctggcccgccaggtgccccaggctgtggtgcgcacggccaacatcctggagtttgctgccaaccacgcctcagtctggatcgccatcctgctcacggttgaccgctacactgccctgtgccaccccctgcaccatcgggccgcctcgtccccaggccggacccgccgggccattgctgctgtcctgagtgctgccctgttgaccggcatccccttctactggtggctggacatgtggagagacaccgactcacccagaacactggacgaggtcctcaagtgggctcactgtctcactgtctatttcatcccttgtggcgtgttcctggtcaccaactcggccatcatccaccggctacggaggaggggccggagtgggctgcagccccgggtgggcaagagcacagccatcctcctgggcatcaccacactgttcaccctcctgtgggcgccccgggtcttcgtcatgctctaccacatgtacgtggcccctgtccaccgggactggagggtccacctggccttggatgtggccaatatggtggccatgctccacacggcagccaacttcggcctctactgctttgtcagcaagactttccgggccactgtccgacaggtcatccacgatgcctacctgccctgcactttggcatcacagccagagggcatggcggcgaagcctgtgatggagcctccgggactccccacaggggcagaagtgtagaggagggggcccagctagggag

SEQ ID NO: 135914 - DNA, 859 bp, Homo sapiens
  Payload ID: 6568
  Gene Symbol: GPR143
  Gene Name: G protein-coupled receptor 143
  ENST ID: ENST00000447366
  CDS Start-End: 59-859
taccgcggggccggtcacggggagcgcgtccagaggtccagcccgcggcccgaagggtatggtgatccggtccaccgtgtggttaggattcccaaattttgttgacagcgtctcggatatgaaccacacggaaatttggcctgctgctttctgcgtggggagtgcgatgtggatccagctgttgtacagtgcctgcttctggtggctgttttgctatgcagtggatgcttatctggtgatccggagatcggcaggactgagcaccatcctgctgtatcacatcatggcgtggggcctggccaccctgctctgtgtggagggagccgccatgctctactacccttccgtgtccaggtgtgagcggggcctggaccacgccatcccccactatgtcaccatgtacctgcccctgctgctggttctcgtggcgaaccccatcctgttccaaaagacagtgactgcagtggcctctttacttaaaggaagacaaggcatttacacggagaacgagaggaggatgggagccgtgatcaagatccgatttttcaaaatcatgctggttttaattatttgttggttgtcgaatatcatcaatgaaagccttttattctatcttgagatgcaaacagatatcaatggaggttctttgaaacctgtcagaactgcagccaagaccacatggtttattatgggaatcctgaatccagcccagggatttctcttgtctttggccttctacggctggacaggatgcagcctgggttttcagtctcccaggaaggagatccagtgggaatcactgaccacctcggctgctgagggggctcacccatccccactgatgccccatgaaaaccct

SEQ ID NO: 135915 - DNA, 587 bp, Homo sapiens
  Payload ID: 6568
  Gene Symbol: GPR143
  Gene Name: G protein-coupled receptor 143
  ENST ID: ENST00000431126
  CDS Start-End: 73-587
taaagatggcaggtttggcgctctaggtggcagagaaaccaccaggaaggcttggtgaatggggagaaaggtatggtgatccggtccaccgtgtggttaggattcccaaattttgttgacagcgtctcggatatgaaccacacggaaatttggcctgctgctttctgcgtggggagtgcgatgtggatccagctgttgtacagtgcctgcttctggtggctgttttgctatgcagtggatgcttatctggtgatccggagatcggcaggactgagcaccatcctgctgtatcacatcatggcgtggggcctggccaccctgctctgtgtggagggagccgccatgctctactacccttccgtgtccaggtgtgagcggggcctggaccacgccatcccccactatgtcaccatgtacctgcccctgctgctggttctcgtggcgaaccccatcctgttccaaaagacagtgactgcagtggcctctttacttaaaggaagacaaggcatttacacggagaacgagaggaggatgggagccgtgatcaagatccgatttttcaaaatcatgctggttttaattatttg

SEQ ID NO: 135916 - DNA, 1762 bp, Homo sapiens
  Payload ID: 6568
  Gene Symbol: GPR143
  Gene Name: G protein-coupled receptor 143
  Uniprot ID: P51810
  ENST ID: ENST00000467482
  CDS Start-End: 148-1362
accgagcctggctctactgcaggcgctgggggttggggtgggggagaggcccagggcacatgatgccgcccccagcccgcccagcacatgacccaggcaggccggcggggtcctggcacacccgagccgcgtccgcgaacacagcccatggcctccccgcgcctagggaccttctgctgccccacgcgggacgcagccacgcagctcgtgctgagcttccagccgcgggccttccacgcgctctgcctgggcagcggcgggctccgcttggcgctgggccttctgcagctgctgcccggccgccggcccgcgggccccgggtcccccgcgacgtccccgccggcctcggtccgcatcctgcgcgctgccgctgcctgcgaccttctcggctgcctgggtatggtgatccggtccaccgtgtggttaggattcccaaattttgttgacagcgtctcggatatgaaccacacggaaatttggcctgctgctttctgcgtggggagtgcgatgtggatccagctgttgtacagtgcctgcttctggtggctgttttgctatgcagtggatgcttatctggtgatccggagatcggcaggactgagcaccatcctgctgtatcacatcatggcgtggggcctggccaccctgctctgtgtggagggagccgccatgctctactacccttccgtgtccaggtgtgagcggggcctggaccacgccatcccccactatgtcaccatgtacctgcccctgctgctggttctcgtggcgaaccccatcctgttccaaaagacagtgactgcagtggcctctttacttaaaggaagacaaggcatttacacggagaacgagaggaggatgggagccgtgatcaagatccgatttttcaaaatcatgctggttttaattatttgttggttgtcgaatatcatcaatgaaagccttttattctatcttgagatgcaaacagatatcaatggaggttctttgaaacctgtcagaactgcagccaagaccacatggtttattatgggaatcctgaatccagcccagggatttctcttgtctttggccttctacggctggacaggatgcagcctgggttttcagtctcccaggaaggagatccagtgggaatcactgaccacctcggctgctgagggggctcacccatccccactgatgccccatgaaaaccctgcttccgggaaggtgtctcaagtgggtgggcagacttctgacgaagccctgagcatgctgtctgaaggttctgatgccagcacaattgaaattcacactgcaagtgaatcctgcaacaaaaatgagggtgaccctgctctcccaacccatggagacctatgaaggggatgtgctgggggtccagaccccatattcctcagactcaacaattcttgttctttagaactgtgttctcaccttcccaacactgcactgccgaagtgtagcggcccccaaaccttgctctcatcaccagctagagcttcttcccgaagggcctttaggataggagaaagggttcatgcacacacgtgtgagaatggaagagccccctccagaccactctacagctgctctagccttagttgccactaggaagttttctgaggctggctgtaaagtaagtgtaaggtccacatccttggggaagtagttaaataaaatagttatgactgagctctcagcctgacttggattctgtcttaacacttctagcaaaagaaaataaatacatgtacagtta

SEQ ID NO: 135917 - DNA, 1757 bp, Homo sapiens
  Payload ID: 6569
  Gene Symbol: GPR146
  Gene Name: G protein-coupled receptor 146
  Uniprot ID: Q96CH1
  ENST ID: ENST00000297468
  CDS Start-End: 12-1013
cgccggccgccatgtggagctgcagctggttcaacggcacagggctggtggaggagctgcctgcctgccaggacctgcagctggggctgtcactgttgtcgctgctgggcctggtggtgggcgtgccagtgggcctgtgctacaacgccctgctggtgctggccaacctacacagcaaggccagcatgaccatgccggacgtgtactttgtcaacatggcagtggcaggcctggtgctcagcgccctggcccctgtgcacctgctcggccccccgagctcccggtgggcgctgtggagtgtgggcggcgaagtccacgtggcactgcagatccccttcaatgtgtcctcactggtggccatgtactccaccgccctgctgagcctcgaccactacatcgagcgtgcactgccgcggacctacatggccagcgtgtacaacacgcggcacgtgtgcggcttcgtgtggggtggcgcgctgctgaccagcttctcctcgctgctcttctacatctgcagccatgtgtccacccgcgcgctagagtgcgccaagatgcagaacgcagaagctgccgacgccacgctggtgttcatcggctacgtggtgccagcactggccaccctctacgcgctggtgctactctcccgcgtccgcagggaggacacgcccctggaccgggacacgggccggctggagccctcggcacacaggctgctggtggccaccgtgtgcacgcagtttgggctctggacgccacactatctgatcctgctggggcacacggtcatcatctcgcgagggaagcccgtggacgcacactacctggggctactgcactttgtgaaggatttctccaaactcctggccttctccagcagctttgtgacaccacttctctaccgctacatgaaccagagcttccccagcaagctccaacggctgatgaaaaagctgccctgcggggaccggcactgctccccggaccacatgggggtgcagcaggtgctggcgtaggcggcccagccctcctggggagacgtgactctggtggacgcagagcacttagttaccctggacgctccccacatccttccagaaggagacgagctgctggaagagaagcaggaggggtgtttttcttgaagtttcctttttcccacaaatgccactcttgggccaaggctgtggtccccgtggctggcatctggcttgagtctccccgaggcctgtgcgtctcccaaacacgcagctcaaggtccacatccgcaaaagcctcctcgccttcagcctcctcagcattcagtttgtcaatgaagtgatgaaagcttagagccagtatttatactttgtggttaaaatacttgattcccccttgtttgttttacaaaaacagatgtttcctagaaaaatgacaaatagtaaaatgaacaaaaccctacgaaagaatggcaacagccagggtggccgggccctgccagtgggcggcgtgtgctagcaaggcctgccgggtgtgccgcagtcaccacagggttctgagaacatttcacagaagtgcctgagacgcggagacatggctggtgttaaatggagctattcaatagcagtgacgcgctctcctcagccaccaaatgtccctgacaccctccccagcccccacagataacatcagctgaggtttttttcagtatgaacctgtcctaaatcaattcctcaaagtgtgcacaaaactaaagaatataaataaacaaaagaaaggtg

SEQ ID NO: 135918 - DNA, 1969 bp, Homo sapiens
  Payload ID: 6569
  Gene Symbol: GPR146
  Gene Name: G protein-coupled receptor 146
  Uniprot ID: Q96CH1
  ENST ID: ENST00000397095
  CDS Start-End: 224-1225
aagtgcttgcatcctggggccctcacacgcacgcgcaggcggccaggcgcgctgctgataagagcctgcgggtttgcagagaagcgcagcagcgcgcaggtcctcaccagagctctggtggccacctctgtcccgccatgctgctcaccgacagtggccagggcccacagcaccaagaggcttgggccacaaagtaaagggtcgcggagcctcgccggccgccatgtggagctgcagctggttcaacggcacagggctggtggaggagctgcctgcctgccaggacctgcagctggggctgtcactgttgtcgctgctgggcctggtggtgggcgtgccagtgggcctgtgctacaacgccctgctggtgctggccaacctacacagcaaggccagcatgaccatgccggacgtgtactttgtcaacatggcagtggcaggcctggtgctcagcgccctggcccctgtgcacctgctcggccccccgagctcccggtgggcgctgtggagtgtgggcggcgaagtccacgtggcactgcagatccccttcaatgtgtcctcactggtggccatgtactccaccgccctgctgagcctcgaccactacatcgagcgtgcactgccgcggacctacatggccagcgtgtacaacacgcggcacgtgtgcggcttcgtgtggggtggcgcgctgctgaccagcttctcctcgctgctcttctacatctgcagccatgtgtccacccgcgcgctagagtgcgccaagatgcagaacgcagaagctgccgacgccacgctggtgttcatcggctacgtggtgccagcactggccaccctctacgcgctggtgctactctcccgcgtccgcagggaggacacgcccctggaccgggacacgggccggctggagccctcggcacacaggctgctggtggccaccgtgtgcacgcagtttgggctctggacgccacactatctgatcctgctggggcacacggtcatcatctcgcgagggaagcccgtggacgcacactacctggggctactgcactttgtgaaggatttctccaaactcctggccttctccagcagctttgtgacaccacttctctaccgctacatgaaccagagcttccccagcaagctccaacggctgatgaaaaagctgccctgcggggaccggcactgctccccggaccacatgggggtgcagcaggtgctggcgtaggcggcccagccctcctggggagacgtgactctggtggacgcagagcacttagttaccctggacgctccccacatccttccagaaggagacgagctgctggaagagaagcaggaggggtgtttttcttgaagtttcctttttcccacaaatgccactcttgggccaaggctgtggtccccgtggctggcatctggcttgagtctccccgaggcctgtgcgtctcccaaacacgcagctcaaggtccacatccgcaaaagcctcctcgccttcagcctcctcagcattcagtttgtcaatgaagtgatgaaagcttagagccagtatttatactttgtggttaaaatacttgattcccccttgtttgttttacaaaaacagatgtttcctagaaaaatgacaaatagtaaaatgaacaaaaccctacgaaagaatggcaacagccagggtggccgggccctgccagtgggcggcgtgtgctagcaaggcctgccgggtgtgccgcagtcaccacagggttctgagaacatttcacagaagtgcctgagacgcggagacatggctggtgttaaatggagctattcaatagcagtgacgcgctctcctcagccaccaaatgtccctgacaccctccccagcccccacagataacatcagctgaggtttttttcagtatgaacctgtcctaaatcaattcctcaaagtgtgcacaaaactaaagaatataaataaacaaaagaaaggtg

SEQ ID NO: 135919 - DNA, 313 bp, Homo sapiens
  Payload ID: 6569
  Gene Symbol: GPR146
  Gene Name: G protein-coupled receptor 146
  ENST ID: ENST00000427680
  CDS Start-End: 198-313
ccagtggcgggtgaggacccactcccgcagccggcctcctcactgctcttgcctccgggcatgggaacgatgccgtctgctcgtctgcctgagacgctttctactccactccgagagtaggaggtcagccggggccaaatgacatggtggacatcaggcttcccgagatagctggtcgcggagcctcgccggccgccatgtggagctgcagctggttcaacggcacagggctggtggaggagctgcctgcctgccaggacctgcagctggggctgtcactgttgtcgctgctgggcctggtggtgggcgtgcc

SEQ ID NO: 135920 - DNA, 1053 bp, Homo sapiens
  Payload ID: 6569
  Gene Symbol: GPR146
  Gene Name: G protein-coupled receptor 146
  ENST ID: ENST00000444847
  CDS Start-End: 108-1053
gtgcgcgccgtgagccccgccgcctccgccagcccgagctgcccgcccggcggcgactgcgccggccgccgcccagcaagccgggtcgcggagcctcgccggccgccatgtggagctgcagctggttcaacggcacagggctggtggaggagctgcctgcctgccaggacctgcagctggggctgtcactgttgtcgctgctgggcctggtggtgggcgtgccagtgggcctgtgctacaacgccctgctggtgctggccaacctacacagcaaggccagcatgaccatgccggacgtgtactttgtcaacatggcagtggcaggcctggtgctcagcgccctggcccctgtgcacctgctcggccccccgagctcccggtgggcgctgtggagtgtgggcggcgaagtccacgtggcactgcagatccccttcaatgtgtcctcactggtggccatgtactccaccgccctgctgagcctcgaccactacatcgagcgtgcactgccgcggacctacatggccagcgtgtacaacacgcggcacgtgtgcggcttcgtgtggggtggcgcgctgctgaccagcttctcctcgctgctcttctacatctgcagccatgtgtccacccgcgcgctagagtgcgccaagatgcagaacgcagaagctgccgacgccacgctggtgttcatcggctacgtggtgccagcactggccaccctctacgcgctggtgctactctcccgcgtccgcagggaggacacgcccctggaccgggacacgggccggctggagccctcggcacacaggctgctggtggccaccgtgtgcacgcagtttgggctctggacgccacactatctgatcctgctggggcacacggtcatcatctcgcgagggaagcccgtggacgcacactacctggggctactgcactttgtgaaggatttctccaaactcctggccttctccagcagctttgtgacaccacttctctaccgctacatgaaccagagcttccccagcaagctccaacggctgatgaaaaagctgccct

SEQ ID NO: 135921 - DNA, 1267 bp, Homo sapiens
  Payload ID: 6570
  Gene Symbol: GPR148
  Gene Name: G protein-coupled receptor 148
  Uniprot ID: Q8TDV2
  ENST ID: ENST00000309926
  CDS Start-End: 83-1126
gacccctgtggggcagatcaacactcaaggcaggtgcagaatcaacaacctgtgacaaagccagccatccctgccaggaagcatgggggatgagctggcaccttgccctgtgggcactacagcttggccggccctgatccagctcatcagcaagacaccctgcatgccccaagcagccagcaacacttccttgggcctgggggacctcagggtgcccagctccatgctgtactggcttttccttccctcaagcctgctggctgcagccacactggctgtcagccccctgctgctggtgaccatcctgcggaaccaacggctgcgacaggagccccactacctgctcccggctaacatcctgctctcagacctggcctacattctcctccacatgctcatctcctccagcagcctgggtggctgggagctgggccgcatggcctgtggcattctcactgatgctgtcttcgccgcctgcaccagcaccatcctgtccttcaccgccattgtgctgcacacctacctggcagtcatccatccactgcgctacctctccttcatgtcccatggggctgcctggaaggcagtggccctcatctggctggtggcctgctgcttccccacattccttatttggctcagcaagtggcaggatgcccagctggaggagcaaggagcttcatacatcctaccaccaagcatgggcacccagccgggatgtggcctcctggtcattgttacctacacctccattctgtgcgttctgttcctctgcacagctctcattgccaactgtttctggaggatctatgcagaggccaagacttcaggcatctgggggcagggctattcccgggccaggggcaccctgctgatccactcagtgctgatcacattgtacgtgagcacaggggtggtgttctccctggacatggtgctgaccaggtaccaccacattgactctgggactcacacatggctcctggcagctaacagtgaggtactcatgatgcttccccgtgccatgctcacatacctgtacctgctccgctaccggcagctgttgggcatggtccggggccacctcccatccaggaggcaccaggccatctttaccatttcctagagttcttgagtccacagtctggcaagctgaggttaaaaatcatatgttgaatgcagcagtgtccacttatgactaacttcttagaacagcacaatataatagtggaattgggcctttcagaagacctcaactgatgatttt

SEQ ID NO: 135922 - DNA, 2323 bp, Homo sapiens
  Payload ID: 6571
  Gene Symbol: GPR149
  Gene Name: G protein-coupled receptor 149
  Uniprot ID: Q86SP6
  ENST ID: ENST00000389740
  CDS Start-End: 101-2296
cttggtaggaggaatgaaatctgatttgcagcagccggtctttcttttgagaaaattatcagactcattgataagggaaattaaatattgaccaaggacaatgtctttatttctcagtaacttatcaacaaatgactctagcctgtggaaagagaatcataattctacggaccttttaaatccgccaggaaccctgaatatctatcttttttgcttgacatgtctcatgacttttgcagccttggtgggcagcatttattcactaatttccctgctgaaaatgcagaacagaactgttgtgtccatgcttgtggcttcctggtctgtggatgatctcatgagcgtcctgtcggtgaccatcttcatgtttttgcagtggccaaacgaggtccccggttacttccaatttctgtgcaccacctctgccttaatgtatttatgccagggcctctctagcaacttgaaggcgactctcctagtctcttacaacttttatacgatgcacagaggtgtggggagccagacagcctccagaagatcgggccaggtgctcggcgtggtgctgaccgtgtgggcagccagtctgctgctctcggcgctcccgctgtgcggctggggcgccttcgtgcgcacgccctggggctgcctggtggactgctccagctcctacgtactattcctctctatcgtgtacgctttggccttcggactcctcgtgggcctctcagtcccactcactcaccgattgctgtgttcggaggagccgccgagactccactccaactaccaggaaatttcccgtggagcttcaattcctgggacccctcctactgcggggagagtggtttccctgtccccagaggatgctccaggcccgagtctgcggcgctctgggggatgctctccgagctccgacaccgtgttcggaccgggtgcgcccgctgccgctggggctgaagcctgcaggcgtgagaaccgggggactctctatggcaccaggagcttcaccgtgagcgtagcgcagaagcgcttcgctttgatcctagcgcttacaaaagtcgtcctttggctgcccatgatgatgcacatggtggtccagaacgtcgtggggtttcagagccttcccttggagacattcagctttctacttaccctgctggccaccactgtaaccccagtgtttgtcttgtccaaacgctggacccacttgccctgtggctgcatcatcaactgcaggcagaacgcatatgcagtggcgtccgatgggaaaaaaatcaagagaaaaggctttgaattcaatctatcattccaaaaaagttatgggatttataaaatagcacatgaagattactatgatgatgatgaaaattccatattctatcacaacctgatgaactctgagtgtgaaactacaaaagaccctcagagagacaaccgtaacatcttcaatgctataaaagtagaaatcagcaccacgccctctctggacagctccacacaaagaggcatcaacaaatgcacaaatactgatattacagaagctaaacaggattccaacaacaaaaaggatgcgttttctgacaaaacaggaggtgatattaactatgaagaaactaccttttctgaagggccagaaagaagactgtctcatgaagagagtcagaaaccagatctttcagactgggagtggtgtaggagtaaatcagaaagaacccctcgtcagcgttccggttatgcccttgccattcccttgtgtgcattccaggggactgtgtctctccatgcacctacagggaaaaccctatctctttctacctatgaggtaagcgcagaagggcaaaaaataactccagcctctaagaaaatagaagtctatcgatccaaaagtgttggccatgaaccaaactcagaagattcttcatccacgtttgtggacaccagtgtgaaaatacacttggaggttcttgaaatttgtgataatgaagaggccttggacactgtgtcaatcattagtaacatcagtcagtcctccacacaagtcagatctccatccctacgttactccaggaaagaaaacagatttgtttcatgtgacctaggggaaacagcctcatactccctctttttgcccaccagtaatcctgatggtgatattaatatctccattccagacacagtagaagcacacaggcagaacagtaaaaggcagcatcaagagagggatggctaccaggaggaaatccagttgttaaataaagcttacagaaaaagagaggaagaaagcaagggtagttagtgggtatttggtctaacaggagcaaga

SEQ ID NO: 135923 - DNA, 1252 bp, Homo sapiens
  Payload ID: 6572
  Gene Symbol: GPR15
  Gene Name: G protein-coupled receptor 15
  Uniprot ID: P49685
  ENST ID: ENST00000284311
  CDS Start-End: 136-1218
gatctttaaagggaggggaaaaaagagagagagaggcaggcactgtataaaagaagcttccttgaggtttctaaaatttatacaaaaacatcatatgtaagtaaactcaccagatttggcatctgctctttggtgatggacccagaagaaacttcagtttatttggattattactatgctacgagcccaaactctgacatcagggagacccactcccatgttccttacacctctgtcttccttccagtcttttacacagctgtgttcctgactggagtgctggggaaccttgttctcatgggagcgttgcatttcaaacccggcagccgaagactgatcgacatctttatcatcaatctggctgcctctgacttcatttttcttgtcacattgcctctctgggtggataaagaagcatctctaggactgtggaggacgggctccttcctgtgcaaagggagctcctacatgatctccgtcaatatgcactgcagtgtcctcctgctcacttgcatgagtgttgaccgctacctggccattgtgtggccagtcgtatccaggaaattcagaaggacagactgtgcatatgtagtctgtgccagcatctggtttatctcctgcctgctggggttgcctactcttctgtccagggagctcacgctgattgatgataagccatactgtgcagagaaaaaggcaactccaattaaactcatatggtccctggtggccttaattttcaccttttttgtccctttgttgagcattgtgacctgctactgttgcattgcaaggaagctgtgtgcccattaccagcaatcaggaaagcacaacaaaaagctgaagaaatctataaagatcatctttattgtcgtggcagcctttcttgtctcctggctgcccttcaatactttcaagttcctggccattgtctctgggttgcggcaagaacactatttaccctcagctattcttcagcttggtatggaggtgagtggacccttggcatttgccaacagctgtgtcaaccctttcatttactatatcttcgacagctacatccgccgggccattgtccactgcttgtgcccttgcctgaaaaactatgactttgggagtagcactgagacatcagatagtcacctcactaaggctctctccaccttcattcatgcagaagattttgccaggaggaggaagaggtctgtgtcactctaaagggaactgtgacatttcaagctctgttggtggg

SEQ ID NO: 135924 - DNA, 2065 bp, Homo sapiens
  Payload ID: 6573
  Gene Symbol: GPR150
  Gene Name: G protein-coupled receptor 150
  Uniprot ID: Q8NGU9
  ENST ID: ENST00000380007
  CDS Start-End: 199-1503
caaatcacgaggacaatcgacaaaaacaactaagcgcaaagccgcccgaatccatctccctctctgtgcgtgtgccttttcaactaactttgggaactcgtatagacccagcgtcgctccccgcgccgcctcgcctccactttggtttcccgcgtcctgcccgccctcttcggtgcctcctcttcctccgggacaaggatggaggatctctttagcccctcaattctgccgccggcgcccaacatttccgtgcccatcttgctgggctggggtctcaacctgaccttggggcaaggagcccctgcctctgggccgcccagccgccgcgtccgcctggtgttcctgggggtcatcctggtggtggcggtggcaggcaacaccacagtgctgtgccgcctgtgcggcggcggcgggccctgggcgggccccaagcgtcgcaagatggacttcctgctggtgcagctggccctggcggacctgtacgcgtgcgggggcacggcgctgtcacagctggcctgggaactgctgggcgagccccgcgcggccacgggggacctggcgtgccgcttcctgcagctgctgcaggcatccgggcggggcgcctcggcccacctcgtggtgctcatcgccctcgagcgccggcgcgcggtgcgtcttccgcacggccggccgctgcccgcgcgtgccctcgccgccctgggctggctgctggcactgctgctggcgctgcccccggccttcgtggtgcgcggggactccccctcgccgctgccgccgccgccgccgccaacgtccctgcagccaggcgcgcccccggccgcccgcgcctggccgggggagcgtcgctgccacgggatcttcgcgcccctgccgcgctggcacctgcaggtctacgcgttctacgaggccgtcgcgggcttcgtcgcgcctgttacggtcctgggcgtcgcttgcggccacctactctccgtctggtggcggcaccggccgcaggcccccgcggctgcagcgccctggtcggcgagcccaggtcgagcccctgcgcccagcgcgctgccccgcgccaaggtgcagagcctgaagatgagcctgctgctggcgctgctgttcgtgggctgcgagctgccctactttgccgcccggctggcggccgcgtggtcgtccgggcccgcgggagactgggagggagagggcctgtcggcggcgctgcgcgtggtggcgatggccaacagcgctctcaatcccttcgtctacctcttcttccaggcgggcgactgccggctccggcgacagctgcggaagcggctgggctctctgtgctgcgcgccgcagggaggcgcggaggacgaggaggggccccggggccaccaggcgctctaccgccaacgctggccccaccctcattatcaccatgctcggcgggaaccgctggacgagggcggcttgcgcccaccccctccgcgccccagacccctgccttgctcctgcgaaagtgccttctaggtgcttggtggtcagagacgggtcatctgtcgctaaggcgcaacctccagggaactcgaggcctgccagggtctgtccagatcacaaggggcaggagagtctgtgagagagtgacactgaagttgtccccttcctccactctcctattcccttctcatgtttacatttccctatgctcttccagtttctcttcttccctacagttcctctcatatctccccatttggagacagtgagccactggaaagttgtaaaaacaaaaacagttatttttgcagttttctttcacgcatttatagtgctctggataatgccatttatttttgctgattacccaactttcagtatttgctgtgttatcatctgtatttacttattttgaatcgtgcttaaatcaaatgtaccttcagcacctgcaagtttgccttttctttccaggaggaaaatccccacgttgctctccctggggagtctgagaattataccagtgctgtcagaaatgtaatcatgctgtcatttcagagccacagagtatttataaaataaaaacctttcccacgga

SEQ ID NO: 135925 - DNA, 3088 bp, Homo sapiens
  Payload ID: 6574
  Gene Symbol: GPR151
  Gene Name: G protein-coupled receptor 151
  Uniprot ID: Q8TDV0
  ENST ID: ENST00000311104
  CDS Start-End: 78-1337
tttcctatgcaaaagagcccaggcagaaagacaaacctaaataagaatctaacttctgtaagaagctgtgaagagtgatgctggcagctgcctttgcagactctaactccagcagcatgaatgtgtcctttgctcacctccactttgccggagggtacctgccctctgattcccaggactggagaaccatcatcccggctctcttggtggctgtctgcctggtgggcttcgtgggaaacctgtgtgtgattggcatcctccttcacaatgcttggaaaggaaagccatccatgatccactccctgattctgaatctcagcctggctgatctctccctcctgctgttttctgcacctatccgagctacggcgtactccaaaagtgtttgggatctaggctggtttgtctgcaagtcctctgactggtttatccacacatgcatggcagccaagagcctgacaatcgttgtggtggccaaagtatgcttcatgtatgcaagtgacccagccaagcaagtgagtatccacaactacaccatctggtcagtgctggtggccatctggactgtggctagcctgttacccctgccggaatggttctttagcaccatcaggcatcatgaaggtgtggaaatgtgcctcgtggatgtaccagctgtggctgaagagtttatgtcgatgtttggtaagctctacccactcctggcatttggccttccattattttttgccagcttttatttctggagagcttatgaccaatgtaaaaaacgaggaactaagactcaaaatcttagaaaccagatacgctcaaagcaagtcacagtgatgctgctgagcattgccatcatctctgctctcttgtggctccccgaatgggtagcttggctgtgggtatggcatctgaaggctgcaggcccggccccaccacaaggtttcatagccctgtctcaagtcttgatgttttccatctcttcagcaaatcctctcatttttcttgtgatgtcggaagagttcagggaaggcttgaaaggtgtatggaaatggatgataaccaaaaaacctccaactgtctcagagtctcaggaaacaccagctggcaactcagagggtcttcctgacaaggttccatctccagaatccccagcatccataccagaaaaagagaaacccagctctccctcctctggcaaagggaaaactgagaaggcagagattcccatccttcctgacgtagagcagttttggcatgagagggacacagtcccttctgtacaggacaatgaccctatcccctgggaacatgaagatcaagagacaggggaaggtgttaaatagatttaagtttcaaagcaaaacaaactgtgattattgtatttacttgtactgctgcttatcaatattgctgactttacaaactgatataattattaccattaggaattataaaaatatttcacaatctacactttccaaatgtgcaatgtggtaagtagagaaccatgttagaagtaataattgtttcagaattagaacttggcttcccaaacaatttaagtgttgtgtaaagatgttgctgtcaaagtgattagacagcctggctattctgtcatttgttcacagtggttttactgggtaccccctaggaccagccctgtagtggaccggctggagcctgcagtagaggttctgtcaaagctgagcccctttaccttcagtttcacccaggacctgctagtcctaattttacctactaaattgtatttcacataaccaaagctcaaaatctactttcacttgagatttttaacacattaatgataaattttaatgcgttcttcatttacttaataagtgttaatttacttgatgaaaagtccgtatcataatgttcatgactgaaggtcaaagaaaaagaaacagcaccttattccaattctggactcatttcaagccatggctggttctggccaagtttaaataaattcaaacttaaactaaagcctgcttcagtgaactttttaaagctacctgaatgagtcttcagtttctaagtctaagaattgtagcagctttccaatgacattcagtagtctgatatgggggaaaaaatacttaaaaaaatgtcctctcttcacttccaaaatgtgggaaagttatttttctataagcagaaatgtgttcctcctaatatctcctttctcccaagataaaccatggttaatgatataggtatagattactcctcaaatacaaatagaagatggagatggtgatctttcttgttaatggtactaaacttacccttactcagaacattgaacttgaaccctactcaacttttaaaatactataggctaagttataaaaataatctagcaacctgagaaagagattaatatcaaaaagagaaaattcaacaaaccaagacagaatttggttaagaatacaaaataaaaagcataagggcaatgcagaaagcagtaaaactgtgtacccagacatacggtaaaatctgagtaacaggcaataaccattcattttatagcaaggtaaaacatacccaataaaacatgattatgatatatttctgccccttttaagtataatgacattcacccatgattcttgattactttgttatggaactcgggtattttcactgaaagtttccctcagaatagaaatgcctttagggcaaaccaagccatggagaatctgaaatataaaggatatgttatggaaaaaaaaagattttgctttttgtctatgggtttccggattctttgctttttcataagtggtcatagtttgctttttaacacaggaggtagggctgtattctttttacatccttcattacaaattttatttgaagctcatgtattcaaataaagtaaaatttaacccaagaatccaaaatattgtcttgtgatatggtagttataaaaaggattatcattgtctgtgattatttgaataaataatttttatgttcattatatgtagtaaatttaggatgtaagcttccagggtttgacactttaaacttgtaaagaaataaaaataattacgctttacttccgata

SEQ ID NO: 135926 - DNA, 1429 bp, Homo sapiens
  Payload ID: 6575
  Gene Symbol: GPR152
  Gene Name: G protein-coupled receptor 152
  Uniprot ID: Q8TDT2
  ENST ID: ENST00000312457
  CDS Start-End: 6-1418
cccaaatggacactaccatggaagctgacctgggtgccactggccacaggccccgcacagagcttgatgatgaggactcctacccccaaggtggctgggacacggtcttcctggtggccctgctgctccttgggctgccagccaatgggttgatggcgtggctggccggctcccaggcccggcatggagctggcacgcgtctggcgctgctcctgctcagcctggccctctctgacttcttgttcctggcagcagcggccttccagatcctagagatccggcatgggggacactggccgctggggacagctgcctgccgcttctactacttcctatggggcgtgtcctactcctccggcctcttcctgctggccgccctcagcctcgaccgctgcctgctggcgctgtgcccacactggtaccctgggcaccgcccagtccgcctgcccctctgggtctgcgccggtgtctgggtgctggccacactcttcagcgtgccctggctggtcttccccgaggctgccgtctggtggtacgacctggtcatctgcctggacttctgggacagcgaggagctgtcgctgaggatgctggaggtcctggggggcttcctgcctttcctcctgctgctcgtctgccacgtgctcacccaggccacagcctgtcgcacctgccaccgccaacagcagcccgcagcctgccggggcttcgcccgtgtggccaggaccattctgtcagcctatgtggtcctgaggctgccctaccagctggcccagctgctctacctggccttcctgtgggacgtctactctggctacctgctctgggaggccctggtctactccgactacctgatcctactcaacagctgcctcagccccttcctctgcctcatggccagtgccgacctccggaccctgctgcgctccgtgctctcgtccttcgcggcagctctctgcgaggagcggccgggcagcttcacgcccactgagccacagacccagctagattctgagggtccaactctgccagagccgatggcagaggcccagtcacagatggatcctgtggcccagcctcaggtgaaccccacactccagccacgatcggatcccacagctcagccacagctgaaccctacggcccagccacagtcggatcccacagcccagccacagctgaacctcatggcccagccacagtcagattctgtggcccagccacaggcagacactaacgtccagacccctgcacctgctgccagttctgtgcccagtccctgtgatgaagcttccccaaccccatcctcgcatcctaccccaggggcccttgaggacccagccacacctcctgcctctgaaggagaaagccccagcagcaccccgccagaggcggccccgggcgcaggccccacgtgagggtccaggaa

SEQ ID NO: 135927 - DNA, 4082 bp, Homo sapiens
  Payload ID: 6576
  Gene Symbol: GPR153
  Gene Name: G protein-coupled receptor 153
  Uniprot ID: Q6NV75
  ENST ID: ENST00000377893
  CDS Start-End: 261-2090
ccgccgccagcatgccccggcccgcgggccgctccgccgccagccacccccgcggccctcggcggcctgcgctcggcccgggggcgcgggaaccgcagccggagccggaggcgggagcagcgagccggagccccgggcgctcgaatgcaggatgctcgtggtccccagcatccttgagccaccaggagtgagggctgctgctccctgagacctggctccaaggaggatgccacagccgcctgccagctccggtctgcaccatgagtgatgagcggcggctgcctggcagtgcagtgggctggctggtatgtgggggcctctccctgctggccaatgcctggggcatcctcagcgttggcgccaagcagaagaagtggaagcccttggagttcctgctgtgtacactcgcggccacccacatgctaaatgtggccgtgcccatcgccacctactccgtggtgcagctgcggcggcagcgccccgacttcgagtggaatgagggtctctgcaaggtcttcgtgtccaccttctacaccctcaccctggccacctgtttctctgtcacctccctctcctaccaccgcatgtggatggtctgctggcctgtcaactaccggctgagcaatgccaagaagcaggcggtgcacacagtcatgggtatctggatggtgtccttcatcctgtcggccctgcctgccgttggctggcacgacaccagcgagcgcttctacacccatggctgccgcttcatcgtggctgagatcggcctgggctttggcgtctgcttcctgctgctggtgggcggcagcgtggccatgggcgtgatctgcacagccatcgccctcttccagacgctggccgtgcaggtggggcgccaggccgaccgccgcgccttcaccgtgcccaccatcgtggtggaggacgcgcagggcaagcggcgctcctccatcgatggctcggagcccgccaaaacctctctgcagaccacgggcctcgtgaccaccatagtcttcatctacgactgcctcatgggcttccctgtgctggtggtgagcttcagcagcctgcgggccgacgcctcagcgccctggatggcactctgcgtgctgtggtgctccgtggcccaggccctgctgctgcctgtgttcctctgggcctgcgaccgctaccgggctgacctcaaagctgtccgggagaagtgcatggccctcatggccaacgacgaggagtcagacgatgagaccagcctggaaggtggcatctccccggacctggtgttggagcgctccctggactatggctatggaggtgattttgtggccctagataggatggccaagtatgagatctccgccctggaggggggcctgccccagctctacccactgcggcccttgcaggaggacaagatgcaatacctgcaggtcccgcccacgcggcgcttctcccacgacgatgcggacgtgtgggccgccgtcccgctgcccgccttcctgccgcgctggggctccggcgaggacctggccgccctggcgcacctggtgctgcctgccgggcccgagcggcgccgcgccagcctcctggccttcgcggaggacgcaccaccgtcccgcgcgcgccgccgctcggccgagagcctgctgtcgctgcggccctcggccctggatagcggcccgcggggagcccgcgactcgccccccggcagcccgcgccgccgccccgggcccggcccccgctccgcctcggcctcgctgctgcccgacgccttcgccctgaccgccttcgagtgcgagccacaggccctgcgccgcccgcccgggcccttccccgctgcgcccgccgcccccgacggcgcagatcccggagaggccccgacgcccccaagcagcgcccagcggagcccagggccacgcccctctgcgcactcgcacgccggctctctgcgccccggcctgagcgcgtcgtggggcgagcccggggggctgcgcgcggcgggcggcggcggcagcaccagcagcttcctgagttccccctccgagtcctcgggctacgccacgctgcactcggactcgctgggctccgcgtcctaggaccgccggcgcctccccacggacgccaggcaggccaggccgctctccggggccgcagcaccaaagacgcccgcctccgccccgcgcgcagacatgcgccacccctcccaggggtgagggggcgttggcctcagcgtttgtcttccggctcctcccagctggccttgtcccaggggcgacggctgccccggacgactgcgctgggcaccgcatgtcccgggccgagtgaggtcgggcctggggagctgagtgacatcccaagcttgggcttgggtagtgagtgacatgtgcacacgtccagctgcgccatcaccagccctgcgcaacaggacgtcgggagcagggaacctgagacagggccactgcgggatcggacaaagccccgctttggagaggctgagctggagccattggcctccccaggggctttccacccacactgcaccataaccgccacacccttcggggggggggagggtacagagggtctctaagcacaggggtgttcagagcccgaacaagctttgatcaggtttccctgcttccgacctgtcctgcctcagtttccccatctgtgatgagcaggtgaccacgttaactctcagggctgtttgaagtctcttggttgtaggccctcgccactgagtggcccaggtgtgagaggtagtctagagccctctgcggcctttgtggaggtccgttttcagcatgtggcctggtgtggctccctaggcctgaggcctcccactctcagtgccccctgcccccttgggaacccacactccaccccagctaagcacaacactgtggaccaccaccaatggcacctgagccaccttgaccaccattagtgtccccaccctcattactctgccgtcgttgcctgtccccaccacatcatctccctccatggctcccaccatgacgctggcaggtgcaagcggagagcacgagggcagcagggcctggccttccgtgtccctgcgtcatccccagcctcactccccacccgtgcaggcctggccaggaagggatcctggcaggggcttccaggttctcagctcaaggcctggtcccgggcaggcgtccaacccctgggagcaatgtatttctttgccttccatcctgggcagaccccttacaggcctgggcattgccatgggccctgggtcttcccaggctaaggagaaccaggaacagctataaccttgagctagtgaaatagggtagatgagaaggctgtctcctccagacccctacccctacacagtggccccacaatatgaagacctggggtaattccaaggtgagcatagagcctgcctgtgcccagttccttctggccctcaggtggccaagcccatctcttcatccttcagatagggtcccactcccagaagaagctgctggggtgggggtgggaggctgcctaagcctgtctgtgcttcagaggcccctccagtccctggctgtggggtaactgggggtatgagctgtggccacaggtgagcaaggcagggaactgcaatccagccctggccgcgggaggggccatctctggccaatgctgctgtgccttcaaggactgacaagttacgtaggggcagaggtcgccagctagccagtgtctcctccatctggggggcgtctgtccacttgtcaccttaggttttcactcatttgtcaccttggggttttgctctgtgtgtttcatatccaacggcaatacttgcagggggacagagtcctctaaatactccaatcctgcggtttttacaaacataaagggggagaccccaagtggaggaccctgggcctggagctccctcccaaactttgtccagcatccagcctgttccctgggctcactggggagggagttgtcttcatagcacacccagagccagggatccctttgtagttttttgacaacggagcatttctcttctgtacaggacccaataaaaacttccttatgatttgcacctggca

SEQ ID NO: 135928 - DNA, 3930 bp, Homo sapiens
  Payload ID: 6577
  Gene Symbol: GPR155
  Gene Name: G protein-coupled receptor 155
  Uniprot ID: Q7Z3F1
  ENST ID: ENST00000295500
  CDS Start-End: 346-2958
cccaccttactttatcggaacgtgcctaagctgctgcagctggcacccggttgcgctcggcgaagagggctgggggcgggagatgacggtggtcttctccctgcttggcaccctgcgagcaccagctcccttctcctcgccactccaaggttgcagacgaagcaggtactgtcctagatgttaaggacacaacattgagcaaaaacatgcatagtccctgcttccgtgacacttgagtgaactgaatgtgcaaagtccctgtggcacaaagtccctggggccagtgtgtgtggcgggtgtagaaggagctaaagagatctggttggagttggagggtgagagaaaatgaattctaatttacctgcagagaacttaaccattgcagtcaatatgaccaagactttgcctacagcagtaacgcatggatttaattccactaatgacccaccttcaatgtcaattacaaggctttttccagccttactggaatgctttggcattgtcctttgtggctacatagcaggaagggccaatgtcataacatcaacccaggccaaaggactaggaaattttgtctccagatttgcacttccagctttattattcaaaaacatggttgtacttaatttttccaatgtggactggtccttcctatatagtatcttaattgccaaagcttctgtatttttcattgtatgtgtattaaccttattggttgccagtcctgatagtcgatttagcaaagctggactattccctatttttgctacacaaagtaatgactttgcattgggataccctatagttgaagctttatatcaaactacatacccagaatatctccagtacatttatttggtggcaccaatatctcttatgatgttaaaccctatagggtttattttctgtgaaatccaaaagtggaaagacactcaaaatgcttctcaaaataaaataaaaattgtgggactcggactcctgcgtgtattacagaacccaatagtatttatggtcttcattggcatcgccttcaattttattcttgatcgaaaggtacctgtatatgtcgaaaattttcttgatggacttggaaattctttttctggatcagccctattttatcttggtctcacgatggtgggaaaaataaagagactgaagaagtcggcatttgtagtactaattcttctcatcacagctaaacttctggtgctgccacttctgtgcagagaaatggtggaactcttggacaagggcgacagtgtggtgaaccatacaagtttatcaaattatgcatttctgtatggtgtatttcctgtagcaccaggagtggctatctttgcaacacaattcaacatggaagtagaaattataacctcagggatggtgataagcacatttgtgtctgctcccatcatgtacgtttctgcctggttactgacctttcccactatggaccctaagccattggcatatgccatccagaatgttagttttgatataagtattgtcagcctgatctccttgatctggtctctggctattcttcttttgagtaagaaatataaacagcttcctcatatgcttacaactaatttactcattgctcagtctattgtctgtgctggaatgatgatatggaattttgttaaagaaaaaaattttgttggacaaattttggtgtttgttctattgtacagctccctctatagcacctacctgtggacaggccttctagcaatttctttgtttcttttgaaaaagcgagagagggtacaaattcctgttggaataatcataatatctggctggggaattcctgctctccttgttggtgttcttttgataactggaaaacacaatggagatagcattgactcagccttcttttatggaaaagaacagatgatcaccacagcagtcaccctgttctgcagcatcctgatagctggcatatccctcatgtgcatgaaccagactgcccaagcaggaagctatgaaggtttcgatcagtctcagagccacaaagtggtggagcctggaaatactgcttttgaggagagtccagcaccagtaaatgaaccagaactttttacaagctctattccagaaacaagttgctgctcctgctccatgggaaatggtgaattacactgcccatcaatagagccaatagcaaacacaagcaccagtgagcctgtgattccttcgtttgagaaaaacaatcattgtgtgagtcgctgtaactcccagagctgcatattagcccaggaagaagaacagtatctacagagtggagaccagcaactgacccgacatgtgttgctgtgtttacttctcatcattggcctgttcgctaatctttccagttgtttatggtggctattcaaccaagagcctggaagactttatgttgagttacagtttttctgtgccgtgtttaactttggtcagggatttatttcctttggaatctttggattagataaacatttaatcatcctgcctttcaaaagaagacttgaattcctatggaacaataaagacacagcagaaaacagggattctcctgtttcagaggaaataaaaatgacctgtcaacaatttatccattatcaccgtgacctctgtatccgaaacattgtcaaagaaagaaggtgtggtgcaaagacttctgctggaactttctgtggctgtgacctggtgagctggctaattgaagtcggccttgcctccgaccgtggtgaagctgtgatatacggagacaggctggtacaagggggagtcatccaacatattaccaacgagtatgaattccgggatgagtacttgttttacagatttcttcaaaagagtcctgaacagagtcctcctgctattaatgcaaacactctccaacaggaaagatataaagaaattgagcattcatccccaccctcacattcccctaagacctaaattatgcaggggagaaccctacatggaatcatattctagccgcgtattcattagtttttagctgggtgaccttgggcaagttaacagaggcaacctctctgagcctcagttgtctcttctgtaaaatgtgaaaagatgtgctcccaccacatgcgcagggtctgtgattttacatgtatgtaaaacacataggaagctgacttaggaaaaagagaaaaccaaattaaagttctgataatgaatataatatagtcatcctttagtatccaaggggattggttccaggactcctgaagatcccaaaatctgaggatactcaagtcccttatataaaatggtgtaggccgggcatggtggctcacgcctgtaatcccagtactttgggaggccgagtcaggtggatcacctgaggtcaggagttcaagaccagcctggccaacatggcgaaaccccgtctctactataaaatacaaaaaattagttgggtgtggtggcgggtgcctgtaatcccagctactcaggaggctgaggcaggagaatcgcttgaatctgggaggcagaggttgctgtgagccgagatcgtgccactgcactccagcctgagcaacagagcaagactctatctcaaaaataaaataaaataaaataaaataattaataaaatggtgtagtatttgcatataacctatgcacattctcccatatagtttaatcatctttagatacttataatgcctaatacaatgtaaatgctatgtaaatagttgttgttatactgtattgtttagggaataacaataagaaaaacagtctgtacatgttcactacagatgcaaccattgttaagcctgactacatctttttatctgcggttgattgaatctatggatgtggaacctgtgcatatggagggtcaactgtactataaataatacgaatatgccaacattatataatcattgctttctgcaa

SEQ ID NO: 135929 - DNA, 4876 bp, Homo sapiens
  Payload ID: 6577
  Gene Symbol: GPR155
  Gene Name: G protein-coupled receptor 155
  Uniprot ID: Q7Z3F1
  ENST ID: ENST00000392551
  CDS Start-End: 300-2912
gggggcggggcctcgcggccggcgaggggctgagctgacagggccgcatcggcttaccccaccttactttatcggaacgtgcctaagctgctgcagctggcacccggttgcgctcggcgaagagggctgggggcgggagatgacggtggtcttctccctgcttggcaccctgcgagcaccagctcccttctcctcgccactccaaggttgcagacgaagcagatgtgattataaagacttcagtggaataatcgcaagttcccatgtgagatctggttggagttggagggtgagagaaaatgaattctaatttacctgcagagaacttaaccattgcagtcaatatgaccaagactttgcctacagcagtaacgcatggatttaattccactaatgacccaccttcaatgtcaattacaaggctttttccagccttactggaatgctttggcattgtcctttgtggctacatagcaggaagggccaatgtcataacatcaacccaggccaaaggactaggaaattttgtctccagatttgcacttccagctttattattcaaaaacatggttgtacttaatttttccaatgtggactggtccttcctatatagtatcttaattgccaaagcttctgtatttttcattgtatgtgtattaaccttattggttgccagtcctgatagtcgatttagcaaagctggactattccctatttttgctacacaaagtaatgactttgcattgggataccctatagttgaagctttatatcaaactacatacccagaatatctccagtacatttatttggtggcaccaatatctcttatgatgttaaaccctatagggtttattttctgtgaaatccaaaagtggaaagacactcaaaatgcttctcaaaataaaataaaaattgtgggactcggactcctgcgtgtattacagaacccaatagtatttatggtcttcattggcatcgccttcaattttattcttgatcgaaaggtacctgtatatgtcgaaaattttcttgatggacttggaaattctttttctggatcagccctattttatcttggtctcacgatggtgggaaaaataaagagactgaagaagtcggcatttgtagtactaattcttctcatcacagctaaacttctggtgctgccacttctgtgcagagaaatggtggaactcttggacaagggcgacagtgtggtgaaccatacaagtttatcaaattatgcatttctgtatggtgtatttcctgtagcaccaggagtggctatctttgcaacacaattcaacatggaagtagaaattataacctcagggatggtgataagcacatttgtgtctgctcccatcatgtacgtttctgcctggttactgacctttcccactatggaccctaagccattggcatatgccatccagaatgttagttttgatataagtattgtcagcctgatctccttgatctggtctctggctattcttcttttgagtaagaaatataaacagcttcctcatatgcttacaactaatttactcattgctcagtctattgtctgtgctggaatgatgatatggaattttgttaaagaaaaaaattttgttggacaaattttggtgtttgttctattgtacagctccctctatagcacctacctgtggacaggccttctagcaatttctttgtttcttttgaaaaagcgagagagggtacaaattcctgttggaataatcataatatctggctggggaattcctgctctccttgttggtgttcttttgataactggaaaacacaatggagatagcattgactcagccttcttttatggaaaagaacagatgatcaccacagcagtcaccctgttctgcagcatcctgatagctggcatatccctcatgtgcatgaaccagactgcccaagcaggaagctatgaaggtttcgatcagtctcagagccacaaagtggtggagcctggaaatactgcttttgaggagagtccagcaccagtaaatgaaccagaactttttacaagctctattccagaaacaagttgctgctcctgctccatgggaaatggtgaattacactgcccatcaatagagccaatagcaaacacaagcaccagtgagcctgtgattccttcgtttgagaaaaacaatcattgtgtgagtcgctgtaactcccagagctgcatattagcccaggaagaagaacagtatctacagagtggagaccagcaactgacccgacatgtgttgctgtgtttacttctcatcattggcctgttcgctaatctttccagttgtttatggtggctattcaaccaagagcctggaagactttatgttgagttacagtttttctgtgccgtgtttaactttggtcagggatttatttcctttggaatctttggattagataaacatttaatcatcctgcctttcaaaagaagacttgaattcctatggaacaataaagacacagcagaaaacagggattctcctgtttcagaggaaataaaaatgacctgtcaacaatttatccattatcaccgtgacctctgtatccgaaacattgtcaaagaaagaaggtgtggtgcaaagacttctgctggaactttctgtggctgtgacctggtgagctggctaattgaagtcggccttgcctccgaccgtggtgaagctgtgatatacggagacaggctggtacaagggggagtcatccaacatattaccaacgagtatgaattccgggatgagtacttgttttacagatttcttcaaaagagtcctgaacagagtcctcctgctattaatgcaaacactctccaacaggaaagatataaagaaattgagcattcatccccaccctcacattcccctaagacctaaattatgcaggggagaaccctacatggaatcatattctagccgcgtattcattagtttttagctgggtgaccttgggcaagttaacagaggcaacctctctgagcctcagttgtctcttctgtaaaatgtgaaaagatgtgctcccaccacatgcgcagggtctgtgattttacatgtatgtaaaacacataggaagctgacttaggaaaaagagaaaaccaaattaaagttctgataatgaatataatatagtcatcctttagtatccaaggggattggttccaggactcctgaagatcccaaaatctgaggatactcaagtcccttatataaaatggtgtaggccgggcatggtggctcacgcctgtaatcccagtactttgggaggccgagtcaggtggatcacctgaggtcaggagttcaagaccagcctggccaacatggcgaaaccccgtctctactataaaatacaaaaaattagttgggtgtggtggcgggtgcctgtaatcccagctactcaggaggctgaggcaggagaatcgcttgaatctgggaggcagaggttgctgtgagccgagatcgtgccactgcactccagcctgagcaacagagcaagactctatctcaaaaataaaataaaataaaataaaataattaataaaatggtgtagtatttgcatataacctatgcacattctcccatatagtttaatcatctttagatacttataatgcctaatacaatgtaaatgctatgtaaatagttgttgttatactgtattgtttagggaataacaataagaaaaacagtctgtacatgttcactacagatgcaaccattgttaagcctgactacatctttttatctgcggttgattgaatctatggatgtggaacctgtgcatatggagggtcaactgtactataaataatacgaatatgccaacattatataatcattgctttctgcaactgtttactataatttcaaaattaatatcctattaactgttcctataaattatcaaatttggcaagtgtattactagcaggagatggaccttaaattatgacaactttatattttttgatagcatctcttgaaaaagaattttaatgattctaataagaggttctttttcttttttccatttccttgacaaatagtactcatttaaaaactagagggctaggcttagtggctcacgcctgtaatctcagcactttgggaggctgaggcgggcagatcgcttgaggtcaggagttcaagaccagcccgggcaacgtggtgaaacccggtctgtactaaaaaaaaaaaaaaagaaaaagaaaaagaaaaaagaatacccaggtgtggtagtgcatgcctgtagtcccagctactttggagactgaggtgggagtaccccttgagcctgggaggcgcaggttgcagtgaaccaagatcacatcactgcacttcaacctgggtgacagagcaagaccctgtctcaaaaacaaaaaacaagcaaaaaaaacctagaggcactatttttttttaaagtttgtcttttcttttctacccaaattactaatctatgccattaaggaaaggaataagaacctccatatgtattattatctccacagtcctgcagaagtacaatctgatctttaactttcatgctacaaataataatttgagtagattaatttgaattttatcaacaaaattattgccatatgatgtatcatttctgtgtttgaacaaagcatcgtaatgcaggataacttctactttattccctgtagttaaaaaaaaaaaaactatatagttcaagccaatatttaaaaattctaaacctaggctgggcatggtgactcatacctgtaatcccagcactttgggaggccgaggcaggtgaattgcttcagcccaggagttcgagaccagcctggccaatgtggtgaaaccccatctctac

SEQ ID NO: 135930 - DNA, 6730 bp, Homo sapiens
  Payload ID: 6577
  Gene Symbol: GPR155
  Gene Name: G protein-coupled receptor 155
  Uniprot ID: Q7Z3F1
  ENST ID: ENST00000392552
  CDS Start-End: 240-2852
gcggccggcgaggggctgagctgacagggccgcatcggcttaccccaccttactttatcggaacgtgcctaagctgctgcagctggcacccggttgcgctcggcgaagagggctgggggcgggagatgacggtggtcttctccctgcttggcaccctgcgagcaccagctcccttctcctcgccactccaaggttgcagacgaagcagagatctggttggagttggagggtgagagaaaatgaattctaatttacctgcagagaacttaaccattgcagtcaatatgaccaagactttgcctacagcagtaacgcatggatttaattccactaatgacccaccttcaatgtcaattacaaggctttttccagccttactggaatgctttggcattgtcctttgtggctacatagcaggaagggccaatgtcataacatcaacccaggccaaaggactaggaaattttgtctccagatttgcacttccagctttattattcaaaaacatggttgtacttaatttttccaatgtggactggtccttcctatatagtatcttaattgccaaagcttctgtatttttcattgtatgtgtattaaccttattggttgccagtcctgatagtcgatttagcaaagctggactattccctatttttgctacacaaagtaatgactttgcattgggataccctatagttgaagctttatatcaaactacatacccagaatatctccagtacatttatttggtggcaccaatatctcttatgatgttaaaccctatagggtttattttctgtgaaatccaaaagtggaaagacactcaaaatgcttctcaaaataaaataaaaattgtgggactcggactcctgcgtgtattacagaacccaatagtatttatggtcttcattggcatcgccttcaattttattcttgatcgaaaggtacctgtatatgtcgaaaattttcttgatggacttggaaattctttttctggatcagccctattttatcttggtctcacgatggtgggaaaaataaagagactgaagaagtcggcatttgtagtactaattcttctcatcacagctaaacttctggtgctgccacttctgtgcagagaaatggtggaactcttggacaagggcgacagtgtggtgaaccatacaagtttatcaaattatgcatttctgtatggtgtatttcctgtagcaccaggagtggctatctttgcaacacaattcaacatggaagtagaaattataacctcagggatggtgataagcacatttgtgtctgctcccatcatgtacgtttctgcctggttactgacctttcccactatggaccctaagccattggcatatgccatccagaatgttagttttgatataagtattgtcagcctgatctccttgatctggtctctggctattcttcttttgagtaagaaatataaacagcttcctcatatgcttacaactaatttactcattgctcagtctattgtctgtgctggaatgatgatatggaattttgttaaagaaaaaaattttgttggacaaattttggtgtttgttctattgtacagctccctctatagcacctacctgtggacaggccttctagcaatttctttgtttcttttgaaaaagcgagagagggtacaaattcctgttggaataatcataatatctggctggggaattcctgctctccttgttggtgttcttttgataactggaaaacacaatggagatagcattgactcagccttcttttatggaaaagaacagatgatcaccacagcagtcaccctgttctgcagcatcctgatagctggcatatccctcatgtgcatgaaccagactgcccaagcaggaagctatgaaggtttcgatcagtctcagagccacaaagtggtggagcctggaaatactgcttttgaggagagtccagcaccagtaaatgaaccagaactttttacaagctctattccagaaacaagttgctgctcctgctccatgggaaatggtgaattacactgcccatcaatagagccaatagcaaacacaagcaccagtgagcctgtgattccttcgtttgagaaaaacaatcattgtgtgagtcgctgtaactcccagagctgcatattagcccaggaagaagaacagtatctacagagtggagaccagcaactgacccgacatgtgttgctgtgtttacttctcatcattggcctgttcgctaatctttccagttgtttatggtggctattcaaccaagagcctggaagactttatgttgagttacagtttttctgtgccgtgtttaactttggtcagggatttatttcctttggaatctttggattagataaacatttaatcatcctgcctttcaaaagaagacttgaattcctatggaacaataaagacacagcagaaaacagggattctcctgtttcagaggaaataaaaatgacctgtcaacaatttatccattatcaccgtgacctctgtatccgaaacattgtcaaagaaagaaggtgtggtgcaaagacttctgctggaactttctgtggctgtgacctggtgagctggctaattgaagtcggccttgcctccgaccgtggtgaagctgtgatatacggagacaggctggtacaagggggagtcatccaacatattaccaacgagtatgaattccgggatgagtacttgttttacagatttcttcaaaagagtcctgaacagagtcctcctgctattaatgcaaacactctccaacaggaaagatataaagaaattgagcattcatccccaccctcacattcccctaagacctaaattatgcaggggagaaccctacatggaatcatattctagccgcgtattcattagtttttagctgggtgaccttgggcaagttaacagaggcaacctctctgagcctcagttgtctcttctgtaaaatgtgaaaagatgtgctcccaccacatgcgcagggtctgtgattttacatgtatgtaaaacacataggaagctgacttaggaaaaagagaaaaccaaattaaagttctgataatgaatataatatagtcatcctttagtatccaaggggattggttccaggactcctgaagatcccaaaatctgaggatactcaagtcccttatataaaatggtgtaggccgggcatggtggctcacgcctgtaatcccagtactttgggaggccgagtcaggtggatcacctgaggtcaggagttcaagaccagcctggccaacatggcgaaaccccgtctctactataaaatacaaaaaattagttgggtgtggtggcgggtgcctgtaatcccagctactcaggaggctgaggcaggagaatcgcttgaatctgggaggcagaggttgctgtgagccgagatcgtgccactgcactccagcctgagcaacagagcaagactctatctcaaaaataaaataaaataaaataaaataattaataaaatggtgtagtatttgcatataacctatgcacattctcccatatagtttaatcatctttagatacttataatgcctaatacaatgtaaatgctatgtaaatagttgttgttatactgtattgtttagggaataacaataagaaaaacagtctgtacatgttcactacagatgcaaccattgttaagcctgactacatctttttatctgcggttgattgaatctatggatgtggaacctgtgcatatggagggtcaactgtactataaataatacgaatatgccaacattatataatcattgctttctgcaactgtttactataatttcaaaattaatatcctattaactgttcctataaattatcaaatttggcaagtgtattactagcaggagatggaccttaaattatgacaactttatattttttgatagcatctcttgaaaaagaattttaatgattctaataagaggttctttttcttttttccatttccttgacaaatagtactcatttaaaaactagagggctaggcttagtggctcacgcctgtaatctcagcactttgggaggctgaggcgggcagatcgcttgaggtcaggagttcaagaccagcccgggcaacgtggtgaaacccggtctgtactaaaaaaaaaaaaaaagaaaaagaaaaagaaaaaagaatacccaggtgtggtagtgcatgcctgtagtcccagctactttggagactgaggtgggagtaccccttgagcctgggaggcgcaggttgcagtgaaccaagatcacatcactgcacttcaacctgggtgacagagcaagaccctgtctcaaaaacaaaaaacaagcaaaaaaaacctagaggcactatttttttttaaagtttgtcttttcttttctacccaaattactaatctatgccattaaggaaaggaataagaacctccatatgtattattatctccacagtcctgcagaagtacaatctgatctttaactttcatgctacaaataataatttgagtagattaatttgaattttatcaacaaaattattgccatatgatgtatcatttctgtgtttgaacaaagcatcgtaatgcaggataacttctactttattccctgtagttaaaaaaaaaaaaactatatagttcaagccaatatttaaaaattctaaacctaggctgggcatggtgactcatacctgtaatcccagcactttgggaggccgaggcaggtgaattgcttcagcccaggagttcgagaccagcctggccaatgtggtgaaaccccatctctactaaaaaaaaaaaaaaaaaaaaaaattagccaggtgtggtggtgtgcacctgtaatcccagctacccaggaggctgaggcaggaaaattgcttgaaaccaggaggcagaggttgcagtgagctgagatcgtgccactgcactccagcctgagtgtcagagtgagactctgtctcagaaaaaaaaaaaaaaattctaaagattacatttagaatttagtctttttaaagtgtccatgtataaaaatatataatttttaaaattactaaatgttgccttttctcttagtctaatattttagctactaaaacaaaatataaactggatagcttataaacaacataaacttatttctcacagttttggaggctgtgaagtccaagattaaggcactaacagatctagtgtctggtaaggcaaatttctggctcatagatggtaccttcttgctgtgtccccacatggtagatgggaagaactggtctcattggccccttataaggacattaattccactcaataggctccaccctcatgatctaataacctctcaaaggccctacctcctaatactaacacattgaggatgtgacttcaactttacatttctacaggcagagaagtggggctgtgtaaattcttcccatcagtacttgaatgttcatttaacaaataacttatcgagcatctagcatgttccagacacaatctgaacactgagcacacaacagttggaacaaatatgattcctatcctcatggagcttctattctcctgtgaaaaacagatgttaaacatgattgaggattaggtttcaacataagaattctaggaggacacagacatttagaccatagcatcttcaggtaaactttatcttcagtaaattaaagagatctatttagatgacctttgagcatcttaattattagatgtcagtgctagtttaacttattttaaacgtttcagatatttatttaattatactttaagtgtctcatgtaaaaaagttatttataaaataatttatagggttagagtcattgcccttttaatgcaacaaataaacagttttttaaaaacctgcatgggggccaggcgcggtggttcatacctgcaatcccagcactttgggaggtcgaggctggcggatcacgaggtcaggagatcgagaccaccctgattaatgcggtgaaatcccgtctctactaaaaatacaaaaaattagccagacgtggtggtgggcacctatagtcccagctactcgggaggctgaggcaggagaatggcatgaacccggaaggcggagcttgcagtgaaccaagatcgcgccactgcactccagcctgggcgacagagtgagactccatcgcaaaaaaaaaaaaaaaaaaacctgcatggaagcctagtatatttattaataacaaataaattatactttagtgtactattaacctataccaattttaagttgtgattagggaatggggatgtttttaagctgaattgtcttgctgcggaactttccttttttaataagaccatattatgactctgaatgctcaagggtaagtctaaggcctcattgctgttaccaggagatttttctagttacagtaataaagatgttaattcacatgcatgcagacaactgaaactcaagtggagaatttgtttgtgaacaagtcatactacttctgttatttgcatgaatggaatctgcaatatctttttccatgggagaccctaaaagaaaaccctggatcagaatgatctgcagtttcagataataaaggcttttaagagacatttttagaattaaaaatatgctaattttattaaatgaaaatatttgtaactgttaactttctcactgacaaagcaagtttctcaataaaatacctattttaacttgca

SEQ ID NO: 135931 - DNA, 7321 bp, Homo sapiens
  Payload ID: 6577
  Gene Symbol: GPR155
  Gene Name: G protein-coupled receptor 155
  ENST ID: ENST00000614352
  CDS Start-End: 248-2776
ggggcctcgcggccggcgaggggctgagctgacagggccgcatcggcttaccccaccttactttatcggaacgtgcctaagctgctgcagctggcacccggttgcgctcggcgaagagggctgggggcgggagatgacggtggtcttctccctgcttggcaccctgcgagcaccagctcccttctcctcgccactccaaggttgcagacgaagcagagatctggttggagttggagggtgagagaaaatgaattctaatttacctgcagagaacttaaccattgcagtcaatatgaccaagactttgcctacagcagtaacgcatggatttaattccactaatgacccaccttcaatgtcaattacaaggctttttccagccttactggaatgctttggcattgtcctttgtggctacatagcaggaagggccaatgtcataacatcaacccaggccaaaggactaggaaattttgtctccagatttgcacttccagctttattattcaaaaacatggttgtacttaatttttccaatgtggactggtccttcctatatagtatcttaattgccaaagcttctgtatttttcattgtatgtgtattaaccttattggttgccagtcctgatagtcgatttagcaaagctggactattccctatttttgctacacaaagtaatgactttgcattgggataccctatagttgaagctttatatcaaactacatacccagaatatctccagtacatttatttggtggcaccaatatctcttatgatgttaaaccctatagggtttattttctgtgaaatccaaaagtggaaagacactcaaaatgcttctcaaaataaaataaaaattgtgggactcggactcctgcgtgtattacagaacccaatagtatttatggtcttcattggcatcgccttcaattttattcttgatcgaaaggtacctgtatatgtcgaaaattttcttgatggacttggaaattctttttctggatcagccctattttatcttggtctcacgatggtgggaaaaataaagagactgaagaagtcggcatttgtagtactaattcttctcatcacagctaaacttctggtgctgccacttctgtgcagagaaatggtggaactcttggacaagggcgacagtgtggtgaaccatacaagtttatcaaattatgcatttctgtatggtgtatttcctgtagcaccaggagtggctatctttgcaacacaattcaacatggaagtagaaattataacctcagggatggtgataagcacatttgtgtctgctcccatcatgtacgtttctgcctggttactgacctttcccactatggaccctaagccattggcatatgccatccagaatgttagttttgatataagtattgtcagcctgatctccttgtctattgtctgtgctggaatgatgatatggaattttgttaaagaaaaaaattttgttggacaaattttggtgtttgttctattgtacagctccctctatagcacctacctgtggacaggccttctagcaatttctttgtttcttttgaaaaagcgagagagggtacaaattcctgttggaataatcataatatctggctggggaattcctgctctccttgttggtgttcttttgataactggaaaacacaatggagatagcattgactcagccttcttttatggaaaagaacagatgatcaccacagcagtcaccctgttctgcagcatcctgatagctggcatatccctcatgtgcatgaaccagactgcccaagcaggaagctatgaaggtttcgatcagtctcagagccacaaagtggtggagcctggaaatactgcttttgaggagagtccagcaccagtaaatgaaccagaactttttacaagctctattccagaaacaagttgctgctcctgctccatgggaaatggtgaattacactgcccatcaatagagccaatagcaaacacaagcaccagtgagcctgtgattccttcgtttgagaaaaacaatcattgtgtgagtcgctgtaactcccagagctgcatattagcccaggaagaagaacagtatctacagagtggagaccagcaactgacccgacatgtgttgctgtgtttacttctcatcattggcctgttcgctaatctttccagttgtttatggtggctattcaaccaagagcctggaagactttatgttgagttacagtttttctgtgccgtgtttaactttggtcagggatttatttcctttggaatctttggattagataaacatttaatcatcctgcctttcaaaagaagacttgaattcctatggaacaataaagacacagcagaaaacagggattctcctgtttcagaggaaataaaaatgacctgtcaacaatttatccattatcaccgtgacctctgtatccgaaacattgtcaaagaaagaaggtgtggtgcaaagacttctgctggaactttctgtggctgtgacctggtgagctggctaattgaagtcggccttgcctccgaccgtggtgaagctgtgatatacggagacaggctggtacaagggggagtcatccaacatattaccaacgagtatgaattccgggatgagtacttgttttacagatttcttcaaaagagtcctgaacagagtcctcctgctattaatgcaaacactctccaacaggaaagatataaagaaattgagcattcatccccaccctcacattcccctaagacctaaattatgcaggggagaaccctacatggaatcatattctagccgcgtattcattagtttttagctgggtgaccttgggcaagttaacagaggcaacctctctgagcctcagttgtctcttctgtaaaatgtgaaaagatgtgctcccaccacatgcgcagggtctgtgattttacatgtatgtaaaacacataggaagctgacttaggaaaaagagaaaaccaaattaaagttctgataatgaatataatatagtcatcctttagtatccaaggggattggttccaggactcctgaagatcccaaaatctgaggatactcaagtcccttatataaaatggtgtaggccgggcatggtggctcacgcctgtaatcccagtactttgggaggccgagtcaggtggatcacctgaggtcaggagttcaagaccagcctggccaacatggcgaaaccccgtctctactataaaatacaaaaaattagttgggtgtggtggcgggtgcctgtaatcccagctactcaggaggctgaggcaggagaatcgcttgaatctgggaggcagaggttgctgtgagccgagatcgtgccactgcactccagcctgagcaacagagcaagactctatctcaaaaataaaataaaataaaataaaataattaataaaatggtgtagtatttgcatataacctatgcacattctcccatatagtttaatcatctttagatacttataatgcctaatacaatgtaaatgctatgtaaatagttgttgttatactgtattgtttagggaataacaataagaaaaacagtctgtacatgttcactacagatgcaaccattgttaagcctgactacatctttttatctgcggttgattgaatctatggatgtggaacctgtgcatatggagggtcaactgtactataaataatacgaatatgccaacattatataatcattgctttctgcaactgtttactataatttcaaaattaatatcctattaactgttcctataaattatcaaatttggcaagtgtattactagcaggagatggaccttaaattatgacaactttatattttttgatagcatctcttgaaaaagaattttaatgattctaataagaggttctttttcttttttccatttccttgacaaatagtactcatttaaaaactagagggctaggcttagtggctcacgcctgtaatctcagcactttgggaggctgaggcgggcagatcgcttgaggtcaggagttcaagaccagcccgggcaacgtggtgaaacccggtctgtactaaaaaaaaaaaaaaagaaaaagaaaaagaaaaaagaatacccaggtgtggtagtgcatgcctgtagtcccagctactttggagactgaggtgggagtaccccttgagcctgggaggcgcaggttgcagtgaaccaagatcacatcactgcacttcaacctgggtgacagagcaagaccctgtctcaaaaacaaaaaacaagcaaaaaaaacctagaggcactatttttttttaaagtttgtcttttcttttctacccaaattactaatctatgccattaaggaaaggaataagaacctccatatgtattattatctccacagtcctgcagaagtacaatctgatctttaactttcatgctacaaataataatttgagtagattaatttgaattttatcaacaaaattattgccatatgatgtatcatttctgtgtttgaacaaagcatcgtaatgcaggataacttctactttattccctgtagttaaaaaaaaaaaaactatatagttcaagccaatatttaaaaattctaaacctaggctgggcatggtgactcatacctgtaatcccagcactttgggaggccgaggcaggtgaattgcttcagcccaggagttcgagaccagcctggccaatgtggtgaaaccccatctctactaaaaaaaaaaaaaaaaaaaaaaattagccaggtgtggtggtgtgcacctgtaatcccagctacccaggaggctgaggcaggaaaattgcttgaaaccaggaggcagaggttgcagtgagctgagatcgtgccactgcactccagcctgagtgtcagagtgagactctgtctcagaaaaaaaaaaaaaaattctaaagattacatttagaatttagtctttttaaagtgtccatgtataaaaatatataatttttaaaattactaaatgttgccttttctcttagtctaatattttagctactaaaacaaaatataaactggatagcttataaacaacataaacttatttctcacagttttggaggctgtgaagtccaagattaaggcactaacagatctagtgtctggtaaggcaaatttctggctcatagatggtaccttcttgctgtgtccccacatggtagatgggaagaactggtctcattggccccttataaggacattaattccactcaataggctccaccctcatgatctaataacctctcaaaggccctacctcctaatactaacacattgaggatgtgacttcaactttacatttctacaggcagagaagtggggctgtgtaaattcttcccatcagtacttgaatgttcatttaacaaataacttatcgagcatctagcatgttccagacacaatctgaacactgagcacacaacagttggaacaaatatgattcctatcctcatggagcttctattctcctgtgaaaaacagatgttaaacatgattgaggattaggtttcaacataagaattctaggaggacacagacatttagaccatagcatcttcaggtaaactttatcttcagtaaattaaagagatctatttagatgacctttgagcatcttaattattagatgtcagtgctagtttaacttattttaaacgtttcagatatttatttaattatactttaagtgtctcatgtaaaaaagttatttataaaataatttatagggttagagtcattgcccttttaatgcaacaaataaacagttttttaaaaacctgcatgggggccaggcgcggtggttcatacctgcaatcccagcactttgggaggtcgaggctggcggatcacgaggtcaggagatcgagaccaccctgattaatgcggtgaaatcccgtctctactaaaaatacaaaaaattagccagacgtggtggtgggcacctatagtcccagctactcgggaggctgaggcaggagaatggcatgaacccggaaggcggagcttgcagtgaaccaagatcgcgccactgcactccagcctgggcgacagagtgagactccatcgcaaaaaaaaaaaaaaaaaaacctgcatggaagcctagtatatttattaataacaaataaattatactttagtgtactattaacctataccaattttaagttgtgattagggaatggggatgtttttaagctgaattgtcttgctgcggaactttccttttttaataagaccatattatgactctgaatgctcaagggtaagtctaaggcctcattgctgttaccaggagatttttctagttacagtaataaagatgttaattcacatgcatgcagacaactgaaactcaagtggagaatttgtttgtgaacaagtcatactacttctgttatttgcatgaatggaatctgcaatatctttttccatgggagaccctaaaagaaaaccctggatcagaatgatctgcagtttcagataataaaggcttttaagagacatttttagaattaaaaatatgctaattttattaaatgaaaatatttgtaactgttaactttctcactgacaaagcaagtttctcaataaaatacctattttaacttgcattactgacatcttttctttgagtaatctgaataatgcagaagccatcatagaggtcttttctatacattctcaatgttttcttaaatgggtttcctgagttctgttcttcatgactctgggctctgcaaacagggtttcccaattacgcattctataaacacttttatgaatgagtcaatatgacattgagtccttttcatacatttcatcatttccaatatgtagagtgacagctagaaaaatgataaaattttgattaaaacctatctctttttcttcagcatagtcaattgttttcttaactctcaatgagtaactccatgcctagcttgtgcttagctttcaatatttttagactaagacaaagtgtatttggcattttgagaacaacaattaatggtcagtaaatttctaaagcaagaaaaatgtgaaactagtgttttatatgtttgttacgcagcagaatgcggctcttagtgtttgccccttcatatctcatcatgtaaaatattaaattactttaggccactgcacataggtagtcctgtcatgagtgatggctggagaaaagttcaggatcataaatgttatcatcattcttcaagaaaagatgagattataaatttctgcaattggtatgataaaaggttgaaataattaatgaaa

SEQ ID NO: 135932 - DNA, 4193 bp, Homo sapiens
  Payload ID: 6578
  Gene Symbol: GPR156
  Gene Name: G protein-coupled receptor 156
  Uniprot ID: Q8NFN8
  ENST ID: ENST00000315843
  CDS Start-End: 198-2642
ggagcctagcgaaataaccctttgcttctacctgaatgggttgttcactctggattctgagcctgcagccagctccaaaatggggcctctgaagaaaagatttgagttgctcttgtgtcttagtcaaagatctacatccctaccagtgggtaaccaagactgtgaataagcacacaccaacaggggcatgtggtgacatggagcctgaaataaactgctctgaattgtgtgacagttttcctggccaggagctggatcggagaccccttcatgatctctgcaagacaacaattacatcttcccaccacagcagtaagaccatctcttcattatctcctgtcctcttgggtattgtttggacttttctcagctgtggacttctgctgatacttttctttcttgcctttacaattcactgcaggaagaacaggattgtgaagatgtccagtcccaatctgaacattgtgaccttactgggcagttgtctcacttacagtagcgcttacctctttgggattcaggatgttttagtggggagctcaatggaaactctcattcagacaagactgtccatgctgtgcattgggacctcccttgtgtttggccccattctgggaaagagctggcgactctacaaggtgtttacccaaagggtcccggacaagagagtgattatcaaagacctgcagttgctggggttggtggcagccctgttgatggctgatgtgatcctgctcatgacgtgggtgctgactgatcccatccagtgcctccagattctcagtgtcagtatgacggtgacagggaaagacgtgtcctgcacttcgaccagcacccacttctgtgcttcccggtattccgatgtttggattgctctcatttggggatgcaagggtctgctcctgctgtatggtgcctacctggctggcctgactggccatgtcagctcccctcctgtgaatcagtccttaaccatcatggtgggggtcaacctccttgtactggctgctgggctgctttttgtagtcaccagatacttgcattcctggcccaacctggtctttggactcacatctggagggatctttgtttgtacaactacaatcaactgcttcatcttcattccccagctgaagcaatggaaggcatttgaagaggaaaaccaaacaatcagacgcatggccaaatatttcagcactcccaacaaaagcttccatacccagtatggtgaggaggagaactgccacccgaggggagagaaaagctccatggagaggctcctcacagaaaaaaatgctgtgattgaaagcctgcaggaacaagtaaacaacgccaaagagaagattgtgaggctgatgtcagctgagtgcacctatgacctcccagagggggctgccccacctgcctcttccccgaacaaggacgtccaggcggtagcctcggtccacaccctggcagctgctcaggggccttcgggtcacctctctgactttcagaatgatcctggcatggctgcccgggattcccagtgcacttcagggccctcctcatatgcacaaagccttgaggggcctgggaaggactccagcttctccccagggaaggaggagaagatatctgactcaaaagacttttctgatcatttagactcaggttgtagccagaagccatggactgagcaaagcctgggtccagaaagaggagaccaagtccccatgaaccccagccagagtctcctaccagaaagaggcggctcagatccccagagacagaggcatctggagaactcagaggagcccccagagcggcggtcacgggttagttcagtaatcagggagaaacttcaggaggtcttacaagatctgggcctgggccctgaggcttccctctccaccgccccctcttgtcatcagcaaacctggaagaacagtgctgccttcagcccccaaaagatgcccctctccaaggagctcggctttagcccttacatggtgaggagaaggcgggcagctcagcgggcccgctcacactttcctggctctgcaccctcatctgtggggcatcgggcaaacaggactgttcctggggcacacagcaggctacatgtgcagaatggggacagccccagcctggccccacaaactactgattccagagtacgaagaccttcttccaggaagccttcactaccttcagatcctcaagacagaccaggtaccctggagggcagcaaacaaagccagacagagcccgagggggctagagggagcaaagcagcctttcttcgccagccttctggttctggccgggccccaagtcctgctgccccatgcctctccaaagcctcacctgacttgcctgaacagtggcagctgtggcccccagtgccctcaggctgtgcctccctgtcttctcaacacagctattttgatactgagtccagcagctcagatgagttcttctgccgctgccaccggccctactgtgaaatctgcttccagagctcttctgactctagtgacagtggcacatcagacactgaccctgagcctactggggggctggcttcctgggaaaagctgtgggcccgctccaagcctattgtgaacttcaaagatgacttgaaacccacgctggtgtgaaaagcaacagagctggtctagacacagaggtcagtccaagagaagctgtaccaaggcccacaggagaagagccaatttctggtctttggggaacagattagtgccctgcatttgaccagcccataccatgtttcagctaggctcactgtgttactttgagtacttcttgatctataaaaagagaggcattgcctgtcctgttactacctcgcagccttactataaaagactccagttgagtgactatgaaagacactgactccttggataaaaggtgctgaatgaacacataggattttctgtccaggtcagcctacattctgtaaaactcttaatatattcagatggatggctgaatggacagacagatggagagatgcatgggaaatttctgtagaacttgaggtgtggactgtgacccatcaaactggccttttggtggacagacctaccaggaagataagtctcctacatccttgggcctcccactcctggaaggcagtggttttatttctgctgaatgttgtgaacagcacctccctagattccagcttctggccagacccagctcagagccacccctacaccactatttcttgatggtgtctttccaccattatggcactttaccctcctctctgagacagatctccatgcgcccgcaggcttcccagatctctcccctgggatcggatgtacctgaggtcctgactgtccccactgtccccttgtcctgtggctcatcctcgattcacccactgatgcagttttgtactgcggggaggcacacaccagcaatttctgttggggtatgggagaacctgttggtcaagagtgcttttggttccattggggttacatgactaccaacagacacataaacctggaagccaaatggagaaataaaaaggaagacacgagggacacgaaaacaggaaagaaaacaggatttgaatatttcacttgagtccagcatagtacttggcaatatcatatttttgtgattccttttgataaccctgtgaagtagacactttcatttttacagacaaggattatgaggcttagagaaatgaggtagtttcccgcaacatcacactgctggacagagatgtacacacagctcctgggactcaagtaggtgggttttcccagggacacatggcttcatgtgttcttctgggaatggcaggtgacgcttggcagacgagacaacaaagcaaggctcatgtaagaaagctgggatgtgctcccctatagtccagaataatagacctgggtcctcacctcaggaaacgggcctccacttcctcactgccaaaggccacactggcacctcccaagggagctggggagctggtgaaggatgagtgcgaggaactcagccaccaccagagccacagggagagcacacctgggtccactgtgcttattgctgagctggctgtcatgtccaggctgtcccctgccccgagtcctgtgtatacatctgtgggtgtgcacatgtttgcatgaaggaattcaggccttattaaatattctcagaggggg

SEQ ID NO: 135933 - DNA, 4154 bp, Homo sapiens
  Payload ID: 6578
  Gene Symbol: GPR156
  Gene Name: G protein-coupled receptor 156
  ENST ID: ENST00000495912
  CDS Start-End: 23-259
accaacaggggcatgtggtgacatggagcctgaaataaactgctctgaattgtgtgacagttttcctggccaggagctggatcggagaccccttcatgatctctgcaagacaacaattacatcttcccaccacagcagtaagaccatctcttcattatctcctgtcctcttgggtattgtttggacttttctcagctgtggacttctgctgatacttttctttcttgcctttacaattcactgcaggaagaacagctgaagcaatggaaggcatttgaagaggaaaaccaaacaatcagacgcatggccaaatatttcagcactcccaacaaaagcttccatacccagtatggtgaggaggagaactgccacccgaggggagagaaaagctccatggagaggctcctcacagaaaaaaatgctgtgattgaaagcctgcaggaacaagtaaacaacgccaaagagaagattgtgaggctgatgtcagctgagtgcacctatgacctcccagagggggctgccccacctgcctcttccccgaacaaggacgtccaggcggtagcctcggtccacaccctggcagctgctcaggggccttcgggtcacctctctgactttcagaatgatcctggcatggctgcccgggattcccagtgcacttcagggccctcctcatatgcacaaagccttgaggggcctgggaaggactccagcttctccccagggaaggaggagaagatatctgactcaaaagacttttctgatcatttagactcaggttgtagccagaagccatggactgagcaaagcctgggtccagaaagaggagaccaagtccccatgaaccccagccagagtctcctaccagaaagaggcggctcagatccccagagacagaggcatctggagaactcagaggagcccccagagcggcggtcacgggttagttcagtaatcagggagaaacttcaggaggtcttacaagatctgggcctgggccctgaggcttccctctccaccgccccctcttgtcatcagcaaacctggaagaacagtgctgccttcagcccccaaaagatgcccctctccaaggagctcggctttagcccttacatggtgaggagaaggcgggcagctcagcgggcccgctcacactttcctggctctgcaccctcatctgtggggcatcgggcaaacaggactgttcctggggcacacagcaggctacatgtgcagaatggggacagccccagcctggccccacaaactactgattccagagtacgaagaccttcttccaggaagccttcactaccttcagatcctcaagacagaccaggtaccctggagggcagcaaacaaagccagacagagcccgagggggctagagggagcaaagcagcctttcttcgccagccttctggttctggccgggccccaagtcctgctgccccatgcctctccaaagcctcacctgacttgcctgaacagtggcagctgtggcccccagtgccctcaggctgtgcctccctgtcttctcaacacagctattttgatactgagtccagcagctcagatgagttcttctgccgctgccaccggccctactgtgaaatctgcttccagagctcttctgactctagtgacagtggcacatcagacactgaccctgagcctactggggggctggcttcctgggaaaagctgtgggcccgctccaagcctattgtgaacttcaaagatgacttgaaacccacgctggtgtgaaaagcaacagagctggtctagacacagaggtcagtccaagagaagctgtaccaaggcccacaggagaagagccaatttctggtctttggggaacagattagtgccctgcatttgaccagcccataccatgtttcagctaggctcactgtgttactttgagtacttcttgatctataaaaagagaggcattgcctgtcctgttactacctcgcagccttactataaaagactccagttgagtgactatgaaagacactgactccttggataaaaggtgctgaatgaacacataggattttctgtccaggtcagcctacattctgtaaaactcttaatatattcagatggatggctgaatggacagacagatggagagatgcatgggaaatttctgtagaacttgaggtgtggactgtgacccatcaaactggccttttggtggacagacctaccaggaagataagtctcctacatccttgggcctcccactcctggaaggcagtggttttatttctgctgaatgttgtgaacagcacctccctagattccagcttctggccagacccagctcagagccacccctacaccactatttcttgatggtgtctttccaccattatggcactttaccctcctctctgagacagatctccatgcgcccgcaggcttcccagatctctcccctgggatcggatgtacctgaggtcctgactgtccccactgtccccttgtcctgtggctcatcctcgattcacccactgatgcagttttgtactgcggggaggcacacaccagcaatttctgttggggtatgggagaacctgttggtcaagagtgcttttggttccattggggttacatgactaccaacagacacataaacctggaagccaaatggagaaataaaaaggaagacacgagggacacgaaaacaggaaagaaaacaggatttgaatatttcacttgagtccagcatagtacttggcaatatcatatttttgtgattccttttgataaccctgtgaagtagacactttcatttttacagacaaggattatgaggcttagagaaatgaggtagtttcccgcaacatcacactgctggacagagatgtacacacagctcctgggactcaagtaggtgggttttcccagggacacatggcttcatgtgttcttctgggaatggcaggtgacgcttggcagacgagacaacaaagcaaggctcatgtaagaaagctgggatgtgctcccctatagtccagaataatagacctgggtcctcacctcaggaaacgggcctccacttcctcactgccaaaggccacactggcacctcccaagggagctggggagctggtgaaggatgagtgcgaggaactcagccaccaccagagccacagggagagcacacctgggtccactgtgcttattgctgagctggctgtcatgtccaggctgtcccctgccccgagtcctgtgtatacatctgtgggtgtgcacatgtttgcatgaaggaattcaggccttattaaatattctcagaggggggcatttggctctaaatgtatcatcaatttatcatggaatcttgggggctgctgacacccctggactctccaggcactgaaccatgaggccctcctggaagcacagcttcttctatcatctacttttaaacaggaatttcctaatttattctgtgcatgggtttgcagtttcttgtgctgtgtgtgtgctgtccaagtggtaccataataaaagagaaatgactcccgagaggagtcttttcagaaactgtaatctggggctggccaggaggggcccggagaaggctgacccacccaaagaaggggaaccagagaagccatcagagctgctgccgggctaccctgggtcccagtgtaccttctaccaaagttccatttgaacagattcttctgtgttctccctaagaagcctcttatcccagaaacactccctcaatggacataggaaaccctggagaccctggactcttcctgcccctgggggtcctgtggctgggctccccctcctgcagctcccttcctcccagcatgccaccactagcagcccaccattcattcatgtggactctaaatctggcaatccttctagccttctcactctgtctgcttctagaaccttagtcccaccatccccgcccttctacatctccatccttctgtttagaattttttttcccactttgtgcccttgtgaattattcatccttcaaggctcaggtggagcatacattctttcttcaacctttcccagccatccccaaagaaagctgattgattccctagttaaataaggaaggatgggctggaagcagtggctcacgtctgtaatcccagcac

SEQ ID NO: 135934 - DNA, 4442 bp, Homo sapiens
  Payload ID: 6578
  Gene Symbol: GPR156
  Gene Name: G protein-coupled receptor 156
  Uniprot ID: Q8NFN8
  ENST ID: ENST00000464295
  CDS Start-End: 447-2891
ggggaccgtgggcgtcctgcacatagcagcgggcttggcgcttctcggcggtccgacgctgatgaggaaccagagtgagggtactcgaacagtgactgccatctggtggttaaccagaatcatcaccttgtgtagcctgatggttactaagatgtccactcttgactcacatggcatgcactcgcagcaggggaccagttgaaggatgtctgactttggagggtcaccagttgaaggatgtctgatgaaggagcctagcgaaataaccctttgcttctacctgaatgggttgttcactctggattctgagcctgcagccagctccaaaatggggcctctgaagaaaagatttgagttgctcttgtgtcttagtcaaagatctacatccctaccagtgggtaaccaagactgtgaataagcacacaccaacaggggcatgtggtgacatggagcctgaaataaactgctctgaattgtgtgacagttttcctggccaggagctggatcggagaccccttcatgatctctgcaagacaacaattacatcttcccaccacagcagtaagaccatctcttcattatctcctgtcctcttgggtattgtttggacttttctcagctgtggacttctgctgatacttttctttcttgcctttacaattcactgcaggaagaacaggattgtgaagatgtccagtcccaatctgaacattgtgaccttactgggcagttgtctcacttacagtagcgcttacctctttgggattcaggatgttttagtggggagctcaatggaaactctcattcagacaagactgtccatgctgtgcattgggacctcccttgtgtttggccccattctgggaaagagctggcgactctacaaggtgtttacccaaagggtcccggacaagagagtgattatcaaagacctgcagttgctggggttggtggcagccctgttgatggctgatgtgatcctgctcatgacgtgggtgctgactgatcccatccagtgcctccagattctcagtgtcagtatgacggtgacagggaaagacgtgtcctgcacttcgaccagcacccacttctgtgcttcccggtattccgatgtttggattgctctcatttggggatgcaagggtctgctcctgctgtatggtgcctacctggctggcctgactggccatgtcagctcccctcctgtgaatcagtccttaaccatcatggtgggggtcaacctccttgtactggctgctgggctgctttttgtagtcaccagatacttgcattcctggcccaacctggtctttggactcacatctggagggatctttgtttgtacaactacaatcaactgcttcatcttcattccccagctgaagcaatggaaggcatttgaagaggaaaaccaaacaatcagacgcatggccaaatatttcagcactcccaacaaaagcttccatacccagtatggtgaggaggagaactgccacccgaggggagagaaaagctccatggagaggctcctcacagaaaaaaatgctgtgattgaaagcctgcaggaacaagtaaacaacgccaaagagaagattgtgaggctgatgtcagctgagtgcacctatgacctcccagagggggctgccccacctgcctcttccccgaacaaggacgtccaggcggtagcctcggtccacaccctggcagctgctcaggggccttcgggtcacctctctgactttcagaatgatcctggcatggctgcccgggattcccagtgcacttcagggccctcctcatatgcacaaagccttgaggggcctgggaaggactccagcttctccccagggaaggaggagaagatatctgactcaaaagacttttctgatcatttagactcaggttgtagccagaagccatggactgagcaaagcctgggtccagaaagaggagaccaagtccccatgaaccccagccagagtctcctaccagaaagaggcggctcagatccccagagacagaggcatctggagaactcagaggagcccccagagcggcggtcacgggttagttcagtaatcagggagaaacttcaggaggtcttacaagatctgggcctgggccctgaggcttccctctccaccgccccctcttgtcatcagcaaacctggaagaacagtgctgccttcagcccccaaaagatgcccctctccaaggagctcggctttagcccttacatggtgaggagaaggcgggcagctcagcgggcccgctcacactttcctggctctgcaccctcatctgtggggcatcgggcaaacaggactgttcctggggcacacagcaggctacatgtgcagaatggggacagccccagcctggccccacaaactactgattccagagtacgaagaccttcttccaggaagccttcactaccttcagatcctcaagacagaccaggtaccctggagggcagcaaacaaagccagacagagcccgagggggctagagggagcaaagcagcctttcttcgccagccttctggttctggccgggccccaagtcctgctgccccatgcctctccaaagcctcacctgacttgcctgaacagtggcagctgtggcccccagtgccctcaggctgtgcctccctgtcttctcaacacagctattttgatactgagtccagcagctcagatgagttcttctgccgctgccaccggccctactgtgaaatctgcttccagagctcttctgactctagtgacagtggcacatcagacactgaccctgagcctactggggggctggcttcctgggaaaagctgtgggcccgctccaagcctattgtgaacttcaaagatgacttgaaacccacgctggtgtgaaaagcaacagagctggtctagacacagaggtcagtccaagagaagctgtaccaaggcccacaggagaagagccaatttctggtctttggggaacagattagtgccctgcatttgaccagcccataccatgtttcagctaggctcactgtgttactttgagtacttcttgatctataaaaagagaggcattgcctgtcctgttactacctcgcagccttactataaaagactccagttgagtgactatgaaagacactgactccttggataaaaggtgctgaatgaacacataggattttctgtccaggtcagcctacattctgtaaaactcttaatatattcagatggatggctgaatggacagacagatggagagatgcatgggaaatttctgtagaacttgaggtgtggactgtgacccatcaaactggccttttggtggacagacctaccaggaagataagtctcctacatccttgggcctcccactcctggaaggcagtggttttatttctgctgaatgttgtgaacagcacctccctagattccagcttctggccagacccagctcagagccacccctacaccactatttcttgatggtgtctttccaccattatggcactttaccctcctctctgagacagatctccatgcgcccgcaggcttcccagatctctcccctgggatcggatgtacctgaggtcctgactgtccccactgtccccttgtcctgtggctcatcctcgattcacccactgatgcagttttgtactgcggggaggcacacaccagcaatttctgttggggtatgggagaacctgttggtcaagagtgcttttggttccattggggttacatgactaccaacagacacataaacctggaagccaaatggagaaataaaaaggaagacacgagggacacgaaaacaggaaagaaaacaggatttgaatatttcacttgagtccagcatagtacttggcaatatcatatttttgtgattccttttgataaccctgtgaagtagacactttcatttttacagacaaggattatgaggcttagagaaatgaggtagtttcccgcaacatcacactgctggacagagatgtacacacagctcctgggactcaagtaggtgggttttcccagggacacatggcttcatgtgttcttctgggaatggcaggtgacgcttggcagacgagacaacaaagcaaggctcatgtaagaaagctgggatgtgctcccctatagtccagaataatagacctgggtcctcacctcaggaaacgggcctccacttcctcactgccaaaggccacactggcacctcccaagggagctggggagctggtgaaggatgagtgcgaggaactcagccaccaccagagccacagggagagcacacctgggtccactgtgcttattgctgagctggctgtcatgtccaggctgtcccctgccccgagtcctgtgtatacatctgtgggtgtgcacatgtttgcatgaaggaattcaggccttattaaatattctcagaggggg

SEQ ID NO: 135935 - DNA, 2525 bp, Homo sapiens
  Payload ID: 6578
  Gene Symbol: GPR156
  Gene Name: G protein-coupled receptor 156
  Uniprot ID: Q8NFN8
  ENST ID: ENST00000461057
  CDS Start-End: 19-2451
acaggggcatgtggtgacatggagcctgaaataaactgctctgaattgtgtgacagttttcctggccaggagctggatcggagaccccttcatgatctctgcaagacaacaattacatcttcccaccacagcagtaagaccatctcttcattatctcctgtcctcttgggtattgtttggacttttctcagctgtggacttctgctgatacttttctttcttgcctttacaattcactgcaggaagaacaggattgtgaagatgtccagtcccaatctgaacattgtgaccttactgggcagttgtctcacttacagtagcgcttacctctttgggattcaggatgttttagtggggagctcaatggaaactctcattcagacaagactgtccatgctgtgcattgggacctcccttgtgtttggccccattctgggaaagagctggcgactctacaaggtgtttacccaaagggtcccggacaagagagtgattatcaaagacctgcagttgctggggttggtggcagccctgttgatggctgatgtgatcctgctcatgacgtgggtgctgactgatcccatccagtgcctccagattctcagtgtgacagggaaagacgtgtcctgcacttcgaccagcacccacttctgtgcttcccggtattccgatgtttggattgctctcatttggggatgcaagggtctgctcctgctgtatggtgcctacctggctggcctgactggccatgtcagctcccctcctgtgaatcagtccttaaccatcatggtgggggtcaacctccttgtactggctgctgggctgctttttgtagtcaccagatacttgcattcctggcccaacctggtctttggactcacatctggagggatctttgtttgtacaactacaatcaactgcttcatcttcattccccagctgaagcaatggaaggcatttgaagaggaaaaccaaacaatcagacgcatggccaaatatttcagcactcccaacaaaagcttccatacccagtatggtgaggaggagaactgccacccgaggggagagaaaagctccatggagaggctcctcacagaaaaaaatgctgtgattgaaagcctgcaggaacaagtaaacaacgccaaagagaagattgtgaggctgatgtcagctgagtgcacctatgacctcccagagggggctgccccacctgcctcttccccgaacaaggacgtccaggcggtagcctcggtccacaccctggcagctgctcaggggccttcgggtcacctctctgactttcagaatgatcctggcatggctgcccgggattcccagtgcacttcagggccctcctcatatgcacaaagccttgaggggcctgggaaggactccagcttctccccagggaaggaggagaagatatctgactcaaaagacttttctgatcatttagactcaggttgtagccagaagccatggactgagcaaagcctgggtccagaaagaggagaccaagtccccatgaaccccagccagagtctcctaccagaaagaggcggctcagatccccagagacagaggcatctggagaactcagaggagcccccagagcggcggtcacgggttagttcagtaatcagggagaaacttcaggaggtcttacaagatctgggcctgggccctgaggcttccctctccaccgccccctcttgtcatcagcaaacctggaagaacagtgctgccttcagcccccaaaagatgcccctctccaaggagctcggctttagcccttacatggtgaggagaaggcgggcagctcagcgggcccgctcacactttcctggctctgcaccctcatctgtggggcatcgggcaaacaggactgttcctggggcacacagcaggctacatgtgcagaatggggacagccccagcctggccccacaaactactgattccagagtacgaagaccttcttccaggaagccttcactaccttcagatcctcaagacagaccaggtaccctggagggcagcaaacaaagccagacagagcccgagggggctagagggagcaaagcagcctttcttcgccagccttctggttctggccgggccccaagtcctgctgccccatgcctctccaaagcctcacctgacttgcctgaacagtggcagctgtggcccccagtgccctcaggctgtgcctccctgtcttctcaacacagctattttgatactgagtccagcagctcagatgagttcttctgccgctgccaccggccctactgtgaaatctgcttccagagctcttctgactctagtgacagtggcacatcagacactgaccctgagcctactggggggctggcttcctgggaaaagctgtgggcccgctccaagcctattgtgaacttcaaagatgacttgaaacccacgctggtgtgaaaagcaacagagctggtctagacacagaggtcagtccaagagaagctgtaccaaggcccacaggagaagagcca

SEQ ID NO: 135936 - DNA, 5265 bp, Homo sapiens
  Payload ID: 6579
  Gene Symbol: GPR157
  Gene Name: G protein-coupled receptor 157
  Uniprot ID: Q5UAW9
  ENST ID: ENST00000377411
  CDS Start-End: 144-1151
gggcgggggagcggccggacgcgggcggggcgggcgcctggacgcgagcctagggcgcctcggtgcccagacggcggcggcgtggccgcacgcgcggcccggcttctgtcctcgcggcgctccggctcctggccccccacgccatgcagccgtccccgccgcccaccgagctggtgccgtcggagcgcgccgtggtgctgctgtcgtgcgcactctccgcgctcggctcgggcctgctggtggccacgcacgccctgtggcccgacctgcgcagccgggcacggcgcctgctgctcttcctgtcgctggccgacctgctctcggccgcctcctacttctacggagtgctgcagaacttcgcgggcccgtcgtgggactgcgtgctgcagggcgcgctgtccaccttcgccaacaccagctccttcttctggaccgtggccattgcgctctacttgtacctcagcatcgtccgcgccgcgcgcgggcctcgcacagatcgcctgctttgggccttccatgtcgtcagctggggggtcccgttggtcatcactgtggcagccgtcgccctgaagaagattggctatgacgcctcggacgtgtctgtgggctggtgctggatcgacctggaggccaaggaccatgtcctgtggatgctgctgacggggaagctgtgggagatgctggcatatgtgctgctgcctctgctgtacctcctggtccggaagcacatcaacagagcgcacacggcactctctgagtaccggcccatcctctcccaggagcaccgcctgctgcgccactcctccatggcggacaagaagctggtgctcatcccgctcatcttcatcggcctcagggtctggagcaccgtgcggttcgtgctgaccctctgtggctccccggccgtgcagacgccggtgctggtggttctgcatggtatcgggaacacgtttcagggaggtgccaactgcatcatgttcgtcctctgcacccgcgccgtccgaactcggctcttctctctctgttgctgctgctgctcttctcagcctcccaccaagagcccggctggcactcccaaggctcccgcgccttccaagccaggagaatctcaggaatcccaagggaccccaggggaacttccaagcacctgagcttttgtcctttctagttctgtgcataggtgctgccttcctgggggtaggcacttctgtgagtccctgctgcaggggcagaagtgcatgtctgctgcaccagaagcccccgctattgatgctctcggctccattgggagagcagctgccaactcagcttcttctacctcctagatcctcaggcagcaagttccaccggtaccagcgtcctggcccacgggtgggcgttcatctgcataagggtagcagtgagattcgggaagccggtggcccacagctgtggccacagtgcccccacccagtggaccttgatgtcctgaggaccacacagcactgtttacaatctgagggacccacatctgtgcacctatcctctgtgtgattaaataagctgtcaggggccctcagagatgtgtccccatccacacatcatggagcagattcccggctggtcagggtgttaagattctctggagaacccggctttccttggagactttgctcaacagaggaaccagttgccattcaccaggttgaaggttcccctgaggttgcatggtgaccaccaggggcaagcacagcccggcgcagctgctcagggacagcagtctccccgggcctcctggcctctccctccatgggctgctaacccttgccgtagcttgggtttgagtgtcaagcacaggccagaatccacactcctgtccccacctgtcaatcacttcagacacaggttccctccttccaattccaaagctggaacaagggcaggaagaggcgtctcagggaacccccgaagaccccactgtctctccagctcctttcttagaatcctcctcttcttggggagaccaaaggggatgagtagggaggggttctggcttatttacttcttagtttagttttttgtaagtaaagtggccggagagatgagtaatccaaatacgattcctcaggccgggcacagtggctcacacctgtaaccctagcactttgggaggccaaggcaggcagatcacctgaggtcaggagttcaagaccagcctggccaacatggtgaaaccctgtctctactaaaaatacaaaaattagccaggcatggtgatgcacgtctgtaatcccaggtctttgggaggctgaggcaggagaatctcttgaacctgggaggcggaggttgcggtgagccaagaccacaccattgcactccagcctgggcaacaagagtgaaactcggtctcaaacaaacaaatacgatttcttcctaaaggtgaaggttttaagcttcagagtcagtttttttttttttttttttttaaaaaaggagcctcattctgtcgcccggagctgatgtggtggtgcgtgcctgtagtccctactactcaggaggctgagacgggaggatcccttgagcccagggatttgaggcttcattgaactgggatggcaccactgccactccagcctgggcaacagcaggaccctgtctcaaaaaaagaaaaaaacaaaggattcaaaaggattcagctgttttgtattcagctgaggtaagtggcggcatggagcatggagcgattatttacatttaaaagaaaagaattgaaagtaagcacctgtatctctatttttattctgtgggtcttccacaaacgctttcgtcttatttcagaaaacagcttctgtgttcagtcacaggagccatcggcaaagaatggaagtggaaatgctacctccagggtcttggtgagagaaagtacagctttacctgataggtgatttcccttggaatccatcagaactcgacaaagcatgattttctgagcctagtaaaatggttctgaatcaaaaccgaagtcacgctgtgctgccgatccctgtttgactctcaaaaccaaaatctgtatcaggaaaggaataatcatttagcagactgagtccaaaatgctcatttttggtttcctgtgaaaatggatttctttttgtcgctttctttttttttttttttttttttgagatggagtctcactctattgcccaggctggagtgcagtggtgcaattttgactcactgcaaccaccgcctcccaggttcaagcgattctcctgcttcccaatcccaagctgctgggattacaggcatgcgccaccatgctcggctaattttttgtattttcagtagagacgggttttcaccatgttggccaggctggtctcgaactcctgacctcaggtgatccacccacctcagcctcccaaaatgcttcgattgcaggcatgagccactgtgcctgtccaagaaaacagatttcttgatggaaattagtgagacagacatccccttaggattgaaagagagctctgggctgctccagggaaagccacttggcagaaatagcctctgtaagtgaattctggattcccctgaagacgttacagcaaatctctgggtatgtctctggtaaagaccctcacttgagcttctagaagggagcgaaaattcaggaatttgcttgctgcaaaagagaacatgattaacaggtaaaagagaaaagacaatataggccacagaggaatagtgttaggatcaaccctgctcagcaggggcctctggagccctccctgctgtacccaagccagagctgagacatggctccccagatggactggctgtggtcaggaaaggcctgtagagggagctgagggctcagaaaatacctgctccgggtgcctgggctcaagttctcattccatttctttgatgccactggccactgtatctgcttttgtaaaaacctccaaaaagttatacatcaggtatctctagtcagcttcctccgctgcccacctcttgccacagatgagtgatcactgtgaatggtggtgaccaggtgggcagggcaggggcttgtctaagtgccttagcccaggcccctggcccatcgacctcgaaaacagcaatatcgcctccttcttagatccagttaccaagtcagtctagctgggtgggtagtgctcagacagaaaggctggatgggaaggaagtcacatcctaaaagtccaggagggggccaggcgcagtggctcacgcctgtaatcccagcactttgggagaccaaggtgggcagatcacctgaggtcaggagtttgagaccagcctggccaacatggtgaaaccctgtttctactaaatatacaaaaaaaaaaaaaatagttggatgtggtttcgtgtgcctgtagtgccagctactcaggaggctgaggcaggagaattgcttgaacccagaaggcagaggttgcagtgagccgagactgcaccactgcactccagcctgggtgacagagcaagactccatctcaaaaaataaaacaagtccaggaggggctgttacttctttttagtttatttatttttgtgaggcagggttttgctgtctggagcatcatacccagtctggagtgcagtgatgcaatcatggctcactgcagcctccacctcccaggctcaagcgatcctcccacctcagctccctgagaagctgggaccacaggcctggctaaattttgactttttgtagagacaaggttttgccatgttgcccagtcagatctcaagcgaggggctgttacatctgatcagggcaaaaggggctgtgctccttggacactttgcacagccccagtgggcttctttctcctctgttagtgtggttaatgttcatctgcctgcatccctgagtcacccaagtgtaacctcagccataacacgtactgcagccggaacggtgtccgcagctcagcgtccctctcccatgcactttctgaactttggtcttttaaccaggtttaccagccgctttctgcctctttgtgcttttgagggttttttggtttgtttgttctgttttgtttttaaataaagatgattatttggcccaggctgagggtgcaaacagaactcttcacgtgtccacgacaagaaaaatagtttttacaaacttctagttgtggcatcaaaagtgtgagtttttgcacctgcaaaattgtaatgcaagccctgactgggtggaagctgaagtcttgctgttttaaattaaataaataaattatttttctccta

SEQ ID NO: 135937 - DNA, 198 bp, Homo sapiens
  Payload ID: 6579
  Gene Symbol: GPR157
  Gene Name: G protein-coupled receptor 157
  ENST ID: ENST00000465853
  CDS Start-End: 1-198
tgtggatgctgctgacggggaagctgtgggagatgctggcatatgtgctgctgcctctgctgtacctcctggtccggaagcacatcaacagagcgggtatcgggaacacgtttcagggaggtgccaactgcatcatgttcgtcctctgcacccgcgccgtccgaactcggctcttctctctctgttgctgctgctgct

SEQ ID NO: 135938 - DNA, 6959 bp, Homo sapiens
  Payload ID: 6580
  Gene Symbol: GPR158
  Gene Name: G protein-coupled receptor 158
  Uniprot ID: Q5T848
  ENST ID: ENST00000376351
  CDS Start-End: 360-4007
aatgagagcggcggtggcggcagccgggccgagagacggactcgggctgactccagccgctgggagcgcgaggccatgtaacccgctcggctccaggctgcgaggtgcgtaatccccagccggcccctcgcgcagcgggcacggccagcgctgccacaggtgacttgatttctgcgacggtagcttagccacccggggccaatctcgaaacattcttattttcaagtcctttggactgggtgccatctggagaagggggaagactcctcgaaaaagtctgactgttgagaaactgacgatccaaatttaaaaagtgattcccccccctcccgttccctcctcttctctctgggaggcagatgggagccatggcttaccccttactcctctgcctcctgcttgctcagctgggattgggagctgttggcgccagccgcgacccccaaggacggccggattcccctcgagagaggaccccgaaggggaagccgcacgcccagcagccgggtcgagcctctgcctcggactcctcggctccctggagccgctccaccgatggcaccatcttggcgcagaaactcgccgaggaggtgcccatggacgtggcctcttacctctacaccggggactcccaccagctgaagcgagccaactgctccggccgctacgagttggcgggcctgccggggaagtggccagccctggccagcgcgcacccctccttgcaccgggcgctggacacactgacacacgccaccaacttcctcaacgtgatgctgcagagcaataagtcgcgggagcagaacttgcaggacgacctggattggtaccaggcgctggtgtggagccttctggagggcgagcccagcatctcccgggcggccatcaccttcagcaccgattcgctgtccgcaccggccccacaggtcttcctccaggccacgcgcgaggagagccgcatcctgctccaagacctgtcctcctccgcaccccacctggccaacgccactctggagaccgagtggttccacggcctccggcgcaagtggaggccccacttacaccgccgcggccccaatcaggggccccggggcctgggccacagctggcggcgcaaggacgggctcggcggggacaagagccacttcaagtggtctccgccttatctggagtgcgagaacgggagttacaagcccgggtggctggttactctttcctctgccatctacgggttgcagcctaacctggtcccggaattcaggggtgtcatgaaagttgacataaatcttcagaaagtggacattgaccaatgctcaagtgatggctggttttcaggaactcataaatgccacctcaacaattcagagtgtatgccaattaaaggcctaggattcgttcttggagcctatgagtgcatttgcaaagcaggattctatcatcctggagtcttaccagtgaacaactttcggagaaggggtccggatcagcatatttcaggaagtacaaaagatgtgtcagaagaagcctatgtctgcctaccttgcagggagggctgccccttctgtgctgatgacagcccatgcttcgtccaggaagataagtatttacgacttgccatcatctccttccaagccctgtgtatgctgctcgacttcgttagcatgctggtggtctaccactttcgcaaagcaaagagcatccgggcatcgggccttatcctgttggaaacgatcctttttggatctctgctcctatactttccagttgttattttgtactttgagccaagcacatttcgctgtattctcctaagatgggctcgtcttctcggttttgctactgtttacggaactgtcactctcaaacttcacagggttttgaaggtgtttctttcacgaacggctcaacgaattccatatatgactggcggacgggtcatgaggatgctggcagtaatactcttggtagtgttttggtttctcattggctggacttcatctgtgtgccagaatttggagaaacagatttcacttattggccaggggaaaacatccgatcacctcatcttcaatatgtgcctcattgaccgctgggactacatgacagcagttgctgaatttttattcctcttgtggggtgtttatctctgctatgcagtgcggacagtcccatcggcattccatgagccccgctatatggctgttgcagttcacaatgagctcatcatctctgctatattccatacaattagatttgttcttgcctcaagacttcagtctgattggatgttgatgctgtattttgcacatactcatttgactgtgacagtcaccattgggttgcttttgattccaaagttttcacattcaagcaataacccacgagatgatattgctacagaagcatatgaggatgagctagacatgggccgatctggatcctacctgaacagcagtatcaattcagcctggagtgagcacagcttggatccagaggacattcgggacgagctgaaaaaactctatgcccaactggaaatatataaaagaaagaagatgatcacaaacaacccccacctccagaaaaagcggtgctcgaagaagggcctaggtcgttccatcatgagacgcattacggagatcccagagacagtcagccggcagtgctctaaagaggacaaggagggcgccgaccatggcacagccaaaggcactgccctcatcaggaagaaccccccagagtcttcagggaacacagggaaatccaaggaggagaccctgaaaaaccgagtcttctcactcaagaaatcccacagcacttatgaccacgtgagagaccaaacggaagagtccagtagcctacccacagaaagccaagaggaggagacaacagaaaattccacactggaatccctgtcgggtaaaaaactaacacaaaaactaaaagaagacagcgaggctgagtccacggagtcggtgccgttggtgtgcaagtcagcaagcgctcacaacctcagctcagagaagaaaactgggcacccacgaacatcgatgttacagaagtctctcagtgtcatagcaagcgccaaggagaagactcttggattagctgggaaaacccaaacagcaggtgtggaagaacgcactaaatcccagaaacctttgccaaaagataaagagacaaacagaaatcactcaaattctgataacacagagactaaagatcctgccccccaaaactcaaatcctgcggaggagccaagaaagcctcagaaatctgggattatgaaacaacaaagggtcaaccccaccactgccaattctgacctgaacccaggcaccacccagatgaaggacaactttgacattggggaggtgtgtccttgggaggtttatgacctgacccctggtcctgtgccttcagaatcaaaagttcaaaagcacgtatctattgtggcttctgaaatggagaaaaaccccactttttccttaaaggagaaatctcaccacaagcctaaggcagctgaggtttgtcagcaatccaatcagaagcgcatagataaggctgaagtatgcctttgggagagccaaggccagtccattttggaagatgagaagcttttgatttccaagactccagttctcccagagagggcaaaagaggagaacggaggtcagcctcgtgcagccaatgtgtgtgctgggcagagcgaagaactgccccccaaagctgtagcatcaaaaacagagaatgaaaatctcaaccaaataggacaccaggaaaaaaagacatcttcttctgaggagaatgtgcgtggctcctataactcaagtaataacttccagcaacctttaacatcacgagcagaggtttgtccttgggagtttgagaccccagctcaaccaaatgctggaagaagtgtagctttacctgcctcttctgctctaagtgcaaataagatagcagggcctaggaaagaagagatctgggatagttttaaagtgtagcatctccaggaagaagaggaaaaggagggaaccccggattggatatgagacagaagatataagaatcaaatattcccaaggaggatttgtcaatcaaggaaaacatgacagatggtgaggtaaagtcaaaggcatgggtagaagaggaccaggggggcaagagcaacaacgtcataatggagaagtcagactttggtcaagaaagtccttcccttggtaacactaggaaaatctttccatttcagcatgtttaaggaaaatagcccacaatgtctgccctgatcaatatgtatccatgggactttgaagatcctaagccaggtaaaccaggagacacagaagacgtaccagatttgcaaagaaagaaaaggtataagacatatataactgaaattctaagtagctgaccgagaagaacttactttacctatttaaccttgatagcactgctaacttaatgcatcccaaaaatatcttttatattaatgattgctctcattttcttataaatgtatgtttcagtatatcgttgtgtctcatattcaagcattccagattgtataatttttgcaaataactttggtattatgtgacacaacacatttatgcaatctgcagctattcaattgttattgcaccttacagaatacctgctatctatcaactttagttgattcttgaagtacagtaagctttctctggcttgggaagccataactgttactataaaaacttttagttttggctgtggtttatatattgtgactttgaatttgactctattatttcacatcatggtttgttatactgtcttaatcagggttttttatacaagttgagttacttgttttgcacttcttgttaggactcagaagctttattaatattggagatcaagtggtcctacttagtcatatgtctcaataagttaaggacaacttatccgttgtttattcaaagtcagagatagataacgccttcattccaattaattgtcccttttaactctttcagtatttcctacttagcagcatttccaaaggaagaagctaagagtgagaaaaatataccgtgcattattattactattggaaagggaagactctagggatgacataagaattatagcagtactataaacccaggaagtttgcctttcaaaaaaaaacacaggtagctcctgatagcactttcaagggattatttttttaaagagaaaaattatggtagcatcaagatcattgtatggatatatttttattatgtgtactgaaaatacagtattttaaaataccttaaagtatttattctcataaactcttattcattgcttcagctacaggtagaacttgctgggctcaaatcccaaagaggttttataaccttatttattcaaaacctataaggtggtatggaatcttcattctcccaagcactggaaaatgtctaagtcctgcaaattgccattgtgagccacttgctcgacatgtaacatgtaaggtccatttgcaaagcaaagcagcccccaaagcatattttataaagcttattgcattccacactgatctcttggcatgggaatcctaagctgccgactaagccctaccgacatgatcatgcagtgagattccaaagctcagtctcatttcatttaaagaagaatcactcagaaatagaaccgagacttccctttttctccctgtaaacacccaagtatcaactgcttatttggccaggacactcccagcacaaataactattttttatgtcacaagcagcaaggaggacatgctagggtgataaaagatggagaaacaggatcagagggtggatatagggctgttcttagagagtattttcagtggaaggtaaaaacagaattctccatattcatcatcaaatttttctcagtgatttttttattcaggagtaagcaagcacttcactgtttcacaaagctgtgcgcaaatcttcctcacccatttgctgactttatgcattactcaggttggtggggtcggtttgagaagatatagaaattctatttttgtgtctttacaccatttatttcttttatctcttccttttcaatgaaggcctatatgcttggtgacctcctttaaggaatctttgtgaactgggttggaagttcctagacccacatatttgtttcatttatgtctgaaatctgttagcacttgattcctttcttgagaattatgcagtcaagcatcagtgactttctattgcacttcaggattgatcctgctagagatgtgagttaaaaagacttgccaaattatatcttagcgacattctatagttcatagattattctccaccagcataaatcagtgagagtgcctagagtctttctgagagtttcattgccattatcaacaagagaagttgaaatttacaagtcaggaggttatttttccagattgataaccatagaaagtgaataaacacttttaaggtcgcaaacatttgctaggttgtccttctcaatgcatgtgcaggctgcatcctgtccttgtttttaagccagggtttataaataagtagatttataccaatcttaatagaattgtatattttatgcaagaattaaatgctttacaacatgaagtataactcaacccattgtaaactttggtggcaatatggatttgaaactcgacagttctcttgtatttgcttcctaggtttctgcatgcaagttatgacaggtaggactgaaaaaacactgccttttgacttctagcatttagcaaccgagagtcgtagagtcaataaagctgtaagtgtcttcacttaatctgtggttctcctaaaactattatctgaaacctacagcatcccaccatgaaatatttggtaaatttatgttgtgacgtgttgcagcatgtaaataattataacttctctgcaataaaacatatttatatg

SEQ ID NO: 135939 - DNA, 2039 bp, Homo sapiens
  Payload ID: 6581
  Gene Symbol: GPR160
  Gene Name: G protein-coupled receptor 160
  Uniprot ID: Q9UJ42
  ENST ID: ENST00000355897
  CDS Start-End: 609-1625
ccggcccttgtttcgttgggcccggacgggacgtgcgcgctcaaaggttgcccgtctctgacgcccgcatttcctggtctggagccggctgagccacagcagggtcgccgcggggtcccggggccgtgctcccctgcccctcccgggagcgcgcggggcggggcggggcggggcgggaccaggcgggcgagctgggccctcgcccctccctcgggcggtcacctgggcacgggcgctgcaggtgtcggggcctcaaccttgcggagccgacagccatcgatcctcgggtggcctcgaggtggtggcagggccgccccctgcagtccggagacgaacgcacggaccgggcctccggaggcaggttcggctggaaggaaccgctctcgcttcgtcctacacttgcgcaaatgtctccgagcttactcacatagcatattggtatatcaaaatgaaatgcaaggaaccaaaaataacataattgaaggcagtaaaagtgaaattaaataggaagatcatcagtcaaggaagacccactggagaggacagaaaatgaagcagtgttttatcatgtgtatttcagcaggtcttcttgaaatttaactaaaaatatgactgctctctcttcagagaactgctcttttcagtaccagttacgtcaaacaaaccagcccctagatgttaactatctgctattcttgatcatacttgggaaaatattattaaatatccttacactaggaatgagaagaaaaaacacctgtcaaaattttatggaatatttttgcatttcactagcattcgttgatcttttacttttggtaaacatttccattatattgtatttcagggattttgtacttttaagcattaggttcactaaataccacatctgcctatttactcaaattatttcctttacttatggctttttgcattatccagttttcctgacagcttgtatagattattgcctgaatttctctaaaacaaccaagctttcatttaagtgtcaaaaattattttatttctttacagtaattttaatttggatttcagtccttgcttatgttttgggagacccagccatctaccaaagcctgaaggcacagaatgcttattctcgtcactgtcctttctatgtcagcattcagagttactggctgtcatttttcatggtgatgattttatttgtagctttcataacctgttgggaagaagttactactttggtacaggctatcaggataacttcctatatgaatgaaactatcttatattttcctttttcatcccactccagttatactgtgagatctaaaaaaatattcttatccaagctcattgtctgttttctcagtacctggttaccatttgtactacttcaggtaatcattgttttacttaaagttcagattccagcatatattgagatgaatattccctggttatactttgtcaatagttttctcattgctacagtgtattggtttaattgtcacaagcttaatttaaaagacattggattacctttggatccatttgtcaactggaagtgctgcttcattccacttacaattcctaatcttgagcaaattgaaaagcctatatcaataatgatttgttaatattattaattaaaagttacagctgtcataagatcataattttatgaacagaaagaactcaggacatattaaaaaataaactgaactaaaacaacttttgccccctgactgatagcatttcagaatgtgtcttttgaagggctatgataccagttattaaatagtgttttattttaaaaacaaaataattccaagaagtttttatagttattcagggacactatattacaaatattactttgttattaacacaaaaagtgataagagttaacatttggctatactgatgtttgtgttactcaaaaaaactactggatgcaaactgttatgtaaatctgagatttcactgacaactttaagatatcaacctaaacatttttattaaatgttcaaatgaaagcaagaaagtaaaaa

SEQ ID NO: 135940 - DNA, 1299 bp, Homo sapiens
  Payload ID: 6581
  Gene Symbol: GPR160
  Gene Name: G protein-coupled receptor 160
  ENST ID: ENST00000492492
  CDS Start-End: 1201-1299
ctcgggcggtcacctgggcacgggcgctgcaggtgtcggggcctcaaccttgcggagccgacagccatcgatcctcgggtggcctcgaggtggtggcagggccgccccctgcagtccggagacgaacgcacggaccgggcctccggaggcaggttcggctggaaggaaccgctctcgcttcgtcctacacttgcgcaaatgtctccggcttgctccacttatcgggctcaccaaatacagctgcagtatgaattccatcttctacacaacagtaaaccagaatgttcatgttcacagcgttcatctcccatcctgttgtctaacgcacatggtttttttaaacttttctaagattgcatgagattctgcaacacaactgattataaaaacacttgaagtttttacctttttttttactttccaactctcgtgaatgtacagaggactttccagaagctacatgatgtgtgatatttcagctgatgaaatgtagatgtataggtaatcggtcagagtggtgggagaaactgttgggaaaggagcaggccttctgaaaggtcggaaggcttcaggggagaataagctgaacgcagctgttctctgaccttgaggcagagggcaaggagtaggtacaaggacgtgtaggagaatttatcttaaataggcttgttcacttgtgttgtccagaaacgacttttgatcatcagcgcgcatgactgctccctgaaaggaagaacaataatgttaattacccgcagactgtgtttgctccaggctttcggcattatgtctgtactgaataaaagcaagcagctccagctgttcgaggctgctctcttcttcagccattagtgccgggcagcccactagctgctgttacactgcatatctgtgtctgagtactcctttcttcagttgcttggccagggtctgtgggacagacccagcagctggtgccctgtgtgaggaacgctgcaatggatcgcgacggaaccctcgaaaacgaagagcttactcacatagcatattggtatatcaaaatgaaatgcaaggaaccaaaaataacataattgaaggcagtaaaagtgaaattaaataggaagatcatcagtcaaggaagacccactggagaggacagaaaatgaagcagtgttttatcatgtgtatttcagcaggtcttcttgaaatttaactaaaaatatgactgctctctcttcagagaactgctcttttcagtaccagttacgtcaaacaaaccagcccctagatgttaactatctgctattcttgatcatactt

SEQ ID NO: 135941 - DNA, 740 bp, Homo sapiens
  Payload ID: 6581
  Gene Symbol: GPR160
  Gene Name: G protein-coupled receptor 160
  ENST ID: ENST00000482710
  CDS Start-End: 476-740
ttatcgggctcaccaaatacagctgcagtatgaattccatcttctacacaacagtaaaccagaatgttcatgttcacagcgttcatctcccatcctgttgtctaacgcacatggtttttttaaacttttctaagattgcatgagattctgcaacacaactgattataaaaacacttgaagtttttacctttttttttactttccaactctcgtgaatgtacagaggactttccagaagctacatgatgtgtgatatttcagctgatgaaatgtagatgtatagagcttactcacatagcatattggtatatcaaaatgaaatgcaaggaaccaaaaataacataattgaaggcagtaaaagtgaaattaaataggaagatcatcagtcaaggaagacccactggagaggacagaaaatgaagcagtgttttatcatgtgtatttcagcaggtcttcttgaaatttaactaaaaatatgactgctctctcttcagagaactgctcttttcagtaccagttacgtcaaacaaaccagcccctagatgttaactatctgctattcttgatcatacttgggaaaatattattaaatatccttacactaggaatgagaagaaaaaacacctgtcaaaattttatggaatatttttgcatttcactagcattcgttgatcttttacttttggtaaacatttccattatattgtatttcagggattttgtacttttaagcattaggt

SEQ ID NO: 135942 - DNA, 731 bp, Homo sapiens
  Payload ID: 6581
  Gene Symbol: GPR160
  Gene Name: G protein-coupled receptor 160
  ENST ID: ENST00000485735
  CDS Start-End: 243-731
cagtggcttgggagctggagcaggtggtggaggcctgaaatgactacttgagcttactcacatagcatattggtatatcaaaatgaaatgcaaggaaccaaaaataacataattgaaggcagtaaaagtgaaattaaataggaagatcatcagtcaaggaagacccactggagaggacagaaaatgaagcagtgttttatcatgtgtatttcagcaggtcttcttgaaatttaactaaaaatatgactgctctctcttcagagaactgctcttttcagtaccagttacgtcaaacaaaccagcccctagatgttaactatctgctattcttgatcatacttgggaaaatattattaaatatccttacactaggaatgagaagaaaaaacacctgtcaaaattttatggaatatttttgcatttcactagcattcgttgatcttttacttttggtaaacatttccattatattgtatttcagggattttgtacttttaagcattaggttcactaaataccacatctgcctatttactcaaattatttcctttacttatggctttttgcattatccagttttcctgacagcttgtatagattattgcctgaatttctctaaaacaaccaagctttcatttaagtgtcaaaaattattttatttctttacagtaattttaatttggatttcagtccttgcttatgttttgggagacccagccatctaccaaagc

SEQ ID NO: 135943 - DNA, 783 bp, Homo sapiens
  Payload ID: 6581
  Gene Symbol: GPR160
  Gene Name: G protein-coupled receptor 160
  ENST ID: ENST00000473675
  CDS Start-End: 353-783
agagcttactcacatagcatattggtatatcaaaatgaaatgcaaggaaccaaaaataacataattgaaggcagtaaaagtgaaattaaataggaagatcatcagtcaaggaagacccactggagactgaaaccacctgttttcagagcttcaggaaaagacttaatctgaaggatcctgcagctaaaaagctttgaaaactgtgttaaggggccccataagcatcgcttctaaacttcactgacaaaagggactggggtcatgctgtctggagtcagagtgagggacagaaaatgaagcagtgttttatcatgtgtatttcagcaggtcttcttgaaatttaactaaaaatatgactgctctctcttcagagaactgctcttttcagtaccagttacgtcaaacaaaccagcccctagatgttaactatctgctattcttgatcatacttgggaaaatattattaaatatccttacactaggaatgagaagaaaaaacacctgtcaaaattttatggaatatttttgcatttcactagcattcgttgatcttttacttttggtaaacatttccattatattgtatttcagggattttgtacttttaagcattaggttcactaaataccacatctgcctatttactcaaattatttcctttacttatggctttttgcattatccagttttcctgacagcttgtatagattattgcctgaatttctctaaaacaaccaagctttcatttaagtgtcaaaaattattttatttctttacagtaat

SEQ ID NO: 135944 - DNA, 7806 bp, Homo sapiens
  Payload ID: 6582
  Gene Symbol: GPR161
  Gene Name: G protein-coupled receptor 161
  ENST ID: ENST00000271357
  CDS Start-End: 178-1818
gactgctccctggccttttggttccgagggagtgcagggcagcagtgtgaagacctgtttacgtccactccccactccccggggctggcttcgggacgaattcactgtggtattaacagagcccgggacagagcctggcagaaggcagatggatgctcgtgcccgtcggctggatgaatgaaagtcgtccagcatgctctgcccaccccacgccgaggtgcactgaccatgagcctcaactcctccctcagctgcaggaaggagctgagtaatctcactgaggaggagggtggcgaagggggcgtcatcatcacccagttcatcgccatcattgtcatcaccatttttgtctgcctgggaaacctggtcatcgtggtcaccttgtacaagaagtcctacctcctcaccctcagcaacaagttcgtcttcagcctgactctgtccaacttcctgctgtccgtgttggtgctgccttttgtggtgacgagctccatccgcagggaatggatctttggtgtagtgtggtgcaacttctctgccctcctctacctgctgatcagctctgccagcatgctaaccctcggggtcattgccatcgaccgctactatgctgtcctgtaccccatggtgtaccccatgaagatcacagggaaccgggctgtgatggcacttgtctacatctggcttcactcgctcatcggctgcctgccacccctgtttggttggtcatccgtggagtttgacgagttcaaatggatgtgtgtggctgcttggcaccgggagcctggctacacggccttctggcagatctggtgtgccctcttcccctttctggtcatgctggtgtgctatggcttcatcttccgcgtggccagggtcaaggcacgcaaggtgcactgtggcacagtcgtcatcgtggaggaggatgctcagaggaccgggaggaagaactccagcacctccacctcctcttcaggcagcaggaggaatgcctttcagggtgtggtctactcggccaaccagtgcaaagccctcatcaccatcctggtggtcctcggtgccttcatggtcacctggggcccctacatggttgtcatcgcctctgaggccctctgggggaaaagctccgtctccccgagcctggagacttgggccacatggctgtcctttgccagcgctgtctgccaccccctgatctatggactctggaacaagacagttcgcaaagaactactgggcatgtgctttggggaccggtattatcgggaaccatttgtgcaacgacagaggacttccaggctcttcagcatttccaacaggatcacagacctgggcctgtccccacacctcactgcgctcatggcaggtggacagcccctggggcacagcagcagcacgggggacactggcttcagctgctcccaggactcagggacagatatgatgctgcttgaggactacacgtctgatgacaaccctccctctcactgcacttgcccacccaagagaaggagctcggtgacatttgaggatgaagtggaacaaatcaaagaagctgccaagaactcgattcttcatgtgaaagctgaagtacacaagtccttggacagttacgcagcaagcttggccaaagccattgaggccgaagccaaaatcaacttatttggggaggaggctttgccaggggtcttggttacagcacggactgtcccggggggcggcttcgggggccgccgaggcagcagaactcttgtgagccagaggctgcagttgcagagcatcgaagaaggagatgttttagctgccgagcagagatgagggcctcagggtgccgtggggctgcagcctgagaggctggcccggggaggagttcccatcaccgcctgtgccgcggccttgggagcatgtcactgtgtacagctggccacacacagggaaggagcagcatctggtatgcagccaccaggacaaggactgaaaataatgtctacagtccacagcttcagcatttccagagaccacatgtgagcttcttttaggtcccagtgatgggaccagaagcatctaaagcaaaaaaaaaaccaaaaaaaaatctagagatgtggctgtggctttttgggaggtggggcatgggaggaccagagacgaagggcttggaaggagacccccacatgcatcatttcctcctcttcacagtgtgctgggagtccagccgtgcactgtgccagatgcctcaggaggagaaccctccccagtgtactgtgaaggatgacacagcacttcttcctaatgacacgcgaccgtcctggtgcctctacatggttgatgcgggcagtgtgggaccctcagttctaggactggtccgcagagaaagcacccaggagcagagcgcttcggagcggtcctcagtggcgccacctgctggtgctaatagggacagccacaggcctcttgcagactggcccaccctgcctacttccctactgacaagttctttggtatttcaaaagggagaaaccactataaaagacaagaggaagggcaggtactaggtgtttcatttccagaattaaaaaaaaaatccatttaagacgtaccactgttttaccggactgaatgggactgtagtgccaagcacagccaggaaatagagaaactgttattatggaagggaatttgttcacatgggaaagcctcattaaatagattctatgtgtgatgtttgagtgaccaatgaaaatagctggcctcagttctgcatggcacactcccaagagcaacagttactattatcacaagcctggtataaataagatagaagcagccctggacccacagccagcaacctgggttattggcccagctctgtctttgtgtgcacatgtcatttggacatcttgtcacctttctaggtcctctgtaaagtgggaaaacagagtggagttggattgaatggtctccaagatcatttccagctctgacctttggtgttctcaggatttgtaaagcagagataggtaaaacacaaaagcagacccacggaccgacctttgtataactttggagtgtggttgctcatgcacatgtgaagtgcaggcagatcaaggttctgtggctttgtctgccctgtccattagagcacaatctggatagaatgccagccaccaagatgcatgaggggcagggtcaccatctcagaaggggaagcacaggaatgtgattgggatggttaaacctctcttctcctccctttgtgctggaacagcagttgaagtttggtcctggagtaattgctgtgatgacttgggaagccactgatctcctcttgcgtctgcccttggcctgcatcatgactaaataagttcaggacttctctgctttggttggcagaaggtagattccaaggagatcttgctggttgctgagaggcagctgttctagaaagtgaattacccttgtggttttttctttggggcccagctagctcctggtgaggttgtgtttttgtgttgtgtggcagaaaccaatggttagctggtcccctggtctgcagtttgtaaaagacctttcatgaggcctggagtcttgctacctgtggtgattgaactcaactattctgggtcacctggatgccaggcgctggcctagcttctggatgggagtgggaaggagcagagggcaggttcacctgtgcaggtcagacactctgcttccatcactggatggcattcctacgtctgcgtgtggttcacgttttctatatatattccctgtatatatttttttctagcacttgtctactttctgaagggaccatattcctgatcaactagtgtgcacagaggtggaacagggcagagagacctttatctctaggatgggttgctggttaggtgtaggcattcttgagtgcagcagcttggctttgaaacgcaagggttggagaatgttcccctgactgtactagactgggctctagggaaagaatcctgagacagccccccactcccccactgaccccacactagctgggctattatagaatttaatctaaatctagaaatactgcatttcacaaaatgattcactgtgtttccctttttttactgaggtccaattcatttagtcgtctaccagacactgcacatccagtgtatgcgaagcaccaggctaggctctgtaggcaataccactaaagtgtgcactctgatttagggagcaggacctgtggataccgattctaataactagcaaagtcaagtcgtggttatagaaagaagtgtggcttcagagggaggtgggtatttccaaatatggagttagggatggctccatgaggtaagtgacagtttgagctaagtcttgaaggatgcttggcagctagaaccatattttccatattcaggaattcaaatttgcctttattcagctagagagaaagagagaagggggtgtgggggagaaggaaaagagaattttcacacattttgaagttcctgagagcatttctgaggatatctgccgttagtgcagaaggtcgaaaccccaagtgcccccactaaacccaggctctttagctgtaaactgccatgcagtggcaggcctgcagccttcctgatgggaccacatggacagtggcacatgggacatttggctactcgttagcttaaacaactcagtcctgtgtcttctggttttgacaagaccacatttaggactgctgcccacctctgcctctttcattgagatttccgccttattgggtccctgtgctatgccacagataccaggtttggggttgttttgacccagaaggcattgggagtcccacattacagagcacacacacagctcaacacagccatttccctggccagaggcaccaagactgaagttcaggcccttagacactaggtggcagcggtgtggctgtgcagagccaaggatgaacctgagagcttgtttgcctctggctgggcactcttgttttgaattcctttgcccttatcgtgtagtccacggccttggtgaccaaggaccacctggctagcctgcttacatgcatgaccccatccaggttcacaggtattgccactgagtgatcttaggtagatcactgctcctggagaagcagagttgaggagtgtaagacaagggccatctagtgccaatgttccttgattcttatttgaggagctactatgtggtctttctgtaaacaagtgaacaaccaatgagactaaatatttgcaatagataggctaaggaatttgggttgagacaggagacggaggaaaaatgctttgatacaatgacagatggttagtctcttcagatttccctgaatattttccatcccgacaatatgcctcttagatacttgcagattagacatgtctctggatggaccacaagatacattcacaacatgtgttcagccttgagccctggctgtgtcctgtctggaaggaactgaggatgatgtggctataaagaggaggcagtgagctggcatgtgactgccttctgtgggcctgacctgtttgacatttgagggcctatgatgtgctaggtgctgtgttaggtacttccaaatgctttatctcattttaccccagtgcaagtgtgatatagtgaggatggtgaagacgtgggtatggttaagtcatgagttcagatcccgtgcttccaattacatgggtgttttcaaacaagtcactacttatgagtttcctcatctgtgaagggaagtttagtcatctgtttcaatgtggagacacacaggattgagggagtcctccgtcacagggtgactgtctggattctatgaggaaatacttggaaagcatgcagcacaatgcctggggtgcagctgaagctgagccactggtgtttcttcacagtatctctgtggggagggtgtattattcctttttatagggatctctataatgaagtgagaatcttgaaaatataagtgttatcctagatgggaggtgttaaaggtttttgccttgggaattttgtcatatttgttgcacagcaaggaaggactttcagaaaagcagggatgtggtgaggaagagcaggcaatagagagcagggaggaaaggctaagtagcatctggaacttgagaagtctaagggagccaaaatgagattttctattaaaaatgtctatcctcagccgggcgtggtagctcacgcctgtaatcccagcactttggggggtcgagatgggcagatcacctgaggtcaggagttcgagaccagcctgaccaatatggagaaaccccgtctctactaaaaatacaaaattagttgcgcgtggtggtgggcgcctgtaatcccagctactcaggagcctgaggcaggagaatcacttaaacccaggaggcggaggttgcagtgagccgagatcgcgccattgcactccagcctgggcaacaagagcgaaaccccgcctaaaaaaagaaaaaaaagaaaaagtctatcctctatgctactggcctgtttgtacaaagataaaatcattctaatttgtccggaatgactatcaaagatgatcaaatccccagggcctggtgtaacgttccaaatcatagcacaaatacagcttgaccttccttacagtccagaaaggacattctccctgagaaatgcccttggttgctgaggacagctctgtcctgtagtgacagagtgactgcctggctgtggctcttgggttcacagaatccctaatcctccaagcccctaagaggcagggcagggatgctacccacaatatatgcagaaccccagatggagcctgtgggagagagaggaaattaccgtcttcactgtaggcaaaggagaatggctgtgattagccatatatgcctataagaaggagcagagccatactgtccttgtgggttgggagaggggacacagaatccagggcaattgtctgaggtctcaaagtaagttaagccagagtcaaagccaaactccaagtcttggccaaggggatgagaaaagcaaggagctagtcttataggtcaaggaagatgaggtatagttaagagtcatcagtatcacagaacaggccagcagggctttattaggtatgtagaactattataaaccaaggatcttgggagatattaatatctgctggccagacctaaaaaaaactgaaggcccaaggaaagtgactggactcactggaaagtatctaacaaatactttggattccaaagtatttccaataccttgaagattcctttgaaaacatcaaagcacaaactcaaatctgcacaagattacaaaagcacaattttggtgttatttttagaatgcaatacacaaagctatgttcatttctctcagcaagcattttcctgggtagtagtaatagcttaggaatcaaatgccacttttgtttttccttttttcactagtttgaaataccacaaatcacaggtgagtcagtcctcccagaggaaaagacagtcctagggagaatcacaggcctggcagacaagaccacactgagagcagtagaaggaacctgcatgcttaagggacagaggactgtgttgtgttctcataatagaccgctggatgaagaagtggttaaaaaccaaccctcgaaaaacaaaaatccctggctaatcctgaaatatatttaacttgaagtctttggatgatttttttaaggttaaaaaaaagtttaggattattataaatcaatatttataaataagcaacaatgtatttggaatttttgtttacctgattaaatatgtttttggtatgtgt

SEQ ID NO: 135945 - DNA, 2400 bp, Homo sapiens
  Payload ID: 6582
  Gene Symbol: GPR161
  Gene Name: G protein-coupled receptor 161
  Uniprot ID: Q8N6U8
  ENST ID: ENST00000367835
  CDS Start-End: 558-2147
gttttgtgatgactgctccctggccttttggttccgagggagtgcagggcagcagtgtgaagacctgtttacgtccactccccactccccggggctggcttcgggacgaattcactgtggtattaacagagcccgggacagagcctggcagaaggcagatggatgctcgtgcccgtcggctggatgaatgaaaggtgagcagcaaaggcgataccaggatcgtccacggcgggactggaggaggagaatgggactgtgcggagcctgcgggaagaatctgaaagtgtctgtgtgatggagagagacatggaaaaggcgacgtcccagcggctggaactggggcggaggaacgggaacagggaaggcctgagttaggcaccacaaaggttttcaggagaaaagtggggcgagccgagaggagtctcaccctgttgcttaggcagatggcgcgatctcggctcctgggttcaagcaattctcctgcctcagcctcctgaatagccgggattacagtcgtccagcatgctctgcccaccccacgccgaggtgcactgaccatgagcctcaactcctccctcagctgcaggaaggagctgagtaatctcactgaggaggagggtggcgaagggggcgtcatcatcacccagttcatcgccatcattgtcatcaccatttttgtctgcctgggaaacctggtcatcgtggtcaccttgtacaagaagtcctacctcctcaccctcagcaacaagttcgtcttcagcctgactctgtccaacttcctgctgtccgtgttggtgctgccttttgtggtgacgagctccatccgcagggaatggatctttggtgtagtgtggtgcaacttctctgccctcctctacctgctgatcagctctgccagcatgctaaccctcggggtcattgccatcgaccgctactatgctgtcctgtaccccatggtgtaccccatgaagatcacagggaaccgggctgtgatggcacttgtctacatctggcttcactcgctcatcggctgcctgccacccctgtttggttggtcatccgtggagtttgacgagttcaaatggatgtgtgtggctgcttggcaccgggagcctggctacacggccttctggcagatctggtgtgccctcttcccctttctggtcatgctggtgtgctatggcttcatcttccgcgtggccagggtcaaggcacgcaaggtgcactgtggcacagtcgtcatcgtggaggaggatgctcagaggaccgggaggaagaactccagcacctccacctcctcttcaggcagcaggaggaatgcctttcagggtgtggtctactcggccaaccagtgcaaagccctcatcaccatcctggtggtcctcggtgccttcatggtcacctggggcccctacatggttgtcatcgcctctgaggccctctgggggaaaagctccgtctccccgagcctggagacttgggccacatggctgtcctttgccagcgctgtctgccaccccctgatctatggactctggaacaagacagttcgcaaagaactactgggcatgtgctttggggaccggtattatcgggaaccatttgtgcaacgacagaggacttccaggctcttcagcatttccaacaggatcacagacctgggcctgtccccacacctcactgcgctcatggcaggtggacagcccctggggcacagcagcagcacgggggacactggcttcagctgctcccaggactcagggacagatatgatgctgcttgaggactacacgtctgatgacaaccctccctctcactgcacttgcccacccaagagaaggagctcggtgacatttgaggatgaagtggaacaaatcaaagaagctgccaagaactcgattcttcatgtgaaagctgaagtacacaagtccttggacagttacgcagcaagcttggccaaagccattgaggccgaagccaaaatcaacttatttggggaggaggctttgccaggggtcttggttacagcacggactgtcccggggggcggcttcgggggccgccgaggcagcagaactcttgtgagccagaggctgcagttgcagagcatcgaagaaggagatgttttagctgccgagcagagatgagggcctcagggtgccgtggggctgcagcctgagaggctggcccggggaggagttcccatcaccgcctgtgccgcggccttgggagcatgtcactgtgtacagctggccacacacagggaaggagcagcatctggtatgcagccaccaggacaaggactgaaaataatgtctacagtccacagcttcagcatttccagagaccacatgtgagcttcttttaggtcccagtgatgggaccagaagcatctaaagc

SEQ ID NO: 135946 - DNA, 1983 bp, Homo sapiens
  Payload ID: 6582
  Gene Symbol: GPR161
  Gene Name: G protein-coupled receptor 161
  Uniprot ID: Q8N6U8
  ENST ID: ENST00000367836
  CDS Start-End: 528-1721
ggtgcgtgcccgggactctgccgatgcgggccgcgccccctggggccaagagactccacgtcccgctcagggcaaagggtgtggggagaagcggtcacgcccctcggctggaatccgtgaggaccaggtgagcagccttctcccagccgggactcagggcgctgtctccccgagcctgggcgggcggcgggtggcgcgcccagaagtggcccggcgccgccggatgggcggctctgcccctcagatctgcgggagggagattcggctggttcttggaaaggggagaactcgaccagccctcggcgccttctgggccaagcttaacccccgtgcaacctttggacaaaggcatatgggatgagaacgtctgttggcctggtgcactgtgcgtcctctgagaggtgaaggagcactgtgtggtcagagggctgcgagctctctgtttgggttccgaggaagacagaatgggctgaactggaactgacctaaatgtcagcaagaggagctactatgctgtcctgtaccccatggtgtaccccatgaagatcacagggaaccgggctgtgatggcacttgtctacatctggcttcactcgctcatcggctgcctgccacccctgtttggttggtcatccgtggagtttgacgagttcaaatggatgtgtgtggctgcttggcaccgggagcctggctacacggccttctggcagatctggtgtgccctcttcccctttctggtcatgctggtgtgctatggcttcatcttccgcgtggccagggtcaaggcacgcaaggtgcactgtggcacagtcgtcatcgtggaggaggatgctcagaggaccgggaggaagaactccagcacctccacctcctcttcaggcagcaggaggaatgcctttcagggtgtggtctactcggccaaccagtgcaaagccctcatcaccatcctggtggtcctcggtgccttcatggtcacctggggcccctacatggttgtcatcgcctctgaggccctctgggggaaaagctccgtctccccgagcctggagacttgggccacatggctgtcctttgccagcgctgtctgccaccccctgatctatggactctggaacaagacagttcgcaaagaactactgggcatgtgctttggggaccggtattatcgggaaccatttgtgcaacgacagaggacttccaggctcttcagcatttccaacaggatcacagacctgggcctgtccccacacctcactgcgctcatggcaggtggacagcccctggggcacagcagcagcacgggggacactggcttcagctgctcccaggactcagggacagatatgatgctgcttgaggactacacgtctgatgacaaccctccctctcactgcacttgcccacccaagagaaggagctcggtgacatttgaggatgaagtggaacaaatcaaagaagctgccaagaactcgattcttcatgtgaaagctgaagtacacaagtccttggacagttacgcagcaagcttggccaaagccattgaggccgaagccaaaatcaacttatttggggaggaggctttgccaggggtcttggttacagcacggactgtcccggggggcggcttcgggggccgccgaggcagcagaactcttgtgagccagaggctgcagttgcagagcatcgaagaaggagatgttttagctgccgagcagagatgagggcctcagggtgccgtggggctgcagcctgagaggctggcccggggaggagttcccatcaccgcctgtgccgcggccttgggagcatgtcactgtgtacagctggccacacacagggaaggagcagcatctggtatgcagccaccaggacaaggactgaaaataatgtctacagtccacagcttcagcatttccagagaccacatgtgagcttcttttaggtcccagtgatgggaccagaagcatctaaagcaaaaaaaaa

SEQ ID NO: 135947 - DNA, 2676 bp, Homo sapiens
  Payload ID: 6582
  Gene Symbol: GPR161
  Gene Name: G protein-coupled receptor 161
  Uniprot ID: Q8N6U8
  ENST ID: ENST00000367838
  CDS Start-End: 315-1904
gtaggtgcgtgcccgggactctgccgatgcgggccgcgccccctggggccaagagactccacgtcccgctcagggcaaagggtgtggggagaagcggtcacgcccctcggctggaatccgtgaggaccaggtctttttcagtgtgctcaatatggtcaccaagcctggaaacatagagtctcaccctgttgcttaggcagatggcgcgatctcggctcctgggttcaagcaattctcctgcctcagcctcctgaatagccgggattacagtcgtccagcatgctctgcccaccccacgccgaggtgcactgaccatgagcctcaactcctccctcagctgcaggaaggagctgagtaatctcactgaggaggagggtggcgaagggggcgtcatcatcacccagttcatcgccatcattgtcatcaccatttttgtctgcctgggaaacctggtcatcgtggtcaccttgtacaagaagtcctacctcctcaccctcagcaacaagttcgtcttcagcctgactctgtccaacttcctgctgtccgtgttggtgctgccttttgtggtgacgagctccatccgcagggaatggatctttggtgtagtgtggtgcaacttctctgccctcctctacctgctgatcagctctgccagcatgctaaccctcggggtcattgccatcgaccgctactatgctgtcctgtaccccatggtgtaccccatgaagatcacagggaaccgggctgtgatggcacttgtctacatctggcttcactcgctcatcggctgcctgccacccctgtttggttggtcatccgtggagtttgacgagttcaaatggatgtgtgtggctgcttggcaccgggagcctggctacacggccttctggcagatctggtgtgccctcttcccctttctggtcatgctggtgtgctatggcttcatcttccgcgtggccagggtcaaggcacgcaaggtgcactgtggcacagtcgtcatcgtggaggaggatgctcagaggaccgggaggaagaactccagcacctccacctcctcttcaggcagcaggaggaatgcctttcagggtgtggtctactcggccaaccagtgcaaagccctcatcaccatcctggtggtcctcggtgccttcatggtcacctggggcccctacatggttgtcatcgcctctgaggccctctgggggaaaagctccgtctccccgagcctggagacttgggccacatggctgtcctttgccagcgctgtctgccaccccctgatctatggactctggaacaagacagttcgcaaagaactactgggcatgtgctttggggaccggtattatcgggaaccatttgtgcaacgacagaggacttccaggctcttcagcatttccaacaggatcacagacctgggcctgtccccacacctcactgcgctcatggcaggtggacagcccctggggcacagcagcagcacgggggacactggcttcagctgctcccaggactcagggacagatatgatgctgcttgaggactacacgtctgatgacaaccctccctctcactgcacttgcccacccaagagaaggagctcggtgacatttgaggatgaagtggaacaaatcaaagaagctgccaagaactcgattcttcatgtgaaagctgaagtacacaagtccttggacagttacgcagcaagcttggccaaagccattgaggccgaagccaaaatcaacttatttggggaggaggctttgccaggggtcttggttacagcacggactgtcccggggggcggcttcgggggccgccgaggcagcagaactcttgtgagccagaggctgcagttgcagagcatcgaagaaggagatgttttagctgccgagcagagatgagggcctcagggtgccgtggggctgcagcctgagaggctggcccggggaggagttcccatcaccgcctgtgccgcggccttgggagcatgtcactgtgtacagctggccacacacagggaaggagcagcatctggtatgcagccaccaggacaaggactgaaaataatgtctacagtccacagcttcagcatttccagagaccacatgtgagcttcttttaggtcccagtgatgggaccagaagcatctaaagcaaaaaaaaaaccaaaaaaaaatctagagatgtggctgtggctttttgggaggtggggcatgggaggaccagagacgaagggcttggaaggagacccccacatgcatcatttcctcctcttcacagtgtgctgggagtccagccgtgcactgtgccagatgcctcaggaggagaaccctccccagtgtactgtgaaggatgacacagcacttcttcctaatgacacgcgaccgtcctggtgcctctacatggttgatgcgggcagtgtgggaccctcagttctaggactggtccgcagagaaagcacccaggagcagagcgcttcggagcggtcctcagtggcgccacctgctggtgctaatagggacagccacaggcctcttgcagactggcccaccctgcctacttccctactgacaagttctttggtatttcaaaagggagaaaccactataaaagacaagaggaagggcaggtactaggtgtttcatttccagaattaaaaaaaaaatccatttaa

SEQ ID NO: 135948 - DNA, 7655 bp, Homo sapiens
  Payload ID: 6582
  Gene Symbol: GPR161
  Gene Name: G protein-coupled receptor 161
  Uniprot ID: Q8N6U8
  ENST ID: ENST00000539777
  CDS Start-End: 312-1667
cccgggcggagagggcggtccggatggagccaggctaaactcattgtgcgaggctgagggctcagggcgcgggccgggaagggtccccgcccccacggcgctccctttctccccgcgcccctctcggaggtcagggctgtcctccgcccgcactgcgccttgctttggagagctggagctctttgtgggaagatgttgggggcgcgcccctcccctgcggcctggggcttctgagaggcccaccccattctgctgggtgcagcccgccccgtttctccggcgccgcccgaagcccctaaacagtccgctggatgggagggcgtaggtgcgtgcccgggactctgccgatgcgggccgcgccccctggggccaagagactccacgtcccgctcagggcaaagggtgtggggagaagcggtcacgcccctcggctggaatccgtgaggaccagctactatgctgtcctgtaccccatggtgtaccccatgaagatcacagggaaccgggctgtgatggcacttgtctacatctggcttcactcgctcatcggctgcctgccacccctgtttggttggtcatccgtggagtttgacgagttcaaatggatgtgtgtggctgcttggcaccgggagcctggctacacggccttctggcagatctggtgtgccctcttcccctttctggtcatgctggtgtgctatggcttcatcttccgcgtggccagggtcaaggcacgcaaggtgcactgtggcacagtcgtcatcgtggaggaggatgctcagaggaccgggaggaagaactccagcacctccacctcctcttcaggcagcaggaggaatgcctttcagggtgtggtctactcggccaaccagtgcaaagccctcatcaccatcctggtggtcctcggtgccttcatggtcacctggggcccctacatggttgtcatcgcctctgaggccctctgggggaaaagctccgtctccccgagcctggagacttgggccacatggctgtcctttgccagcgctgtctgccaccccctgatctatggactctggaacaagacagttcgcaaagaactactgggcatgtgctttggggaccggtattatcgggaaccatttgtgcaacgacagaggacttccaggctcttcagcatttccaacaggatcacagacctgggcctgtccccacacctcactgcgctcatggcaggtggacagcccctggggcacagcagcagcacgggggacactggcttcagctgctcccaggactcagggacagatatgatgctgcttgaggactacacgtctgatgacaaccctccctctcactgcacttgcccacccaagagaaggagctcggtgacatttgaggatgaagtggaacaaatcaaagaagctgccaagaactcgattcttcatgtgaaagctgaagtacacaagtccttggacagttacgcagcaagcttggccaaagccattgaggccgaagccaaaatcaacttatttggggaggaggctttgccaggggtcttggttacagcacggactgtcccggggggcggcttcgggggccgccgaggcagcagaactcttgtgagccagaggctgcagttgcagagcatcgaagaaggagatgttttagctgccgagcagagatgagggcctcagggtgccgtggggctgcagcctgagaggctggcccggggaggagttcccatcaccgcctgtgccgcggccttgggagcatgtcactgtgtacagctggccacacacagggaaggagcagcatctggtatgcagccaccaggacaaggactgaaaataatgtctacagtccacagcttcagcatttccagagaccacatgtgagcttcttttaggtcccagtgatgggaccagaagcatctaaagcaaaaaaaaaaccaaaaaaaaatctagagatgtggctgtggctttttgggaggtggggcatgggaggaccagagacgaagggcttggaaggagacccccacatgcatcatttcctcctcttcacagtgtgctgggagtccagccgtgcactgtgccagatgcctcaggaggagaaccctccccagtgtactgtgaaggatgacacagcacttcttcctaatgacacgcgaccgtcctggtgcctctacatggttgatgcgggcagtgtgggaccctcagttctaggactggtccgcagagaaagcacccaggagcagagcgcttcggagcggtcctcagtggcgccacctgctggtgctaatagggacagccacaggcctcttgcagactggcccaccctgcctacttccctactgacaagttctttggtatttcaaaagggagaaaccactataaaagacaagaggaagggcaggtactaggtgtttcatttccagaattaaaaaaaaaatccatttaagacgtaccactgttttaccggactgaatgggactgtagtgccaagcacagccaggaaatagagaaactgttattatggaagggaatttgttcacatgggaaagcctcattaaatagattctatgtgtgatgtttgagtgaccaatgaaaatagctggcctcagttctgcatggcacactcccaagagcaacagttactattatcacaagcctggtataaataagatagaagcagccctggacccacagccagcaacctgggttattggcccagctctgtctttgtgtgcacatgtcatttggacatcttgtcacctttctaggtcctctgtaaagtgggaaaacagagtggagttggattgaatggtctccaagatcatttccagctctgacctttggtgttctcaggatttgtaaagcagagataggtaaaacacaaaagcagacccacggaccgacctttgtataactttggagtgtggttgctcatgcacatgtgaagtgcaggcagatcaaggttctgtggctttgtctgccctgtccattagagcacaatctggatagaatgccagccaccaagatgcatgaggggcagggtcaccatctcagaaggggaagcacaggaatgtgattgggatggttaaacctctcttctcctccctttgtgctggaacagcagttgaagtttggtcctggagtaattgctgtgatgacttgggaagccactgatctcctcttgcgtctgcccttggcctgcatcatgactaaataagttcaggacttctctgctttggttggcagaaggtagattccaaggagatcttgctggttgctgagaggcagctgttctagaaagtgaattacccttgtggttttttctttggggcccagctagctcctggtgaggttgtgtttttgtgttgtgtggcagaaaccaatggttagctggtcccctggtctgcagtttgtaaaagacctttcatgaggcctggagtcttgctacctgtggtgattgaactcaactattctgggtcacctggatgccaggcgctggcctagcttctggatgggagtgggaaggagcagagggcaggttcacctgtgcaggtcagacactctgcttccatcactggatggcattcctacgtctgcgtgtggttcacgttttctatatatattccctgtatatatttttttctagcacttgtctactttctgaagggaccatattcctgatcaactagtgtgcacagaggtggaacagggcagagagacctttatctctaggatgggttgctggttaggtgtaggcattcttgagtgcagcagcttggctttgaaacgcaagggttggagaatgttcccctgactgtactagactgggctctagggaaagaatcctgagacagccccccactcccccactgaccccacactagctgggctattatagaatttaatctaaatctagaaatactgcatttcacaaaatgattcactgtgtttccctttttttactgaggtccaattcatttagtcgtctaccagacactgcacatccagtgtatgcgaagcaccaggctaggctctgtaggcaataccactaaagtgtgcactctgatttagggagcaggacctgtggataccgattctaataactagcaaagtcaagtcgtggttatagaaagaagtgtggcttcagagggaggtgggtatttccaaatatggagttagggatggctccatgaggtaagtgacagtttgagctaagtcttgaaggatgcttggcagctagaaccatattttccatattcaggaattcaaatttgcctttattcagctagagagaaagagagaagggggtgtgggggagaaggaaaagagaattttcacacattttgaagttcctgagagcatttctgaggatatctgccgttagtgcagaaggtcgaaaccccaagtgcccccactaaacccaggctctttagctgtaaactgccatgcagtggcaggcctgcagccttcctgatgggaccacatggacagtggcacatgggacatttggctactcgttagcttaaacaactcagtcctgtgtcttctggttttgacaagaccacatttaggactgctgcccacctctgcctctttcattgagatttccgccttattgggtccctgtgctatgccacagataccaggtttggggttgttttgacccagaaggcattgggagtcccacattacagagcacacacacagctcaacacagccatttccctggccagaggcaccaagactgaagttcaggcccttagacactaggtggcagcggtgtggctgtgcagagccaaggatgaacctgagagcttgtttgcctctggctgggcactcttgttttgaattcctttgcccttatcgtgtagtccacggccttggtgaccaaggaccacctggctagcctgcttacatgcatgaccccatccaggttcacaggtattgccactgagtgatcttaggtagatcactgctcctggagaagcagagttgaggagtgtaagacaagggccatctagtgccaatgttccttgattcttatttgaggagctactatgtggtctttctgtaaacaagtgaacaaccaatgagactaaatatttgcaatagataggctaaggaatttgggttgagacaggagacggaggaaaaatgctttgatacaatgacagatggttagtctcttcagatttccctgaatattttccatcccgacaatatgcctcttagatacttgcagattagacatgtctctggatggaccacaagatacattcacaacatgtgttcagccttgagccctggctgtgtcctgtctggaaggaactgaggatgatgtggctataaagaggaggcagtgagctggcatgtgactgccttctgtgggcctgacctgtttgacatttgagggcctatgatgtgctaggtgctgtgttaggtacttccaaatgctttatctcattttaccccagtgcaagtgtgatatagtgaggatggtgaagacgtgggtatggttaagtcatgagttcagatcccgtgcttccaattacatgggtgttttcaaacaagtcactacttatgagtttcctcatctgtgaagggaagtttagtcatctgtttcaatgtggagacacacaggattgagggagtcctccgtcacagggtgactgtctggattctatgaggaaatacttggaaagcatgcagcacaatgcctggggtgcagctgaagctgagccactggtgtttcttcacagtatctctgtggggagggtgtattattcctttttatagggatctctataatgaagtgagaatcttgaaaatataagtgttatcctagatgggaggtgttaaaggtttttgccttgggaattttgtcatatttgttgcacagcaaggaaggactttcagaaaagcagggatgtggtgaggaagagcaggcaatagagagcagggaggaaaggctaagtagcatctggaacttgagaagtctaagggagccaaaatgagattttctattaaaaatgtctatcctcagccgggcgtggtagctcacgcctgtaatcccagcactttggggggtcgagatgggcagatcacctgaggtcaggagttcgagaccagcctgaccaatatggagaaaccccgtctctactaaaaatacaaaattagttgcgcgtggtggtgggcgcctgtaatcccagctactcaggagcctgaggcaggagaatcacttaaacccaggaggcggaggttgcagtgagccgagatcgcgccattgcactccagcctgggcaacaagagcgaaaccccgcctaaaaaaagaaaaaaaagaaaaagtctatcctctatgctactggcctgtttgtacaaagataaaatcattctaatttgtccggaatgactatcaaagatgatcaaatccccagggcctggtgtaacgttccaaatcatagcacaaatacagcttgaccttccttacagtccagaaaggacattctccctgagaaatgcccttggttgctgaggacagctctgtcctgtagtgacagagtgactgcctggctgtggctcttgggttcacagaatccctaatcctccaagcccctaagaggcagggcagggatgctacccacaatatatgcagaaccccagatggagcctgtgggagagagaggaaattaccgtcttcactgtaggcaaaggagaatggctgtgattagccatatatgcctataagaaggagcagagccatactgtccttgtgggttgggagaggggacacagaatccagggcaattgtctgaggtctcaaagtaagttaagccagagtcaaagccaaactccaagtcttggccaaggggatgagaaaagcaaggagctagtcttataggtcaaggaagatgaggtatagttaagagtcatcagtatcacagaacaggccagcagggctttattaggtatgtagaactattataaaccaaggatcttgggagatattaatatctgctggccagacctaaaaaaaactgaaggcccaaggaaagtgactggactcactggaaagtatctaacaaatactttggattccaaagtatttccaataccttgaagattcctttgaaaacatcaaagcacaaactcaaatctgcacaagattacaaaagcacaattttggtgttatttttagaatgcaatacacaaagctatgttcatttctctcagcaagcattttcctgggtagtagtaatagcttaggaatcaaatgccacttttgtttttccttttttcactagtttgaaataccacaaatcacaggtgagtcagtcctcccagaggaaaagacagtcctagggagaatcacaggcctggcagacaagaccacactgagagcagtagaaggaacctgcatgcttaagggacagaggactgtgttgtgttctcataatagaccgctggatgaagaagtggttaaaaaccaaccctcgaaaaacaaaaatccctggctaatcctgaaatatatttaacttgaagtctttggatgatttttttaaggttaaaaaaaagtttaggattattataaatcaatatttataaataagcaacaatgtatttggaatttttgtttacctgattaaatatgtttttggtatgtgt

SEQ ID NO: 135949 - DNA, 8256 bp, Homo sapiens
  Payload ID: 6582
  Gene Symbol: GPR161
  Gene Name: G protein-coupled receptor 161
  Uniprot ID: Q8N6U8
  ENST ID: ENST00000537209
  CDS Start-End: 619-2268
aggcaaagtggggagtgaggaagggaaaacaaacattctgagaaggaactgttccgtcccccgagctgacagcgcccgctctttgttttgtgatgactgctccctggccttttggttccgagggagtgcagggcagcagtgtgaagacctgtttacgtccactccccactccccggggctggcttcgggacgaattcactgtggtattaacagagcccgggacagagcctggcagaaggcagatggatgctcgtgcccgtcggctggatgaatgaaaggtgagcagcaaaggcgataccaggatcgtccacggcgggactggaggaggagaatgggactgtgcggagcctgcgggaagaatctgaaagtgtctgtgtgatggagagagacatggaaaaggcgacgtcccagcggctggaactggggcggaggaacgggaacagggaaggcctgagttaggcaccacaaaggttttcaggagaaaagtggggcgagccgagaggcctggtgcactgtgcgtcctctgagaggtgaaggagcactgtgtggtcagagggctgcgagctctctgtttgggttccgaggaagacagaatgggctgaactggaactgacctaaatgtcagcaagaggagtcgtccagcatgctctgcccaccccacgccgaggtgcactgaccatgagcctcaactcctccctcagctgcaggaaggagctgagtaatctcactgaggaggagggtggcgaagggggcgtcatcatcacccagttcatcgccatcattgtcatcaccatttttgtctgcctgggaaacctggtcatcgtggtcaccttgtacaagaagtcctacctcctcaccctcagcaacaagttcgtcttcagcctgactctgtccaacttcctgctgtccgtgttggtgctgccttttgtggtgacgagctccatccgcagggaatggatctttggtgtagtgtggtgcaacttctctgccctcctctacctgctgatcagctctgccagcatgctaaccctcggggtcattgccatcgaccgctactatgctgtcctgtaccccatggtgtaccccatgaagatcacagggaaccgggctgtgatggcacttgtctacatctggcttcactcgctcatcggctgcctgccacccctgtttggttggtcatccgtggagtttgacgagttcaaatggatgtgtgtggctgcttggcaccgggagcctggctacacggccttctggcagatctggtgtgccctcttcccctttctggtcatgctggtgtgctatggcttcatcttccgcgtggccagggtcaaggcacgcaaggtgcactgtggcacagtcgtcatcgtggaggaggatgctcagaggaccgggaggaagaactccagcacctccacctcctcttcaggcagcaggaggaatgcctttcagggtgtggtctactcggccaaccagtgcaaagccctcatcaccatcctggtggtcctcggtgccttcatggtcacctggggcccctacatggttgtcatcgcctctgaggccctctgggggaaaagctccgtctccccgagcctggagacttgggccacatggctgtcctttgccagcgctgtctgccaccccctgatctatggactctggaacaagacagttcgcaaagaactactgggcatgtgctttggggaccggtattatcgggaaccatttgtgcaacgacagaggacttccaggctcttcagcatttccaacaggatcacagacctgggcctgtccccacacctcactgcgctcatggcaggtggacagcccctggggcacagcagcagcacgggggacactggcttcagctgctcccaggactcagggacagatatgatgctgcttgaggactacacgtctgatgacaaccctccctctcactgcacttgcccacccaagagaaggagctcggtgacatttgaggatgaagtggaacaaatcaaagaagctgccaagaactcgattcttcatgtgaaagctgaagtacacaagtccttggacagttacgcagcaagcttggccaaagccattgaggccgaagccaaaatcaacttatttggggaggaggctttgccaggggtcttggttacagcacggactgtcccggggggcggcttcgggggccgccgaggcagcagaactcttgtgagccagaggctgcagttgcagagcatcgaagaaggagatgttttagctgccgagcagagatgagggcctcagggtgccgtggggctgcagcctgagaggctggcccggggaggagttcccatcaccgcctgtgccgcggccttgggagcatgtcactgtgtacagctggccacacacagggaaggagcagcatctggtatgcagccaccaggacaaggactgaaaataatgtctacagtccacagcttcagcatttccagagaccacatgtgagcttcttttaggtcccagtgatgggaccagaagcatctaaagcaaaaaaaaaaccaaaaaaaaatctagagatgtggctgtggctttttgggaggtggggcatgggaggaccagagacgaagggcttggaaggagacccccacatgcatcatttcctcctcttcacagtgtgctgggagtccagccgtgcactgtgccagatgcctcaggaggagaaccctccccagtgtactgtgaaggatgacacagcacttcttcctaatgacacgcgaccgtcctggtgcctctacatggttgatgcgggcagtgtgggaccctcagttctaggactggtccgcagagaaagcacccaggagcagagcgcttcggagcggtcctcagtggcgccacctgctggtgctaatagggacagccacaggcctcttgcagactggcccaccctgcctacttccctactgacaagttctttggtatttcaaaagggagaaaccactataaaagacaagaggaagggcaggtactaggtgtttcatttccagaattaaaaaaaaaatccatttaagacgtaccactgttttaccggactgaatgggactgtagtgccaagcacagccaggaaatagagaaactgttattatggaagggaatttgttcacatgggaaagcctcattaaatagattctatgtgtgatgtttgagtgaccaatgaaaatagctggcctcagttctgcatggcacactcccaagagcaacagttactattatcacaagcctggtataaataagatagaagcagccctggacccacagccagcaacctgggttattggcccagctctgtctttgtgtgcacatgtcatttggacatcttgtcacctttctaggtcctctgtaaagtgggaaaacagagtggagttggattgaatggtctccaagatcatttccagctctgacctttggtgttctcaggatttgtaaagcagagataggtaaaacacaaaagcagacccacggaccgacctttgtataactttggagtgtggttgctcatgcacatgtgaagtgcaggcagatcaaggttctgtggctttgtctgccctgtccattagagcacaatctggatagaatgccagccaccaagatgcatgaggggcagggtcaccatctcagaaggggaagcacaggaatgtgattgggatggttaaacctctcttctcctccctttgtgctggaacagcagttgaagtttggtcctggagtaattgctgtgatgacttgggaagccactgatctcctcttgcgtctgcccttggcctgcatcatgactaaataagttcaggacttctctgctttggttggcagaaggtagattccaaggagatcttgctggttgctgagaggcagctgttctagaaagtgaattacccttgtggttttttctttggggcccagctagctcctggtgaggttgtgtttttgtgttgtgtggcagaaaccaatggttagctggtcccctggtctgcagtttgtaaaagacctttcatgaggcctggagtcttgctacctgtggtgattgaactcaactattctgggtcacctggatgccaggcgctggcctagcttctggatgggagtgggaaggagcagagggcaggttcacctgtgcaggtcagacactctgcttccatcactggatggcattcctacgtctgcgtgtggttcacgttttctatatatattccctgtatatatttttttctagcacttgtctactttctgaagggaccatattcctgatcaactagtgtgcacagaggtggaacagggcagagagacctttatctctaggatgggttgctggttaggtgtaggcattcttgagtgcagcagcttggctttgaaacgcaagggttggagaatgttcccctgactgtactagactgggctctagggaaagaatcctgagacagccccccactcccccactgaccccacactagctgggctattatagaatttaatctaaatctagaaatactgcatttcacaaaatgattcactgtgtttccctttttttactgaggtccaattcatttagtcgtctaccagacactgcacatccagtgtatgcgaagcaccaggctaggctctgtaggcaataccactaaagtgtgcactctgatttagggagcaggacctgtggataccgattctaataactagcaaagtcaagtcgtggttatagaaagaagtgtggcttcagagggaggtgggtatttccaaatatggagttagggatggctccatgaggtaagtgacagtttgagctaagtcttgaaggatgcttggcagctagaaccatattttccatattcaggaattcaaatttgcctttattcagctagagagaaagagagaagggggtgtgggggagaaggaaaagagaattttcacacattttgaagttcctgagagcatttctgaggatatctgccgttagtgcagaaggtcgaaaccccaagtgcccccactaaacccaggctctttagctgtaaactgccatgcagtggcaggcctgcagccttcctgatgggaccacatggacagtggcacatgggacatttggctactcgttagcttaaacaactcagtcctgtgtcttctggttttgacaagaccacatttaggactgctgcccacctctgcctctttcattgagatttccgccttattgggtccctgtgctatgccacagataccaggtttggggttgttttgacccagaaggcattgggagtcccacattacagagcacacacacagctcaacacagccatttccctggccagaggcaccaagactgaagttcaggcccttagacactaggtggcagcggtgtggctgtgcagagccaaggatgaacctgagagcttgtttgcctctggctgggcactcttgttttgaattcctttgcccttatcgtgtagtccacggccttggtgaccaaggaccacctggctagcctgcttacatgcatgaccccatccaggttcacaggtattgccactgagtgatcttaggtagatcactgctcctggagaagcagagttgaggagtgtaagacaagggccatctagtgccaatgttccttgattcttatttgaggagctactatgtggtctttctgtaaacaagtgaacaaccaatgagactaaatatttgcaatagataggctaaggaatttgggttgagacaggagacggaggaaaaatgctttgatacaatgacagatggttagtctcttcagatttccctgaatattttccatcccgacaatatgcctcttagatacttgcagattagacatgtctctggatggaccacaagatacattcacaacatgtgttcagccttgagccctggctgtgtcctgtctggaaggaactgaggatgatgtggctataaagaggaggcagtgagctggcatgtgactgccttctgtgggcctgacctgtttgacatttgagggcctatgatgtgctaggtgctgtgttaggtacttccaaatgctttatctcattttaccccagtgcaagtgtgatatagtgaggatggtgaagacgtgggtatggttaagtcatgagttcagatcccgtgcttccaattacatgggtgttttcaaacaagtcactacttatgagtttcctcatctgtgaagggaagtttagtcatctgtttcaatgtggagacacacaggattgagggagtcctccgtcacagggtgactgtctggattctatgaggaaatacttggaaagcatgcagcacaatgcctggggtgcagctgaagctgagccactggtgtttcttcacagtatctctgtggggagggtgtattattcctttttatagggatctctataatgaagtgagaatcttgaaaatataagtgttatcctagatgggaggtgttaaaggtttttgccttgggaattttgtcatatttgttgcacagcaaggaaggactttcagaaaagcagggatgtggtgaggaagagcaggcaatagagagcagggaggaaaggctaagtagcatctggaacttgagaagtctaagggagccaaaatgagattttctattaaaaatgtctatcctcagccgggcgtggtagctcacgcctgtaatcccagcactttggggggtcgagatgggcagatcacctgaggtcaggagttcgagaccagcctgaccaatatggagaaaccccgtctctactaaaaatacaaaattagttgcgcgtggtggtgggcgcctgtaatcccagctactcaggagcctgaggcaggagaatcacttaaacccaggaggcggaggttgcagtgagccgagatcgcgccattgcactccagcctgggcaacaagagcgaaaccccgcctaaaaaaagaaaaaaaagaaaaagtctatcctctatgctactggcctgtttgtacaaagataaaatcattctaatttgtccggaatgactatcaaagatgatcaaatccccagggcctggtgtaacgttccaaatcatagcacaaatacagcttgaccttccttacagtccagaaaggacattctccctgagaaatgcccttggttgctgaggacagctctgtcctgtagtgacagagtgactgcctggctgtggctcttgggttcacagaatccctaatcctccaagcccctaagaggcagggcagggatgctacccacaatatatgcagaaccccagatggagcctgtgggagagagaggaaattaccgtcttcactgtaggcaaaggagaatggctgtgattagccatatatgcctataagaaggagcagagccatactgtccttgtgggttgggagaggggacacagaatccagggcaattgtctgaggtctcaaagtaagttaagccagagtcaaagccaaactccaagtcttggccaaggggatgagaaaagcaaggagctagtcttataggtcaaggaagatgaggtatagttaagagtcatcagtatcacagaacaggccagcagggctttattaggtatgtagaactattataaaccaaggatcttgggagatattaatatctgctggccagacctaaaaaaaactgaaggcccaaggaaagtgactggactcactggaaagtatctaacaaatactttggattccaaagtatttccaataccttgaagattcctttgaaaacatcaaagcacaaactcaaatctgcacaagattacaaaagcacaattttggtgttatttttagaatgcaatacacaaagctatgttcatttctctcagcaagcattttcctgggtagtagtaatagcttaggaatcaaatgccacttttgtttttccttttttcactagtttgaaataccacaaatcacaggtgagtcagtcctcccagaggaaaagacagtcctagggagaatcacaggcctggcagacaagaccacactgagagcagtagaaggaacctgcatgcttaagggacagaggactgtgttgtgttctcataatagaccgctggatgaagaagtggttaaaaaccaaccctcgaaaaacaaaaatccctggctaatcctgaaatatatttaacttgaagtctttggatgatttttttaaggttaaaaaaaagtttaggattattataaatcaatatttataaataagcaacaatgtatttggaatttttgtttacctgattaaatatgtttttggtatgtgt

SEQ ID NO: 135950 - DNA, 7388 bp, Homo sapiens
  Payload ID: 6582
  Gene Symbol: GPR161
  Gene Name: G protein-coupled receptor 161
  Uniprot ID: Q8N6U8
  ENST ID: ENST00000546300
  CDS Start-End: 153-1400
gactgctccctggccttttggttccgagggagtgcagggcagcagtgtgaagacctgtttacgtccactccccactccccggggctggcttcgggacgaattcactgtggtattaacagagcccgggacagagcctggcagaaggcagatggatgctcgtgcccgtcggctggatgaatgaaagctactatgctgtcctgtaccccatggtgtaccccatgaagatcacagggaaccgggctgtgatggcacttgtctacatctggcttcactcgctcatcggctgcctgccacccctgtttggttggtcatccgtggagtttgacgagttcaaatggatgtgtgtggctgcttggcaccgggagcctggctacacggccttctggcagatctggtgtgccctcttcccctttctggtcatgctggtgtgctatggcttcatcttccgcgtggccagggtcaaggcacgcaaggtgcactgtggcacagtcgtcatcgtggaggaggatgctcagaggaccgggaggaagaactccagcacctccacctcctcttcaggcagcaggaggaatgcctttcagggtgtggtctactcggccaaccagtgcaaagccctcatcaccatcctggtggtcctcggtgccttcatggtcacctggggcccctacatggttgtcatcgcctctgaggccctctgggggaaaagctccgtctccccgagcctggagacttgggccacatggctgtcctttgccagcgctgtctgccaccccctgatctatggactctggaacaagacagttcgcaaagaactactgggcatgtgctttggggaccggtattatcgggaaccatttgtgcaacgacagaggacttccaggctcttcagcatttccaacaggatcacagacctgggcctgtccccacacctcactgcgctcatggcaggtggacagcccctggggcacagcagcagcacgggggacactggcttcagctgctcccaggactcagggacagatatgatgctgcttgaggactacacgtctgatgacaaccctccctctcactgcacttgcccacccaagagaaggagctcggtgacatttgaggatgaagtggaacaaatcaaagaagctgccaagaactcgattcttcatgtgaaagctgaagtacacaagtccttggacagttacgcagcaagcttggccaaagccattgaggccgaagccaaaatcaacttatttggggaggaggctttgccaggggtcttggttacagcacggactgtcccggggggcggcttcgggggccgccgaggcagcagaactcttgtgagccagaggctgcagttgcagagcatcgaagaaggagatgttttagctgccgagcagagatgagggcctcagggtgccgtggggctgcagcctgagaggctggcccggggaggagttcccatcaccgcctgtgccgcggccttgggagcatgtcactgtgtacagctggccacacacagggaaggagcagcatctggtatgcagccaccaggacaaggactgaaaataatgtctacagtccacagcttcagcatttccagagaccacatgtgagcttcttttaggtcccagtgatgggaccagaagcatctaaagcaaaaaaaaaaccaaaaaaaaatctagagatgtggctgtggctttttgggaggtggggcatgggaggaccagagacgaagggcttggaaggagacccccacatgcatcatttcctcctcttcacagtgtgctgggagtccagccgtgcactgtgccagatgcctcaggaggagaaccctccccagtgtactgtgaaggatgacacagcacttcttcctaatgacacgcgaccgtcctggtgcctctacatggttgatgcgggcagtgtgggaccctcagttctaggactggtccgcagagaaagcacccaggagcagagcgcttcggagcggtcctcagtggcgccacctgctggtgctaatagggacagccacaggcctcttgcagactggcccaccctgcctacttccctactgacaagttctttggtatttcaaaagggagaaaccactataaaagacaagaggaagggcaggtactaggtgtttcatttccagaattaaaaaaaaaatccatttaagacgtaccactgttttaccggactgaatgggactgtagtgccaagcacagccaggaaatagagaaactgttattatggaagggaatttgttcacatgggaaagcctcattaaatagattctatgtgtgatgtttgagtgaccaatgaaaatagctggcctcagttctgcatggcacactcccaagagcaacagttactattatcacaagcctggtataaataagatagaagcagccctggacccacagccagcaacctgggttattggcccagctctgtctttgtgtgcacatgtcatttggacatcttgtcacctttctaggtcctctgtaaagtgggaaaacagagtggagttggattgaatggtctccaagatcatttccagctctgacctttggtgttctcaggatttgtaaagcagagataggtaaaacacaaaagcagacccacggaccgacctttgtataactttggagtgtggttgctcatgcacatgtgaagtgcaggcagatcaaggttctgtggctttgtctgccctgtccattagagcacaatctggatagaatgccagccaccaagatgcatgaggggcagggtcaccatctcagaaggggaagcacaggaatgtgattgggatggttaaacctctcttctcctccctttgtgctggaacagcagttgaagtttggtcctggagtaattgctgtgatgacttgggaagccactgatctcctcttgcgtctgcccttggcctgcatcatgactaaataagttcaggacttctctgctttggttggcagaaggtagattccaaggagatcttgctggttgctgagaggcagctgttctagaaagtgaattacccttgtggttttttctttggggcccagctagctcctggtgaggttgtgtttttgtgttgtgtggcagaaaccaatggttagctggtcccctggtctgcagtttgtaaaagacctttcatgaggcctggagtcttgctacctgtggtgattgaactcaactattctgggtcacctggatgccaggcgctggcctagcttctggatgggagtgggaaggagcagagggcaggttcacctgtgcaggtcagacactctgcttccatcactggatggcattcctacgtctgcgtgtggttcacgttttctatatatattccctgtatatatttttttctagcacttgtctactttctgaagggaccatattcctgatcaactagtgtgcacagaggtggaacagggcagagagacctttatctctaggatgggttgctggttaggtgtaggcattcttgagtgcagcagcttggctttgaaacgcaagggttggagaatgttcccctgactgtactagactgggctctagggaaagaatcctgagacagccccccactcccccactgaccccacactagctgggctattatagaatttaatctaaatctagaaatactgcatttcacaaaatgattcactgtgtttccctttttttactgaggtccaattcatttagtcgtctaccagacactgcacatccagtgtatgcgaagcaccaggctaggctctgtaggcaataccactaaagtgtgcactctgatttagggagcaggacctgtggataccgattctaataactagcaaagtcaagtcgtggttatagaaagaagtgtggcttcagagggaggtgggtatttccaaatatggagttagggatggctccatgaggtaagtgacagtttgagctaagtcttgaaggatgcttggcagctagaaccatattttccatattcaggaattcaaatttgcctttattcagctagagagaaagagagaagggggtgtgggggagaaggaaaagagaattttcacacattttgaagttcctgagagcatttctgaggatatctgccgttagtgcagaaggtcgaaaccccaagtgcccccactaaacccaggctctttagctgtaaactgccatgcagtggcaggcctgcagccttcctgatgggaccacatggacagtggcacatgggacatttggctactcgttagcttaaacaactcagtcctgtgtcttctggttttgacaagaccacatttaggactgctgcccacctctgcctctttcattgagatttccgccttattgggtccctgtgctatgccacagataccaggtttggggttgttttgacccagaaggcattgggagtcccacattacagagcacacacacagctcaacacagccatttccctggccagaggcaccaagactgaagttcaggcccttagacactaggtggcagcggtgtggctgtgcagagccaaggatgaacctgagagcttgtttgcctctggctgggcactcttgttttgaattcctttgcccttatcgtgtagtccacggccttggtgaccaaggaccacctggctagcctgcttacatgcatgaccccatccaggttcacaggtattgccactgagtgatcttaggtagatcactgctcctggagaagcagagttgaggagtgtaagacaagggccatctagtgccaatgttccttgattcttatttgaggagctactatgtggtctttctgtaaacaagtgaacaaccaatgagactaaatatttgcaatagataggctaaggaatttgggttgagacaggagacggaggaaaaatgctttgatacaatgacagatggttagtctcttcagatttccctgaatattttccatcccgacaatatgcctcttagatacttgcagattagacatgtctctggatggaccacaagatacattcacaacatgtgttcagccttgagccctggctgtgtcctgtctggaaggaactgaggatgatgtggctataaagaggaggcagtgagctggcatgtgactgccttctgtgggcctgacctgtttgacatttgagggcctatgatgtgctaggtgctgtgttaggtacttccaaatgctttatctcattttaccccagtgcaagtgtgatatagtgaggatggtgaagacgtgggtatggttaagtcatgagttcagatcccgtgcttccaattacatgggtgttttcaaacaagtcactacttatgagtttcctcatctgtgaagggaagtttagtcatctgtttcaatgtggagacacacaggattgagggagtcctccgtcacagggtgactgtctggattctatgaggaaatacttggaaagcatgcagcacaatgcctggggtgcagctgaagctgagccactggtgtttcttcacagtatctctgtggggagggtgtattattcctttttatagggatctctataatgaagtgagaatcttgaaaatataagtgttatcctagatgggaggtgttaaaggtttttgccttgggaattttgtcatatttgttgcacagcaaggaaggactttcagaaaagcagggatgtggtgaggaagagcaggcaatagagagcagggaggaaaggctaagtagcatctggaacttgagaagtctaagggagccaaaatgagattttctattaaaaatgtctatcctcagccgggcgtggtagctcacgcctgtaatcccagcactttggggggtcgagatgggcagatcacctgaggtcaggagttcgagaccagcctgaccaatatggagaaaccccgtctctactaaaaatacaaaattagttgcgcgtggtggtgggcgcctgtaatcccagctactcaggagcctgaggcaggagaatcacttaaacccaggaggcggaggttgcagtgagccgagatcgcgccattgcactccagcctgggcaacaagagcgaaaccccgcctaaaaaaagaaaaaaaagaaaaagtctatcctctatgctactggcctgtttgtacaaagataaaatcattctaatttgtccggaatgactatcaaagatgatcaaatccccagggcctggtgtaacgttccaaatcatagcacaaatacagcttgaccttccttacagtccagaaaggacattctccctgagaaatgcccttggttgctgaggacagctctgtcctgtagtgacagagtgactgcctggctgtggctcttgggttcacagaatccctaatcctccaagcccctaagaggcagggcagggatgctacccacaatatatgcagaaccccagatggagcctgtgggagagagaggaaattaccgtcttcactgtaggcaaaggagaatggctgtgattagccatatatgcctataagaaggagcagagccatactgtccttgtgggttgggagaggggacacagaatccagggcaattgtctgaggtctcaaagtaagttaagccagagtcaaagccaaactccaagtcttggccaaggggatgagaaaagcaaggagctagtcttataggtcaaggaagatgaggtatagttaagagtcatcagtatcacagaacaggccagcagggctttattaggtatgtagaactattataaaccaaggatcttgggagatattaatatctgctggccagacctaaaaaaaactgaaggcccaaggaaagtgactggactcactggaaagtatctaacaaatactttggattccaaagtatttccaataccttgaagattcctttgaaaacatcaaagcacaaactcaaatctgcacaagattacaaaagcacaattttggtgttatttttagaatgcaatacacaaagctatgttcatttctctcagcaagcattttcctgggtagtagtaatagcttaggaatcaaatgccacttttgtttttccttttttcactagtttgaaataccacaaatcacaggtgagtcagtcctcccagaggaaaagacagtcctagggagaatcacaggcctggcagacaagaccacactgagagcagtagaaggaacctgcatgcttaagggacagaggactgtgttgtgttctcataatagaccgctggatgaagaagtggttaaaaaccaaccctcgaaaaacaaaaatccctggctaatcctgaaatatatttaacttgaagtctttggatgatttttttaaggttaaaaaaaagtttaggattattataaatcaatatttataaataagcaacaatgtatttggaatttttgtttacctgattaaatatgtttttggtatgtgt

SEQ ID NO: 135951 - DNA, 2768 bp, Homo sapiens
  Payload ID: 6583
  Gene Symbol: GPR162
  Gene Name: G protein-coupled receptor 162
  Uniprot ID: Q16538
  ENST ID: ENST00000311268
  CDS Start-End: 788-2554
ttccttgcccctcctccccgagtcaccaccgtccagttccccaccctgcactcgtttcccgcccccccccgccccccacaaagctgtcctgccttccctctggcctgggctcactggcaggacgaccccgggagagagggtcctggagagtgagaggggcagagaccgagtgagccgtgggctgagcctgggaggccgggactgagggggaggagggaggcccgggggaagggagggagggagagagggaaggagggaggagggcgggcgagctggagccggcaggcagcgggagcccgagagagccgcgtcgggagtgcggtctccatggcagtgctgggcgcagccggagagagcctgtccagggggctgagccccacccccaaatccctggggcatccagaagattcctgactggtcaagaaccagaggcaaaagagacctggaagtcccagcatggggaccagaaccccccagccagcctcatagttgggaaagtagccagcttgcctgccccatcaattgcagggatgcttaaggaaggccccgcccagtatgaaagctgaggattgcctctgctgaccctcagtctcctcccctgccctctacatctgccctcagctgggtccatcatgcaatgctgagcactggggtgagcctgggggcagcctgcctgctgacagggcgaggattgtggggatcatgggagtgtttgtgagtggggctcctgggtgagacctagcccccacccccacagagctcaagggggtggggggctgaggataggatggctcggggcggggcgggggcagaggaggcctccctgcgctccaacgcattgtcctggctggcctgtgggctcctggcgctgctggccaatgcctggatcatcctcagcatctcggccaagcagcagaagcacaagccactggagctgctgctctgcttcctagcgggcacacacatactcatggcagctgtgcccctcaccacctttgccgtggtgcagctgcgtcgtcaggcttcctccgactatgactggaacgagagtatctgcaaggtcttcgtgtccacctactacaccctggcgctggccacctgcttcacggtcgcctccctctcctaccatcgcatgtggatggtgcgctggcccgtcaactaccgcctcagcaacgccaagaagcaggcactgcatgccgtcatgggcatctggatggtcagcttcatcctctccacactgccctccattggctggcacaacaacggcgagcgctactatgcccgcggctgccagttcatagtctccaagatcggcctcggctttggcgtttgcttcagcctcttgctacttgggggaattgtcatgggtctggtctgtgtggccatcaccttctaccagacactgtgggcccggccccggagggctcggcaggcccggagagtggggggtggtggggggaccaaagcgggtgggccaggggccttgggtacccggccagcttttgaggtaccagccattgtggtggaggatgcccgagggaagcggcggtcctcgctggatggctcggagtctgccaagacatccctgcaggtcaccaacttggtcagcgccatcgtctttctctatgactcactcacaggggtgcccatcttggtggtgagcttcttctccctcaagtcggactcggcgcccccctggatggtgctggctgtgctgtggtgctccatggcacagacgctgctgctgccctccttcatctggtcctgcgagcgctaccgcgccgacgtgcgcacagtgtgggagcaatgcgtggccatcatgtctgaggaggatggagatgacgatgggggctgtgacgactatgcagagggccgagtttgcaaagttcgctttgatgctaacggagccacaggaccagggagccgggaccccgcccaggtgaagctgctgcctggaaggcacatgctcttccctcctcttgagagagtccactacttacaggtccccctatcccggcgtctgtcccatgatgagacaaacatcttctctacccctcgggaaccaggctccttcctgcacaagtggtcatcctctgatgacatccgggtcctcccagcccagagccgggccctcgggggtcctcctgagtacctgggacaaagacacaggttggaggacgaggaggacgaggaagaggctgaaggtggggggctggccagccttcgccaattcttggagagtggggttctggggtcaggtgggggacccccacggggtcctggcttcttccgggaggagatcaccaccttcatcgatgagacacctctgccttctccgactgcctcaccagggcactctcctcgtcggccccggccactgggcctctcaccccgccgactctcccttgggtcccctgagagcagagccgttggacttcctttgggactaagcgcagggagacgctgctccctgacggggggtgaagaaagtgcaagggcttggggaggatcctggggcccaggcaaccccatctttccccagctgaccctgtgagcccaagcaggcctgctgaactcagaggagaaagcctgagtgagtaacacctcattctggccgagagtagggcagctgcctccagactctggggagacgggcgctagatttggggctcagaaggccctgctctctcccatccaagtgaccagatgccctactcagcttccatcacccctagcaatatgtattaaagtctgaagtgttgccatgg

SEQ ID NO: 135952 - DNA, 1150 bp, Homo sapiens
  Payload ID: 6583
  Gene Symbol: GPR162
  Gene Name: G protein-coupled receptor 162
  ENST ID: ENST00000382315
  CDS Start-End: 79-933
ctccatggcagtgctgggcgcagccggagagaggtggtgagcttcttctccctcaagtcggactcggcgcccccctggatggtgctggctgtgctgtggtgctccatggcacagacgctgctgctgccctccttcatctggtcctgcgagcgctaccgcgccgacgtgcgcacagtgtgggagcaatgcgtggccatcatgtctgaggaggatggagatgacgatgggggctgtgacgactatgcagagggccgagtttgcaaagttcgctttgatgctaacggagccacaggaccagggagccgggaccccgcccaggtgaagctgctgcctggaaggcacatgctcttccctcctcttgagagagtccactacttacaggtccccctatcccggcgtctgtcccatgatgagacaaacatcttctctacccctcgggaaccaggctccttcctgcacaagtggtcatcctctgatgacatccgggtcctcccagcccagagccgggccctcgggggtcctcctgagtacctgggacaaagacacaggttggaggacgaggaggacgaggaagaggctgaaggtggggggctggccagccttcgccaattcttggagagtggggttctggggtcaggtgggggacccccacggggtcctggcttcttccgggaggagatcaccaccttcatcgatgagacacctctgccttctccgactgcctcaccagggcactctcctcgtcggccccggccactgggcctctcaccccgccgactctcccttgggtcccctgagagcagagccgttggacttcctttgggactaagcgcagggagacgctgctccctgacggggggtgaagaaagtgcaagggcttggggaggatcctggggcccaggcaaccccatctttccccagctgaccctgtgagcccaagcaggcctgctgaactcagaggagaaagcctgagtgagtaacacctcattctggccgagagtagggcagctgcctccagactctggggagacgggcgctagatttggggctcagaaggccctgctctctcccatccaagtgaccagatgccctactcagcttccatcacccctagcaatatgtattaaagtctgaagtgttgccatggaaa

SEQ ID NO: 135953 - DNA, 1610 bp, Homo sapiens
  Payload ID: 6583
  Gene Symbol: GPR162
  Gene Name: G protein-coupled receptor 162
  Uniprot ID: Q16538
  ENST ID: ENST00000428545
  CDS Start-End: 479-1393
cagagaccgagtgagccgtgggctgagcctgggaggccgggactgagggggaggagggaggcccgggggaagggagggagggagagagggaaggagggaggagggcgggcgagctggagccggcaggcagcgggagcccgagagagccgcgtcgggagtgcggtctccatggcagtgctgggcgcagccggagagagcctgtccagggggctgagccccacccccaaatccctggggcatccagaagattcctgactggtcaagaaccagaggcaaaagagacctggaagtcccagcatggggaccagaaccccccagccagcctcatagttgggaaagtagccagcttgcctgccccatcaattgcagggatgcttaaggaaggccccgcccagtatgaaagctgaggattgcctctgctgaccctcagtctcctcccctgccctctacatctgccctcagctgggtccatcatgcaatgctgagcactggggtggtgagcttcttctccctcaagtcggactcggcgcccccctggatggtgctggctgtgctgtggtgctccatggcacagacgctgctgctgccctccttcatctggtcctgcgagcgctaccgcgccgacgtgcgcacagtgtgggagcaatgcgtggccatcatgtctgaggaggatggagatgacgatgggggctgtgacgactatgcagagggccgagtttgcaaagttcgctttgatgctaacggagccacaggaccagggagccgggaccccgcccaggtgaagctgctgcctggaaggcacatgctcttccctcctcttgagagagtccactacttacaggtccccctatcccggcgtctgtcccatgatgagacaaacatcttctctacccctcgggaaccaggctccttcctgcacaagtggtcatcctctgatgacatccgggtcctcccagcccagagccgggccctcgggggtcctcctgagtacctgggacaaagacacaggttggaggacgaggaggacgaggaagaggctgaaggtggggggctggccagccttcgccaattcttggagagtggggttctggggtcaggtgggggacccccacggggtcctggcttcttccgggaggagatcaccaccttcatcgatgagacacctctgccttctccgactgcctcaccagggcactctcctcgtcggccccggccactgggcctctcaccccgccgactctcccttgggtcccctgagagcagagccgttggacttcctttgggactaagcgcagggagacgctgctccctgacggggggtgaagaaagtgcaagggcttggggaggatcctggggcccaggcaaccccatctttccccagctgaccctgtgagcccaagcaggcctgctgaactcagaggagaaagcctgagtgagtaacacctcattctggccgagagtagggcagctgcctccagactctggggagacgggcgctagatttggggctcagaaggccctgctctctcccatccaagtgaccagatgccctactcagcttccatcacccctagcaatatgtattaaagtctgaagtgttgccatggaaa

SEQ ID NO: 135954 - DNA, 683 bp, Homo sapiens
  Payload ID: 6583
  Gene Symbol: GPR162
  Gene Name: G protein-coupled receptor 162
  ENST ID: ENST00000545321
  CDS Start-End: 1-683
ccatcaccttctaccagacactgtgggcccggccccggagggctcggcaggcccggagagtggggggtggtggggggaccaaagcgggtgggccaggggccttgggtacccggccagcttttgaggtaccagccattgtggtggaggatgcccgagggaagcggcggtcctcgctggatggctcggagtctgccaagacatccctgcaggtcaccaacttggtggtgagcttcttctccctcaagtcggactcggcgcccccctggatggtgctggctgtgctgtggtgctccatggcacagacgctgctgctgccctccttcatctggtcctgcgagcgctaccgcgccgacgtgcgcacagtgtgggagcaatgcgtggccatcatgtctgaggaggatggagatgacgatgggggctgtgacgactatgcagagggccgagtttgcaaagttcgctttgatgctaacggagccacaggaccagggagccgggaccccgcccaggtgaagctgctgcctggaaggcacatgctcttccctcctcttgagagagtccactacttacagttgaagaagctggatctggcagctgcggcagcacacaccttctttgtagcaaaccccatgcacctgcagatgcgggaggacatggctaagtacagacgaatgtcgggagttcgg

SEQ ID NO: 135955 - DNA, 2062 bp, Homo sapiens
  Payload ID: 6584
  Gene Symbol: GPR17
  Gene Name: G protein-coupled receptor 17
  Uniprot ID: Q13304
  ENST ID: ENST00000272644
  CDS Start-End: 75-1178
ccgacacccacgggcggagatcacctgctgccccgcagacccctgtcccttcctcccggaccagcagctagaggatgtccaaacggagttggtgggctggatccagaaagcccccaagagagatgctgaaactctcaggctctgactccagccaaagcatgaatggccttgaagtggctcccccaggtctgatcaccaacttctccctggccacggcagagcaatgtggccaggagacgccactggagaacatgctgttcgcctccttctaccttctggattttatcctggctttagttggcaataccctggctctgtggcttttcatccgagaccacaagtccgggaccccggccaacgtgttcctgatgcatctggccgtggccgacttgtcgtgcgtgctggtcctgcccacccgcctggtctaccacttctctgggaaccactggccatttggggaaatcgcatgccgtctcaccggcttcctcttctacctcaacatgtacgccagcatctacttcctcacctgcatcagcgccgaccgtttcctggccattgtgcacccggtcaagtccctcaagctccgcaggcccctctacgcacacctggcctgtgccttcctgtgggtggtggtggctgtggccatggccccgctgctggtgagcccacagaccgtgcagaccaaccacacggtggtctgcctgcagctgtaccgggagaaggcctcccaccatgccctggtgtccctggcagtggccttcaccttcccgttcatcaccacggtcacctgctacctgctgatcatccgcagcctgcggcagggcctgcgtgtggagaagcgcctcaagaccaaggcagtgcgcatgatcgccatagtgctggccatcttcctggtctgcttcgtgccctaccacgtcaaccgctccgtctacgtgctgcactaccgcagccatggggcctcctgcgccacccagcgcatcctggccctggcaaaccgcatcacctcctgcctcaccagcctcaacggggcactcgaccccatcatgtatttcttcgtggctgagaagttccgccacgccctgtgcaacttgctctgtggcaaaaggctcaagggcccgccccccagcttcgaagggaaaaccaacgagagctcgctgagtgccaagtcagagctgtgagcggggggcgccgtccaggccgagcgcagactgtttaggactcagcagacccagcaagaggcatctgccctttccccagccacctccccagcaagcaacctgaaatctcagcagatgcccaccatttctctagatcgcctagtctcaacccataaaaaggaagaactgacaaaggggatccatcggccacccctctgcaggggcttgtgatggctacaatggctcctagacactcaacgacttcatctgtggcagggagagaggaggccggaagaacaacccctgaacaatggaggcctttctttcccgctaggctcccagcctccttcccgctacagaatcgctcatcggcgaggctcagcagaaagaccctgaaggcaggctgcaaatgacccagaagagggacctgggagtcctggtggggacggggagggagtctcaatactcctttgcagtgcaaggtactctgagtcccctctgtagtgcctctgccagacacacactgcctgagttgaagagacacaggccacacatttcaggctggttgccagcggacgtcagcactcacggcctgcagggactcagcacagctctggattctggatctctcctgctgtaaccccacgcacaagcctgcaacccccagagctctttgacaggctcccaggcctcccagtcctggacaagcatgtgcagtcacgggagctcagctcaggccagggctgggctgtgcacctgcctcccactgacccagacccacttcctccagagaggcctctctccgcctgagctatttcccttgctagtgtgcagatatttccctaacatgtccttttttgtatttgtttgtacggaccataaatataactgtagctttaagacta

SEQ ID NO: 135956 - DNA, 1177 bp, Homo sapiens
  Payload ID: 6584
  Gene Symbol: GPR17
  Gene Name: G protein-coupled receptor 17
  Uniprot ID: Q13304
  ENST ID: ENST00000393018
  CDS Start-End: 74-1177
gagaaaatactcccagctggcctgatacccaggcacaggcttctcctaaacacaggtctccccacctgtcaggatgtccaaacggagttggtgggctggatccagaaagcccccaagagagatgctgaaactctcaggctctgactccagccaaagcatgaatggccttgaagtggctcccccaggtctgatcaccaacttctccctggccacggcagagcaatgtggccaggagacgccactggagaacatgctgttcgcctccttctaccttctggattttatcctggctttagttggcaataccctggctctgtggcttttcatccgagaccacaagtccgggaccccggccaacgtgttcctgatgcatctggccgtggccgacttgtcgtgcgtgctggtcctgcccacccgcctggtctaccacttctctgggaaccactggccatttggggaaatcgcatgccgtctcaccggcttcctcttctacctcaacatgtacgccagcatctacttcctcacctgcatcagcgccgaccgtttcctggccattgtgcacccggtcaagtccctcaagctccgcaggcccctctacgcacacctggcctgtgccttcctgtgggtggtggtggctgtggccatggccccgctgctggtgagcccacagaccgtgcagaccaaccacacggtggtctgcctgcagctgtaccgggagaaggcctcccaccatgccctggtgtccctggcagtggccttcaccttcccgttcatcaccacggtcacctgctacctgctgatcatccgcagcctgcggcagggcctgcgtgtggagaagcgcctcaagaccaaggcagtgcgcatgatcgccatagtgctggccatcttcctggtctgcttcgtgccctaccacgtcaaccgctccgtctacgtgctgcactaccgcagccatggggcctcctgcgccacccagcgcatcctggccctggcaaaccgcatcacctcctgcctcaccagcctcaacggggcactcgaccccatcatgtatttcttcgtggctgagaagttccgccacgccctgtgcaacttgctctgtggcaaaaggctcaagggcccgccccccagcttcgaagggaaaaccaacgagagctcgctgagtgccaagtcagagctgtga

SEQ ID NO: 135957 - DNA, 581 bp, Homo sapiens
  Payload ID: 6584
  Gene Symbol: GPR17
  Gene Name: G protein-coupled receptor 17
  ENST ID: ENST00000423019
  CDS Start-End: 172-581
gaccaagtcagagtactgtggaacctggattcctggggaatggggtccccatgaggaactccacattggactaagaacagaccctgttcctggaagcagcaggaaaccatctctggtgttagaacttcaggcatcttgaaacactctgaagccgggggcaatcttttcaggatgtccaaacggagttggtgggctggatccagaaagcccccaagagagatgctgaaactctcaggctctgactccagccaaagcatgaatggccttgaagtggctcccccaggtctgatcaccaacttctccctggccacggcagagcaatgtggccaggagacgccactggagaacatgctgttcgcctccttctaccttctggattttatcctggctttagttggcaataccctggctctgtggcttttcatccgagaccacaagtccgggaccccggccaacgtgttcctgatgcatctggccgtggccgacttgtcgtgcgtgctggtcctgcccacccgcctggtctaccacttctctgggaaccactggccatttggggaaatcgcatgccgtctcaccggctt

SEQ ID NO: 135958 - DNA, 2598 bp, Homo sapiens
  Payload ID: 6584
  Gene Symbol: GPR17
  Gene Name: G protein-coupled receptor 17
  Uniprot ID: Q13304
  ENST ID: ENST00000544369
  CDS Start-End: 612-1715
aaacgtcctgttgtgtccctcagctccagcccaagccccccacccagcccccgcctgctctgagtctctgagacagtcacacactcagactatgtggccaagctgggggcggggggcatgggctagggacacactagaatattcacgctccggtggcagcagcagcagcagccagaggagcagcccgacacaacaagggacccctcaggaatgaagcagcctttcagggccagaggggctgtggtctcccttcctctccttaaatagccagcgttccacccacagcggcaaggagccccctgccaccaccgacacccacgggcggagatcacctgctgccccgcagacccctgtcccttcctcccggaccagcagctagagctctccgccctcaccgtggttttagcagtcctagggaaagtgccagccgagaccagccagaccaagtcagagtactgtggaacctggattcctggggaatggggtccccatgaggaactccacattggactaagaacagaccctgttcctggaagcagcaggaaaccatctctggtgttagaacttcaggcatcttgaaacactctgaagccgggggcaatcttttcaggatgtccaaacggagttggtgggctggatccagaaagcccccaagagagatgctgaaactctcaggctctgactccagccaaagcatgaatggccttgaagtggctcccccaggtctgatcaccaacttctccctggccacggcagagcaatgtggccaggagacgccactggagaacatgctgttcgcctccttctaccttctggattttatcctggctttagttggcaataccctggctctgtggcttttcatccgagaccacaagtccgggaccccggccaacgtgttcctgatgcatctggccgtggccgacttgtcgtgcgtgctggtcctgcccacccgcctggtctaccacttctctgggaaccactggccatttggggaaatcgcatgccgtctcaccggcttcctcttctacctcaacatgtacgccagcatctacttcctcacctgcatcagcgccgaccgtttcctggccattgtgcacccggtcaagtccctcaagctccgcaggcccctctacgcacacctggcctgtgccttcctgtgggtggtggtggctgtggccatggccccgctgctggtgagcccacagaccgtgcagaccaaccacacggtggtctgcctgcagctgtaccgggagaaggcctcccaccatgccctggtgtccctggcagtggccttcaccttcccgttcatcaccacggtcacctgctacctgctgatcatccgcagcctgcggcagggcctgcgtgtggagaagcgcctcaagaccaaggcagtgcgcatgatcgccatagtgctggccatcttcctggtctgcttcgtgccctaccacgtcaaccgctccgtctacgtgctgcactaccgcagccatggggcctcctgcgccacccagcgcatcctggccctggcaaaccgcatcacctcctgcctcaccagcctcaacggggcactcgaccccatcatgtatttcttcgtggctgagaagttccgccacgccctgtgcaacttgctctgtggcaaaaggctcaagggcccgccccccagcttcgaagggaaaaccaacgagagctcgctgagtgccaagtcagagctgtgagcggggggcgccgtccaggccgagcgcagactgtttaggactcagcagacccagcaagaggcatctgccctttccccagccacctccccagcaagcaacctgaaatctcagcagatgcccaccatttctctagatcgcctagtctcaacccataaaaaggaagaactgacaaaggggatccatcggccacccctctgcaggggcttgtgatggctacaatggctcctagacactcaacgacttcatctgtggcagggagagaggaggccggaagaacaacccctgaacaatggaggcctttctttcccgctaggctcccagcctccttcccgctacagaatcgctcatcggcgaggctcagcagaaagaccctgaaggcaggctgcaaatgacccagaagagggacctgggagtcctggtggggacggggagggagtctcaatactcctttgcagtgcaaggtactctgagtcccctctgtagtgcctctgccagacacacactgcctgagttgaagagacacaggccacacatttcaggctggttgccagcggacgtcagcactcacggcctgcagggactcagcacagctctggattctggatctctcctgctgtaaccccacgcacaagcctgcaacccccagagctctttgacaggctcccaggcctcccagtcctggacaagcatgtgcagtcacgggagctcagctcaggccagggctgggctgtgcacctgcctcccactgacccagacccacttcctccagagaggcctctctccgcctgagctatttcccttgctagtgtgcagatatttccctaacatgtccttttttgtatttgtttgtacggaccataaatataactgtagctttaagact

SEQ ID NO: 135959 - DNA, 1786 bp, Homo sapiens
  Payload ID: 6585
  Gene Symbol: GPR171
  Gene Name: G protein-coupled receptor 171
  Uniprot ID: O14626
  ENST ID: ENST00000309180
  CDS Start-End: 232-1191
ggttgctactgctgcggctaaccaaacagctcatgcttctctgaagacttgcagcaaggcttgctgaggctcacagaagatagccccagtgttttggagtggttttgaatgtgattctgagatcagactgactgagctggaatcctggctttatatcttaccagctacacaaccttggagtcttagaaattttttcttttcaataagcagtcatccttactttccctcaagatgacaaacagttcgttcttctgcccagtttataaagatctggagccattcacgtattttttttatttagttttccttgttggaattattggaagttgttttgcaacctgggcttttatacagaagaatacgaatcacaggtgtgtgagcatctacttaattaatttgcttacagccgatttcctgcttactctggcattaccagtgaaaattgttgttgacttgggtgtggcaccttggaagctgaagatattccactgccaagtaacagcctgcctcatctatatcaatatgtatttatcaattatcttcttagcatttgtcagcattgaccgctgtcttcagctgacacacagctgcaagatctaccgaatacaagaacccggatttgccaaaatgatatcaaccgttgtgtggctaatggtccttcttataatggtgccaaatatgatgattcccatcaaagacatcaaggaaaagtcaaatgtgggttgtatggagtttaaaaaggaatttggaagaaattggcatttgctgacaaatttcatatgtgtagcaatatttttaaatttctcagccatcattttaatatccaattgccttgtaattcgacagctctacagaaacaaagataatgaaaattacccaaatgtgaaaaaggctctcatcaacatacttttagtgaccacgggctacatcatatgctttgttccttaccacattgtccgaatcccgtataccctcagccagacagaagtcataactgattgctcaaccaggatttcactcttcaaagccaaagaggctacactgctcctggctgtgtcgaacctgtgctttgatcctatcctgtactatcacctctcaaaagcattccgctcaaaggtcactgagacttttgcctcacctaaagagaccaaggctcagaaagaaaaattaagatgtgaaaataatgcataaaagacaggattttttgtgctaccaattctggccttactggaccataaagttaattatagctttgaaagataaaaaaaaaaaaaacaaaaaaaaactcagtatgaaaaaatacagttagctagcaaatatggacaggtttacttagaaatcctgtttctaaatgcaagtcaagctttattgttaggcttgctgctactcattaacccaaatatttgtacaaaaaactaaagagtctcattgaacgaatgtaaaatcctgcaatatccttgaaatccaaaagaggtccatgacatagacccaaaggtattcatgagttattcatttaaatgcctggaactgacttcttgataaaaatataaaaaataatttccatgtaagttaccagaaagcccaccagcaacataattttaaagcctttcagattacttttaaaaaatgcagcttacatataacaacttgtgcctattttatttctaatctatcacttcaaaagatggtaatctttcaactcattattcctccaatttttaatgtcgaatttttttctaacacaataaccaaaagcttttatttataaaaaggcttgaaaaatata

SEQ ID NO: 135960 - DNA, 205 bp, Homo sapiens
  Payload ID: 6585
  Gene Symbol: GPR171
  Gene Name: G protein-coupled receptor 171
  ENST ID: ENST00000480322
  CDS Start-End: 152-205
ctgcaatggggttgctactgctgcggctaaccaaacagctcatgcttctctgaagacttgcagcaaggcttgctgaggctcacagaagatagccccagagtcttagaaattttttcttttcaataagcagtcatccttactttccctcaagatgacaaacagttcgttcttctgcccagtttataaagatctggagccattcacg

SEQ ID NO: 135961 - DNA, 960 bp, Homo sapiens
  Payload ID: 6585
  Gene Symbol: GPR171
  Gene Name: G protein-coupled receptor 171
  Uniprot ID: O14626
  ENST ID: ENST00000617554
  CDS Start-End: 1-960
atgacaaacagttcgttcttctgcccagtttataaagatctggagccattcacgtattttttttatttagttttccttgttggaattattggaagttgttttgcaacctgggcttttatacagaagaatacgaatcacaggtgtgtgagcatctacttaattaatttgcttacagccgatttcctgcttactctggcattaccagtgaaaattgttgttgacttgggtgtggcaccttggaagctgaagatattccactgccaagtaacagcctgcctcatctatatcaatatgtatttatcaattatcttcttagcatttgtcagcattgaccgctgtcttcagctgacacacagctgcaagatctaccgaatacaagaacccggatttgccaaaatgatatcaaccgttgtgtggctaatggtccttcttataatggtgccaaatatgatgattcccatcaaagacatcaaggaaaagtcaaatgtgggttgtatggagtttaaaaaggaatttggaagaaattggcatttgctgacaaatttcatatgtgtagcaatatttttaaatttctcagccatcattttaatatccaattgccttgtaattcgacagctctacagaaacaaagataatgaaaattacccaaatgtgaaaaaggctctcatcaacatacttttagtgaccacgggctacatcatatgctttgttccttaccacattgtccgaatcccgtataccctcagccagacagaagtcataactgattgctcaaccaggatttcactcttcaaagccaaagaggctacactgctcctggctgtgtcgaacctgtgctttgatcctatcctgtactatcacctctcaaaagcattccgctcaaaggtcactgagacttttgcctcacctaaagagaccaaggctcagaaagaaaaattaagatgtgaaaataatgcataa

SEQ ID NO: 135962 - DNA, 4485 bp, Homo sapiens
  Payload ID: 6586
  Gene Symbol: GPR173
  Gene Name: G protein-coupled receptor 173
  Uniprot ID: Q9NS66
  ENST ID: ENST00000332582
  CDS Start-End: 492-1613
accggcagccaggcaggcagacgggtagcaggggccagcactggcccccctcccagcttggcagtggcatgaagatgggagtgggagtgtatagtggaggaagcacctgccgggacccccacctgccagctagttggacaccccaaggctgtgtgctgcccacctggtgttccccaacacccccagccctacccagtgcacccctccggtgcctgctttccctgatgcctgcgatttagaccagcccggctgtatccacggcaacagaagcaggagtgtcactggccgccagatcactgagggtcccacaatgtggcccgggctgtgatttacctgggtgagacagcttgagccccatcgtggattccaagacatccctgctgagagagccaaggtgcaatgtagcaggacaactcatggagcccccccgggcccatcgagtaccggactggctgaccccctagggttggcagtagcccctgaccctcagtatggccaacactaccggagagcctgaggaggtgagcggcgctctgtccccaccgtccgcatcagcttatgtgaagctggtactgctgggactgattatgtgcgtgagcctggcgggtaacgccatcttgtccctgctggtgctcaaggagcgtgccctgcacaaggctccttactacttcctgctggacctgtgcctggccgatggcatacgctctgccgtctgcttcccctttgtgctggcttctgtgcgccacggctcttcatggaccttcagtgcactcagctgcaagattgtggcctttatggccgtgctcttttgcttccatgcggccttcatgctgttctgcatcagcgtcacccgctacatggccatcgcccaccaccgcttctacgccaagcgcatgacactctggacatgcgcggctgtcatctgcatggcctggaccctgtctgtggccatggccttcccacctgtctttgacgtgggcacctacaagtttattcgggaggaggaccagtgcatctttgagcatcgctacttcaaggccaatgacacgctgggcttcatgcttatgttggctgtgctcatggcagctacccatgctgtctacggcaagctgctcctcttcgagtatcgtcaccgcaagatgaagccagtgcagatggtgccagccatcagccagaactggacattccatggtcccggggccaccggccaggctgctgccaactggatcgccggctttggccgtgggcccatgccaccaaccctgctgggtatccggcagaatgggcatgcagccagccggcggctactgggcatggacgaggtcaagggtgaaaagcagctgggccgcatgttctacgcgatcacactgctctttctgctcctctggtcaccctacatcgtggcctgctactggcgagtgtttgtgaaagcctgtgctgtgccccaccgctacctggccactgctgtttggatgagcttcgcccaggctgccgtcaacccaattgtctgcttcctgctcaacaaggacctcaagaagtgcctgaggactcacgccccctgctggggcacaggaggtgccccggctcccagagaaccctactgtgtcatgtgaagcaggctggtaggcagacaggcagagagaaggtcatggccaccgtgatggggccaacagcaagggaggggtaggggcccatacaggagtcctcctttctgagctccagccccagcccctcgaaccacctgtaatctaggcacctttgccaacacctcccaaggatggaggactgggcgagggactgggaaagaggcatatttagttttgtggggcctgtctccgctgcctccttctccacttctacaatctcattctctctctctctctctctgtctctctctctctctctctctctctctcagaagtgacaattcagaaaaagaaaagaacactgagaatgcaggtttttctactaacagctgaggagacaggctttcttactttaatgtctctccttctgacactgtccagaagggggaatttgtcctgtaaaatagacttccagagctcttttgccccctctgctcccatgcaccctccccttccaagtcctttagcaaggcctggatgtttagggagaaagtggtccaaggctgctgacaagagggaccaaagggggtgctgggttcccagggagcagggatgtttaattactatgtcatgtgcaatgttgttttaggccaacccttgccccaagcccagtctcttctccctccccaccatgtccagacctcccaaatggttcttgtgcatctgttggagaagtcaagggagtagggagaagggccccaaggatgggcccaggttaggtgaagagtaagatgtgagctgaactcctcgaactgaagagacccacacttggtcacattctctcacgctgccttcaggatccccagcccccaactcttcttcctgaggatggaaatccactccagccccactaggactgatgtgggtgccatacaggcaggagcagcccaccaggaaagtgtaaggagggagctgaactccccagagtagctggaccacagagacttgggtcagagctgatttcaaccccagaattgtctctcgggttcaccctactcttctgaagatgaaaatttgtttggggccttggtaaccgatagcggtacaaactccaaggcactgtggacttgagtccattcctatctgacctctttttgtccccctcaagcctcaggggcctcaagcccctccttagtagcccttggctgactgggccctgagccccaagcatccttctttcccaacaaccctccttccccatccttcccccacccttacctacacccaaagtggagcacactgcagtcagattctccaggagggagatccaagcctcctcccaggggtggagtccactctgggcttactttgaggcctgttctgtggattggtgagccaagctggcactccttgccctggtcttacccaggctctctgtccccctctcacttcctgtggggccggaatctgtatttatccatccccctttcccttctttatagaagtccctgtcctaaactccctccctagcccaagagagccccagaactggggaagcctgacccatacagaatggggagggcactctaggcaggagagacattaatgagcctggctgcagagtggccctggaaaggcaggccagagtggctgagaggctgggagtaggggagcctgttctctcagcgatagtgatgggggtgcctttccgagggggtggggtgggaagaccaagggggtggggggtagatagggtacatttaggagggttttcctccatttcttttttctaactgcctggattcaccattggattttgtaaatggaaaaactgaaatgaacaatgctatactggatgttttctctttctgactgtgtgtgtgtgtgtgcgtgcgtgcgtgcatgtgccctgtctgaccacatgtggagagacatgattgagtgatagtgtgtgtctgtgtgactttgtgtggggaggcactcctgaagaaaacttgcccggtgcacacacgtaaaatgcctgtatatggggacagatacagcacgtgcatgcatacacacacacacacacacaccacagttgagaggagacaaactagagtatgtgcccgtggtaggaagtcgagtggtcaagagatggatcttggaaactacataggtcggtagcaagagggtagactcccatctcacaagatgggcctcccttggcccaggccctgagcacgggagggctggggccgccagggaacttgaaaacctcatctcctcacaaagcctgtagccccatctcaaccccgtctcagtctccttcccaaactcaaacaaggtgttcctaaaattggaccaccatggagaatggggactgggaattgaggatcaaatgtgagggaaactgatgaggttaggaaatgccccccacaaagtaatggcttctggagggactgctcagtctgggatgggagcccttcctaggggccactgtatgcagctgggactttggtcagctttgaccaaatttagagggagggatgtcatggggaaaaaaaacccaagcccaggagtctacccagccagcctgctccctagacagttaatttactatctggttattctctcaggtgcacagaattgagttgaccatactcctcagttcttggcacactatatcatcattggtccatgtgaggcccttttatttttttttcttcagttttgtccccttcatcacccattcctgatcccatcctccccgccccctacacaggcacccactctcgtgtatttaacgtacgtccttccaatccaccgttcatgtgtttatttacatatatgtgtatctgtgaaaaatgtatggtattgctgtgtgttttaatttacataaacagtattgtactataaa

SEQ ID NO: 135963 - DNA, 579 bp, Homo sapiens
  Payload ID: 6586
  Gene Symbol: GPR173
  Gene Name: G protein-coupled receptor 173
  ENST ID: ENST00000375466
  CDS Start-End: 423-579
ccagtgcacccctccggtgcctgctttccctgatgcctgcgatttagaccagcccggctgtatccacggcaacagaagcaggagtgtcactggccgccagatcactgagggtcccacaatgtggcccgggctgtgatttacctgggtgagacagcttgagccccatcgtggattccaagacatccctgctgagagagccaagatggagtttcgctcttgttgtccaggctggagtgcaatggcgcaatctcagctcaccacaacctccacctcccgggttcaagtgattctcctgcctcagcctccccagtagctgggattacaggtgcaatgtagcaggacaactcatggagcccccccgggcccatcgagtaccggactggctgaccccctagggttggcagtagcccctgaccctcagtatggccaacactaccggagagcctgaggaggtgagcggcgctctgtccccaccgtccgcatcagcttatgtgaagctggtactgctgggactgattatgtgcgtgagcctggcgggtaacgccatcttgtccctgctggtgctcaaggagcgtgccc

SEQ ID NO: 135964 - DNA, 1258 bp, Homo sapiens
  Payload ID: 6587
  Gene Symbol: GPR174
  Gene Name: G protein-coupled receptor 174
  Uniprot ID: Q9BXC1
  ENST ID: ENST00000276077
  CDS Start-End: 37-1038
caccattaggcaaagatagtttctctagagagaatcatgcctgctaattacacgtgtaccaggccagatggagacaatacagattttcgatactttatttatgcagtgacatacactgtcattcttgtgccaggtctcatagggaatatattagccctgtgggtattctatggttatatgaaagaaacaaaacgagctgtgatatttatgataaacttagccattgctgacttactacaagttctttccttgccactgaggatcttctactacttgaatcatgactggccatttgggcctggtctctgcatgttctgtttctacctgaagtatgtcaacatgtatgcaagcatctacttcttggtctgcatcagtgtgcgacgattttggtttctcatgtacccctttcgcttccatgactgcaaacagaaatatgacctgtacatcagcattgctggctggctgatcatctgccttgcctgtgtactctttccactcctcagaaccagtgatgatacctctggcaataggaccaaatgctttgtggatcttcctaccaggaatgtcaacctggcccagtccgttgttatgatgaccattggcgagttgattgggtttgtaactccgcttctgattgtcctatattgtacctggaagacggttttatcactgcaagataaatatcccatggcccaagatcttggagagaaacagaaagccttgaagatgattctaacctgtgcaggggtattcctaatttgctttgcaccttatcatttcagttttcctttagatttcctggtgaagtccaatgaaattaaaagctgcctagccagaagggtgattctaatatttcattctgtggcattgtgtcttgctagtctgaattcatgtcttgacccagtcatatactacttttccactaatgagttccgaagacggctttcaagacaagatttgcatgacagcatccaactccatgcaaaatcctttgtgagtaaccatacagcttccaccatgacacctgaattatgctaaaacaaaaaaccaaactgaatgtgacctgaaatgcaagtacatcagaacatatctgcaatacccaagccacagggaagaacttgcaaaacaacacagcttttcagttctgctctatcttactgctatggggaattcacttcttcaaagcaggacctatttggagcattacgatccacgattattgatgttgacatgtccatgtagtaatttttcttcaagt

SEQ ID NO: 135965 - DNA, 3844 bp, Homo sapiens
  Payload ID: 6588
  Gene Symbol: GPR176
  Gene Name: G protein-coupled receptor 176
  ENST ID: ENST00000299092
  CDS Start-End: 200-1744
ggcgcagccgcgcctccctccctccccgcctcccgggcgccggggttggcgatgtggagacgtgaggggacccgtcggctgctccggcttctccaggactccgccaggcgcccgcgcgtccctcctcacccggaggaggagaggctccgcgcggggctccgaggcgggcggcgcgcggagccggagtcccagcctcgccatgggacataacgggagctggatctctccaaatgccagcgagccgcacaacgcgtccggcgccgaggctgcgggtgtgaaccgcagcgcgctcggggagttcggcgaggcgcagctgtaccgccagttcaccaccaccgtgcaggtcgtcatcttcataggctcgctgctcgagtttggcaacatggaggtcactagaaaacttgataagagcagactgcctgggattaagttcattaaaaacctggcctgctcggggatttgtgccagcctggtctgtgtgcccttcgacatcatcctcagcaccagtcctcactgttgctggtggatctacaccatgctcttctgcaaggtcgtcaaatttttgcacaaagtattctgctctgtgaccatcctcagcttccctgctattgctttggacaggtactactcagtcctctatccactggagaggaaaatatctgatgccaagtcccgtgaactggtgatgtacatctgggcccatgcagtggtggccagtgtccctgtgtttgcagtaaccaatgtggctgacatctatgccacgtccacctgcacggaagtctggagcaactccttgggccacctggtgtacgttctggtgtataacatcaccacggtcattgtgcctgtggtggtggtgttcctcttcttgatactgatccgacgggccctgagtgccagccagaagaagaaggtcatcatagcagcgctccggaccccacagaacaccatctctattccctatgcctcccagcgggaggccgagctgcacgccaccctgctctccatggtgatggtcttcatcttgtgtagcgtgccctatgccaccctggtcgtctaccagactgtgctcaatgtccctgacacttccgtcttcttgctgctcactgctgtttggctgcccaaagtctccctgctggcaaaccctgttctctttcttactgtgaacaaatctgtccgcaagtgcttgatagggaccctggtgcaactacaccaccggtacagtcgccgtaatgtggtcagtacagggagtggcatggctgaggccagcctggaacccagcatacgctcgggtagccagctcctggagatgttccacattgggcagcagcagatctttaagcccacagaggatgaggaagagagtgaggccaagtacattggctcagctgacttccaggccaaggagatatttagcacctgcctggagggagagcaggggccacagtttgcgccctctgccccacccctgagcacagtggactctgtatcccaggtggcaccggcagcccctgtggaacctgaaacattccctgataagtattccctgcagtttggctttgggccttttgagttgcctcctcagtggctctcagagacccgaaacagcaagaagcggctgcttccccccttgggcaacaccccagaagagctgatccagacaaaggtgcccaaggtaggcagggtggagcggaagatgagcagaaacaataaagtgagcatttttccaaaggtggattcctagcaaggattgtaaattcttggaagcaacggggagcttccatattcccaccagagtgtgggaatgctgtggccatgtgattgtatgatctccttgcaactcagtgtgagttgattcctccaatatgggccagatgcttttgaatgatagggaaatctacataaaatccagtgtcctctttattgagggagtatatgtatccatctcagtgatccatgtccttagtgaagtccacattattctctgtggggacaagagctgggcagttttgaatgggtcttgaggtgggtaccccatgtgcactttctgaggatgcctcacttccctgggctctgcagagaacacacagagagaagactttcagagctcacaggagcagggagcaggagcactctaagggaattccaagatcatgatggagcatggtggctccagagaaaatgcctgtttgatgaacttaaacatgtcaaacattttctgttgagaaggtagggatttggtgtcttacactgtttctctggaagccccagtcatatgactcactgtttctcctgatacccttcgtccctttcattgggatgtaggtaaggaatgacgattcctcacctatggtacacatggcgatagatgtgcccgggagtaagggagatattttgtccttgataattctgattttcccttggcatcaccaacgcctcagagagatacacctgcaccctccagtcagggtcagtgttggctggaaaacactgaaaagtcttcgctctgtctttcaccttaaattgtgttttctcaacaaatgagagagaagcttacgggggagatgcctgagagatgcctatggcgctgtagtttttttttcttccctatgatctcacatgaaaggtgctatgtaacaaccagtatgagtcaaatatattgaaaaaatcatcttatgcaaactttaggaattaaaaggtatttttaaaatggagagttagtgtaagctgggtcctttggaaacatcaaactgaaaaggcctgatttggaaaggtgactctgcccaaaaggttggcaagaatctgacaaagatggtttccttccgaggaagactccggaactcaggtgtggccagtctccttttcagtctgtttgtacagctgcggttctctcttaattttggacacagaggaggaacagaacagggagaaataatcattgtagagtgccaaggcaacatctgacccagatgagctcttcacttcctccttccctgtcgttgtagagccagactgggtagaagagggagggcagtgtcctcaactcatcagcctcacaagcaatttgggacccctctggggtggatttcaccaggttgaattagaaccgcagataatacttccctgttagtgaggacaaaccaagcgccagctctgcccttttctctagagtgttgtgttcttgctcttggtacttacaggagctagtctggtgccttgagcaagcttgaagggaagtgggtgtcctcaccagcaaacttccacatctcaactcgtgccctcttttggccacactggccccgtctcttggagggagcccagaccctgtagggagttttgttttcctttcttctcttgggtgtggtgtcttgtgtttctgaatgtgaacccaaagaccctacccctggagaggaagcaccttcctctttgtgttggtctcctcatagcactgtttgctcacagcagaaacggggctgccacagcctcctgcggctctgctgccttctgggccctgcgtgcatggcatctatagctccttgccctgatagtcaatgctgtggcccttcaagcttgtctttcaaagctttcacaatcattacaacttttatcaaggggaataataatctctaggaaaattatgtccactttaggagaatctgtcaagtgtagccactttggtgttgttctgataatatactgtatatgtacaacttaataaattttgatgaggcagaatctggttgggtatgtttcttatatatgtttgaagcagatggctgactactaacaggtcattgccaggtgtatttctatactctttgaagaataacattttaataaaaaa

SEQ ID NO: 135966 - DNA, 3681 bp, Homo sapiens
  Payload ID: 6588
  Gene Symbol: GPR176
  Gene Name: G protein-coupled receptor 176
  ENST ID: ENST00000543580
  CDS Start-End: 160-1572
cattctgatgcccgagtccaagtggcttttccagcgacacatctttggtctttgttctcagtgttgggggttgcgttgtgaggtgttgtctcttcatgagaaggcagtgtgacgtagtgatcacatcccaggctctggagttcaactgcttctgtctgaatgccagctccactgcttcttatttctagaactttgggaaacttcatggtgttatggtcaacttgccgcacaaccgtgttcaaatctgtcaccaacaggttcattaaaaacctggcctgctcggggatttgtgccagcctggtctgtgtgcccttcgacatcatcctcagcaccagtcctcactgttgctggtggatctacaccatgctcttctgcaaggtcgtcaaatttttgcacaaagtattctgctctgtgaccatcctcagcttccctgctattgctttggacaggtactactcagtcctctatccactggagaggaaaatatctgatgccaagtcccgtgaactggtgatgtacatctgggcccatgcagtggtggccagtgtccctgtgtttgcagtaaccaatgtggctgacatctatgccacgtccacctgcacggaagtctggagcaactccttgggccacctggtgtacgttctggtgtataacatcaccacggtcattgtgcctgtggtggtggtgttcctcttcttgatactgatccgacgggccctgagtgccagccagaagaagaaggtcatcatagcagcgctccggaccccacagaacaccatctctattccctatgcctcccagcgggaggccgagctgcacgccaccctgctctccatggtgatggtcttcatcttgtgtagcgtgccctatgccaccctggtcgtctaccagactgtgctcaatgtccctgacacttccgtcttcttgctgctcactgctgtttggctgcccaaagtctccctgctggcaaaccctgttctctttcttactgtgaacaaatctgtccgcaagtgcttgatagggaccctggtgcaactacaccaccggtacagtcgccgtaatgtggtcagtacagggagtggcatggctgaggccagcctggaacccagcatacgctcgggtagccagctcctggagatgttccacattgggcagcagcagatctttaagcccacagaggatgaggaagagagtgaggccaagtacattggctcagctgacttccaggccaaggagatatttagcacctgcctggagggagagcaggggccacagtttgcgccctctgccccacccctgagcacagtggactctgtatcccaggtggcaccggcagcccctgtggaacctgaaacattccctgataagtattccctgcagtttggctttgggccttttgagttgcctcctcagtggctctcagagacccgaaacagcaagaagcggctgcttccccccttgggcaacaccccagaagagctgatccagacaaaggtgcccaaggtaggcagggtggagcggaagatgagcagaaacaataaagtgagcatttttccaaaggtggattcctagcaaggattgtaaattcttggaagcaacggggagcttccatattcccaccagagtgtgggaatgctgtggccatgtgattgtatgatctccttgcaactcagtgtgagttgattcctccaatatgggccagatgcttttgaatgatagggaaatctacataaaatccagtgtcctctttattgagggagtatatgtatccatctcagtgatccatgtccttagtgaagtccacattattctctgtggggacaagagctgggcagttttgaatgggtcttgaggtgggtaccccatgtgcactttctgaggatgcctcacttccctgggctctgcagagaacacacagagagaagactttcagagctcacaggagcagggagcaggagcactctaagggaattccaagatcatgatggagcatggtggctccagagaaaatgcctgtttgatgaacttaaacatgtcaaacattttctgttgagaaggtagggatttggtgtcttacactgtttctctggaagccccagtcatatgactcactgtttctcctgatacccttcgtccctttcattgggatgtaggtaaggaatgacgattcctcacctatggtacacatggcgatagatgtgcccgggagtaagggagatattttgtccttgataattctgattttcccttggcatcaccaacgcctcagagagatacacctgcaccctccagtcagggtcagtgttggctggaaaacactgaaaagtcttcgctctgtctttcaccttaaattgtgttttctcaacaaatgagagagaagcttacgggggagatgcctgagagatgcctatggcgctgtagtttttttttcttccctatgatctcacatgaaaggtgctatgtaacaaccagtatgagtcaaatatattgaaaaaatcatcttatgcaaactttaggaattaaaaggtatttttaaaatggagagttagtgtaagctgggtcctttggaaacatcaaactgaaaaggcctgatttggaaaggtgactctgcccaaaaggttggcaagaatctgacaaagatggtttccttccgaggaagactccggaactcaggtgtggccagtctccttttcagtctgtttgtacagctgcggttctctcttaattttggacacagaggaggaacagaacagggagaaataatcattgtagagtgccaaggcaacatctgacccagatgagctcttcacttcctccttccctgtcgttgtagagccagactgggtagaagagggagggcagtgtcctcaactcatcagcctcacaagcaatttgggacccctctggggtggatttcaccaggttgaattagaaccgcagataatacttccctgttagtgaggacaaaccaagcgccagctctgcccttttctctagagtgttgtgttcttgctcttggtacttacaggagctagtctggtgccttgagcaagcttgaagggaagtgggtgtcctcaccagcaaacttccacatctcaactcgtgccctcttttggccacactggccccgtctcttggagggagcccagaccctgtagggagttttgttttcctttcttctcttgggtgtggtgtcttgtgtttctgaatgtgaacccaaagaccctacccctggagaggaagcaccttcctctttgtgttggtctcctcatagcactgtttgctcacagcagaaacggggctgccacagcctcctgcggctctgctgccttctgggccctgcgtgcatggcatctatagctccttgccctgatagtcaatgctgtggcccttcaagcttgtctttcaaagctttcacaatcattacaacttttatcaaggggaataataatctctaggaaaattatgtccactttaggagaatctgtcaagtgtagccactttggtgttgttctgataatatactgtatatgtacaacttaataaattttgatgaggcagaatctggttgggtatgtttcttatatatgtttgaagcagatggctgactactaacaggtcattgccaggtgtatttctatactctttgaagaataacattttaataaaaaattgaaaagc

SEQ ID NO: 135967 - DNA, 2816 bp, Homo sapiens
  Payload ID: 6588
  Gene Symbol: GPR176
  Gene Name: G protein-coupled receptor 176
  Uniprot ID: Q14439
  ENST ID: ENST00000561100
  CDS Start-End: 867-2414
tgggggcgtcctccttcgtccccgcccggctgtcaagctgtgttctagcggccgagggaccgaggggggctaagaaagggggcgcccagccatgcagaggcaaaaaggcgctgcggaacggggtccccgtcgccagtgctgaggcaggaggtcggagccacaagtgaggggctgggaagcaggacccagcacgggcgtcttggcaggcggccgggcgcagggccaggctgctggggacgctcagggctttccacccaagccatgggcgctgtcgggcactcgggggtcccctcgtggctccggccactcggcgtgggcattacgttggcttcacatcgccatccagcctcgaagccaacaggactgaaaaatagcttcggccaaacgttctcctcccgctaaggagaggggtcgagtgcgtcagcccgaggggactggagagggatgccctagccctcgaggggcggaggacccgcggttgaaggaggcagcgggagcggagagcgccctccttgaccatcgaatgcctccttctgtgtttccattcctgtcgagtgggctgggccacgctgaccaccctggaggagggacggacgacgctcggcgggctctgaccgtgccgccttcttgtggctgctgactgggatccaggagggagtgggcatggggcgcagccgcgcctccctccctccccgcctcccgggcgccggggttggcgatgtggagacgtgaggggacccgtcggctgctccggcttctccaggactccgccaggcgcccgcgcgtccctcctcacccggaggaggagaggctccgcgcggggctccgaggcgggcggcgcgcggagccggagtcccagcctcgccatgggacataacgggagctggatctctccaaatgccagcgagccgcacaacgcgtccggcgccgaggctgcgggtgtgaaccgcagcgcgctcggggagttcggcgaggcgcagctgtaccgccagttcaccaccaccgtgcaggtcgtcatcttcataggctcgctgctcggaaacttcatggtgttatggtcaacttgccgcacaaccgtgttcaaatctgtcaccaacaggttcattaaaaacctggcctgctcggggatttgtgccagcctggtctgtgtgcccttcgacatcatcctcagcaccagtcctcactgttgctggtggatctacaccatgctcttctgcaaggtcgtcaaatttttgcacaaagtattctgctctgtgaccatcctcagcttccctgctattgctttggacaggtactactcagtcctctatccactggagaggaaaatatctgatgccaagtcccgtgaactggtgatgtacatctgggcccatgcagtggtggccagtgtccctgtgtttgcagtaaccaatgtggctgacatctatgccacgtccacctgcacggaagtctggagcaactccttgggccacctggtgtacgttctggtgtataacatcaccacggtcattgtgcctgtggtggtggtgttcctcttcttgatactgatccgacgggccctgagtgccagccagaagaagaaggtcatcatagcagcgctccggaccccacagaacaccatctctattccctatgcctcccagcgggaggccgagctgcacgccaccctgctctccatggtgatggtcttcatcttgtgtagcgtgccctatgccaccctggtcgtctaccagactgtgctcaatgtccctgacacttccgtcttcttgctgctcactgctgtttggctgcccaaagtctccctgctggcaaaccctgttctctttcttactgtgaacaaatctgtccgcaagtgcttgatagggaccctggtgcaactacaccaccggtacagtcgccgtaatgtggtcagtacagggagtggcatggctgaggccagcctggaacccagcatacgctcgggtagccagctcctggagatgttccacattgggcagcagcagatctttaagcccacagaggatgaggaagagagtgaggccaagtacattggctcagctgacttccaggccaaggagatatttagcacctgcctggagggagagcaggggccacagtttgcgccctctgccccacccctgagcacagtggactctgtatcccaggtggcaccggcagcccctgtggaacctgaaacattccctgataagtattccctgcagtttggctttgggccttttgagttgcctcctcagtggctctcagagacccgaaacagcaagaagcggctgcttccccccttgggcaacaccccagaagagctgatccagacaaaggtgcccaaggtaggcagggtggagcggaagatgagcagaaacaataaagtgagcatttttccaaaggtggattcctagcaaggattgtaaattcttggaagcaacggggagcttccatattcccaccagagtgtgggaatgctgtggccatgtgattgtatgatctccttgcaactcagtgtgagttgattcctccaatatgggccagatgcttttgaatgatagggaaatctacataaaatccagtgtcctctttattgagggagtatatgtatccatctcagtgatccatgtccttagtgaagtccacattattctctgtggggacaagagctgggcagttttgaatgggtcttgaggtgggtaccccatgtgcactttctgaggatgcctcacttccctgggctctgcagagaacacacagagagaagactttcagagctcacaggagcagggagcaggagcactctaagggaattc

SEQ ID NO: 135968 - DNA, 7983 bp, Homo sapiens
  Payload ID: 6589
  Gene Symbol: GPR179
  Gene Name: G protein-coupled receptor 179
  ENST ID: ENST00000621958
  CDS Start-End: 22-7128
gtcctgagagctgccccaaggatgggcaccaggggagcggtcatgccccctcctatgtgggggctgctgggctgctgttttgtctgtgcctgggctctggggggtccacggcccatccgctctctgccccctctgtcttcccaagtcaagccaggatctgtacccatgcaggtgcccctagagggggccgaggccgccctcgcttatctctactctggagatgcccagcagctatcacaggtgaattgcagtgagcgctatgaagcgcgtggggcaggagccatgccagggctccccccaagcctacagggggcagcgggcacccttgcccaggccgccaattttctcaacatgctgctgcaagccaacgacatccgtgagtccagtgtggaggaggatgtggaatggtaccaggcactggtccgcagcgtggccgagggggacccaagagtgtacagggctttgctgacctttaaccctccaccaggggccagccacctacagctggccctgcaggccacccggactggggaggaaaccatcctgcaggacttgtctgggaactgggtgcaggaggagaaccctcctggggacctggacacccctgccctgaagaagcgagtgttgaccaatgacctagggagcctcggcagccccaagtggccgcaggcagatggatatgtgggggacacgcagcaggtgaggctgtctcctcctttcctggaatgccaggagggacggctccgacctggatggctgatcacactctctgccaccttctatggactcaagccagacctcagcccagaagtcagtagggggcaggtgcagatggacgtagatctccagagtgtggacatcaatcagtgtgcaagtggcccaggctggtactctaacacacacctgtgtgatctcaacagcacccagtgtgtccccctggagagtcagggctttgttcttggccgctacctctgccgctgccgacctggattctacggggcaagcccctctggggggttagaggagagtgacttccagactaccgggcaattcgggttcccagaaggcagatctgggagactgctgcagtgtctgccatgtcctgagggctgcaccagctgcatggatgccacaccgtgcctggtggaagaggccgcggtgctgcgggccgctgtgctggcctgccaggcctgctgcatgctggccatcttcctgagcatgctggtctcctaccgctgccgccggaacaagaggatctgggcatctggagtggtcctgctggaaactgtcctttttggattcctgctgctttactttcctgtcttcatcctatacttcaagcccagtgtattccgctgcatcgctcttcgctgggtgcggctgctgggttttgccatcgtctacggcaccatcatactcaagctttacagagtgctgcagctgtttctgtctcgaacggcccagcggagtgcccttctgagcagcgggcggctgctgcggcacctggggctgctcctgctacctgtgctgggcttcctggctgtgtggaccgtgggcgccctggagcgaggcatccagcacgcacctctggtgatccgaggccacactcccagtggccgccatttctacctctgtcaccacgaccgctgggactacatcatggttgtggctgagctgctgctgctgtgctggggcagcttcctctgctacgccacacgggctgtgctctcggccttccatgagccacgctacatgggcatcgccctgcacaatgagctactgctttccgctgccttccacacagccaggtttgtgctggttccctctctgcacccggactggaccctcctcctcttcttcttccacacccacagcacagtcaccaccacgctggctctgatcttcatccctaagttctggaagctgggggctcctccccgggaggagatggtggatgaggtgtgtgaggacgagctggacctgcagcactcaggctcctaccttggcagcagcatcgcctcagcctggagtgagcacagcctggaccctggagacattcgggacgagctgaagaagctctatgcccagctagaggtccacaaaaccaaggaaatggccgcaaacaacccccacctgcccaagaagcgaggcagctcatgccagggactgggccgctccttcatgaggtacctggcggaattccccgaggccctggccaggcagcactcccgggactcaggatccccaggccacggcagcctgcccggctcctcccgccgccggctcctcagctccagcctccaggaacccgaggggacaccagctctgcacaagtcccgcagcacctatgaccagcgcagggagcaggacccgcctcttcttgactcactgctgaggaggaagctggccaagaaggcctctcgaacagagagccgggagtcggtggaggggccccctgccctgggcttcaggtcagccagcgcccacaacctgacggtgggagagaggctacccagagcccggcccgcctctctgcagaagtcgctcagtgtggccagctccagggaaaaggccttgctcatggccagccaggcctacctggaggagacctaccggcaagcaaaggagcgggaggagcggaagaaggccaaggcagccatggccagcctggtgcggaggccatcagccaggaggctggagcggcctcgaggggcccccctgtcagctccaccttcccctgccaagagcagcagcgtggacagctctcacacctctgggaggcttcatgaggaggctaggagaaggctgcctcatccacccatcaggcaccaggtttctacccccatcttggccctgtctgggggcctgggagagccaaggatgctatctcccacctccaccttggctccagctctgctgccagctctagctccaaccccagcccctgccctggcaccagtcccagtatccccacaaagccccaacttactcacctacatctgcccctgggagaacgcagaactgccagccaagcaagaaaatgtgccccaggaaggcccctcagggccagagcgaggccaccactcccctgccccagctcgagccaggctctggagggccctctctgttgcagtagagaaaagcagggctggggagaatgagatggacgcagaggatgcacatcaccagagggaagctaatgatgtggacgaagacaggcccaagatcttccctaaatcccacagcctcaaggcccctgttcagcagggttccatgcgcagcctggggctggcgattaaagctctgacccgttctcggagcacctacagagagaaggagagtgtggaggagagtcccgaggggcagaacagcgggactgcgggagagagtatgggggcaccctcccgatcgcccaggctaggccggcccaaggcggtgagtaagcaggccgctcttatcccctccgatgacaaggagtccctccagaaccaacagaacgctcacaccagcaggatgctccaagtctgtcaacgggagggcagcagggaacaagaagacagaggcaggaggatgacccagggtctaggggaacggaaagctgagagagcaggtaaaacagggcttgccatgctgaggcaagtttccagggacaaaaacatcaagcaatcaaaagaaacccctgtcgggtggcaggaactgcccaaagctggcctccagtccctgggcagcgctgaccacagggtggcagaggtatgcccctgggaggtcactgaatcagaaacgcgtcagccagacagtggcaacaaggccgaaatctgcccctgggagacgagtgaaggagccccagagtcgagggcactaagacaagacccaggtgactcccaaaaaaagagaggggaggcccggggaaaatcagagcccatagatgtggttcccatgatgcggaaaaagccagagaggctggtgagggagcaggaagcagtgtgtccctgggagagtgccgatcgaggaggtctgtcccctgggtcagctcctcaggaccctggcagaatcagagacaaatctgaggcgggggacagtgtggaggccaggaaggtggagaagcctgggtgggaagctgctggcccagaagctcatacccctgacatcaccaaggcagagccgtgtccctgggaggcaagtgaaggaggcgaggatgggaaaccagcccaagaggcagtgaaggatctccctcaggaaaagcagaaaaccaggaaagcaaccttttggaaagaacagaaaccgggaggagacttggagtctctttgtccatgggagagtacagatttccggggcccctcagcagtctcaattcaggccccaggaagctcagagtgttcagggagtttgggcagtggcattgctgaagtgtgtctgtgggaggcaggagatgctcctgctatccagaaagcagagatctgtccctgggagctggatgataacgtgatggggcaggaaatgctgagtctggggacaggtagagaatctcttcaagaaaaggaaaaagcctccagaaaaggaagctttggagagatgggggaacaaactgtgaaagcagtgcagaaattaagtcaacagcaggagtcagtttgtcccagggagagcacggtccctgggcactccagcccatgtctagacaattcctcatccaaagctggtagccaattcctatgcaatggaggaagcagagcaacgcaggtgtgtccacaggaagatctcaggccggaggcacaggaagcaacacctgccaaaacagaaatctgtccctgggaggtaaatgaaagaacaagagaggaatggacatcagcacaggtgccaagaggaggagaatctcaaaaggacaaggagaaaatgcctggaaaatcggaaatcgaagatgtcacagcttgggaaaagcctgaggggcagatccaaaagcaagaagcggtcggcccctgggagagtgtggaccctggcagcttctccccacaaccacgtcctcaagacacagagagaccccaaacccttctccagatgtcaggcagtgtgggaagcaaagctgccgacatttgccctttggatgtggaggaaaacttgactgctgggaaggcagaaatctgtccctgggaggtgggtgctggagcaggggaggaaagggctttgggagctgaggccattaggaaatctccaaatgatacaggcaaggtttctgcagatcttggacccagggagagagctgttactgctccagagaagccacagaagccaaccccagagtgggaggtggcttgtccctgggggagtgtgggtccaggggcctgttctcagcatccaggtactctagatgctgatggaccaaaagctgggttccaggaactggatcatatgggctgcaggccaggtgaagtgtgtccctgggaagcacaggaagctgctaccagtgaaaaagccaagatctgtccctgggaggtaagtgaaggaactactgggaagggattggaccaaaaggcagggagtgaatcagcagagcagagggagaaagctctagaaaaggggagactcacttccctgggagaagacgtatcaaaagggatggcaaaactgtgtcaacaacaggaaactatttgtatttgggagaacaaggacttgagggaatcccctgctcaggcccccaagatctcagacttgcccagcagcatgagtagtgaagtggcagagggacattccttggaagcaacagagaagggggacctgagacaagacccaaagacaggttccttcccagaacacataacccaagaaaaagctccagctgcagacacagaagaattcactactgaagatggggaaaaaacaagccatgagctacaatccgtctgtccatgggagaccactgccccagcagattccgtctctcacctagacagacagcgccctgaccaacctaaagctagctcccagagactggtcagcactgggggcagggccgctgacgtgtgcccatgggatgttcctgatgcaggtgtgtataaatctgacagcagtgccaaggctgagacctgtccctgggaagtgactgaaagaatccctgtcaaaggggtgtcaaggcaggatggaaaaggggactctcaagaagagaaaggcagagccccagaaaaatcagagccaaaaggtgtgccagttcagaaaaagccagagatggcagacttcaggcagcaggaggctgtgtgtccctgggagagtcaagatggcaagggtctgtccccacagccagccccagatgcttctgacagaagcagaggcagttctgaggcagcaggcagtgtggagaccagggtagcggaagtgtgtctgtgggaagtggtagaggctccctctgccaagaaagcagagatctgcccttgggaggcgggtggaggagcagcagaggaaggggaacaggaaagagaatcacaagggcaaggagagatgttccttcagaaggcaggacctggagggacggaagaacacttctcaaaagcagcagcaaagcccagagagcaggaggcagtctgccctggggaaggcacaggctcaggagggctcttgccccagtcaggtgccctggacccagaactcaaagtcagccccaaggaagcaggcagcatgggaagcaggatggcagagctgtgccaatgggaaatcacagatccagaaggaaataaaataaagggtaccatggcagacatctgtcctggggaggaaactggagtcccatctgaggaatctggcctcctggctttaacagcaactcggagagaatttttccccacagctcctgaaaaaccactatgccttttagtccatgggcctctggatcacttctttccagaaagcaaaatcccctgccccaaggtaagcaggccagccagtactttcactctagaaggtgtcagagaactacaaggaccttcagggcttgagccaaggaccagcttagccccagagccaagtctccaggaagctgagtctcagtcttcgtccttaactgaagactcaggccaagtggcttttgaagctcagtatgaagaattcacccctcccactgtctatccttgggattgggagtaacagccttattaggtgaggtcaaacacagagctagctttcaggagccaaggccctttccaagtccaggtgttcccaaagagctgaatcaaagacagcttggccacttcccctccttgagaagaccagaagtcaacccatcccaaagacaaactgcatgaaaagggtacagcttagaccccaatgggaaggcccaccctctctttacttctaacttttcttcctgtttgaggaaacaaagactggacactctacttctaaggacgcctcccatccacctacagtactcacaacacaaaccacccgagtctggacactcacccacaaagccactgttagggatgaaaaaagtcagttgtgcccagcctaccttctctcacagggggacccaattctctgaagtctacgatggagcattttttgagaagaaactaaaccatacaaagtgttggcaacgtagggatggtggaccacagaaggctataaaggccaccatagaaagctgaagagccatttaattgaagcggaagataaattgggggaaaagctaaaatgactcaaaataggggcctgaaaatgctttaaggaccttgtcattttgactttgaatctcctgtttctgctttattgcttctcatacctgccctgcttgactgctgaagcagaaacaatcaggcacgctgacacccttatcagcatctggcatccaaagcaacatcagagagagagaacacagaagaaaagcaattgccccaggtcctccccacagtcaagggagctcttccttccagacatccttgtgtgcctcttgctagttttttagggggtctccccctcttcctgccctagctctcacca

SEQ ID NO: 135969 - DNA, 7980 bp, Homo sapiens
  Payload ID: 6589
  Gene Symbol: GPR179
  Gene Name: G protein-coupled receptor 179
  ENST ID: ENST00000616987
  CDS Start-End: 22-7125
gtcctgagagctgccccaaggatgggcaccaggggagcggtcatgccccctcctatgtgggggctgctgggctgctgttttgtctgtgcctgggctctggggggtccacggcccatccgctctctgccccctctgtcttcccaagtcaagccaggatctgtacccatgcaggtgcccctagagggggccgaggccgccctcgcttatctctactctggagatgcccagcagctatcacaggtgaattgcagtgagcgctatgaagcgcgtggggcaggagccatgccagggctccccccaagcctacagggggcagcgggcacccttgcccaggccgccaattttctcaacatgctgctgcaagccaacgacatccgtgagtccagtgtggaggaggatgtggaatggtaccaggcactggtccgcagcgtggccgagggggacccaagagtgtacagggctttgctgacctttaaccctccaccaggggccagccacctacagctggccctgcaggccacccggactggggaggaaaccatcctgcaggacttgtctgggaactgggtgcaggaggagaaccctcctggggacctggacacccctgccctgaagaagcgagtgttgaccaatgacctagggagcctcggcagccccaagtggccgcaggcagatggatatgtgggggacacgcagcaggtgaggctgtctcctcctttcctggaatgccaggagggacggctccgacctggatggctgatcacactctctgccaccttctatggactcaagccagacctcagcccagaagtcagggggcaggtgcagatggacgtagatctccagagtgtggacatcaatcagtgtgcaagtggcccaggctggtactctaacacacacctgtgtgatctcaacagcacccagtgtgtccccctggagagtcagggctttgttcttggccgctacctctgccgctgccgacctggattctacggggcaagcccctctggggggttagaggagagtgacttccagactaccgggcaattcgggttcccagaaggcagatctgggagactgctgcagtgtctgccatgtcctgagggctgcaccagctgcatggatgccacaccgtgcctggtggaagaggccgcggtgctgcgggccgctgtgctggcctgccaggcctgctgcatgctggccatcttcctgagcatgctggtctcctaccgctgccgccggaacaagaggatctgggcatctggagtggtcctgctggaaactgtcctttttggattcctgctgctttactttcctgtcttcatcctatacttcaagcccagtgtattccgctgcatcgctcttcgctgggtgcggctgctgggttttgccatcgtctacggcaccatcatactcaagctttacagagtgctgcagctgtttctgtctcgaacggcccagcggagtgcccttctgagcagcgggcggctgctgcggcacctggggctgctcctgctacctgtgctgggcttcctggctgtgtggaccgtgggcgccctggagcgaggcatccagcacgcacctctggtgatccgaggccacactcccagtggccgccatttctacctctgtcaccacgaccgctgggactacatcatggttgtggctgagctgctgctgctgtgctggggcagcttcctctgctacgccacacgggctgtgctctcggccttccatgagccacgctacatgggcatcgccctgcacaatgagctactgctttccgctgccttccacacagccaggtttgtgctggttccctctctgcacccggactggaccctcctcctcttcttcttccacacccacagcacagtcaccaccacgctggctctgatcttcatccctaagttctggaagctgggggctcctccccgggaggagatggtggatgaggtgtgtgaggacgagctggacctgcagcactcaggctcctaccttggcagcagcatcgcctcagcctggagtgagcacagcctggaccctggagacattcgggacgagctgaagaagctctatgcccagctagaggtccacaaaaccaaggaaatggccgcaaacaacccccacctgcccaagaagcgaggcagctcatgccagggactgggccgctccttcatgaggtacctggcggaattccccgaggccctggccaggcagcactcccgggactcaggatccccaggccacggcagcctgcccggctcctcccgccgccggctcctcagctccagcctccaggaacccgaggggacaccagctctgcacaagtcccgcagcacctatgaccagcgcagggagcaggacccgcctcttcttgactcactgctgaggaggaagctggccaagaaggcctctcgaacagagagccgggagtcggtggaggggccccctgccctgggcttcaggtcagccagcgcccacaacctgacggtgggagagaggctacccagagcccggcccgcctctctgcagaagtcgctcagtgtggccagctccagggaaaaggccttgctcatggccagccaggcctacctggaggagacctaccggcaagcaaaggagcgggaggagcggaagaaggccaaggcagccatggccagcctggtgcggaggccatcagccaggaggctggagcggcctcgaggggcccccctgtcagctccaccttcccctgccaagagcagcagcgtggacagctctcacacctctgggaggcttcatgaggaggctaggagaaggctgcctcatccacccatcaggcaccaggtttctacccccatcttggccctgtctgggggcctgggagagccaaggatgctatctcccacctccaccttggctccagctctgctgccagctctagctccaaccccagcccctgccctggcaccagtcccagtatccccacaaagccccaacttactcacctacatctgcccctgggagaacgcagaactgccagccaagcaagaaaatgtgccccaggaaggcccctcagggccagagcgaggccaccactcccctgccccagctcgagccaggctctggagggccctctctgttgcagtagagaaaagcagggctggggagaatgagatggacgcagaggatgcacatcaccagagggaagctaatgatgtggacgaagacaggcccaagatcttccctaaatcccacagcctcaaggcccctgttcagcagggttccatgcgcagcctggggctggcgattaaagctctgacccgttctcggagcacctacagagagaaggagagtgtggaggagagtcccgaggggcagaacagcgggactgcgggagagagtatgggggcaccctcccgatcgcccaggctaggccggcccaaggcggtgagtaagcaggccgctcttatcccctccgatgacaaggagtccctccagaaccaacagaacgctcacaccagcaggatgctccaagtctgtcaacgggagggcagcagggaacaagaagacagaggcaggaggatgacccagggtctaggggaacggaaagctgagagagcaggtaaaacagggcttgccatgctgaggcaagtttccagggacaaaaacatcaagcaatcaaaagaaacccctgtcgggtggcaggaactgcccaaagctggcctccagtccctgggcagcgctgaccacagggtggcagaggtatgcccctgggaggtcactgaatcagaaacgcgtcagccagacagtggcaacaaggccgaaatctgcccctgggagacgagtgaaggagccccagagtcgagggcactaagacaagacccaggtgactcccaaaaaaagagaggggaggcccggggaaaatcagagcccatagatgtggttcccatgatgcggaaaaagccagagaggctggtgagggagcaggaagcagtgtgtccctgggagagtgccgatcgaggaggtctgtcccctgggtcagctcctcaggaccctggcagaatcagagacaaatctgaggcgggggacagtgtggaggccaggaaggtggagaagcctgggtgggaagctgctggcccagaagctcatacccctgacatcaccaaggcagagccgtgtccctgggaggcaagtgaaggaggcgaggatgggaaaccagcccaagaggcagtgaaggatctccctcaggaaaagcagaaaaccaggaaagcaaccttttggaaagaacagaaaccgggaggagacttggagtctctttgtccatgggagagtacagatttccggggcccctcagcagtctcaattcaggccccaggaagctcagagtgttcagggagtttgggcagtggcattgctgaagtgtgtctgtgggaggcaggagatgctcctgctatccagaaagcagagatctgtccctgggagctggatgataacgtgatggggcaggaaatgctgagtctggggacaggtagagaatctcttcaagaaaaggaaaaagcctccagaaaaggaagctttggagagatgggggaacaaactgtgaaagcagtgcagaaattaagtcaacagcaggagtcagtttgtcccagggagagcacggtccctgggcactccagcccatgtctagacaattcctcatccaaagctggtagccaattcctatgcaatggaggaagcagagcaacgcaggtgtgtccacaggaagatctcaggccggaggcacaggaagcaacacctgccaaaacagaaatctgtccctgggaggtaaatgaaagaacaagagaggaatggacatcagcacaggtgccaagaggaggagaatctcaaaaggacaaggagaaaatgcctggaaaatcggaaatcgaagatgtcacagcttgggaaaagcctgaggggcagatccaaaagcaagaagcggtcggcccctgggagagtgtggaccctggcagcttctccccacaaccacgtcctcaagacacagagagaccccaaacccttctccagatgtcaggcagtgtgggaagcaaagctgccgacatttgccctttggatgtggaggaaaacttgactgctgggaaggcagaaatctgtccctgggaggtgggtgctggagcaggggaggaaagggctttgggagctgaggccattaggaaatctccaaatgatacaggcaaggtttctgcagatcttggacccagggagagagctgttactgctccagagaagccacagaagccaaccccagagtgggaggtggcttgtccctgggggagtgtgggtccaggggcctgttctcagcatccaggtactctagatgctgatggaccaaaagctgggttccaggaactggatcatatgggctgcaggccaggtgaagtgtgtccctgggaagcacaggaagctgctaccagtgaaaaagccaagatctgtccctgggaggtaagtgaaggaactactgggaagggattggaccaaaaggcagggagtgaatcagcagagcagagggagaaagctctagaaaaggggagactcacttccctgggagaagacgtatcaaaagggatggcaaaactgtgtcaacaacaggaaactatttgtatttgggagaacaaggacttgagggaatcccctgctcaggcccccaagatctcagacttgcccagcagcatgagtagtgaagtggcagagggacattccttggaagcaacagagaagggggacctgagacaagacccaaagacaggttccttcccagaacacataacccaagaaaaagctccagctgcagacacagaagaattcactactgaagatggggaaaaaacaagccatgagctacaatccgtctgtccatgggagaccactgccccagcagattccgtctctcacctagacagacagcgccctgaccaacctaaagctagctcccagagactggtcagcactgggggcagggccgctgacgtgtgcccatgggatgttcctgatgcaggtgtgtataaatctgacagcagtgccaaggctgagacctgtccctgggaagtgactgaaagaatccctgtcaaaggggtgtcaaggcaggatggaaaaggggactctcaagaagagaaaggcagagccccagaaaaatcagagccaaaaggtgtgccagttcagaaaaagccagagatggcagacttcaggcagcaggaggctgtgtgtccctgggagagtcaagatggcaagggtctgtccccacagccagccccagatgcttctgacagaagcagaggcagttctgaggcagcaggcagtgtggagaccagggtagcggaagtgtgtctgtgggaagtggtagaggctccctctgccaagaaagcagagatctgcccttgggaggcgggtggaggagcagcagaggaaggggaacaggaaagagaatcacaagggcaaggagagatgttccttcagaaggcaggacctggagggacggaagaacacttctcaaaagcagcagcaaagcccagagagcaggaggcagtctgccctggggaaggcacaggctcaggagggctcttgccccagtcaggtgccctggacccagaactcaaagtcagccccaaggaagcaggcagcatgggaagcaggatggcagagctgtgccaatgggaaatcacagatccagaaggaaataaaataaagggtaccatggcagacatctgtcctggggaggaaactggagtcccatctgaggaatctggcctcctggctttaacagcaactcggagagaatttttccccacagctcctgaaaaaccactatgccttttagtccatgggcctctggatcacttctttccagaaagcaaaatcccctgccccaaggtaagcaggccagccagtactttcactctagaaggtgtcagagaactacaaggaccttcagggcttgagccaaggaccagcttagccccagagccaagtctccaggaagctgagtctcagtcttcgtccttaactgaagactcaggccaagtggcttttgaagctcagtatgaagaattcacccctcccactgtctatccttgggattgggagtaacagccttattaggtgaggtcaaacacagagctagctttcaggagccaaggccctttccaagtccaggtgttcccaaagagctgaatcaaagacagcttggccacttcccctccttgagaagaccagaagtcaacccatcccaaagacaaactgcatgaaaagggtacagcttagaccccaatgggaaggcccaccctctctttacttctaacttttcttcctgtttgaggaaacaaagactggacactctacttctaaggacgcctcccatccacctacagtactcacaacacaaaccacccgagtctggacactcacccacaaagccactgttagggatgaaaaaagtcagttgtgcccagcctaccttctctcacagggggacccaattctctgaagtctacgatggagcattttttgagaagaaactaaaccatacaaagtgttggcaacgtagggatggtggaccacagaaggctataaaggccaccatagaaagctgaagagccatttaattgaagcggaagataaattgggggaaaagctaaaatgactcaaaataggggcctgaaaatgctttaaggaccttgtcattttgactttgaatctcctgtttctgctttattgcttctcatacctgccctgcttgactgctgaagcagaaacaatcaggcacgctgacacccttatcagcatctggcatccaaagcaacatcagagagagagaacacagaagaaaagcaattgccccaggtcctccccacagtcaagggagctcttccttccagacatccttgtgtgcctcttgctagttttttagggggtctccccctcttcctgccctagctctcacca

SEQ ID NO: 135970 - DNA, 7980 bp, Homo sapiens
  Payload ID: 6589
  Gene Symbol: GPR179
  Gene Name: G protein-coupled receptor 179
  Uniprot ID: Q6PRD1
  ENST ID: ENST00000610650
  CDS Start-End: 22-7125
gtcctgagagctgccccaaggatgggcaccaggggagcggtcatgccccctcctatgtgggggctgctgggctgctgttttgtctgtgcctgggctctggggggtccacggcccatccgctctctgccccctctgtcttcccaagtcaagccaggatctgtacccatgcaggtgcccctagagggggccgaggccgccctcgcttatctctactctggagatgcccagcagctatcacaggtgaattgcagtgagcgctatgaagcgcgtggggcaggagccatgccagggctccccccaagcctacagggggcagcgggcacccttgcccaggccgccaattttctcaacatgctgctgcaagccaacgacatccgtgagtccagtgtggaggaggatgtggaatggtaccaggcactggtccgcagcgtggccgagggggacccaagagtgtacagggctttgctgacctttaaccctccaccaggggccagccacctacagctggccctgcaggccacccggactggggaggaaaccatcctgcaggacttgtctgggaactgggtgcaggaggagaaccctcctggggacctggacacccctgccctgaagaagcgagtgttgaccaatgacctagggagcctcggcagccccaagtggccgcaggcagatggatatgtgggggacacgcagcaggtgaggctgtctcctcctttcctggaatgccaggagggacggctccgacctggatggctgatcacactctctgccaccttctatggactcaagccagacctcagcccagaagtcagggggcaggtgcagatggacgtagatctccagagtgtggacatcaatcagtgtgcaagtggcccaggctggtactctaacacacacctgtgtgatctcaacagcacccagtgtgttcccctggagagtcagggctttgttcttggccgctacctctgccgctgccgacctggattctacggggcaagcccctctggggggttagaggagagtgacttccagactaccgggcaattcgggttcccagaaggcagatctgggagactgctgcagtgtctgccatgtcctgagggctgcaccagctgcatggatgccacaccgtgcctggtggaagaggccgcggtgctgcgggccgctgtgctggcctgccaggcctgctgcatgctggccatcttcctgagcatgctggtctcctaccgctgccgccggaacaagaggatctgggcatctggagtggtcctgctggaaactgtcctttttggattcctgctgctttactttcctgtcttcatcctatacttcaagcccagtgtattccgctgcatcgctcttcgctgggtgcggctgctgggttttgccatcgtctacggcaccatcatactcaagctttacagagtgctgcagctgtttctgtctcgaacggcccagcggagtgcccttctgagcagcgggcggctgctgcggcgcctggggctgctcctgctacctgtgctgggcttcctggctgtgtggaccgtgggcgccctggagcgaggcatccagcacgcacctctggtgatccgaggccacactcccagtggccgccatttctacctctgtcaccacgaccgctgggactacatcatggttgtggctgagctgctgctgctgtgctggggcagcttcctctgctacgccacacgggctgtgctctcggccttccatgagccacgctacatgggcatcgccctgcacaatgagctactgctttccgctgccttccacacagccaggtttgtgctggttccctctctgcacccggactggaccctcctcctcttcttcttccacacccacagcacagtcaccaccacgctggctctgatcttcatccctaagttctggaagctgggggctcctccccgggaggagatggtggatgaggtgtgtgaggacgagctggacctgcagcactcaggctcctaccttggcagcagcatcgcctcagcctggagtgagcacagcctggaccctggagacattcgggacgagctgaagaagctctatgcccagctagaggtccacaaaaccaaggaaatggccgcaaacaacccccacctgcccaagaagcgaggcagctcatgccagggactgggccgctccttcatgaggtacctggcggaattccccgaggccctggccaggcagcactcccgggactcaggatccccaggccacggcagcctgcccggctcctcccgccgccggctcctcagctccagcctccaggaacccgaggggacaccagctctgcacaagtcccgcagcacctatgaccagcgcagggagcaggacccgcctcttcttgactcactgctgaggaggaagctggccaagaaggcctctcgaacagagagccgggagtcggtggaggggccccctgccctgggcttcaggtcagccagcgcccacaacctgacggtgggagagaggctacccagagcccggcccgcctctctgcagaagtcgctcagtgtggccagctccagggaaaaggccttgctcatggccagccaggcctacctggaggagacctaccggcaagcaaaggagcgggaggagcggaagaaggccaaggcagccatggccagcctggtgcggaggccatcagccaggaggctggagcggcctcgaggggcccccctgtcagctccaccttcccctgccaagagcagcagcgtggacagctctcacacctctgggaggcttcatgaggaggctaggagaaggctgcctcatccacccatcaggcaccaggtttctacccccatcttggccctgtctgggggcctgggagagccaaggatgctatctcccacctccaccttggctccagctctgctgccagctctagctccaaccccagcccctgccctggcaccagtcccagtatccccacaaagccccaacttactcacctacatctgcccctgggagaacgcagaactgccagccaagcaagaaaatgtgccccaggaaggcccctcagggccagagcgaggccaccactcccctgccccagctcgagccaggctctggagggccctctctgttgcagtagagaaaagcagggctggggagaatgagatggacgcagaggatgcacatcaccagagggaagctaatgatgtggacgaagacaggcccaagatcttccctaaatcccacagcctcaaggcccctgttcagcagggttccatgcgcagcctggggctggcgattaaagctctgacccgttctcggagcacctacagagagaaggagagtgtggaggagagtcccgaggggcagaacagcgggactgcgggagagagtatgggggcaccctcccgatcgcccaggctaggccggcccaaggcggtgagtaagcaggccgctcttatcccctccgatgacaaggagtccctccagaaccaacagaacgctcacaccagcaggatgctccaagtctgtcaacgggagggcagcagggaacaagaagacagaggcaggaggatgacccagggtctaggggaacggaaagctgagagagcaggtaaaacagggcttgccatgctgaggcaagtttccagggacaaaaacatcaagcaatcaaaagaaacccctgtcgggtggcaggaactgcccaaagctggcctccagtccctcggcagcgctgaccacagggtggcagaggtatgcccctgggaggtcactgaatcagaaacgcgtcagccagacagtggcaacaaggccgaaatctgcccctgggagacgagtgaaggagccccagagtcgagggcactaagacaagacccaggtgactcccaaaaaaagagaggggaggcccggggaaaatcagagcccatagatgtggttcccatgatgcggaaaaagccagagaggctggtgagggagcaggaagcagtgtgtccctgggagagtgccgatcgaggaggtctgtcccctgggtcagctcctcaggaccctggcagaatcagagacaaatctgaggcgggggacagtgtggaggccaggaaggtggagaagcctgggtgggaagctgctggcccagaagctcatacccctgacatcaccaaggcagagccgtgtccctgggaggcaagtgaaggaggcgaggatgggaaaccagcccaagaggcagtgaaggatctccctcaggaaaagcagaaaaccaggaaagcaaccttttggaaagaacagaaaccgggaggagacttggagtctctttgtccatgggagagtacagatttccggggcccctcagcagtctcaattcaggccccaggaagctcagagtgttcagggagtttgggcagtggcattgctgaagtgtgtctgtgggaggcaggagatgctcctgctatccagaaagcagagatctgtccctgggagctggatgataacgtgatggggcaggaaatgctgagtctggggacaggtagagaatctcttcaagaaaaggaaaaagcctccagaaaaggaagctttggagagatgggggaacaaactgtgaaagcagtgcagaaattaagtcaacagcaggagtcagtttgtcccagggagagcacggtccctgggcactccagcccatgtctagacaattcctcatccaaagctggtagccaattcctatgcaatggaggaagcagagcaacgcaggtgtgtccacaggaagatctcaggccggaggcacaggaagcaacacctgccaaaacagaaatctgtccctgggaggtaaatgaaagaacaagagaggaatggacatcagcacaggtgccaagaggaggagaatctcaaaaggacaaggagaaaatgcctggaaaatcggaaatcgaagatgtcacagcttgggaaaagcctgaggggcagatccaaaagcaagaagcggtcggcccctgggagagtgtggaccctggcagcttctccccacaaccacgtcctcaagacacagagagaccccaaacccttctccagatgtcaggcagtgtgggaagcaaagctgccgacatttgccctttggatgtggaggaaaacttgactgctgggaaggcagaaatctgtccctgggaggtgggtgctggagcaggggaggaaagggctttgggagctgaggccattaggaaatctccaaatgatacaggcaaggtttctgcagatcttggacccagggagagagctgttactgctccagagaagccacagaagccaaccccagagtgggaggtggcttgtccctgggggagtgtgggtccaggggcctgttctcagcatccaggtactctagatgctgatggaccaaaagctgggttccaggaactggatcatatgggctgcaggccaggtgaagtgtgtccctgggaagcacaggaagctgctaccagtgaaaaagccaagatctgtccctgggaggtaagtgaaggaactactgggaagggattggaccaaaaggcagggagtgaatcagcagagcagagggagaaagctctagaaaaggggagactcacttccctgggagaagacgtatcaaaagggatggcaaaactgtgtcaacaacaggaaactatttgtatttgggagaacaaggacttgagggaatcccctgctcaggcccccaagatctcagacttgcccagcagcatgagtagtgaagtggcagagggacattccttggaagcaacagagaagggggacctgagacaagacccaaagacaggttccttcccagaacacataacccaagaaaaagctccagctgcagacacagaagaattcactactgaagatggggaaaaaacaagccatgagctacaatccgtctgtccatgggagaccactgccccagcagattccgtctctcacctagacagacagcgccctgaccaacctaaagctagctcccagagactggtcagcactgggggcagggccgctgacgtgtgcccatgggatgttcctgatgcaggtgtgtataaatctgacagcagtgccaaggctgagacctgtccctgggaagtgactgaaagaatccctgtcaaaggggtgtcaaggcaggatggaaaaggggactctcaagaagagaaaggcagagccccagaaaaatcagagccaaaaggtgtgccagttcagaaaaagccagagatggcagacttcaggcagcaggaggctgtgtgtccctgggagagtcaagatggcaagggtctgtccccacagccagccccagatgcttctgacagaagcagaggcagttctgaggcagcaggcagtgtggagaccagggtagcggaagtgtgtctgtgggaagtggtagaggctccctctgccaagaaagcagagatctgcccttgggaggcgggtggaggagcagcagaggaaggggaacaggaaagagaatcacaagggcaaggagagatgttccttcagaaggcaggacctggagggacggaagaacacttctcaaaagcagcagcaaagcccagagagcaggaggcagtctgccctggggaaggcacaggctcaggagggctcttgccccagtcaggtgccctggacccagaactcaaagtcagccccaaggaagcaggcagcatgggaagcaggatggcagagctgtgccaatgggaaatcacagatccagaaggaaataaaataaagggtaccatggcagacatctgtcctggggaggaaactggagtcccatctgaggaatctggcctcctggctttaacagcaactcggagagaatttttccccacagctcctgaaaaaccactatgccttttagtccatgggcctctggatcacttctttccagaaagcaaaatcccctgccccaaggtaagcaggccagccagtactttcactctagaaggtgtcagagaactacaaggaccttcagggcttgagccaaggaccagcttagccccagagccaagtctccaggaagctgagtctcagtcttcgtccttaactgaagactcaggccaagtggcttttgaagctcagtatgaagaattcacccctcccactgtctatccttgggattgggagtaacagccttattaggtgaggtcaaacacagagctagctttcaggagccaaggccctttccaagtccaggtgttcccaaagagctgaatcaaagacagcttggccacttcccctccttgagaagaccagaagtcaacccatcccaaagacaaactgcatgaaaagggtacagcttagaccccaatgggaaggcccaccctctctttacttctaacttttcttcctgtttgaggaaacaaagactggacactctacttctaaggacgcctcccatccacctacagtactcacaacacaaaccacccgagtctggacactcacccacaaagccactgttagggatgaaaaaagtcagttgtgcccagcctaccttctctcacagggggacccaattctctgaagtctacgatggagcattttttgagaagaaactaaaccatacaaagtgttggcaacgtagggatggtggaccacagaaggctataaaggccaccatagaaagctgaagagccatttaattgaagcggaagataaattgggggaaaagctaaaatgactcaaaataggggcctgaaaatgctttaaggaccttgtcattttgactttgaatctcctgtttctgctttattgcttctcatacctgccctgcttgactgctgaagcagaaacaatcaggcacgctgacacccttatcagcatctggcatccaaagcaacatcagagagagagaacacagaagaaaagcaattgccccaggtcctccccacagtcaagggagctcttccttccagacatccttgtgtgcctcttgctagttttttagggggtctccccctcttcctgccctagctctcacca

SEQ ID NO: 135971 - DNA, 1698 bp, Homo sapiens
  Payload ID: 6590
  Gene Symbol: GPR18
  Gene Name: G protein-coupled receptor 18
  Uniprot ID: Q14330
  ENST ID: ENST00000340807
  CDS Start-End: 558-1553
agtaaaatgtcacactgcaaactctgggcctggggtcccatgggacttcagtggttccaggactgatttcactgccatcacttatatatgatgatgcagacttcaagcatcaaagtacacaaactgaagaaactttatcctttgtatataattatcttaaatatatgccatcatttcaaggggagcttatgctaagtgtgacttcataaacaaatcatttgtgaaagagaaaaaccacatccagggtaaagtcataaggtgaaaaagcctatttcagagagcacttcctgaaagagacaaagcagcaattaaagtcagcccagcaccaactccgacgccaagcgttacactggaaactactttttaaagcaacaaaagagtctaaaacaaaatacaacatttcttaaatacactgtttccagaaagagctattttaacagaagcaactcaaagatatcccttcgacagaagtggaagtgctgaaaaatgctcatctctcacacagacttttgatggacaggagtttctaagtatcatgcctaccaacaagctgtaaaatgatcaccctgaacaatcaagatcaacctgtcccttttaacagctcacatccagatgaatacaaaattgcagcccttgtcttctatagctgtatcttcataattggattatttgttaacatcactgcattatgggttttcagttgtaccaccaagaagagaaccacggtaaccatctatatgatgaatgtggcattagtggacttgatatttataatgactttaccctttcgaatgttttattatgcaaaagatgaatggccatttggagagtacttctgccagattcttggagctctcacagtgttttacccaagcattgctttatggcttcttgcctttattagtgctgacagatacatggccattgtacagccgaagtacgccaaagaacttaaaaacacgtgcaaagccgtgctggcgtgtgtgggagtctggataatgaccctgaccacgaccacccctctgctactgctctataaagacccagataaagactccactcccgccacctgcctcaagatttctgacatcatctatctaaaagctgtgaacgtgctgaacctcactcgactgacattttttttcttgattcctttgttcatcatgattgggtgctacttggtcattattcataatctccttcacggcaggacgtctaagctgaaacccaaagtcaaggagaagtccataaggatcatcatcacgctgctggtgcaggtgctcgtctgctttatgcccttccacatctgtttcgctttcctgatgctgggaacgggggagaacagttacaatccctggggagcctttaccaccttcctcatgaacctcagcacgtgtctggatgtgattctctactacatcgtttcaaaacaatttcaggctcgagtcattagtgtcatgctataccgtaattaccttcgaagcatgcgcagaaaaagtttccgatctggtagtctacggtcactaagcaatataaacagtgaaatgttatgaataataaggttctttcatttcaatcccatcaaaattcacttcactaactactctggcgtcaatggatattctgtataatactatcaagtcccttttctcttgaaaaaataaattcattatcttcattttaaaaacttatataaaa

SEQ ID NO: 135972 - DNA, 1468 bp, Homo sapiens
  Payload ID: 6590
  Gene Symbol: GPR18
  Gene Name: G protein-coupled receptor 18
  Uniprot ID: Q14330
  ENST ID: ENST00000397470
  CDS Start-End: 310-1305
aagtcataaggtgaaaaagcctatttcagagagcacttcctgaaagagacaaagcagcaattaaagtcagcccagcaccaactccgacgccaagcgttacactggaaactactttttaaagcaacaaaagagtctaaaacaaaatacaacatttcttaaatacactgtttccagaaagagctattttaacagaagcaactcaaagatatcccttcgacagaagtggaagtgctgaaaaatgctcatctctcacacagacttttgatggacaggagtttctaagtatcatgcctaccaacaagctgtaaaatgatcaccctgaacaatcaagatcaacctgtcccttttaacagctcacatccagatgaatacaaaattgcagcccttgtcttctatagctgtatcttcataattggattatttgttaacatcactgcattatgggttttcagttgtaccaccaagaagagaaccacggtaaccatctatatgatgaatgtggcattagtggacttgatatttataatgactttaccctttcgaatgttttattatgcaaaagatgaatggccatttggagagtacttctgccagattcttggagctctcacagtgttttacccaagcattgctttatggcttcttgcctttattagtgctgacagatacatggccattgtacagccgaagtacgccaaagaacttaaaaacacgtgcaaagccgtgctggcgtgtgtgggagtctggataatgaccctgaccacgaccacccctctgctactgctctataaagacccagataaagactccactcccgccacctgcctcaagatttctgacatcatctatctaaaagctgtgaacgtgctgaacctcactcgactgacattttttttcttgattcctttgttcatcatgattgggtgctacttggtcattattcataatctccttcacggcaggacgtctaagctgaaacccaaagtcaaggagaagtccataaggatcatcatcacgctgctggtgcaggtgctcgtctgctttatgcccttccacatctgtttcgctttcctgatgctgggaacgggggagaacagttacaatccctggggagcctttaccaccttcctcatgaacctcagcacgtgtctggatgtgattctctactacatcgtttcaaaacaatttcaggctcgagtcattagtgtcatgctataccgtaattaccttcgaagcatgcgcagaaaaagtttccgatctggtagtctacggtcactaagcaatataaacagtgaaatgttatgaataataaggttctttcatttcaatcccatcaaaattcacttcactaactactctggcgtcaatggatattctgtataatactatcaagtcccttttctcttgaaaaaataaattcattatcttcattttaaaaacttatataaaacatttttgtgaattattc

SEQ ID NO: 135973 - DNA, 1660 bp, Homo sapiens
  Payload ID: 6590
  Gene Symbol: GPR18
  Gene Name: G protein-coupled receptor 18
  Uniprot ID: Q14330
  ENST ID: ENST00000397473
  CDS Start-End: 502-1497
aagtcataaggtgaaaaagcctatttcagagagcacttcctgaaagagacaaagcagcaattaaagtcagcccagcaccaactccgacgccaagcgttacactggaaactactttttaaagcaacaaaagagtctaaaacaaaatacaacatttcttaaatacactgtttccagaaagagctattttaacagaagcaactcaaagatatcccttcgacagaagtggaagtgctgaaaaatgctcatctctcacacagacttttgatggacaggaggtgctgctttctgtgaaccactgaagtagagcagctgaaatcacaaaacctggaagacttggctttacgtactcccaattgtgcactagaaaacagctcatctattgctctaacagtctagttcttgatctgctgaccatgacacaaaacattgctgtttctcaacctatgataatttaaagagaacataagtttctaagtatcatgcctaccaacaagctgtaaaatgatcaccctgaacaatcaagatcaacctgtcccttttaacagctcacatccagatgaatacaaaattgcagcccttgtcttctatagctgtatcttcataattggattatttgttaacatcactgcattatgggttttcagttgtaccaccaagaagagaaccacggtaaccatctatatgatgaatgtggcattagtggacttgatatttataatgactttaccctttcgaatgttttattatgcaaaagatgaatggccatttggagagtacttctgccagattcttggagctctcacagtgttttacccaagcattgctttatggcttcttgcctttattagtgctgacagatacatggccattgtacagccgaagtacgccaaagaacttaaaaacacgtgcaaagccgtgctggcgtgtgtgggagtctggataatgaccctgaccacgaccacccctctgctactgctctataaagacccagataaagactccactcccgccacctgcctcaagatttctgacatcatctatctaaaagctgtgaacgtgctgaacctcactcgactgacattttttttcttgattcctttgttcatcatgattgggtgctacttggtcattattcataatctccttcacggcaggacgtctaagctgaaacccaaagtcaaggagaagtccataaggatcatcatcacgctgctggtgcaggtgctcgtctgctttatgcccttccacatctgtttcgctttcctgatgctgggaacgggggagaacagttacaatccctggggagcctttaccaccttcctcatgaacctcagcacgtgtctggatgtgattctctactacatcgtttcaaaacaatttcaggctcgagtcattagtgtcatgctataccgtaattaccttcgaagcatgcgcagaaaaagtttccgatctggtagtctacggtcactaagcaatataaacagtgaaatgttatgaataataaggttctttcatttcaatcccatcaaaattcacttcactaactactctggcgtcaatggatattctgtataatactatcaagtcccttttctcttgaaaaaataaattcattatcttcattttaaaaacttatataaaacatttttgtgaattattc

SEQ ID NO: 135974 - DNA, 741 bp, Homo sapiens
  Payload ID: 6590
  Gene Symbol: GPR18
  Gene Name: G protein-coupled receptor 18
  ENST ID: ENST00000416594
  CDS Start-End: 448-741
cagcaattaaagtcagcccagcaccaactccgacgccaagcgttacactggaaactactttttaaagcaacaaaagagtctaaaacaaaatacaacatttcttaaatacactgtttccagaaagagctattttaacagaagcaactcaaagatatcccttcgacagaagtggaagtgctgaaaaatgctcatctctcacacagacttttgatggacaggaggtgctgctttctgtgaaccactgaagtagagcagctgaaatcacaaaacctggaagacttggctttacgtactcccaattgtgcactagaaaacagctcatctattgctctaacagtctagttcttgatctgctgaccatgacacaaaacattgctgtttctcaacctatgataatttaaagagaacataagtttctaagtatcatgcctaccaacaagctgtaaaatgatcaccctgaacaatcaagatcaacctgtcccttttaacagctcacatccagatgaatacaaaattgcagcccttgtcttctatagctgtatcttcataattggattatttgttaacatcactgcattatgggttttcagttgtaccaccaagaagagaaccacggtaaccatctatatgatgaatgtggcattagtggacttgatatttataatgactttaccctttcgaatgttttattatgcaaaagatgaatggccatttggagagtacttctgccagattcttgga

SEQ ID NO: 135975 - DNA, 8822 bp, Homo sapiens
  Payload ID: 6591
  Gene Symbol: GPR180
  Gene Name: G protein-coupled receptor 180
  Uniprot ID: Q86V85
  ENST ID: ENST00000376958
  CDS Start-End: 26-1348
cgtcggtgcagacctggagacgggcatgggggggctgcggctgctggctgtggccctcacgtgctgctggtggccgcagggcagccagggtaagaccctgcggggcagcttcagcagcaccgcggcccaggacgcccagggccagcgcatcggccacttcgagttccatggtgaccatgctcttctgtgtgtcagaatcaacaacatagcagtagctgttggaaaagaagctaaactctacctgttccaagcccaggaatggctaaagctacagcaaagcagtcatggttatagctgtagtgaaaaattatccaaagctcagttgacaatgaccatgaaccagaccgaacataatctgacagtgtcccagattccgtctccacaaacgtggcatgtgttttatgcagacaagtatacatgccaagatgacaaggagaattctcaggtggaagatatcccatttgaaatggtgttactaaacccagatgccgaagggaatccatttgatcattttagtgctggagaatctgggttacatgagttctttttcctcctagtcctagtgtactttgtgattgcttgcatttatgctcaatcattgtggcaggctattaagaaaggcggacccatgcacatgattttaaaggttctgacaactgcattgctgttacaagctggttcagctttagctaattacattcatttctccagttactccaaagatggaataggggtaccatttatgggaagtttggcagaattttttgacatcgcttcccaaattcagatgttatacttacttttgagtctatgcatgggttggacaatagtcagaatgaagaagtctcaaagcagacctctccagtgggattctacgcctgcatccactggcattgcagtattcattgtcatgacacagagtgttttgctactttgggaacagtttgaagatatcagtcatcatagctaccattcacaccacaacttagcagggatcctcctaattgttctaagaatttgcctagcattgtcattaggctgtggactctatcagatcatcacagtggagagaagtacactcaaaagggagttctacatcacatttgccaaaggctgtatcttgtggtttttatgccatccagttcttgcatgcatttctgtcatttttagcgactaccaaagagacaaggttattacaataggtgttatcctttgccagtctgtttccatggttattctctacagactctttctgtctcacagtctatactgggaagtttcttcactttcttcagtaacactaccactgaccatatcatctggacacaaaagtcgccctcatttctgatacttgatttttgttgagaggaaaagtgaattggttaaaagagtgcaataaggatccaaatacagtgacttttttttcatacatttagtatgaaaacttgaacagcgaaagcagagcatgttatttatataactgcatttaagcagtaccaagactgaaaaaaaaggtaataaatgaaatgttttgaaatatacttaaacaacaaactttgaagaaagtgttgttataaaattattgaagcgatttctatgtggaaataaatgtgaaaaataactatgatattttggtaaaatattcaccacttataatgcctcatcttaatagctaactcaggtttaatagtcttataaaaagtaatcagttaaatgattacttgcttataaatatctaaactagtccagttatgaaatcagtgtaatacattgatttttaaaactgctgctttttatgctttaaggaaaatgtatttcatatttgagtttaaaggaattgaaattacttcaggaaatgaatataaaataggttcacagttaaatgaataagcttttgtttatttgtgggtggagttattctccaattttttctgccatttttggctctagttcaggttttagcttgattagcaaaggtttttgacaaacagtttatgaaaaaataaaacttaaatacattacacgggttgtaaggacaaaggattttaaaatctgagcacttaggtgaagggacaagcaggtttatgtgtttaaacagaaagaagggaaaaggtactatgtgatatggtactgaaattttgatcccaatagaattcatttctcttacgttgaatccccaatcataattaagccgtatacacagattaaattaacagaagcatttcacataaatgttggtttcagtcatcaactacccatgaattcctgcccaaggatacttaatcaggattaaattttctatgaataattgaaaaacaaaacactcactggatttgttataatccgtgttggcactggattctaagtagttgccatcttgaatcctttgtaataaagccatacttttgtgtgtgtgtgtgatgccccagtattgagtatgctagctaaaaaatatcaagtgcctgattaaagaattgctaaatggttgtcaatactcgctgtataaaatgagtattcccattaatagtcactgattggaaattattctgttgctgtttgtcaagctgttcaggccttttcctttttacttctggcttattttaaaaatattttttatctatttactgtgtgtttaagcaagcaacagtgcactgatctggtagttaaattttttaattaaatagttaaaataatgtagtgcaacttaaaaatatctatggctttgtttttgtttttcttttgtacctagtctcattggaaatgactagtattctgcctcattttcagggcagaatatgtgtttgtgacccaaaatgacaaagttaccaagttcaacctgctcattaaatcatctctctattagttctttgtaaatcacttagtacattagagctacaggttaagactagaaagtctgagttatgttttaggtatacatgatcgtctgagtggtcataaccttttcttttatcatgtctcgctaataaccccagctattgtctgttgtgttcagctgagatgcaaaaaagaaattaagcaaaaaagaaaaagatgaagacttttcatgaattttgtgaacttgccaaaaggggaagggaaaaatctttgtgttacttcactcaaagaacataagtaactgcaattaacatatatgaaatttattactctgcttgcatttatgaaactaaccagttttttaaactttaattcttaaatttatggttggaaatgctgataatttattttgttatttaagagctgttgttaagtggaggaaagtagttgttaataaatgtataaaactgttcttgactagtaatcagggacaaaatttatagttcataagtcatgacacagtattcgctctttttctgaatgtttacatagagattcatcactgcagattacagaaagttaagtgtatactacaaactctaattaaagataaaaatcttttctacttttctttgtcagataatgcttttttatgtgtttttacattttttgaaagaagataaatggttcatccagagctttattaagaagcatttcttttcttcccttaaaaaatagatgcttatttttattgacatgtgtataataagatgggtgcctactgtgatgcattttaccaggcattttaccttcattattactcatctctattgtgataaccaggctcccatttaactgagtataagagagaataaatgatttctctaaggtcatcaaactatttagtttttccactttaccttcatgatttaaggaacatgtattagctgtgttttagtgagaatgaattgctatccatcataatttttgctgttgatttgaacattaaaactggaattgtgctaaaatcagaacatgcgcttgaatatctgtaagacctcagcacacttcagtatttgaacctggcttttaaccagacagtattactagcaggagagttaatctaggcagaagagcttgctttagggtaattatttattatctccagtaaagtcacatctgatgaacataggagatacacaaatctgagatcatctctaaaataatgagactagaacctatctatcaacatgaacatgggctccttcagcatgtttcttctaggagactgcacgttctttggaatttggaaatttggaattatctgtgaaacattttcttaaatagcttctgtggtatcaaatcattgaggttgttttttgtttgttttgagaattgatatgattgttagaagtagccagatacgaagaggtaatactgttttttattccaacatgtatttgtgaattgagactaaaataatgagattggttttcctctgtgatctgaaagtagtgtggtagaagcaccgtagcttgatttcttgcaatagctctctaagtaatattaccatgtccacacttgggcagccttctgcacagctccaggggcatcatatgtgttgtgctgtaggagtgccatgaagcctggaggtgaggaaagaagtgatcctgcccactagggccattctccacagtgtagccaaaacaatctcttaaaaatggaaatcatctggatgatgagcatacagaaattctttgtgctaatcttgtaatttttttgtaagtttgaaattatttcaaaaagtttaaaaatcatataaatcagatcaaactactacttccctgacaaaaaccctccatgtgcctctcattgcacttaggaaaagaagtcctcactcattactatgttctgcaaggcccatatgatctggttatctcttaatttgtaccactctctcacacacatatcccagcctcattgtccttcatcaaaaaaagatctagcttatatcacaccctcagatacttggcactagccatcttctctgcctgggacattctcttccaaatcttagcatggttggaaggctgaatcctcatccttcaggttctcagctgagatgtcttttagagaactcaccatctgtggtggatttatatggtgcagtttagtcaacctggagataggttctgcagaattctcttccatgcataatttcaggacaatgtaggccataagaaatgtttgatacaagatatagaaggcagaagtaaagtagcagccagatctgcattctttttgtaagaggaagggccagacaaggcacaaggcacaaggcactgttgcagcttatccacattattgcttatctgttggcttctcttggcctgtgggacaacagccaggcccacaggaacaccagttcctgccggaatggctccttcagcttctctggctcctgggccaggtgtgcgttttactctgacaaagggtgccagcttctgctggacaactccatcattcacactggaggattagaggcagggagagacctgtatggcttccagtccatcctcacaagttccactcagttcccacaggttctactcatcctagcaagttccttgcttcccccatttcccatgtcttccctttccaactgccagacacaaaagaaaccgcctcctataatccctataataagccccttattttgaatattaagatatgtgtatgtgtattagatcctagtggttcttttctgatcagaccctgattaaccataccatcctacctaatgctattcccccatcctagttctatcatattatccctttttttgtttgttgtacttagctggtttatctttgtcatctctcaaattagaatataaattttaagtgagtttgtctctattgttcattgctgtatgcctaatactaggacactccctggtgcatactagatgctcaaaaatatttttgagtgaatgaaggcaatgctgaaaaagttccaaatctgtacttaacagtgtagtattaattatgtaatagaagtacccgtagtgacttcaataataccttgcctattctttgttcaattgcatggaacttggtagtgtgtaaaaatcttgactagtcaagtagttgtcataaaacatcagttacgagaggatttctcaaattctcacagaggcagtttctctttattttatgtagtcctgtaataggaccatgtgtctggtttctggcctgccacaaccagaagcaccaatttaaaagagaagtttctagtcagctagaggagggaatgttgacagtagtcagaagcagctgggaaaagatgggaaaactagaaatgacaataacactcaaattgcagcagcctggggtcatttagtgtaggtgaaagcagccctgtgttgtgtatctcagtagactcttaagagatttgttgttcaatgtattcatgacagtgactgatggtaatcaagaaaatattaagttataagttatgttcagtagcctcaaagaagtatgcgaaaaccttctaatgttttcttcttgttaaacaggtaatatatgcacattgtacaaaaatcagaaagttgaaaaaggtggggaaaagaagtccttctctcactcatttcccttccctgaatccaaactctgttaccagttatctttctagaaatggccccatgcacatataaacatatatgaaacacaaattatagcataacatacagacttttgcacattcagcaatttattctgtagccttacctagaattgtcccatttttttcaccaattgcatagaactccattatatggatgtattttgattttttcaaagaatcagttctgttactgcacgttgttggttttcagtcttgctaatacagacaaggctgaaattaagacagtaatcaagaatttgccaagacttccttccctcctcccaaaatgcctccactccaggttccaggtctagatccttgggattttctaggtgatggaagtatctttgttattcatagtgagctctgatagttacgctaaccagatgactcaaataggggctagccacaccagaagaccaaccattggattagagggttggagttttgagtcatatgatattagcccaacctctgaggtggagagaggggttagagatggagttcagctttatatagagattgagtcaattaatcatgcctgtcatgaaaccccgagagaaactctggtcagtgatgctcaagtgaacttccctggttggcaatactctggtgtgttctaggagggtgacatgtccctgagggcacagaaactttgtgtttgggatcctcttacaccttgctctatgtatgtcttcttttggctgttctgatttgtatccttttgctataataaactgtaatagtacgcatagcactttgctgagttctgtgagttgttctatttaattatagaacctgaaggtattgtggggacccctgaacttgcagccagttggtcagaagtaaggatggtcctgggaatgcccaaagttgctagtttctgaagtgagggcagtcatatggaggactgggcccttaatctgtgaagtttggcttaacttcaggcagttggtgtcagaagccattgcaaatatcctgatgatccgtgcaaaacaaaaacacttaacagaaaattacgttgtactctctgtacggataattttcggttaagtgtttttgttttccatggattgtactagatatcaatctgataaataacttttattcattatagttttaatttgcatttctcttattaatttttgttttaaaaccattttctttccagttctacgatctgttaacatatttttcccacttttctattgggttggttgtctttttcttattgatttgttaaaactctttataacagaaattggtcatttgtgatatgagtctgaactgtgtttctcaatttgtgatttttctctttacttttttaatggtgtctttttcttgtagtttttttaatgcaggtggaattatcagtctttcatttttttcttctgtgttctacctgtttcacaggtagaaaagccttagctctttgagattatgtttaaatgccctgtattttcatctagtggttttatggttttattttgtatgtttttttcatccacctggaatttattttgctgttaaaatatgaattagagatccaacttaatttttttcagatggttgttgacttattgcaatatcatgtgttatataatccatctttactgattcgttgctaattggtttctggacttttaaggctatctgatgaactgttgatctggtaccacactgtttcaattattgtagtcttaaaattgctgtacgctttggtagggataattttctgttaagtgtttttgttttttataattttccaattagtcttgctcattttttatataaactttgaaatcaatttttctgattttcaaaagaaaaaaaatcctgtttagtattcttagtggaatgaattaaatttccatagcaatttagggaaatttgactttcttaacgtgttgagtgttaaacccacaggtggtagcatgacattgactcctcagccaagcatattatcaactgtcggaaactaggttttcccatagtgatccaagaaactagtacgaaatgcctttctgattttttaaaacttgtatacatatatagtacatattatatatacttatatattaagtaatcagaagtatgtgtttctcaatcaccttttaaagacttctttatatagctcttgtacatttcttgatatgaatatgttaatgttttctttcattatgttgcatatggcttttgttttctgcatgaaaactattgatttctgcattctaattttgttcccagtcacctaactgaattcttctaacagttgtaataaatttctggttggctctcttgtg

SEQ ID NO: 135976 - DNA, 3451 bp, Homo sapiens
  Payload ID: 6592
  Gene Symbol: GPR182
  Gene Name: G protein-coupled receptor 182
  Uniprot ID: O15218
  ENST ID: ENST00000300098
  CDS Start-End: 220-1434
gattgggggaatgcaggaaaaaccccatccctccctacagagcctcagcagtgacagctacttcccggatgagaagggcggccgtgaagccagcagggaagccagccccacagccaagggccccccagcctcctcacagctccccatagcctggacctgccggccctccctccaggaccgaggggctcccaagggaaactcaggcgtgtgctggtcccaatgtcagtgaaacccagctgggggcctggcccctcggagggggtcaccgcagtgcctaccagtgaccttggagagatccacaactggaccgagctgcttgacctcttcaaccacactttgtctgagtgccacgtggagctcagccagagcaccaagcgcgtggtcctctttgccctctacctggccatgtttgtggttgggctggtggagaacctcctggtgatatgcgtcaactggcgcggctcaggccgggcagggctgatgaacctctacatcctcaacatggccatcgcggacctgggcattgtcctgtctctgcccgtgtggatgctggaggtcacgctggactacacctggctctggggcagcttctcctgccgcttcactcactacttctactttgtcaacatgtatagcagcatcttcttcctggtgtgcctcagtgtcgaccgctatgtcaccctcaccagcgcctccccctcctggcagcgttaccagcaccgagtgcggcgggccatgtgtgcaggcatctgggtcctctcggccatcatcccgctgcctgaggtggtccacatccagctggtggagggccctgagcccatgtgcctcttcatggcaccttttgaaacgtacagcacctgggccctggcggtggccctgtccaccaccatcctgggcttcctgctgcccttccctctcatcacagtcttcaatgtgctgacagcctgccggctgcggcagccaggacaacccaagagccggcgccactgcctgctgctgtgcgcctacgtggccgtctttgtcatgtgctggctgccctatcatgtgaccctgctgctgctcacactgcatgggacccacatctccctccactgccacctggtccacctgctctacttcttctatgatgtcattgactgcttctccatgctgcactgtgtcatcaaccccatcctttacaactttctcagcccacacttccggggccggctcctgaatgctgtagtccattaccttcctaaggaccagaccaaggcgggcacatgcgcctcctcttcctcctgttccacccagcattccatcatcatcaccaagggtgatagccagcctgctgcagcagccccccaccctgagccaagcctgagctttcaggcacaccatttgcttccaaatacttcccccatctctcccactcagcctcttacacccagctgaggtagaggccagactcctccaacagtgaaggaaaaggcacaggtgagagtataggtgggagatttggggggatgtagaggggagggtcaaagcactcgtggtcaattttgaatctatcttaaaatactgaggtgtggagagagagacaggatcaggagcgatagagagcaggccctcagtgttgtactatttgtctcggtccttgtgtctaaggagcaatgcagaaaaaaaggtgaaataaatggaagagatagccatggactctggatcttttaaaaatctgcacttccagctgggattgggaagggagctgaggctaaagaggtgctcggcagaggaaactagacacattcatttcataaatcactctggctggaaacagtgaactctgcaggaacctcacaaaactccttttgcgtttgtgagcttgttgatcttccagctcactatgcaggttatggggacaagaggccagaggccaaggaaccaggcggccccagcaggacgttccctagctgtgcatcctatgcacagccatgataagtgaaggcggatggggatggcaggggtgggggcgaagccaaggtctgagacctgcaccctgcagctgggtcagcaggatggtatctccacccgcggccatccaggaaacacagctccatttccttgctgacaccctcccctccccgttgtccatcctgctccctccccacaagcaagaggagttgtcccagagtcagctcctcatagctgacctcttaccagcttcggatctaggaaacttccagacttctagggagacacagagctaccagaaagcccaacccacccccatctctttctctccagatcataggaaagtatcaagggatgtcattccgggagcagcccttgggacagccagcagcaggtgctggcagatgctctgtccttcaccctctgtccccggcaccagatggggaaggccacagtggaaacttctcaattccgtcacagggcagagctctgacactgttataagtcagttctccctggccatgtcttttcctaattttcctgtcccacaacttaggttccttaacacttgttctacagatgaaacaaaaaagtcctctgttaacaagtagaccttctggaaaaggatcacttatgtttgggagactaggaccctgtccatgaagaactctgaagtaaaggcctaagaacaggatctagtttccgccttccaattccacgtcctttgcctcttaatcctgcccgtggtaaggggactggatggaatcactgatagcctcttcaccatctcctctgtcctgcttaagtgctccatgtgtctggaatgtttaacttggagtaactactcactgacttggagaccacctgttctactttgagaaatcagaactgttctgtggatgcactgacagcgtgctccaactgcatatgcacccaggtttgtcaggagcatggaaggaaacctgcatctccctgtttactgggcccaaacctgaaagggtcttaagctgcagacagcttctcagtagcacagagctgaaggctttttgaaccaggagtctgggttgtggcttgggtcgcagtaagggcttagcctatcaatgcagaattcacattgaaaaagactttcctctcttgtcccaacacaaaaaagcaagccaagatctgatgcccatatcactgcctcctctgacttgggctacaggagtttcctgaaggaaaccaaattttacatctctgtcacattccagatcaccttagaggccacgctcccaagattagttatcaccctggcagtatgaatacttccctaaggcctcccatccatggaggggaagagtgggaaccagctgttacactcagcatctactgagcactgatgggagccctgcctgggccatgtgctgtggggccaaatggacatcactccctaacttcttgaggtctgtctcctctgtggattcacgcatgtatcaacctcattaaactatgccaaactttt

SEQ ID NO: 135977 - DNA, 591 bp, Homo sapiens
  Payload ID: 6592
  Gene Symbol: GPR182
  Gene Name: G protein-coupled receptor 182
  ENST ID: ENST00000622922
  CDS Start-End: 1-591
atgataagtgaaggcggatggggatggcaggggtgggggcgaagccaaggtctgagacctgcaccctgcagctgggtcagcaggatggtatctccacccgcggccatccaggaaacacagctccatttccttgctgacaccctcccctccccgttgtccatcctgctccctccccacaagcaagaggagttgtcccagagtcagctcctcatagctgacctcttaccagcttcggatctaggaaacttccagacttctagggagacacagagctaccagaaagcccaacccacccccatctctttctctccagatcataggaaagtatcaagggatgtcattccgggagcagcccttgggacagccagcagcaggtgctggcagatgctctgtccttcaccctctgtccccggcaccagatggggaaggccacagtggaaacttctcaattccgtcacagggcagagctctgacactgttataagtcagttctccctggccatgtcttttcctaattttcctgtcccacaacttaggttccttaacacttgttctacagatgaaacaaaaaagtcctctgttaacaagtag

SEQ ID NO: 135978 - DNA, 459 bp, Homo sapiens
  Payload ID: 6592
  Gene Symbol: GPR182
  Gene Name: G protein-coupled receptor 182
  ENST ID: ENST00000556850
  CDS Start-End: 1-166
ctcctcttcctcctgttccacccagcattccatcatcatcaccaagggtgatagccagcctgctgcagcagccccccaccctgagccaagcctgagctttcaggcacaccatttgcttccaaatacttcccccatctctcccactcagcctcttacacccagctgaggtagaggccagactcctccaacagtgaaggaaaaggcacagatcaccttagaggccacgctcccaagattagttatcaccctggcagtatgaatacttccctaaggcctcccatccatggaggggaagagtgggaaccagctgttacactcagcatctactgagcactgatgggagccctgcctgggccatgtgctgtggggccaaatggacatcactccctaacttcttgaggtctgtctcctctgtggattcacgcatgtatcaacctcattaaactatgccaaactttt

SEQ ID NO: 135979 - DNA, 1700 bp, Homo sapiens
  Payload ID: 6593
  Gene Symbol: GPR183
  Gene Name: G protein-coupled receptor 183
  Uniprot ID: P32249
  ENST ID: ENST00000376414
  CDS Start-End: 85-1170
aaacttacttcagtttggacaactactcacagctactacacagagacccgaacgagtcactgatatacacctggaccaccaccaatggatatacaaatggcaaacaattttactccgccctctgcaactcctcagggaaatgactgtgacctctatgcacatcacagcacggccaggatagtaatgcctctgcattacagcctcgtcttcatcattgggctcgtgggaaacttactagccttggtcgtcattgttcaaaacaggaaaaaaatcaactctaccaccctctattcaacaaatttggtgatttctgatatactttttaccaccgctttgcctacacgaatagcctactatgcaatgggctttgactggagaatcggagatgccttgtgtaggataactgcgctagtgttttacatcaacacatatgcaggtgtgaactttatgacctgcctgagtattgaccgcttcattgctgtggtgcaccctctacgctacaacaagataaaaaggattgaacatgcaaaaggcgtgtgcatatttgtctggattctagtatttgctcagacactcccactcctcatcaaccctatgtcaaagcaggaggctgaaaggattacatgcatggagtatccaaactttgaagaaactaaatctcttccctggattctgcttggggcatgtttcataggatatgtacttccacttataatcattctcatctgctattctcagatctgctgcaaactcttcagaactgccaaacaaaacccactcactgagaaatctggtgtaaacaaaaaggctctcaacacaattattcttattattgttgtgtttgttctctgtttcacaccttaccatgttgcaattattcaacatatgattaagaagcttcgtttctctaatttcctggaatgtagccaaagacattcgttccagatttctctgcactttacagtatgcctgatgaacttcaattgctgcatggacccttttatctacttctttgcatgtaaagggtataagagaaaggttatgaggatgctgaaacggcaagtcagtgtatcgatttctagtgctgtgaagtcagcccctgaagaaaattcacgtgaaatgacagaaacgcagatgatgatacattccaagtcttcaaatggaaagtgaaatggattgtattttggtttatagtgacgtaaactgtatgacaaactttgcaggacttcccttataaagcaaaataattgttcagcttccaattagtattcttttatatttctttcattgggcactttcccatctccaactcggaagtaagcccaagagaacaacataaagcaaacaacataaagcacaataaaaatgcaaataaatatttcatttttatttgtaaacgaatacaccaaaaggaggcgctcttaataactcccaatgtaaaaagttttgttttaataaaaaatttaattattatttcttgccaacaaatggctagaaaggactgaatagattatatattgccagatgttaatactgtaacatactttttaaataacatatttcttaaatccaaatttctctcaatgttagatttaattccctcaataacaccaatgttttgttttgtttcgttctgggtcataaaactttgttaaggaactcttttggaataaagagcaggatgctgcaaagttatgagt

SEQ ID NO: 135980 - DNA, 1743 bp, Homo sapiens
  Payload ID: 6594
  Gene Symbol: GPR19
  Gene Name: G protein-coupled receptor 19
  Uniprot ID: Q15760
  ENST ID: ENST00000332427
  CDS Start-End: 356-1603
ctttccgcctagtgagaggcggtccgatttggcccttggggagtgtccgtcgcgttgatctgatggattcacgtacacaacaccacattctatgagattttgcaggcaaaagtccacaagctcgatatatgggacacctgcaccggcattggatttggccccgcaacatcttaaaggaagcaggctgtgagccaaggggaaggcagaggacagaaatgaatgtgtttccaggctttcctggtggtttatggcattctccaaactcctatgcaagggctattcctgaccaagaagatctaaagagaacgtctctgaaatcaagtccggatgaagaattaagagaaaaaaagtgaatatggtttttgctcacagaatggataacagcaagccacatttgattattcctacacttctggtgcccctccaaaaccgcagctgcactgaaacagccacacctctgccaagccaatacctgatggaattaagtgaggagcacagttggatgagcaaccaaacagaccttcactatgtgctgaaacccggggaagtggccacagccagcatcttctttgggattctgtggttgttttctatcttcggcaattccctggtttgtttggtcatccataggagtaggaggactcagtctaccaccaactactttgtggtctccatggcatgtgctgaccttctcatcagcgttgccagcacgcctttcgtcctgctccagttcaccactggaaggtggacgctgggtagtgcaacgtgcaaggttgtgcgatattttcaatatctcactccaggtgtccagatctacgttctcctctccatctgcatagaccggttctacaccatcgtctatcctctgagcttcaaggtgtccagagaaaaagccaagaaaatgattgcggcatcgtgggtctttgatgcaggctttgtgacccctgtgctctttttctatggctccaactgggacagtcattgtaactatttcctcccctcctcttgggaaggcactgcctacactgtcatccacttcttggtgggctttgtgattccatctgtcctcataattttattttaccaaaaggtcataaaatatatttggagaataggcacagatggccgaacggtgaggaggacaatgaacattgtccctcggacaaaagtgaaaactatcaagatgttcctcattttaaatctgttgtttttgctctcctggctgccttttcatgtagctcagctatggcacccccatgaacaagactataagaaaagttcccttgttttcacagctatcacatggatatcctttagttcttcagcctctaaacctactctgtattcaatttataatgccaattttcggagagggatgaaagagactttttgcatgtcctctatgaaatgttaccgaagcaatgcctatactatcacaacaagttcaaggatggccaaaaaaaactacgttggcatttcagaaatcccttccatggccaaaactattaccaaagactcgatctatgactcatttgacagagaagccaaggaaaaaaagcttgcttggcccattaactcaaatccaccaaatacttttgtctaagttctcattctttcaattgttatgcaccagagattaaaaagctttaactataaaaacagaagctatttacatatttgttttcactcaactttccaagggaaatgttttattttgtaaaatgcattcatttgtttactgta

SEQ ID NO: 135981 - DNA, 1751 bp, Homo sapiens
  Payload ID: 6594
  Gene Symbol: GPR19
  Gene Name: G protein-coupled receptor 19
  Uniprot ID: Q15760
  ENST ID: ENST00000540510
  CDS Start-End: 194-1441
tgtctccctaacaggaagcaggctgtgagccaaggggaaggcagaggacagaaatgaatgtgtttccaggctttcctggtggtttatggcattctccaaactcctatgcaagggctattcctgaccaagaagatctaaagagaacgtctctgaaatcaagtccggatgaagaattaagagaaaaaaagtgaatatggtttttgctcacagaatggataacagcaagccacatttgattattcctacacttctggtgcccctccaaaaccgcagctgcactgaaacagccacacctctgccaagccaatacctgatggaattaagtgaggagcacagttggatgagcaaccaaacagaccttcactatgtgctgaaacccggggaagtggccacagccagcatcttctttgggattctgtggttgttttctatcttcggcaattccctggtttgtttggtcatccataggagtaggaggactcagtctaccaccaactactttgtggtctccatggcatgtgctgaccttctcatcagcgttgccagcacgcctttcgtcctgctccagttcaccactggaaggtggacgctgggtagtgcaacgtgcaaggttgtgcgatattttcaatatctcactccaggtgtccagatctacgttctcctctccatctgcatagaccggttctacaccatcgtctatcctctgagcttcaaggtgtccagagaaaaagccaagaaaatgattgcggcatcgtgggtctttgatgcaggctttgtgacccctgtgctctttttctatggctccaactgggacagtcattgtaactatttcctcccctcctcttgggaaggcactgcctacactgtcatccacttcttggtgggctttgtgattccatctgtcctcataattttattttaccaaaaggtcataaaatatatttggagaataggcacagatggccgaacggtgaggaggacaatgaacattgtccctcggacaaaagtgaaaactatcaagatgttcctcattttaaatctgttgtttttgctctcctggctgccttttcatgtagctcagctatggcacccccatgaacaagactataagaaaagttcccttgttttcacagctatcacatggatatcctttagttcttcagcctctaaacctactctgtattcaatttataatgccaattttcggagagggatgaaagagactttttgcatgtcctctatgaaatgttaccgaagcaatgcctatactatcacaacaagttcaaggatggccaaaaaaaactacgttggcatttcagaaatcccttccatggccaaaactattaccaaagactcgatctatgactcatttgacagagaagccaaggaaaaaaagcttgcttggcccattaactcaaatccaccaaatacttttgtctaagttctcattctttcaattgttatgcaccagagattaaaaagctttaactataaaaacagaagctatttacatatttgttttcactcaactttccaagggaaatgttttattttgtaaaatgcattcatttgtttactgtagtttttgtgggttttattttacttgctttttatgttttaggaaaagcgttcactttgaactttagccaacagtccttttactattaatatattagttacatgcataaaaaagaaaatgctttcttactatttactgttggttcaaaaacataaacctaagccatacacac

SEQ ID NO: 135982 - DNA, 553 bp, Homo sapiens
  Payload ID: 6594
  Gene Symbol: GPR19
  Gene Name:: G protein-coupled receptor 19
  ENST ID: ENST00000540796
  CDS Start-End: 376-553
agcgcgcaaaagtttcaaaactttccgcctagtgagaggcggtccgatttggcccttggggagtgtccgtcgcgttgatctgatggattcacgtacacaacaccacattctatgagattttgcaggcaaaagtccacaagctcgatatatgggacacctgcaccggcattggatttggccccgcaacatcttaaaggaagcaggctgtgagccaaggggaaggcagaggacagaaatgaatgtgtttccaggctttcctggtggtttatggcattctccaaactcctatgcaagggctattcctgaccaagaagatctaaagagaacgtctctgaaatcaagtccggatgaagaattaagagaaaaaaagtgaatatggtttttgctcacagaatggataacagcaagccacatttgattattcctacacttctggtgcccctccaaaaccgcagctgcactgaaacagccacacctctgccaagccaatacctgatggaattaagtgaggagcacagttggatgagcaaccaaacagaccttcactatgtgc

SEQ ID NO: 135983 - DNA, 1515 bp, Homo sapiens
  Payload ID: 6595
  Gene Symbol: GPR20
  Gene Name: G protein-coupled receptor 20
  Uniprot ID: Q99678
  ENST ID: ENST00000377741
  CDS Start-End: 92-1168
aggtccgggctgcatgcagagctgagagctgaggactcccatctccagcctgcccgggtgaagcgcggcctggggtgtgctggctgccgtcatgccctctgtgtctccagcggggccctcggccggggcagtccccaatgccaccgcagtgacaacagtgcggaccaatgccagcgggctggaggtgcccctgttccacctgtttgcccggctggacgaggagctgcatggcaccttcccaggcctgtggctggcgctgatggcggtgcacggagccatcttcctggcagggctggtgctcaacgggctggcgctgtacgtcttctgctgccgcacccgggccaagacaccctcagtcatctacaccatcaacctggtggtgaccgatctactggtagggctgtccctgcccacgcgcttcgctgtgtactacggcgccaggggctgcctgcgctgtgccttcccgcacgtcctcggttacttcctcaacatgcactgctccatcctcttcctcacctgcatctgcgtggaccgctacctggccatcgtgcggcccgaaggctcccgccgctgccgccagcctgcctgtgccagggccgtgtgcgccttcgtgtggctggccgccggtgccgtcaccctgtcggtgctgggcgtgacaggcagccggccctgctgccgtgtctttgcgctgactgtcctggagttcctgctgcccctgctggtcatcagcgtgtttaccggccgcatcatgtgtgcactgtcgcggccgggtctgctccaccagggtcgccagcgccgcgtgcgggccatgcagctcctgctcacggtgctcatcatctttctcgtctgcttcacgcccttccacgcccgccaagtggccgtggcgctgtggcccgacatgccacaccacacgagcctcgtggtctaccacgtggccgtgaccctcagcagcctcaacagctgcatggaccccatcgtctactgcttcgtcaccagtggcttccaggccaccgtccgaggcctcttcggccagcacggagagcgtgagcccagcagcggtgacgtggtcagcatgcacaggagctccaagggctcaggccgtcatcacatcctcagtgccggccctcacgccctcacccaggccctggctaatgggcccgaggcttagtcagcagggctctgccaggggccgaaggtcaggactcatctgggcatgccagcgtggacacccaccatgccaggggtggcaatcggttccatctcgattgattggtgatggctacccagagcaccgcattgagcgtctaaggccactgtgctgtggttgattagcaatgtctgccactggctccgatgggatgtggtggcctgaatgccggtgatttgctgttcctggggtatagcacgtccactgaaaactcacaggggtagccgggagctgctcctcactttggccagtttgtctccagaaggagttcctcagaaaaaagggcacagtggattccattgattaga

SEQ ID NO: 135984 - DNA, 1515 bp, Homo sapiens; identical to SEQ ID NO: 135983
  Payload ID: 6595
  Gene Symbol: GPR20
  Gene Name: G protein-coupled receptor 20
  Uniprot ID: Q99678
  ENST ID: ENST00000613887
  CDS Start-End: 92-1168

SEQ ID NO: 135985 - DNA, 1170 bp, Homo sapiens
  Payload ID: 6596
  Gene Symbol: GPR21
  Gene Name: G protein-coupled receptor 21
  Uniprot ID: Q99679
  ENST ID: ENST00000373642
  CDS Start-End: 41-1090
aagcggcagcatgaagtgacagatcactcctgagctcaagatgaactccaccttggatggtaatcagagcagccaccctttttgcctcttggcatttggctatttggaaactgtcaatttttgccttttggaagtattgattattgtctttctaactgtattgattatttctggcaacatcattgtgatttttgtatttcactgtgcacctttgttgaaccatcacactacaagttattttatccagactatggcatatgctgacctttttgttggggtgagctgcgtggtcccttctttatcactcctccatcacccccttccagtagaggagtccttgacttgccagatatttggttttgtagtatcagttctgaagagcgtctccatggcttctctggcctgtatcagcattgatagatacattgccattactaaacctttaacctataatactctggttacaccctggagactacgcctgtgtattttcctgatttggctatactcgaccctggtcttcctgccttcctttttccactggggcaaacctggatatcatggagatgtgtttcagtggtgtgcggagtcctggcacaccgactcctacttcaccctgttcatcgtgatgatgttatatgccccagcagcccttattgtctgcttcacctatttcaacatcttccgcatctgccaacagcacacaaaggatatcagcgaaaggcaagcccgcttcagcagccagagtggggagactggggaagtgcaggcctgtcctgataagcgctatgccatggtcctgtttcgaatcactagtgtattttacatcctctggttgccatatatcatctacttcttgttggaaagctccactggccacagcaaccgcttcgcatccttcttgaccacctggcttgctattagtaacagtttctgcaactgtgtaatttatagtctctccaacagtgtattccaaagaggactaaagcgcctctcaggggctatgtgtacttcttgtgcaagtcagactacagccaacgacccttacacagttagaagcaaaggccctcttaatggatgtcatatctgaagtggctcagttacggggttcccgtgtgtgtgtgtgtgtgtgtgtgtgtgtgtgtgtgtgtgtgtgtattttatctctaa

SEQ ID NO: 135986 - DNA, 2942 bp, Homo sapiens
  Payload ID: 6597
  Gene Symbol: GPR22
  Gene Name: G protein-coupled receptor 22
  Uniprot ID: Q99680
  ENST ID: ENST00000304402
  CDS Start-End: 1344-2645
attctgcaaaagctgcccgaacaggctttcctctgaaaagcagtgccgttcctttttagaaagactgaatctaaatgttgtctctggagacaagaagccttcagtatgttaaattactttcattatgtattttcagatgcttattgattccacagtaggaagagtgagagactgcagcagcctctaagcagcactacatgttccatacattagcagtactgctgaaacaatggcacactacagacacatattttcattaaggtcattttcgaagagatgtttatgaccctcttcccccagtcctctactaacaagtgaacaaaatgaatcaatccaaactggaaatgcttcaactacatcaagaatttatcaaatctttagcagagggccaatagcagctaattcagtatttacaactgacaatatgaagaatgcaattgactgagcatctccctagctgtctgaactacgaactgcaagatgttcttgtaacacgactttaagacattaaggagttaaaaccagggaataggtctacattactgatggaatataaaaaatcaactgtatcctaagaagatgctacataaaataaccacaaaaagaaaaacaatataactgtaaaagcctgaaaagaatttttaaaaggggaagtttatactttcatataccagaattgtggaagttactgattctggaagacataatgaaacatgaatttccaaaaagaaaagaaaatactttatcagcacacaaaaggaagatttaggaagtgttttctgcactaaatattcagatattcatatcaattggtatgactaatggatttttctatctgacttttatgaccaattatgtatcctcttctaatgaaaacaaacaaaattaaacagcagatggtttttatcaaaaggacatggcctggatttataatataaagcaagttatgtgatcaagaaatcatttcaaaatagtgagcactgctattaaaaacagatttacaatggtaacaaaaggatgtctaaatatattttagaagctacaaacgttatgtttccttttttgttttcacatattctggaaaataaagaaatattatcatgtactccatcaaagggaaacataattcctatcatctgaggaaattcctcttggccgtgactttttaaagcaaaacaaatacaaatattatgtactgttctttagaaatccatcagccaactaaatctcataatgcatgcagttgaagtattggagagaaaacgaaagaattcctacaagacatgaaataaaacacagctacttcactgttgtcagggaaaaaaaccaactgctccaaaagaatgtgtttttctcccattctggaaatcaacatgcagtctgaatctaacattacagtgcgagatgacattgatgacatcaacaccaatatgtaccaaccactatcatatccgttaagctttcaagtgtctctcaccggatttcttatgttagaaattgtgttgggacttggcagcaacctcactgtattggtactttactgcatgaaatccaacttaatcaactctgtcagtaacattattacaatgaatcttcatgtacttgatgtaataatttgtgtgggatgtattcctctaactatagttatccttctgctttcactggagagtaacactgctctcatttgctgtttccatgaggcttgtgtatcttttgcaagtgtctcaacagcaatcaacgtttttgctatcactttggacagatatgacatctctgtaaaacctgcaaaccgaattctgacaatgggcagagctgtaatgttaatgatatccatttggattttttcttttttctctttcctgattccttttattgaggtaaattttttcagtcttcaaagtggaaatacctgggaaaacaagacacttttatgtgtcagtacaaatgaatactacactgaactgggaatgtattatcacctgttagtacagatcccaatattctttttcactgttgtagtaatgttaatcacatacaccaaaatacttcaggctcttaatattcgaataggcacaagattttcaacagggcagaagaagaaagcaagaaagaaaaagacaatttctctaaccacacaacatgaggctacagacatgtcacaaagcagtggtgggagaaatgtagtctttggtgtaagaacttcagtttctgtaataattgccctccggcgagctgtgaaacgacaccgtgaacgacgagaaagacaaaagagagtcttcaggatgtctttattgattatttctacatttcttctctgctggacaccaatttctgttttaaataccaccattttatgtttaggcccaagtgaccttttagtaaaattaagattgtgttttttagtcatggcttatggaacaactatatttcaccctctattatatgcattcactagacaaaaatttcaaaaggtcttgaaaagtaaaatgaaaaagcgagttgtttctatagtagaagctgatcccctgcctaataatgctgtaatacacaactcttggatagatcctaaaagaaacaaaaaaattacctttgaagatagtgaaataagagaaaaatgtttagtgcctcaggttgtcacagactagagaaaagtctcagtttcaccaaatccacattcaaatgagttttaaatttaaattgtaaaaactgatattactgccaaatataagaaaaatattttaagtattggttatgttgtaaattttcaatgtgaatgtcaattagataggtcatatatattcaatttcttcattacttaatgtatttgttgcatggcagtttgttaaagtactatcatgtgtatattttgtcaatattatgtccaacagaaaatattcatgtaagtcatattttttaaggaataaatacatagccttaaaaca

SEQ ID NO: 135987 - DNA, 1086 bp, Homo sapiens
  Payload ID: 6598
  Gene Symbol: GPR25
  Gene Name: G protein-coupled receptor 25
  Uniprot ID: O00155
  ENST ID: ENST00000304244
  CDS Start-End: 1-1086
atggcccccacagagccctggagccccagcccggggtcagcgccctgggactactcggggttggacggcctggaggagctggagctgtgtccggccggggacctgccctacggctacgtctacatccccgcgctctacctggcggccttcgccgtgggcctgctgggcaacgcctttgtggtgtggctgctggccgggcggcggggcccgcggcggctggtggataccttcgtgctgcacctggcggcagctgacctgggcttcgtgctcacgctgccgctgtgggccgcggcggcggcgctaggcggccgctggccgttcggcgatggcctctgcaagctcagcagcttcgcgctggcgggcacgcgctgcgcgggcgcgctgctgctggcgggcatgagcgtggaccgctacctggccgtggtgaagctgctcgaggcgaggccactgcgcaccccgcgctgcgcgctggcctcgtgctgcggcgtctgggccgtggcgctgctggccggcctgccctccctggtctaccgggggttgcagcccctgcctgggggccaggacagccagtgcggcgaggagccctcccacgccttccagggcctcagcttgctgctgctgctgctgaccttcgtgctgcccctggtcgtcaccctcttctgctactgccgcatctcgcgccgcctgcgacggccgccgcacgtgggtcgggcccggaggaactcgctgcgcatcatcttcgccatcgagagcacgtttgtgggctcctggctgcccttcagcgccctgcgggccgtcttccacctggcgcgtctgggggcgctgccgctgccgtgccccctgctgctggcgctgcgctggggcctcaccattgccacctgcctggccttcgtcaacagctgcgccaacccgctcatctacctcctgctggaccgctcattccgagcccgggcgctggacggggcctgcgggcgcaccggccgcctggcgcgaaggatcagctcagcctcctcgctctccagggacgacagttccgtgttccgttgccgggcccaggccgcgaacactgcctcggcctcctggtag

SEQ ID NO: 135988 - DNA, 7514 bp, Homo sapiens
  Payload ID: 6599
  Gene Symbol: GPR26
  Gene Name: G protein-coupled receptor 26
  Uniprot ID: Q8NDV2
  ENST ID: ENST00000284674
  CDS Start-End: 54-1067
cgccatggcggcgccgggttgcggaccctgagcgccggcgcggggcgcgcaccatgaactcgtgggacgcgggcctggcggggctactggtgggcacgatgggcgtctcgctgctgtccaacgcgctggtgctgctctgcctgctgcacagcgcggacatccgccgccaggcgccggcgctcttcaccctgaacctcacgtgcgggaacctgctgtgcaccgtggtcaacatgccgctcacgctggccggcgtcgtggcgcagcggcagccggcgggcgaccgcctgtgccgcctggctgccttcctcgacaccttcctggctgccaactccatgctcagcatggccgcgctcagcatcgaccgctgggtggccgtggtcttcccgctgagctaccgggccaagatgcgcctccgcgacgcggcgctcatggtggcctacacgtggctgcacgcgctcaccttcccagccgccgcgctcgccctgtcctggctcggcttccaccagctgtacgcctcgtgcacgctgtgcagccggcggccagacgagcgcctgcgcttcgccgtcttcactggcgccttccacgctctcagcttcctgctctccttcgtcgtgctctgctgcacgtacctcaaggtgctcaaggtggcccgcttccattgcaagcgcatcgacgtgatcaccatgcagacgctggtgctgctggtggacctgcaccccagtgtgcgggaacgctgtctggaggagcagaagcggaggcgacagcgagccaccaagaagatcagcaccttcatagggaccttccttgtgtgcttcgcgccctatgtgatcaccaggctagtggagctcttctccacggtgcccatcggctcccactggggggtgctgtccaagtgcttggcgtacagcaaggccgcatccgacccctttgtgtactccttactgcgacaccagtaccgcaaaagctgcaaggagattctgaacaggctcctgcacagacgctccatccactcctctggcctcacaggcgactctcacagccagaacattctgccggtgtctgagtgaaggaccgcgctcctgctgaagagtttagaatgaggcagcggtgagaagaagggtgggagggcgtgggggcccctgggtggacaccaccagccaccagtccctggcatgcccagtgatcctggttccctggcttgtaggggctccagagcctgcttcctggttcctcaagggcagatattggacactccttatttgtcaccaaaggatgactgtaggccgtgtgctggcctttctttctaagaagctgctttgagctcctggactcacctgaggctccctgggggatgacactcagttctgtcactgtcaaggatgcagagagctggtggtaggtgggaagcatggtgtccacctgcctgctgaccactggacgctgctccatgctgaagaaaagtgacagtctccaggggacatttcagccatgctgaaagggaggctggcagtggtcatttggcccggatctaacatggcacctcgtctccacagggtagtggtggctgcttcaacccaaatattattcagctggtactaacgacattgtgcccagctgggactcttgggctctgtgcctgagggaaaatgtttcacaactagtggctgcccaattgctgctgaccagttgtcttagaaatggtcaattggattcaactttagtcctctccttccccctaaaagcgaatgtttgtgtgtgcagacaatcttagcatgaaaatggtttaaataggctggtcctacatgtattaggttctttcaagtttgactgggaggtcacctttttctgatttacaagtcctaattgttggagctcagtaaaggtaggaggaaggtggctggttggtcctcccttccccctgtttgtgacctgaatttacaggaagtgtttcaacttgtcttatgcatcttatctggcatgtcctgggagatggatgggcaagaactggcctgagcagggatttttgccttgattttaagtcactgggttccattgtcctggcacctccatttccttagtttctgtaagcctgttaacagaaagtagaggctattcaaggttatcaagaaagtgccctgtgctaatgatgagacagtgaattttttttttttttcgagatgggagtttcactcttattgcccaggctagagtgcaatggtgcgatctaggctcaccacaacctctgccttccaggttcaagtgattagagacagtgaaatttttatggaatactgcacctataaaacacatgccaatctgttagcagtcctgacttgatttaataaaaaccaaggagagccacccctgctttctggccatctcttctttgtctaccatttcaaattgacttgtgaatactcagagcagttatttttcaatcctccactctaagtgattcctccagggtgggaagcacggggagcaatggaatcagatggctcattctctccttccagctctttacatcctaactttggaggtatagaaggaaggatgtggtccaacgggaaggaagtgaagagtctattggtttttacttctaggcagtcccaatttttaaaggcagagaagtatctgcatctttatttgaaaagacgtcttattaactcttagctcctcagttagaaaacaattcacctggcttagtcttgtctagtttcaaagttaccatggagactagaatggagacaggtgtagcttccaaggaggccttggcatcttgcagttgctgtcagagatgggctcatatctgcttggggaagccaatggggcacaatccttcccaatttcatgatctggggcatcatgtcggtagctgaagtcagccacggtgggagtgtttataccatgaaaatcagcaagtgctgtaaatcaggccttttgccccacagagagctgattgtgaaacatctactagcacaccactgccagacatgactgtgtgtgtccctgaaacaaaattgctctggctcagagctcctttggccactcatattacaatagcaacagacatttgcttcctggtggcaagtaactgtgcaccctccaacatcccaaccccagaggaaccagtgggattgaaaaccagcagaagccaagacaggatgcacagctgaattggaggagagtagctcccttctcacacaaacgctttcaaagttgggcaaaagtggcccagtgcgtgaggtcagtcaacagccaaattccagcagcaaaatacattttcatcaatatcactttgggagaataactgtggcacatgctctttctgctttctctgtactgtataggcaacatgttgtactcccagtagcaactagatctcttttacctcttctttagccaagaagcaagatctgtcacccacaacaccacatatcttgaaaagatgcttttcataattttcactatacctctaaaaccaattgtaccgacatcacgtagacaaaaactccagataaatccattgattgggtattttcattattatttggacacatgaattaaatcccaagggaaagtgagaagaaaattaatgtattagcaaccagtgttagccaactctgctgtaattacctttagataaatgtttattttcatctctatacagtctatcaaatttgccccctggctttattactcccaattgaattatctacctcattttgttaatttaatttatcaaaggtaacattgttttctcaggtataacacatagaaacaccaagattttcagcatctgaatcaaactaaaattacttgcttgacttcactccagggtgagacttgacctttaaggcccaaactctggtgaactgttggactgggtagaaatctttcaagaagcttgaaaataaggccataaaggaggggctttcaaattcctaaatccacatatagggctgagttcctagtcctacacaatcagaatttgcctttttaagtcacgctgcaactattccggctttttatatggcacctttctgagggaggggattttacagccgagggacctccaaagggaacgtccatttgcatgtgtgccctggtatttagggtttgtctcatggtcagctcgcctctcaaagatggctcaccaatcacctgcctgtttttacttagaaagcaggcttgggcaggaggggaaatggatttgaaccatctcagaccaactctatctcttctagcactcagctcagcctcctgtccccatgagcaataaaactctctccttatgtctgtgaaattcgttttctttttcatggtgcctttctttctaagaaaagatagaaagaatggggccaggttcatgtcccagttgtcacccttttacatgcttgggtgcaggtagatgaggccttcccatggctacagtgtgacccttggaggaaccaaaggctgtgcattgttagaatttagcccagatgcaggataaactagcttgcctgagtttaatgaggatattatatcaggtgccaggaatcccttgggtcagctcctatcctctggacggggagcatcatgggaaaaagaggtccgagtcatatttagggcttcatgtgtctggaagggagccattagctcttaaattattcacagaagtcaccacggaaggttgtttaagatgcagattccagcatcccctcctcagagatcaatttcagcagggccaggcaggacctgggtttccgcacttttaatcatcgatgcccaggtaactgataggagttttcttcaaaccatcccctaaggagaaatgatcttagacacttggataaactctatagaaaattgagtgtttctattaataactatctaggtttcaattgtcttgtatctttccctaattctccaaacagttcaatctccagctttattcaatggctgggccattttgttcttggagggacaaaattgacctctccatgaaattgcaaaaacccatcttcattcctttttatggggctccaggtcataaggatgagatatatttggggtactggcagaggatggcagagctggctggctctgagccaggaagccttgttagaggaaggaactctggcattcagaggtgtccccttgggggcacttgcttgggtcttggatcaaactctactggggcagcctggctgtgggaggtgatgacatctgccacctctgccactacccagagcttgtcctgccctcttcccagccagcctcacacacaggagctgagccaggctgaggcaaggtcagcgagagacagttctccatgccagtatctgggtgtgggtctcttgttggctcccagctcatcccgtgtggctgacccttccaggtcacttggagcagccagtaatgacagtgtcctaacagctggtgggtatggaggaaagactagacatcaggctatggactcacatggagggccctggtgttggctctgggacctgggctgggccggacctggggagagggtgggtggagcttggcctctgcagtttgcgcttgcaggttcaggggagaaagttgtttgagatcagggtttaggggtagtgtttcccattaatcttcatcataatcttttgatgtaggtgctgttattatctctacgttacacatctgggaggatttgaaagtcctggagacagggaggttttggggagaatgcaaaacagggcagggctctcaaggagggtggaccagtgaccatggggaaactgagtgtttctattaataagtatctaagtttcaattgtcttgtatctttccctaattctccaaacggttcaatctccagttttattcagggactgggccattttgttctcagagggacaaaactgatctctccatgaaatcccctgcacctcactctgggcagctctaggctcagcagatgtttttctgccattaggaaacagccccttactctcagctcctgtgctaacacccatacccaccagctgggcgttgggacctctcccgtcatatggctgccacttgcttgggaaggaattctccagactccttttactttgtatgtgtttctaggggaattctgagggaagaagctttgcagcaacctctgtgcccagaacatacggctcacaagtcctttgtgccgacagggaatctatctaattgttttagtgtgtgaggctcattgtcagcctagatttccctgaaactctgggccagcagcccccaggagcatcagtaggacccagcatttcccctggcaccaaagtggacctctttgcaccttgcagccgggagaactgacttagagggccctggtgttggctctggaacctgggctgagatggattcggggagaggctgggtggagcttggcctctacggtctgttcttgcagattcaggagagaaagtggtatgagagcagtgtggtttgtaagttccccaacttccccgctggctcacactgtctccccagaccaatggcctattagcccccaaaaagttagtccaaccccaggccagctgcctttgctctgctgtggcctaagttctggcctggtcaaaggaaggtggcaggaactccaggcttgctcctgcctcctcacacctcattccacaaatgcggagtgaaagagcaggagccagacacatttgggggttgactgtctagaaaggaggaatcagaggtcccaaggaacacaatcgtgcaacttcctagggaatctgcatcaggagaaagaagcggctaggacacacagtggcttcgctcagcctggccacgacatcactgtgcagaagaagagatctgtcaggggtccagaggagcggagtcctggagcctctgggagggtggcatgtggcagctgcaggctgtggtccagaactatgagcagacttgcctgtcactctccaaacatttactgaacacctactgtgtgccaggccctgtgctttgtcaggctctgggggagacaggtcattactctgcagtgtgggaagcggggctgccctggaagtgtgtactcagtgctgtgggggtacagagggagggctggagaacttagctggtgggaaaggagggttctggaaggcttctcagaggtagtggcattgggccagaacttacagtagggaagagcatgtggcaaggcacagaggagatgggagcctgcctggtgaggggtccagtggtgacagagctcagtgtgggtccagagatggtgtcaggtgagggctgagaggggagggcaagtgccccttgagatgggctgaacgtgatgatgatctgtggccagtgggagatgatagaagtcttgaggttgggaatataagaattaggtctcttttagaaagagaggacatggagaaaatccatatatttttagctaccaaaaaagagaaggaagaaagaaaagaaataagaagagaagcaagacagaaaagaaggaagagagaaggaagaatggcaaaggaaggaagaaggag

SEQ ID NO: 135989 - DNA, 2447 bp, Homo sapiens
  Payload ID: 6600
  Gene Symbol: GPR27
  Gene Name: G protein-coupled receptor 27
  Uniprot ID: Q9NS67
  ENST ID: ENST00000304411
  CDS Start-End: 1-1128
atggcgaacgcgagcgagccgggtggcagcggcggcggcgaggcggccgccctgggcctcaagctggccacgctcagcctgctgctgtgcgtgagcctagcgggcaacgtgctgttcgcgctgctgatcgtgcgggagcgcagcctgcaccgcgccccgtactacctgctgctcgacctgtgcctggccgacgggctgcgcgcgctcgcctgcctcccggccgtcatgctggcggcgcggcgtgcggcggccgcggcgggggcgccgccgggcgcgctgggctgcaagctgctcgccttcctggccgcgctcttctgcttccacgccgccttcctgctgctgggcgtgggcgtcacccgctacctggccatcgcgcaccaccgcttctatgcagagcgcctggccggctggccgtgcgccgccatgctggtgtgcgccgcctgggcgctggcgctggccgcggccttcccgccagtgctggacggcggtggcgacgacgaggacgcgccgtgcgccctggagcagcggcccgacggcgcccccggcgcgctgggcttcctgctgctgctggccgtggtggtgggcgccacgcacctcgtctacctccgcctgctcttcttcatccacgaccgccgcaagatgcggcccgcgcgcctggtgcccgccgtcagccacgactggaccttccacggcccgggcgccaccggccaggcggccgccaactggacggcgggcttcggccgcgggcccacgccgcccgcgcttgtgggcatccggcccgcagggccgggccgcggcgcgcgccgcctcctcgtgctggaagaattcaagacggagaagaggctgtgcaagatgttctacgccgtcacgctgctcttcctgctcctctgggggccctacgtcgtggccagctacctgcgggtcctggtgcggcccggcgccgtcccccaggcctacctgacggcctccgtgtggctgaccttcgcgcaggccggcatcaaccccgtcgtgtgcttcctcttcaacagggagctgagggactgcttcagggcccagttcccctgctgccagagcccccggaccacccaggcgacccatccctgcgacctgaaaggcattggtttatgagggaggccccgccacatagacccccaacccagcctttccctttggctcggacggtgacgttgtatcttttccttctggcccctgtttaattttctaagctgccttcaaaatgactcgaagtggacagacacttggattgtactgactcctttgggggtggggtgggtgaggagtaggatgctcagcccactccagctccgcacattcgtcctcctaactcgactttcttcctgacaataggccctgcagtctttttgtagcggtactgacgtcttttattccatgtgtggttcctttttttctttttctataaaggctgtactaattttcttcatgcaacgtttcctaaagaccatggccagttttctacagaagctatttttgacaacctcaagtggcattacattttgcagtgaagtagaggaacctagggggacttcttcacaagttagatttcttgaggatcttctgttggaagcaggagaaagtggggggtggggggaagttgtccgaaatgccctctgaattgccggctgcagggtccttgtgctgcgctggttctttgaaagtctcagtgttgatattgaacttaaagagcagagatggagatcagtagcaaggcagtcatttttttaaagcagtaagtaacaagtaagatttggttcccggtttactttctgctgctaaaaaccacgtcagtgacaactgctctctgtattatagcaatcttgaatggaaacatttctgtcaagttgtaagttttaaaagagtaaagtgttttggttagtaatgatgtggagaaaaatacagtattgcatgtgttcgtgtgtatagattgtggttcgaggattgggagggctctgagaagcagagtactacatcaaaattgttttaagtattttttgccaataaaaaattaattttatggaaatggcttgtgctttgagaagcccagttttattctgtcttatgaaactaatttccactttgaaaattgttcttctgttgtttatggtataaatgaatggaatataatgatatcctccttctaggaaacaaagcatttccttaaaatgtttgctaggttaagctgtgctgttctactgatggttgttttaaattaataatgagaactataatttaaataatatttctttgttagacattataatgttaaactgaaagactaaattctgcaagtactatataatatttttggcttataatgctacatttttattaatgtaccttccgttttgaggatttatatctgtatttctctttgcattatacaaatataccagtattttcattctgga

SEQ ID NO: 135990 - DNA, 2115 bp, Homo sapiens
  Payload ID: 6601
  Gene Symbol: GPR3
  Gene Name: G protein-coupled receptor 3
  Uniprot ID: P46089
  ENST ID: ENST00000374024
  CDS Start-End: 100-1092
cggccgcgggggcttctcggggtccacgcacgccctgcgccgccaggacccgagcggagcctccccgcggcccggccgcgcctggtcctgagcggtaccatgatgtggggtgcaggcagccctctggcctggctctcagctggctcaggcaacgtgaatgtaagcagcgtgggcccagcagaggggcccacaggtccagccgcaccactgccctcgcctaaggcctgggatgtggtgctctgcatctcaggcaccctggtgtcctgcgagaatgcgctagtggtggccatcatcgtgggcactcctgccttccgtgcccccatgttcctgctggtgggcagcctggccgtggcagacctgctggcaggcctgggcctggtcctgcactttgctgctgtcttctgcatcggctcagcggagatgagcctggtgctggttggcgtgctggcaatggcctttaccgccagcatcggcagtctactggccatcactgtcgaccgctacctttctctgtacaatgccctcacctactattcagagacaacagtgacacggacctatgtgatgctggccttagtgtggggaggtgccctgggcctggggctgctgcctgtgctggcctggaactgcctggatggcctgaccacatgtggcgtggtttatccactctccaagaaccatctggtagttctggccattgccttcttcatggtgtttggcatcatgctgcagctctacgcccaaatctgccgcatcgtctgccgccatgcccagcagattgcccttcagcggcacctgctgcctgcctcccactatgtggccacccgcaagggcattgccacactggccgtggtgcttggagcctttgccgcctgctggttgcccttcactgtctactgcctgctgggtgatgcccactctccacctctctacacctatcttaccttgctccctgccacctacaactccatgatcaaccctatcatctacgccttccgcaaccaggatgtgcagaaagtgctgtgggctgtctgctgctgctgttcctcttccaagatccccttccgatcccgctcccccagtgatgtctagctgagtcttcatgacccttcaaccctgattactacagaattccagaatgttaggctctccagggcttctttccaaacccccagctccacaccccccagacccagctggttctggagttctaggacattgggtgtttcaaggttctgttcagatccctatgggggcccagctggctccacggttccagaatgttcaggtggtcagtgttctactcagaaatgtctcacagcccagctgggttgcaattccagaatgctgggagttttacagtgccattccaagtcccagatgtccctcttcccccaaacttgaccttgaccatgtcactttatgtttgaatttctgagctaaagagtcagagagattagtcacatagttgcctaaataggagagagaaagattatatatgcacatatacaaagacagtgtctatttatgattgatttatttatttataaatttacttatgggtggtaaggggcaaaaaagaggcccacaccttgatatccaggccataccagggtatcccttgtcccttcacccccatttctgacctcagttcctggaggggggaaagggtgaaagagaaaccacgtattttgttattattttggattattttttatcgaagagatcatagaaaccagagccttctccccaggcctgccctcctcgggtttggaaggggaacacaccagcctctggttttttatttttttaagaagccatcacctgagcaaccaaaaattcctctgcgctggggtccgactgccctctggtggccatttggggaaaactgcagcccggccaggcagctgggaccagaatgcaaccccagctccactccagcctggcgtccagggccacagccatggcctgggggccaagcctcaccctgcggtgccctaaaggagggggggcacgagccaacaccccacccctctgccaaccggggtatggcccccagtgcattccctgttcccgtctccaacccaactcaataaaaaatgattttgtcataaa

SEQ ID NO: 135991 - DNA, 2059 bp, Homo sapiens
  Payload ID: 6602
  Gene Symbol: GPR31
  Gene Name: G protein-coupled receptor 31
  Uniprot ID: O00270
  ENST ID: ENST00000366834
  CDS Start-End: 499-1458
ggatcccagcaagcgtcctttatgtatgaaaaggaagaagaaaatttccccatgaaacatattcaaagtagagaacaatctttttgattccattgttattttaattgtatacagacataggagtctttgcataattagacttttccttctttcaggactgtggatgcaaagccctggacccccagacgttataggacattactcctcagctttgcagcccggtgatgtgaagcgaaacaccatttccccttttttatggcggaagaaaacagaacacaactgcaaaggggcttttccctcccctgctcatcctctttccccaaatgaattttggtttgctgtggactctattctgctgaggaactgttcttgttgggcaaatgtagatcttgtctactctgtggcaggaaaaggccttttctttcattttgtaagaaagagcacagagttcctcctgtacctgctccagctgtgcctgcagcccctcacggccgggtgatgccattcccaaactgctcagcccccagcactgtggtggccacagctgtgggtgtcttgctggggctggagtgtgggctgggtctgctgggcaacgcggtggcgctgtggaccttcctgttccgggtcagggtgtggaagccgtacgctgtctacctgctcaacctggccctggctgacctgctgttggctgcgtgcctgcctttcctggccgccttctacctgagcctccaggcttggcatctgggccgtgtgggctgctgggccctgcacttcctgctggacctcagccgcagcgtggggatggccttcctggccgccgtggctttggaccggtacctccgtgtggtccaccctcggcttaaggtcaacctgctgtctcctcaggcggccctgggggtctcgggcctcgtctggctcctgatggtcgccctcacctgcccgggcttgctcatctctgaggccgcccagaactccaccaggtgccacagtttctactccagggcagacggctccttcagcatcatctggcaggaagcactctcctgccttcagtttgtcctcccctttggcctcatcgtgttctgcaatgcaggcatcatcagggctctccagaaaagactccgggagcctgagaaacagcccaagcttcagcgggcccaggcactggtcaccttggtggtggtgctgtttgctctgtgctttctgccctgcttcctggccagagtcctgatgcacatcttccagaatctggggagctgcagggccctttgtgcagtggctcatacctcggatgtcacgggcagcctcacctacctgcacagtgtgctcaaccccgtggtatactgcttctccagccccaccttcaggagctcctatcggagggtcttccacaccctccgaggcaaagggcaggcagcagagcccccagatttcaaccccagagactcctattcctgacaacagccagcgtcctcaacgcccgtgtttatggaactacctgcgacctaaataataattactcctactttgggattctggaagaagaagaagtcttaagactgcaatacaaggatcagagcataaacatgggcacagttgctgcaggtgtggtcttatactttgttgaccagggtggtcctctgtgattttaccttgtagagtggcaaatcaaaatgaacaagctagaacctcctcctacccaactatgatgcagattcagttgctgaactgaaaagtcgggcagctactccatctccacacttgaagaaatgtaatttgctaaatcagtgaaggaagagaagaaagccgggtgatggcatctttccaactcttacttggtctcagcaagtcattttcatttattatgcttcagttttaaatacaaaaaaaaaactatgttttcttcccacctgctgtgcagactggggatgaccgacatcagaaagtgccctggttctaaaaagagactctgctgtatataaggtactgtcgtacatgctagcctttatttggaacataacatttttgttttcataaaattttgcttcatttttctaga

SEQ ID NO: 135992 - DNA, 1269 bp, Homo sapiens
  Payload ID: 6603
  Gene Symbol: GPR32
  Gene Name: G protein-coupled receptor 32
  Uniprot ID: O75388
  ENST ID: ENST00000270590
  CDS Start-End: 138-1208
tcttgagcctaggaggtggaggctgcagtgatctgtgattgtacctttgcactccagcctgggtgacagagcatgacgctgtctctaaaagaataataataataagcattccataaaaattatggaatggagaaatcatgaatggggtctcggaggggaccagaggctgcagtgacaggcaacctggggtcctgacacgtgatcgctcttgttccaggaagatgaactcttccggatgcctgtctgaggaggtggggtccctccgcccactgactgtggttatcctgtctgcgtccattgtcgtcggagtgctgggcaatgggctggtgctgtggatgactgtcttccgtatggcacgcacggtctccaccgtctgcttcttccacctggcccttgccgatttcatgctctcactgtctctgcccattgccatgtactatattgtctccaggcagtggctcctcggagagtgggcctgcaaactctacatcacctttgtgttcctcagctactttgccagtaactgcctccttgtcttcatctctgtggaccgttgcatctctgtcctctaccccgtctgggccctgaaccaccgcactgtgcagcgggcgagctggctggcctttggggtgtggctcctggccgccgccttgtgctctgcgcacctgaaattccggacaaccagaaaatggaatggctgtacgcactgctacttggcgttcaactctgacaatgagactgcccagatttggattgaaggggtcgtggagggacacattatagggaccattggccacttcctgctgggcttcctggggcccttagcaatcataggcacctgcgcccacctcatccgggccaagctcttgcgggagggctgggtccatgccaaccggcccaagaggctgctgctggtgctggtgagcgctttctttatcttctggtccccgtttaacgtggtgctgttggtccatctgtggcgacgggtgatgctcaaggaaatctaccacccccggatgctgctcatcctccaggctagctttgccttgggctgtgtcaacagcagcctcaaccccttcctctacgtcttcgttggcagagatttccaagaaaagtttttccagtctttgacttctgccctggcgagggcgtttggagaggaggagtttctgtcatcctgtccccgtggcaacgccccccgggaatgatggaagacttcagctggaagctggaagccgtccttcttagtttgcttgtggcctcttacct

SEQ ID NO: 135993 - DNA, 1057 bp, Homo sapiens
  Payload ID: 6604
  Gene Symbol: GPR33
  Gene Name: G protein-coupled receptor 33 (gene/pseudogene)
  Uniprot ID: Q49SQ1
  ENST ID: ENST00000399285
  CDS Start-End: 56-1057
tcactttggcctgctcaagaccaatctggcatgaagatacaggtctgaggtcattatggatctgatcaactctactgattacctgatcaatgcctctactttagtaagaaacagcactcagtttctagctcctgcatcaaaaatgattattgccctttctttgtacatttcatctataattggtaccatcaccaatggcctctatctatgggtgctaagattcaagatgaaacagactgtcaatactctcttattttttcatctcattctctcttattttatttcaacaatgattctgccatttatggccacctcccaacttcaagacaatcactggaactttggaactgccttgtgcaaggtcttcaatggcactttgtctctggggatgttcacctctgttttcttcctttcggccatcggtcttgatcgttaccttctcactcttcacccagtgtggtcccagcagcaccgaaccccgcgctgggcttccagcattgtcctgggagtctggatttcagccgctgccctcagcatcccctatttgattttcagagagacacatcatgaccgtaaaggaaaggtgacttgccaaaataactatgctgtgtctactaactgggaaagcaaggagatgcaagcatcaaggcagtggattcatgtggcctgtttcatcagccgcttcttgctgggctttcttctgcctttcttcatcatcatcttttgttatgaaagagtagccagcaaggtgaaagagaggagcctgtttaaatccagcaagcccttcaaagttatgatgactgccattatctctttctttgtgtgttggatgccctaccatatacaccagggcttacttctcactacgaaccagtcactacttttagagttgactttgatacttacagtgctaaccacttctttcaatactatcttttctcccacactctacttatttgttggggagaatttcaaaaaggtcttcaagaagtccattcttgctctgtttgagtcaacatttagtgaagattcttctgtagaaaggacacaaacctaa

SEQ ID NO: 135994 - DNA, 1815 bp, Homo sapiens
  Payload ID: 6605
  Gene Symbol: GPR34
  Gene Name: G protein-coupled receptor 34
  Uniprot ID: Q9UPC5
  ENST ID: ENST00000378138
  CDS Start-End: 176-1321
agctgacacaaccaagacgagtctcagtgtctagggaagcttggggttctgctccttttacttcaggcgaacctgaactttaatgcaattttgaagcatgccctgaatagattcagtcattatcaagtcaaactaaaaacggtgaaaggttgcgactattaccaaatagaagacaatgagaagtcataccataacaatgacgacaacttcagtcagcagctggccttactcctcccacagaatgcgctttataaccaatcatagcgaccaaccgccacaaaacttctcagcaacaccaaatgttactacctgtcccatggatgaaaaattgctatctactgtgttaaccacatcctactctgttattttcatcgtgggactggttgggaacataatcgccctctatgtatttctgggtattcaccgtaaaagaaattccattcaaatttatctacttaacgtagccattgcagacctcctactcatcttctgcctccctttccgaataatgtatcatattaaccaaaacaagtggacactaggtgtgattctgtgcaaggttgtgggaacactgttttatatgaacatgtacattagcattattttgcttggattcatcagtttggatcgctatataaaaattaatcggtctatacagcaacggaaggcaataacaaccaaacaaagtatttatgtctgttgtatagtatggatgcttgctcttggtggattcctaactatgattattttaacacttaagaaaggagggcataattccacaatgtgtttccattacagagataagcataacgcaaaaggagaagccatttttaacttcattcttgtggtaatgttctggctaattttcttactaataatcctttcatatattaagattgggaagaatctattgaggatttctaaaaggaggtcaaaatttcctaattctggtaaatatgccactacagctcgtaactcctttattgtacttatcatttttactatatgttttgttccctatcatgcctttcgattcatctacatttcttcacagctaaatgtatcatcttgctactggaaagaaattgttcacaaaaccaatgagatcatgctggttctctcatctttcaatagttgcttagatccagtcatgtatttcctgatgtccagtaacattcgcaaaataatgtgccaacttctttttagacgatttcaaggtgaaccaagtaggagtgaaagcacttcagaatttaaaccaggatactccctgcatgatacatctgtggcagtgaaaatacagtctagttctaaaagtacttgaggtaaacatactaaaatgaattatataatgcagcctcttaattctttgaagaactaaaaaattaggaaacaaagttctagcatttacaaaactcagatctcaaagctctgcttgtatttgtgatatttcatttgcttaactgtaaaccatttcaaggtactaacttttaaatctgtatgtaaaatcttttcaaaatacatttttaagctaatactcttaacatagattatgaagttaagtgaaatttatggctctaacagcaaaataattaaagtgccatagtttctcaagtgactaaagtagttattaaaatcaagcacttgatactaatttgaagtgtgtttaaaagtaaatgatttgggaactgacaatgtgtcagaaaatatatgttcatttatcattttaaaatcttgtataatttgccactgtattcatttatgcctaaatctctataacagatgaaaagataattaataaaatcctaattaaaaaat

SEQ ID NO: 135995 - DNA, 1928 bp, Homo sapiens
  Payload ID: 6605
  Gene Symbol: GPR34
  Gene Name: G protein-coupled receptor 34
  Uniprot ID: Q9UPC5
  ENST ID: ENST00000378142
  CDS Start-End: 285-1430
aaccaattgcaccacgaccggatggaagagcccagctgacacaaccaagacgagtctcagtgtctagggaagcttggggttctgctccttttacttcaggcgaacctgaactcagttaatgcaattttgaagcatgccctgaatagattcagtcattatcaagtcaaactaaaaacggtgaaaggttgcgactattaccaaataggaaaaatctgaagacataagaactacacatgaggaatatgtcatttagcactttcactttttgatctccacagaagacaatgagaagtcataccataacaatgacgacaacttcagtcagcagctggccttactcctcccacagaatgcgctttataaccaatcatagcgaccaaccgccacaaaacttctcagcaacaccaaatgttactacctgtcccatggatgaaaaattgctatctactgtgttaaccacatcctactctgttattttcatcgtgggactggttgggaacataatcgccctctatgtatttctgggtattcaccgtaaaagaaattccattcaaatttatctacttaacgtagccattgcagacctcctactcatcttctgcctccctttccgaataatgtatcatattaaccaaaacaagtggacactaggtgtgattctgtgcaaggttgtgggaacactgttttatatgaacatgtacattagcattattttgcttggattcatcagtttggatcgctatataaaaattaatcggtctatacagcaacggaaggcaataacaaccaaacaaagtatttatgtctgttgtatagtatggatgcttgctcttggtggattcctaactatgattattttaacacttaagaaaggagggcataattccacaatgtgtttccattacagagataagcataacgcaaaaggagaagccatttttaacttcattcttgtggtaatgttctggctaattttcttactaataatcctttcatatattaagattgggaagaatctattgaggatttctaaaaggaggtcaaaatttcctaattctggtaaatatgccactacagctcgtaactcctttattgtacttatcatttttactatatgttttgttccctatcatgcctttcgattcatctacatttcttcacagctaaatgtatcatcttgctactggaaagaaattgttcacaaaaccaatgagatcatgctggttctctcatctttcaatagttgcttagatccagtcatgtatttcctgatgtccagtaacattcgcaaaataatgtgccaacttctttttagacgatttcaaggtgaaccaagtaggagtgaaagcacttcagaatttaaaccaggatactccctgcatgatacatctgtggcagtgaaaatacagtctagttctaaaagtacttgaggtaaacatactaaaatgaattatataatgcagcctcttaattctttgaagaactaaaaaattaggaaacaaagttctagcatttacaaaactcagatctcaaagctctgcttgtatttgtgatatttcatttgcttaactgtaaaccatttcaaggtactaacttttaaatctgtatgtaaaatcttttcaaaatacatttttaagctaatactcttaacatagattatgaagttaagtgaaatttatggctctaacagcaaaataattaaagtgccatagtttctcaagtgactaaagtagttattaaaatcaagcacttgatactaatttgaagtgtgtttaaaagtaaatgatttgggaactgacaatgtgtcagaaaatatatgttcatttatcattttaaaatcttgtataatttgccactgtattcatttatgcctaaatctctataacagatgaaaagataattaataaaatcctaattaaaaaatgaga

SEQ ID NO: 135996 - DNA, 1282 bp, Homo sapiens
  Payload ID: 6605
  Gene Symbol: GPR34
  Gene Name: G protein-coupled receptor 34
  ENST ID: ENST00000620846
  CDS Start-End: 278-1282
ggttctgctccttttacttcaggcgaacctgaactcagttaatgcaattttgaagcatgccctgaatagattcagtcattatcaagtcaaactaaaaacggtgaaaggttgcgactattaccaaataggaaaaatctgaagacataagaactacacatgaggaatatgtcatttagcactttcactttttgatctccacagaagacaatgagaagtcataccataacaatgacgacaacttcagtcagcagcaacaccaaatgttactacctgtcccatggatgaaaaattgctatctactgtgttaaccacatcctactctgttattttcatcgtgggactggttgggaacataatcgccctctatgtatttctgggtattcaccgtaaaagaaattccattcaaatttatctacttaacgtagccattgcagacctcctactcatcttctgcctccctttccgaataatgtatcatattaaccaaaacaagtggacactaggtgtgattctgtgcaaggttgtgggaacactgttttatatgaacatgtacattagcattattttgcttggattcatcagtttggatcgctatataaaaattaatcggtctatacagcaacggaaggcaataacaaccaaacaaagtatttatgtctgttgtatagtatggatgcttgctcttggtggattcctaactatgattattttaacacttaagaaaggagggcataattccacaatgtgtttccattacagagataagcataacgcaaaaggagaagccatttttaacttcattcttgtggtaatgttctggctaattttcttactaataatcctttcatatattaagattgggaagaatctattgaggatttctaaaaggaggtcaaaatttcctaattctggtaaatatgccactacagctcgtaactcctttattgtacttatcatttttactatatgttttgttccctatcatgcctttcgattcatctacatttcttcacagctaaatgtatcatcttgctactggaaagaaattgttcacaaaaccaatgagatcatgctggttctctcatctttcaatagttgcttagatccagtcatgtatttcctgatgtccagtaacattcgcaaaataatgtgccaacttctttttagacgatttcaaggtgaaccaagtaggagtgaaagcacttcagaatttaaaccaggatactccctgcatgatacatctgtggcagtgaaaatacagtctagttctaaaagtacttga

SEQ ID NO: 135997 - DNA, 2249 bp, Homo sapiens
  Payload ID: 6606
  Gene Symbol: GPR35
  Gene Name: G protein-coupled receptor 35
  Uniprot ID: Q9HC97
  ENST ID: ENST00000319838
  CDS Start-End: 943-1872
ctttagtcacttccagctccaggcacagcagttggtgactccttggtgggagccgtgtcccacccggtcctgatactgccgtcttctctttcacagtcctccaggcttgggccagccttgggggcagcagagcttctgggctgacatgggctcattgctccttctccaagccctctgaggacatcaaaagcgtggacgcatcactttccaccatcttgctgcccactgtccctccatcctgaggcctcctaagcacatgtgtggggtggcaggcacactgctgatagctgtggatgcggccgtgacatccttcacccctgcccccatggcatgcatgatccattagggaggaccgtctgcacaaaggtctcttgccctgtgcagcttcctgcagactggacttgcaaagtccagcctgtatggctggagttcccatgcctgccaatctcctgtcgactgcgagtcagctccgatacttcaccagattcagccacctgggggagctggaagtgaatctcctcgtagctgagccttctgatgagactgcagccccggctgacacctggattgcagactcatgaaagacctgaaactctaccaacagccacctgggggagctggaagtgaatctcctcgtagctgagccttctgatgagactgcagccccggctgacacctggattgcagactcatgaaagaccctgagcagaggacccagtttggcagagcccgaattcctgacccacaggaactgggagataaaactctgtggttttaatcttctcattttagagtgctcagtgtcctgtggtgtgaacacgcttcattcaacctgggcccttgggagagatgctgagtggttcccgggctgtccccactccacaccgtggcagtgaagagctgctgaagtacatgcttcatagtccttgcgtctctctgaccatgaatggcacctacaacacctgtggctccagcgacctcacctggcccccagcgatcaagctgggcttctacgcctacttgggcgtcctgctggtgctaggcctgctgctcaacagcctggcgctctgggtgttctgctgccgcatgcagcagtggacggagacccgcatctacatgaccaacctggcggtggccgacctctgcctgctgtgcaccttgcccttcgtgctgcactccctgcgagacacctcagacacgccgctgtgccagctctcccagggcatctacctgaccaacaggtacatgagcatcagcctggtcacggccatcgccgtggaccgctatgtggccgtgcggcacccgctgcgtgcccgcgggctgcggtcccccaggcaggctgcggccgtgtgcgcggtcctctgggtgctggtcatcggctccctggtggctcgctggctcctggggattcaggagggcggcttctgcttcaggagcacccggcacaatttcaactccatggcgttcccgctgctgggattctacctgcccctggccgtggtggtcttctgctccctgaaggtggtgactgccctggcccagaggccacccaccgacgtggggcaggcagaggccacccgcaaggctgcccgcatggtctgggccaacctcctggtgttcgtggtctgcttcctgcccctgcacgtggggctgacagtgcgcctcgcagtgggctggaacgcctgtgccctcctggagacgatccgtcgcgccctgtacataaccagcaagctctcagatgccaactgctgcctggacgccatctgctactactacatggccaaggagttccaggaggcgtctgcactggccgtggctcccagtgctaaggcccacaaaagccaggactctctgtgcgtgaccctcgcctaagaggcgtgctgtgggcgctgtgggccaggtctcgggggctccgggaggtgctgcctgccaggggaagctggaaccagtagcaaggagcccgagatcagccctgaactcactgtgtattctcttggagccttgggtgggcagggacggcccaggtacctgctctcttgggaagagagagggacagggacaagggcaagaggactgaggccagagcaaggccaatgtcagagacccccgggatggggcctcacacttgccacccccagaaccagctcacctggccagagtgggttcctgctggccagggtgcagccttgatgacacctgccgctgcccctcggggctggaataaaactccccacccagagtcagtccta

SEQ ID NO: 135998 - DNA, 1258 bp, Homo sapiens
  Payload ID: 6606
  Gene Symbol: GPR35
  Gene Name: G protein-coupled receptor 35
  Uniprot ID: Q9HC97
  ENST ID: ENST00000407714
  CDS Start-End: 329-1258
agaacaaatgtgtgccctcagcaaggatgctggctcttcagaggtgtcagcacaggcagccggcaccccacttccctcccagaaatcccccacgccctctagctggggctggtgcaggagcagtggggaactcctgttacccctgacctgctgccgtcagtcagccgcccgcccccccaccttaaggaggggcagagtcagggaccagccctgaggggtggctcaccccagcttcacttcccccagcccttctcagacagccactgtgcaggctttggcagcgggggtcacacactccacccgggaggccaaagctgcctgcaggaccatgaatggcacctacaacacctgtggctccagcgacctcacctggcccccagcgatcaagctgggcttctacgcctacttgggcgtcctgctggtgctaggcctgctgctcaacagcctggcgctctgggtgttctgctgccgcatgcagcagtggacggagacccgcatctacatgaccaacctggcggtggccgacctctgcctgctgtgcaccttgcccttcgtgctgcactccctgcgagacacctcagacacgccgctgtgccagctctcccagggcatctacctgaccaacaggtacatgagcatcagcctggtcacggccatcgccgtggaccgctatgtggccgtgcggcacccgctgcgtgcccgcgggctgcggtcccccaggcaggctgcggccgtgtgcgcggtcctctgggtgctggtcatcggctccctggtggctcgctggctcctggggattcaggagggcggcttctgcttcaggagcacccggcacaatttcaactccatggcgttcccgctgctgggattctacctgcccctggccgtggtggtcttctgctccctgaaggtggtgactgccctggcccagaggccacccaccgacgtggggcaggcagaggccacccgcaaggctgcccgcatggtctgggccaacctcctggtgttcgtggtctgcttcctgcccctgcacgtggggctgacagtgcgcctcgcagtgggctggaacgcctgtgccctcctggagacgatccgtcgcgccctgtacataaccagcaagctctcagatgccaactgctgcctggacgccatctgctactactacatggccaaggagttccaggaggcgtctgcactggccgtggctcccagtgctaaggcccacaaaagccaggactctctgtgcgtgaccctcgcctaa

SEQ ID NO: 135999 - DNA, 2032 bp, Homo sapiens
  Payload ID: 6606
  Gene Symbol: GPR35
  Gene Name: G protein-coupled receptor 35
  Uniprot ID: Q9HC97
  ENST ID: ENST00000403859
  CDS Start-End: 815-1744
agctccaggcacagcagttggtgactccttggtgggagccgtgtcccacccggtcctgatactgccgtcttctctttcacagtcctccaggcttgggccagccttgggggcagcagagcttctgggctgacatgggctcattgctccttctccaagccctctgaggacatcaaaagcgtggacgcatcactttccaccatcttgctgcccactgtccctccatcctgaggcctcctaagcacatgtgtggggtggcaggcacactgctgatagctgtggatgcggccgtgacatccttcacccctgcccccatggcatgcatgatccattagggaggaccgtctgcacaaaggtctcttgccctgtgcagcttcctgcagactggacttgcaaagtccagcctgtatggctggagttcccatgcctgccaatctcctgtcgactgcgagtcagctccgatacttcaccagattcagccacctgggggagctggaagtgaatctcctcgtagctgagccttctgatgagactgcagccccggctgacacctggattgcagactcatgaaagaccctgagcagaggacccagtttggcagagcccgaattcctgacccacaggaactgggagataaaactctgtggttttaatcttctcattttagagtgctcagtgtcctgtggtgtgaacacgcttcattcaacctgggcccttgggagagatgctgagtggttcccgggctgtccccactccacaccgtggcagtgaagagctgctgaagtacatgcttcatagtccttgcgtctctctgaccatgaatggcacctacaacacctgtggctccagcgacctcacctggcccccagcgatcaagctgggcttctacgcctacttgggcgtcctgctggtgctaggcctgctgctcaacagcctggcgctctgggtgttctgctgccgcatgcagcagtggacggagacccgcatctacatgaccaacctggcggtggccgacctctgcctgctgtgcaccttgcccttcgtgctgcactccctgcgagacacctcagacacgccgctgtgccagctctcccagggcatctacctgaccaacaggtacatgagcatcagcctggtcacggccatcgccgtggaccgctatgtggccgtgcggcacccgctgcgtgcccgcgggctgcggtcccccaggcaggctgcggccgtgtgcgcggtcctctgggtgctggtcatcggctccctggtggctcgctggctcctggggattcaggagggcggcttctgcttcaggagcacccggcacaatttcaactccatggcgttcccgctgctgggattctacctgcccctggccgtggtggtcttctgctccctgaaggtggtgactgccctggcccagaggccacccaccgacgtggggcaggcagaggccacccgcaaggctgcccgcatggtctgggccaacctcctggtgttcgtggtctgcttcctgcccctgcacgtggggctgacagtgcgcctcgcagtgggctggaacgcctgtgccctcctggagacgatccgtcgcgccctgtacataaccagcaagctctcagatgccaactgctgcctggacgccatctgctactactacatggccaaggagttccaggaggcgtctgcactggccgtggctcccagtgctaaggcccacaaaagccaggactctctgtgcgtgaccctcgcctaagaggcgtgctgtgggcgctgtgggccaggtctcgggggctccgggaggtgctgcctgccaggggaagctggaaccagtagcaaggagcccgagatcagccctgaactcactgtgtattctcttggagccttgggtgggcagggacggcccaggtacctgctctcttgggaagagagagggacagggacaagggcaagaggactgaggccagagcaaggccaatgtcagagacccccgggatggggcctcacacttgccacccccagaaccagctcacctggccagagt

SEQ ID NO: 136000 - DNA, 1399 bp, Homo sapiens
  Payload ID: 6606
  Gene Symbol: GPR35
  Gene Name: G protein-coupled receptor 35
  Uniprot ID: Q9HC97
  ENST ID: ENST00000430267
  CDS Start-End: 1-1023
atgctgagtggttcccgggctgtccccactccacaccgtggcagtgaagagctgctgaagtacatgcttcatagtccttgcgtctctctgaccatgaatggcacctacaacacctgtggctccagcgacctcacctggcccccagcgatcaagctgggcttctacgcctacttgggcgtcctgctggtgctaggcctgctgctcaacagcctggcgctctgggtgttctgctgccgcatgcagcagtggacggagacccgcatctacatgaccaacctggcggtggccgacctctgcctgctgtgcaccttgcccttcgtgctgcactccctgcgagacacctcagacacgccgctgtgccagctctcccagggcatctacctgaccaacaggtacatgagcatcagcctggtcacggccatcgccgtggaccgctatgtggccgtgcggcacccgctgcgtgcccgcgggctgcggtcccccaggcaggctgcggccgtgtgcgcggtcctctgggtgctggtcatcggctccctggtggctcgctggctcctggggattcaggagggcggcttctgcttcaggagcacccggcacaatttcaactccatggcgttcccgctgctgggattctacctgcccctggccgtggtggtcttctgctccctgaaggtggtgactgccctggcccagaggccacccaccgacgtggggcaggcagaggccacccgcaaggctgcccgcatggtctgggccaacctcctggtgttcgtggtctgcttcctgcccctgcacgtggggctgacagtgcgcctcgcagtgggctggaacgcctgtgccctcctggagacgatccgtcgcgccctgtacataaccagcaagctctcagatgccaactgctgcctggacgccatctgctactactacatggccaaggagttccaggaggcgtctgcactggccgtggctcccagtgctaaggcccacaaaagccaggactctctgtgcgtgaccctcgcctaagaggcgtgctgtgggcgctgtgggccaggtctcgggggctccgggaggtgctgcctgccaggggaagctggaaccagtagcaaggagcccgagatcagccctgaactcactgtgtattctcttggagccttgggtgggcagggacggcccaggtacctgctctcttgggaagagagagggacagggacaagggcaagaggactgaggccagagcaaggccaatgtcagagacccccgggatggggcctcacacttgccacccccagaaccagctcacctggccagagtgggttcctgctggccagggtgcagccttgatgacacctgccgctgcccctcggggctggaataaaactccccacccagagtcagtcct

SEQ ID NO: 136001 - DNA, 3821 bp, Homo sapiens
  Payload ID: 6606
  Gene Symbol: GPR35
  Gene Name: G protein-coupled receptor 35
  Uniprot ID: Q9HC97
  ENST ID: ENST00000438013
  CDS Start-End: 2521-3450
tataaacaggaaaatttaaatgttgtagttagagtttttttcttcttcttagagatggggtttcactctgtctcctaaggctggagtgcagtggtgggatcatagctcacttcagcctcaacctcctgggctcaagccgtcttcctgcctcagcctcccgagtagcacgcatcaccagcccagctaattttctgtctttttttttttttttttttttttttttgtagagacggggtctccctgtgatgcccaggttgttcttaaacttctggcctcaagtcatcctcctgtctcagcctcccaaagtgttgggattacaggcatgagccaccgtgcctgcctgcagttaaacattcccccacaaaatactgggccacaccgaggctagtatgaaagttgcagccctgggtatgtgtgacctgagagccccttggcagccatggggagcgatgggggaagctggggcaatgggaaggggtctaggcacacgagccctcgggtcctcacctcccacgaggcagggtcccaggctgcctctactcaaggtggggcagcaaaagaatcgccctctagctgtgcagaccccctccccctccaggtctgcacaccgcccaaggctggccctggacttctggtggattcaagtactcaggtggggagagtaggaggccagtcgcacggagccctccccaacgcacagtgcctgcccagctcaggtgcctctgaggtgtagattctgagcaggttctgggatctcctggcccccagcgggggctgccacaggagtataggcccaacaggaagggaagatcccagcgattggttccagtgggttctggggatgtcctcggagcctggcctggctcagggtccctccaaaagtccctggaacgagggtgaagtgttgctcatgaatcagagagaaagcaagcaggaccctcaagaagggaggagagagaccactgggcgtgcagcactttgcactcgggggaagggctcctgaaacttggaagtcagcaaatatctgctgtacttcaccagaggtgggatctaaggagacagaatgaagccagggggcagaatgtttcgtttctgtctgaaacctgtgccctccatccctcatggactggggacctggagttcccggggaccaccgtggggaaatgcgtcccagcactaatggtccccagcagctgcagtcacggggtttgggcgctctcccctcctgatttgggggaccttttgtgctcctctgggcagagggaggaggcagagggaggaggaaggcccttcgctgtgggctgagtccttcccaccttccataccagcccagcaggaagccactgcaggatgccccagaggacagcctgatggttgggggagaggcttctcccgccctcacccctccgggttcttcctggacccactgagtaacccaggtggtgggacgtgtggctgtgagtcctggactctgggcgctcaccagcagctccgtctcacacctgcctgcgtgtgacaccagcaccccttatgatgaggaaacaagtttgcccagctgcaggggtggccgagtcaggatgactctagcccgtgtcctggacaccagaccctgcccaggtccagccggggctggtctcagccttcctgggctatgtcgcggagggtgttggggacagcgagaggctggcgtggacagtggaggggtgactttgtgggtggtcctgatagtgacggagaggaggatactcagctccacccctgggcggcccctgagcagcacgactgggcctgaaggggcagggctgccgtcacaggctctggcccctgggagctcaaggggtgaatccctgatcccaggtgtgggactgggatggggcctcaggctgatgcaggcaggacctccagagctcaggactgggtgggtgggctcacagggaggtaggggcaggccagagtcccagctgtcctggactctgctgtggggaagggctgatgcaggtgtggagtcaaatgtgggtgcctcctgcagccgggtgccaggaggggtggaggggccaccctgggctttgtccgggagcctggtcttcccgtccttgggctgacaggtgctgctgcctctgagccctccctgctaagagctgtgtgctgggtaaggctggtggccctttgggctccctgtccaggatttgcgctctggagggtagggcttgctgggctggggactggaggggaacgtggagctccttctgcctcctttcctgccccatgacagcaggcagatcccaggagagaagagctcaggagatgggaagaggatctgtccaggggttagacctcaagggtgacttggagttctttacggcacccatgctttctttgaggagttttgtgtttgtgggtgtggggtcggggctcacctcctcccacatccctgcccagaggtgggcagagtgggggcagtgccttgctccccctgctcactctctgctgacctccggctccctgtgctgccccaggaccatgaatggcacctacaacacctgtggctccagcgacctcacctggcccccagcgatcaagctgggcttctacgcctacttgggcgtcctgctggtgctaggcctgctgctcaacagcctggcgctctgggtgttctgctgccgcatgcagcagtggacggagacccgcatctacatgaccaacctggcggtggccgacctctgcctgctgtgcaccttgcccttcgtgctgcactccctgcgagacacctcagacacgccgctgtgccagctctcccagggcatctacctgaccaacaggtacatgagcatcagcctggtcacggccatcgccgtggaccgctatgtggccgtgcggcacccgctgcgtgcccgcgggctgcggtcccccaggcaggctgcggccgtgtgcgcggtcctctgggtgctggtcatcggctccctggtggctcgctggctcctggggattcaggagggcggcttctgcttcaggagcacccggcacaatttcaactccatggcgttcccgctgctgggattctacctgcccctggccgtggtggtcttctgctccctgaaggtggtgactgccctggcccagaggccacccaccgacgtggggcaggcagaggccacccgcaaggctgcccgcatggtctgggccaacctcctggtgttcgtggtctgcttcctgcccctgcacgtggggctgacagtgcgcctcgcagtgggctggaacgcctgtgccctcctggagacgatccgtcgcgccctgtacataaccagcaagctctcagatgccaactgctgcctggacgccatctgctactactacatggccaaggagttccaggaggcgtctgcactggccgtggctcccagtgctaaggcccacaaaagccaggactctctgtgcgtgaccctcgcctaagaggcgtgctgtgggcgctgtgggccaggtctcgggggctccgggaggtgctgcctgccaggggaagctggaaccagtagcaaggagcccgagatcagccctgaactcactgtgtattctcttggagccttgggtgggcagggacggcccaggtacctgctctcttgggaagagagagggacagggacaagggcaagaggactgaggccagagcaaggccaatgtcagagacccccgggatggggcctcacacttgccacccccagaaccagctcacctggccagagtgggttcctgctggccagggtgcagccttgatgacacctgccgctgcccctcggggctggaataaaactccccacccagagtca

SEQ ID NO: 136002 - DNA, 3021 bp, Homo sapiens
  Payload ID: 6607
  Gene Symbol: GPR37
  Gene Name: G protein-coupled receptor 37 (endothelin receptor type B-like)
  Uniprot ID: O15354
  ENST ID: ENST00000303921
  CDS Start-End: 652-2493
ggggttggaatcccgcttctcctcggcagcagtaggctcgcaagtcgctggggttaggtggggcaagagtttcgccggcgcatcagcgctgcttcggactgtttgcaacgtgtttccagcgagctgggagcggggttgtgactgcgagtcgtctgggggagggggacttgtttttcttttcctctagagacctcggcttgcaactggatcaaacgctgtcgaaaggatgtaaataggcagagcaactgttaccaagaaggccaccacccccacccaaaggcagtgaggagtgtggggcttcgtctgggctcccccgagtctcaacagtaatcaacagtcaggtgttgattgcaacttttcaaggtcagccaccgggagtagcctattccctctaggaaccttggagggcataccttgctgggactcaacttggctgagaaatgcacaagatgccaaaggaggaaggattatagggggcgtgtgtgtgacccccaagaccgatcttccgctatcaccctaatctccggttccccgctacccgggcgggggtgagtatgtgacatgtgcctaactctcagcagcaacttcggcagcaggtgtcgatcctaactaagcaggagctgcggctgccgggtgtgccctcaccaagccatgcgagccccgggcgcgcttctcgcccgcatgtcgcggctactgcttctgctactgctcaaggtgtctgcctcttctgccctcggggtcgcccctgcgtccagaaacgaaacttgtctgggggagagctgtgcacctacagtgatccagcgccgcggcagggacgcctggggaccgggaaattctgcaagagacgttctgcgagcccgagcacccagggaggagcagggggcagcgtttcttgcgggaccctcctgggacctgccggcggccccgggccgtgacccggctgcaggcagaggggcggaggcgtcggcagccggacccccgggacctccaaccaggccacctggcccctggaggtggaaaggtgctcggggtcaggagccttctgaaactttggggagagggaaccccacggccctccagctcttccttcagatctcagaggaggaagagaagggtcccagaggcgctggcatttccgggcgtagccaggagcagagtgtgaagacagtccccggagccagcgatcttttttactggccaaggagagccgggaaactccagggttcccaccacaagcccctgtccaagacggccaatggactggcggggcacgaagggtggacaattgcactcccgggccgggcgctggcccagaatggatccttgggtgaaggaatccatgagcctgggggtccccgccggggaaacagcacgaaccggcgtgtgagactgaagaaccccttctacccgctgacccaggagtcctatggagcctacgcggtcatgtgtctgtccgtggtgatcttcgggaccggcatcattggcaacctggcggtgatgtgcatcgtgtgccacaactactacatgcggagcatctccaactccctcttggccaacctggccttctgggactttctcatcatcttcttctgccttccgctggtcatcttccacgagctgaccaagaagtggctgctggaggacttctcctgcaagatcgtgccctatatagaggtcgcttctctgggagtcaccactttcaccttatgtgctctgtgcatagaccgcttccgtgctgccaccaacgtacagatgtactacgaaatgatcgaaaactgttcctcaacaactgccaaacttgctgttatatgggtgggagctctattgttagcacttccagaagttgttctccgccagctgagcaaggaggatttggggtttagtggccgagctccggcagaaaggtgcattattaagatctctcctgatttaccagacaccatctatgttctagccctcacctacgacagtgcgagactgtggtggtattttggctgttacttttgtttgcccacgcttttcaccatcacctgctctctagtgactgcgaggaaaatccgcaaagcagagaaagcctgtacccgagggaataaacggcagattcaactagagagtcagatgaactgtacagtagtggcactgaccattttatatggattttgcattattcctgaaaatatctgcaacattgttactgcctacatggctacaggggtttcacagcagacaatggacctccttaatatcatcagccagttccttttgttctttaagtcctgtgtcaccccagtcctccttttctgtctctgcaaacccttcagtcgggccttcatggagtgctgctgctgttgctgtgaggaatgcattcagaagtcttcaacggtgaccagtgatgacaatgacaacgagtacaccacggaactcgaactctcgcctttcagtaccatacgccgtgaaatgtccacttttgcttctgtcggaactcattgctgaaggacagtacttggttgggtcagatttatttgtttgattttcatatcccgtgaaagtttttaattcatatttttccttatagggaaaaatgcaaaaaagaaacaataaagaaagaaatattaactactgtagaactgattttacaaattaatatttgtgctttgaaaaaaagtttctatttagttatttaagaagaatgagaaggccaatagttttagattattttatctggtatggtgctaatattttatttgaaaaaagttactgcaacttaacttaaaattgctaacgttttttcttcttttaaaaatacaattattgtatattgattatagcaatgtgattttgtaggttattttatatttgagttgtgattgaaagtatgttgtatatggtattgtgagatgatttgtacttggaagcattcacaaagtagcaccaaataaattacactttattctttaatgtcattgtcaatctacttttaaccaatattcaataaatcttctaattgccttaaagatacaa

SEQ ID NO: 136003 - DNA, 6588 bp, Homo sapiens
  Payload ID: 6608
  Gene Symbol: GPR37L1
  Gene Name: G protein-coupled receptor 37 like 1
  Uniprot ID: O60883
  ENST ID: ENST00000367282
  CDS Start-End: 107-1552
gactggaggcggatccagccggccagctgcctctctggagcccagctcttgggccccctgcactcacctgctcttcctgggctggctgtctcctgctcatccagccatgcggtggctgtggcccctggctgtctctcttgctgtgattttggctgtggggctaagcagggtctctgggggtgcccccctgcacctgggcaggcacagagccgagacccaggagcagcagagccgatccaagaggggcaccgaggatgaggaggccaagggcgtgcagcagtatgtgcctgaggagtgggcggagtacccccggcccattcaccctgctggcctgcagccaaccaagcccttggtggccaccagccctaaccccggcaaggatgggggcaccccagacagtgggcaggaactgaggggcaatctgacaggagcaccagggcagaggctacagatccagaaccccctgtatccggtgaccgagagctcctacagtgcctatgccatcatgcttctggcgctggtggtgtttgcggtgggcattgtgggcaacctgtcggtcatgtgcatcgtgtggcacagctactacctgaagagtgcctggaactccatccttgccagcctggccctctgggattttctggtcctctttttctgcctccctattgtcatcttcaacgagatcaccaagcagaggctactgggtgacgtttcttgtcgtgccgtgcccttcatggaggtctcctctctgggagtcacgactttcagcctctgtgccctgggcattgaccgcttccacgtggccaccagcaccctgcccaaggtgaggcccatcgagcggtgccaatccatcctggccaagttggctgtcatctgggtgggctccatgacgctggctgtgcctgagctcctgctgtggcagctggcacaggagcctgcccccaccatgggcaccctggactcatgcatcatgaaaccctcagccagcctgcccgagtccctgtattcactggtgatgacctaccagaacgcccgcatgtggtggtactttggctgctacttctgcctgcccatcctcttcacagtcacctgccagctggtgacatggcgggtgcgaggccctccagggaggaagtcagagtgcagggccagcaagcacgagcagtgtgagagccagctcaacagcaccgtggtgggcctgaccgtggtctacgccttctgcaccctcccagagaacgtctgcaacatcgtggtggcctacctctccaccgagctgacccgccagaccctggacctcctgggcctcatcaaccagttctccaccttcttcaagggcgccatcaccccagtgctgctcctttgcatctgcaggccgctgggccaggccttcctggactgctgctgctgctgctgctgtgaggagtgcggcggggcttcggaggcctctgctgccaatgggtcggacaacaagctcaagaccgaggtgtcctcttccatctacttccacaagcccagggagtcacccccactcctgcccctgggcacaccttgctgaggccccagtaggggtggggagggagggagaggccgccacccccgccggtgtctgctgttctttccccataggtcttgctttgttgcctgtcttgctgtctagggatggacttggttcctcttgtcaaggtttgggaatgtcaaagccccctccccacacagggcctttcctgtcccttgtggggccttccaaccctgtcctttccactggtgggcggtgatgcttctaggtccttagaactgcccagaaactctgagtcccagcagctgggagccagaactttgcctgccctcccttggttccagtctctcttctctctctctgccttggaacctgaccatactttagttgtgcccttcccaggcatcatcctcctaccaccaacctggggccccatcttggaatgggggctccttggggccagcccagtgtggctcaccacactcttctttttttttttttttttttttgagatggagtcttgctctgttgcccaggctggagtacatttgcctgatgtcagctccctgcaacctccgcctcctgggttcaagcgattctcctgcctcagcctcctgagtagctgggattacaggtgtgcaccaacacacccggctaatttttgtatttgtagaagaggcggggtttcaccatgttggccaggctggtgttgaactcctgacctcaagtgatctgcctgccttggcctcccaaagtgctgggattacaggtgtgagctgccacgcccagccccagtacactcttctctggaccagatctgtcccagtcctggatgcctcctcctactggtgccttcttttcttccagaggatttctctctccttcctcctcctttctttgggatccctgggttgccctgtcccaacctccttgttaggtgctttcccataggaggcccttcttgagaaacaataaactaggtagaactacccctatgcccatccactttcttgtgccacattctggcagggcccagatgcagctgggccttcctggcctggcagtgcctaggagaatttctcctgacctggcctggcctgtggctgatgttcagaacagccttgtggccgatgttcagaacagccttgtggccctggcgactccaagggttttatggcttttgagggacagagaggatggagggcttggggagccggaggacctaagtcctcatcctggcctaaaccccatgctccttgggaagtcaaaagcctggaaaatatctcctctggagccttcatctctgctatgccctctctccacaaagccccccttggagggagtccagtggtctttcctctgtgagccccagggcttcccagcctttgtcactctgagagctgctcttgttcagtttcttagaatggactgttttgcctgtagacggcccagctgcctgccctggcctgcccccacccagcccccactgcaccacccttcccgccagagctcccactgcccccggcagacccttcatgcagcttctcctgtggggtcttgcccttgaagtgccacttcccccagccccacctctggtcccttccagagggcacccttagccttgtaggtccctgggaagctggcacagcatcaaccagaagtgatgcctcagccaggccaccagtcgctccccgcctgggagctcagctttcctcagaaccaccccccctgtctgaagctctgtcctgggtcccaccagacttctgcccaccaggcctacctacagcatccacatggggcctcaggaagggccccgggggcccagggatgggcaggggcagggtttccaagcgcctggggctccattctcctctgtccacccacccacaccccttggcctcagcctgccctgtacccaagcttccctccccctctcctggggatcttaacggccttgttctctctccctggcacccacccccagggcgggtgatgccgccaagagagagggaggccgttgctaggtgatggcgccgccatgcacacaccctttgtgctggggagtgacacccacccgtttctcagcagacctgttgccacggtgactgaagcccccagctctgtctgtagaaacttcagatgggtgggggagcaggttggagaggggaccaaaggcaggcctgtcgtgctgaagctcttggggaccgtttcctcggcatttccccaactccttctccacccccctgccaggcccggaagtaccaccagcttcctaagggatgcaggaaggggccgggtgaactgaggtgaagtccagggcaggggagtcagacccctcaacatcctgtttaggggtcctcctccacaaagggtgccctccacctctccctcctgctggttggccggctcagagatgaagggggagagatggtggctccaaggctctgccaccgccacctcccaagcctgccaacgtgaatggcttgcagaatcagtcagcaggccagcggccttgggaaagagccactgtcctcgcagcctgggccagctgggggaacaatgtagggtttgttgcttaggggtcccaggcttgcgggggggttggcacatggtgggcagtggacttgagctgggatggtctgagggggcactgacacgctcacccgagggcagacttcagaccagccctcagatcctgatgccaggttacagggctgaggggagcctgaaatccactgggtctccctgctccacttgggagtcaccttctcatcacctatcctggaactgaatgcaattacttaaactcagtctcagcttcctcatctgtaaaatgggaataatctgtccttcacagaggattatggtcatttaatgagacaagatacataaagcactttgcatggtgccccgaaccttttattccttcctctcctttgggaattcaattctctagtgttaggagcaggcttggcccagggattcttaaatgcatccaggttttggcatcaaagggccccaaacatgacaatttacctatactcatggtctgttcccattcaactttaataggttatgtgtgttttttttttcttaagagctgggtgggggggtctcactatgttgcccaggctggctttgaactcctgggctcaagcagtcctcctgtctcagcctcctgagtagctgggactacaagtgtgtaccaccatgcctggctgaacacttttttttttttgagacaagatcccactcagtcactcaagctgagtgctgtggtgtgatcacagctcattgcagcctccacttcctgggctcaagcgattctcctgcctcagcttcctgagtagctgggactacaggtgcgcactaccacgcctgtctaatttttgattatttgtagagatagggtctcactattttgcccaggctggtctcaaactcccagactcaagtcattctcctacctcgggctcccaaagtactgggattacaggcatgagcacctggcccctgaacaaattctttaagtcatattagcacctgctgcacgccggcactgtggaaggaggatgcttgcttgcttcctggtaaccagctctcttatctcaaacctcaatcctcagtgaggatcacaggatctgagaaaggcaccttggcctggaaacagccccagatgagtgagattgctggtcctctcccgggatcccaggcccaggaaaacctagccatgcttgcagtcaggagagggcaggggatagagccctggctcccattcaacctccttagccaggaggacatgtcccattttgcttaggagttgggaggtaccctagaatcacttagcttcagatgccaaattccatccacattctttcctccaactctctggcagtggggaactgcctctccaggcagggaactgctctgacaggtctgatgactgcctccaggaggaagccctgggcaccaatgaaggtgaggggctggagggcccaggacggggagtcaaggtccccactcccaggactaagggacagtttggctcctttttcctgcagtgggaggggtgagaagggctggggtgttctgcaagggcctgctccattttccagggtgaaggagaggccgagggaggtggagcgggaggaggtggggcttactgtgaaactgggtcaagatggcctcggatttgagcaggcagggtcaccaggctctgaggcagcagctgtgagcagtgccgagggaggaccagctctgacggtgaggtcgggtgggggactagaatccagcagaggagcgagggcagggctcctaccaggaaacccatagcattgacactaactgagaggcagcaaaggcggtgacactcccccaggctctgtgggcccagccctacccctgaagcacagttaactggttctggggtaggaactgggggccggagggacagggttctggttctggctcaaccttggctgctggtgagatccagggcctgggaaagaggggctgaggcctgaactgggcctaaggagagtgcagctcagttcgcacacaacagcacccagccctgtccccttgctgcctctacccagccctgggcagttccctcaacagagctctgcagccccaagtggcagctgctggctcaaagctgggactacatgaaagtctgaaaagagaatgagaaggaggtggcgcaagagcctggacgcacgtgtgggaggccgttttgtgcagcgccattgtgctccccgggcgggcatgtgctcgcgctccgtggctctgttggtgcccagcgtgcgggggtgtgctggtggccctgtgggcctgtagggcaacccatgccaactgcggaaaagtaaccagcaccatacaccccccccaacacaaaactggtcatttattttttttgttgtcattgttattaggaagcaaaaaaatgtacagttacaagaatcattttccaaacagaggttaaatatgagctgaaaagtgtaaaaaaggaagaggaacatcactttacaaatcattaaattaaacaaataaacaaacagaacccaaagaaccaa

SEQ ID NO: 136004 - DNA, 2784 bp, Homo sapiens
  Payload ID: 6609
  Gene Symbol: GPR39
  Gene Name: G protein-coupled receptor 39
  Uniprot ID: O43194
  ENST ID: ENST00000329321
  CDS Start-End: 470-1831
atgattaatcgctgaccaccccgcctcccgcagctcgggagagggtgctctgggaatgtggaccggggctctcaagtgccggcagctggaaaggaagaggagtgctgcgaggcggagtgcgccctcggcgaagaggggcagaggcggagcgccaggtgctgcggtctcactcccagccagccaggagtttagaacgttcttcctccgccctctccccgcctcgccccagccacatacactcccaaacctcaacacccaggcgcctcctgggcctctcctaggttgggctgctccagcaagtttccatgaaagcacctgaaatactaagttaccttcgcgaggagaactcgagtgagataaaatcgtgcgcccacgcaggtgagtttgcagccaagaattttggacgctgctgggaggagaaagggaagttgagaaagtctttggacctggtagcctggtgctctttctcatggcttcacccagcctcccgggcagtgactgctcccaaatcattgatcacagtcatgtccccgagtttgaggtggccacctggatcaaaatcacccttattctggtgtacctgatcatcttcgtgatgggccttctggggaacagcgccaccattcgggtcacccaggtgctgcagaagaaaggatacttgcagaaggaggtgacagaccacatggtgagtttggcttgctcggacatcttggtgttcctcatcggcatgcccatggagttctacagcatcatctggaatcccctgaccacgtccagctacaccctgtcctgcaagctgcacactttcctcttcgaggcctgcagctacgctacgctgctgcacgtgctgacactcagctttgagcgctacatcgccatctgtcaccccttcaggtacaaggctgtgtcgggaccttgccaggtgaagctgctgattggcttcgtctgggtcacctccgccctggtggcactgcccttgctgtttgccatgggtactgagtaccccctggtgaacgtgcccagccaccggggtctcacttgcaaccgctccagcacccgccaccacgagcagcccgagacctccaatatgtccatctgtaccaacctctccagccgctggaccgtgttccagtccagcatcttcggcgccttcgtggtctacctcgtggtcctgctctccgtagccttcatgtgctggaacatgatgcaggtgctcatgaaaagccagaagggctcgctggccgggggcacgcggcctccgcagctgaggaagtccgagagcgaagagagcaggaccgccaggaggcagaccatcatcttcctgaggctgattgttgtgacattggccgtatgctggatgcccaaccagattcggaggatcatggctgcggccaaacccaagcacgactggacgaggtcctacttccgggcgtacatgatcctcctccccttctcggagacgtttttctacctcagctcggtcatcaacccgctcctgtacacggtgtcctcgcagcagtttcggcgggtgttcgtgcaggtgctgtgctgccgcctgtcgctgcagcacgccaaccacgagaagcgcctgcgcgtacatgcgcactccaccaccgacagcgcccgctttgtgcagcgcccgttgctcttcgcgtcccggcgccagtcctctgcaaggagaactgagaagattttcttaagcacttttcagagcgaggccgagccccagtctaagtcccagtcattgagtctcgagtcactagagcccaactcaggcgcgaaaccagccaattctgctgcagagaatggttttcaggagcatgaagtttgaatgtcaagcgagggagccttgagtgggaactggccctccagccctaagaaaacgtcactctcactctgcagtctcaaactatgcccccatcagggatggaatggacactggaggctttacaaaaggcagatgcccacctcagtgacttctaaggactgactctgccagcctggccttgactccggttacacagacatgggggtgaactttcactccacctccttccttcaagtacatactgaaaattcagtcaggctgaatttattcagaatgctttaccgagctctttcattatttgcacaggaacaaaagagaacacggactcccgctccctacccagaataaaaggacacccagaagaaactcactcagggaggtggggggttgggggcgagggctggaagaacaatgcaggagggggtggcatctccttcagcttcagcagtgtgccgagaagagggctaatttgaggaacaggatggtggtgcggagccctggcctgagggccgaggcagaacttccccttttcttgggccttggcccgttacaaagaggggtgttgcagcagctgatgcaaactgagttcagtttccctggggagcagaaggactggtacccggcagaggcgatgagacaggccgctgatgatgcacaggacttgcggtacatgatccctgtaacacagacccaaaggagctgagttaacgtgcaccggcaaaagaatagctgtccctctcagcccaaatccaaacggacagctcttccttactcctcccacagcccagagactaggtgaggtcagggaagtgcttcggattgtctcattgatattcaagatagatggtgaaagagacaggcactatttcattagttttaacaaaactgttccaaaagcgatttgagatgccaatacctgtgaatacctgttaataaagagctgttaaatagactta

SEQ ID NO: 136005 - DNA, 900 bp, Homo sapiens
  Payload ID: 6609
  Gene Symbol: GPR39
  Gene Name: G protein-coupled receptor 39
  ENST ID: ENST00000622084
  CDS Start-End: 1-900
atggcttcacccagcctcccgggcagtgactgctcccaaatcattgatcacagtcatgtccccgagtttgaggtggccacctggatcaaaatcacccttattctggtgtacctgatcatcttcgtgatgggccttctggggaacagcgccaccattcgggtcacccaggtgctgcagaagaaaggatacttgcagaaggaggtgacagaccacatggtgagtttggcttgctcggacatcttggtgttcctcatcggcatgcccatggagttctacagcatcatctggaatcccctgaccacgtccagctacaccctgtcctgcaagctgcacactttcctcttcgaggcctgcagctacgctacgctgctgcacgtgctgacactcagctttgagcgctacatcgccatctgtcaccccttcaggtacaaggctgtgtcgggaccttgccaggtgaagctgctgattggcttcgtctgggtcacctccgccctggtggcactgcccttgctgtttgccatgggtactgagtaccccctggtgaacgtgcccagccaccggggtctcacttgcaaccgctccagcacccgccaccacgagcagcccgagacctccaatatgtccatctgtaccaacctctccagccgctggaccgtgttccagtccagcatcttcggcgccttcgtggtctacctcgtggtcctgctctccgtagccttcatgtgctggaacatgatgcaggtgctcatgaaaagccagaagggctcgctggccgggggcacgcggcctccgcagctgaggaagtccgagagcgaagagagcaggaccgccaggaggcagaccatcatcttcctgaggcttgggtttctgccactgtgggtctgttccttaccagaccag

SEQ ID NO: 136006 - DNA, 3048 bp, Homo sapiens
  Payload ID: 6610
  Gene Symbol: GPR4
  Gene Name: G protein-coupled receptor 4
  Uniprot ID: P46093
  ENST ID: ENST00000323040
  CDS Start-End: 946-2034
gctgttctgccccgcgggggcatccgctgggtccccgcgccgttgtcaagaccggggacctggacgcagcggagagaggtgccgccgcccgccccgtccagtcgccgcgcgcaggcactgcagtcagcggtgaactgacttcatcccaatccctcagcccccaccaggaccagtctggagtccctcccctgcccccattgaaatttcccttccgtccccaaacttacctctgatctagaccttactcacctccttcctgtttcctaagactccttcctgccgtccacagaccgagccttttatctttgtccaccctgtgccagacacctccttttccagaaccttctccttactggtgaccttacttatctctgttgctttctggggtcctaggaaatgccagcactcccacccacattgcctgaactttccaacactccctaactgcgctgtgtcctatctcaacactttctcatgtatttcttgtgtcttctagaacattcccccgccattattacttcaatatggctacacatacttcctaattgccctgcaaaccatctccttctcaccattgcccagcgatgctttcgtctcctccataaacactcccggagaccaatttttgtgtcacccccatactccctcgttgacacactgactccatacataacctccttgaaaaacctctttattaatctcaccatcctccagacttccctcctgtcataattccatccctcctccaacttttccctctcaagctctgcccttcccagcccagcccagcctacccaacctcatctcttccctgtagaccacatcccaccatgttcccctgagcctccaaggaaggggctcagggggccccatggcctcccgctccctgtggccccacagcccccgtgggccaggggaagcgccccagaagccgaagtgcccaccatgggcaaccacacgtgggagggctgccacgtggactcgcgcgtggaccacctctttccgccatccctctacatctttgtcatcggcgtggggctgcccaccaactgcctggctctgtgggcggcctaccgccaggtgcaacagcgcaacgagctgggcgtctacctgatgaacctcagcatcgccgacctgctgtacatctgcacgctgccgctgtgggtggactacttcctgcaccacgacaactggatccacggccccgggtcctgcaagctctttgggttcatcttctacaccaatatctacatcagcatcgccttcctgtgctgcatctcggtggaccgctacctggctgtggcccacccactccgcttcgcccgcctgcgccgcgtcaagaccgccgtggccgtgagctccgtggtctgggccacggagctgggcgccaactcggcgcccctgttccatgacgagctcttccgagaccgctacaaccacaccttctgctttgagaagttccccatggaaggctgggtggcctggatgaacctctatcgggtgttcgtgggcttcctcttcccgtgggcgctcatgctgctgtcgtaccggggcatcctgcgggccgtgcggggcagcgtgtccaccgagcgccaggagaaggccaagatcaagcggctggccctcagcctcatcgccatcgtgctggtctgctttgcgccctatcacgtgctcttgctgtcccgcagcgccatctacctgggccgcccctgggactgcggcttcgaggagcgcgtcttttctgcataccacagctcactggctttcaccagcctcaactgtgtggcggaccccatcctctactgcctggtcaacgagggcgcccgcagcgatgtggccaaggccctgcacaacctgctccgctttctggccagcgacaagccccaggagatggccaatgcctcgctcaccctggagaccccactcacctccaagaggaacagcacagccaaagccatgactggcagctgggcggccactccgccctcccagggggaccaggtgcagctgaagatgctgccgccagcacaatgaaccccgagtggcacagaatccccagttttcccctctcatcccacagtcccttctctcctggtctggtgtatgcaaattgtatggaaaaagggctgtgttaatattcataagaatacaagaacttaggaagagtgaggttggtgtgtcactggtcaacctttgtgctcccagatcccatcacagtttggcgattgtggagggcctcctgaaggaggagatgagtaaatatatttttttggagacagggtctcactgtgttgcccaggctggagtgcagtagtgcagtcgtggctcactgcagcctccacctcctgggctctccagcgatcttcccacatcagcctcccgagtagctgggaccacaaatgtgagccaccatgcctggctaatttttgtactttttgtagaaatggagtctcactatgtttcccaggctgatcttgaactcctgggctcaagagatcctcctgccttggcctcccaaagtgctcagattagagatgtgagccgccatgtctggccagataaattaagtcaaacatttggtttccagaaaataaagacaaatagagaaggttagatttttttttttccaacaagtggataaaagtctgtgactcgggggaaagtggaaggagaaatgcagccgatatagagtcattatgtttgcaaagcccctggtcatacaggccagggaacataagaccgcaattctaagtttctagataaacagcgatctccaagtcaagactgaggatgaagagggagaatgtcagaactcaagtgaagggcaatcagggcagactgcctggaggagtgatgccagaaggtttgggaagaaggtgtgggacaagaagaaagggtatttattcattcattcaacagaggtttatgtagggcactgtgctgggtggggctggggacacaacaatgactgaggcagcctggccttgccttcacagggctcaccatacacaagtaaataaaaaatatgtaatgtttggaattgctaaa

SEQ ID NO: 136007 - DNA, 1804 bp, Homo sapiens
  Payload ID: 6611
  Gene Symbol: GPR42
  Gene Name: G protein-coupled receptor 42 (gene/pseudogene)
  Uniprot ID: O15529
  ENST ID: ENST00000454971
  CDS Start-End: 202-1242
cccctttttgcatactgaccagccctggcaacggagctcaaggcatctttgtgccactgctcaacagtgagtgatgtcatgggcacggccaggtctttatcagttctgccggataaatagccaactgcactaggtctggagagacagcaaggtgctgtgcggcagagcatttggggtctcaaagaagcagtggccaccaccatggatacaggccccgaccagtcctacttctccggcaatcactggttcgtcttctcggtgtaccttctcactttcctggtggggctccccctcaacctgctggccctggtggtcttcgtgggcaagctgcggtgccgcccggtggccgtggacgtgctcctgctcaacctgaccgcctcggacctgctcctgctgctgttcctgcctttccgcatggtggaggcagccaatggcatgcactggcccctgcccttcatcctctgcccactctctggattcatcttcttcaccaccatctatctcaccgccctcttcctggcagctgtgagcattgaacgcttcctgagtgtggcccacccactgtggtacaagacccggccgaggctggggcaggcaggtctggtgagtgtggcctgctggctgttggcctctgctcactgcagcgtggtctacgtcatagaattctcaggggacatctcccacagccagggcaccaatgggacctgctacctggagttctggaaggaccagctagccatcctcctgcccgtgcggctggagatggctgtggtcctctttgtggtcccgctgatcatcaccagctactgctacagccgcctggtgtggatcctcggcagagggggcagccaccgccggcagaggagggtggcggggctggtggcggccacgctgctcaacttccttgtctgctttgggccctacaacgtgtcccatgtcgtgggctatatctgcggtgaaagcccggtgtggaggatctacgtgacgcttctcagcaccctgaactcctgtgtcgacccctttgtctactacttctcctcctccgggttccaagccgactttcatgagctgctgaggaggttgtgtgggctctggggccagtggcagcaggagagcagcatggagctgaaggagcagaagggaggggaggagcagagagcggaccgaccagctgaaagaaagaccagtgaacactcacagggctgtggaactggtggccaggtggcctgtgctgaaaactaggtcctccgggggaggagggtgtagctggcgtgtcatcctcagggcgcttcctcgctcacgccaggagggacttggagtggcgagctggggcccgatggggcttgggggcagagtagacatctagcctccctaagggtatgcgcgctaaagcccagctctcgatctcacctccatccccatccacccacacactatggattgggctctgggaaggggtcagggtgagaggctgctctggagaacaatgaggtcctcatagcagcaggcagctcctgtgttttcttgagggtggcagaggagctaagagcagtgcccaggtctgagggggctgcccagtgagtggcaggggcaggagaggggagaaccccatcctcagagctgctcccagccagcgagtcaggagcgggggagacagggctccagggatgaggccgcattctgctcccacagtgccttttccagaaagttcccattgctcaataaatgtggatcatcagagacatttatgaacaatgacagaagaaaaattacccaaataaatgtggaagcaagcaaaagagaa

SEQ ID NO: 136008 - DNA, 1182 bp, Homo sapiens
  Payload ID: 6611
  Gene Symbol: GPR42
  Gene Name: G protein-coupled receptor 42 (gene/pseudogene)
  Uniprot ID: O15529
  ENST ID: ENST00000597214
  CDS Start-End: 71-1111
tgctggccagaggccgttagggcccccactaccaactccatgttactctctctcaccagtggccaccaccatggatacaggccccgaccagtcctacttctccggcaatcactggttcgtcttctcggtgtaccttctcactttcctggtggggctccccctcaacctgctggccctggtggtcttcgtgggcaagctgcggtgccgcccggtggccgtggacgtgctcctgctcaacctgaccgcctcggacctgctcctgctgctgttcctgcctttccgcatggtggaggcagccaatggcatgcactggcccctgcccttcatcctctgcccactctctggattcatcttcttcaccaccatctatctcaccgccctcttcctggcagctgtgagcattgaacgcttcctgagtgtggcccacccactgtggtacaagacccggccgaggctggggcaggcaggtctggtgagtgtggcctgctggctgttggcctctgctcactgcagcgtggtctacgtcatagaattctcaggggacatctcccacagccagggcaccaatgggacctgctacctggagttctggaaggaccagctagccatcctcctgcccgtgcggctggagatggctgtggtcctctttgtggtcccgctgatcatcaccagctactgctacagccgcctggtgtggatcctcggcagagggggcagccaccgccggcagaggagggtggcggggctggtggcggccacgctgctcaacttccttgtctgctttgggccctacaacgtgtcccatgtcgtgggctatatctgcggtgaaagcccggtgtggaggatctacgtgacgcttctcagcaccctgaactcctgtgtcgacccctttgtctactacttctcctcctccgggttccaagccgactttcatgagctgctgaggaggttgtgtgggctctggggccagtggcagcaggagagcagcatggagctgaaggagcagaagggaggggaggagcagagagcggaccgaccagctgaaagaaagaccagtgaacactcacagggctgtggaactggtggccaggtggcctgtgctgaaaactaggtcctccgggggaggagggtgtagctggcgtgtcatcctcagggcgcttcctcgctcacgccaggagggac

SEQ ID NO: 136009 - DNA, 1307 bp, Homo sapiens
  Payload ID: 6612
  Gene Symbol: GPR45
  Gene Name: G protein-coupled receptor 45
  Uniprot ID: Q9Y5Y3
  ENST ID: ENST00000258456
  CDS Start-End: 117-1235
cagaggtccacagacatccaggaagatgcagccagcagacaaagaatggcagccacccaagtgctgaggggagccctcccggccatttctgtcccagctccaagggtctctccacgatggcctgcaacagcacgtcccttgaggcttacacatacctgctgctgaacaccagcaacgcctcagactcggggtccacccagttgcccgcacccctcaggatctccttggccatagtgatgctgctgatgaccgtggtggggttcctgggcaacactgtggtctgcatcatcgtgtaccagaggccggctatgcgctcggccatcaacctgctgctggccaccctggccttctccgacatcatgctgtccctctgctgcatgcccttcaccgccgtcaccctcatcaccgtgcgctggcactttggggaccacttctgccgcctctcagccacgctctactggttttttgtcctggagggcgtggccatcctgctcatcatcagcgtggaccgcttcctcatcatcgtccagcgccaggacaagctgaacccgcgcagggccaaggtgatcatcgcggtctcctgggtgctgtccttctgcatcgcggggccctcgctcacgggctggacgctggtggaggtgccggcgcgggccccacagtgcgtgctgggctacacggagctccccgctgaccgcgcctacgtggtcaccttggtggtggccgtgttcttcgcgccctttggcgtcatgctgtgcgcctacatgtgcatcctcaacacggtccgcaagaacgccgtgcgcgtgcacaaccagtcggacagcctggacctgcggcagctcaccagggcgggcctgcggcgcctgcagcggcagcaacaggtcagcgtggacttgagcttcaagaccaaggccttcaccaccatcctgatcctcttcgtgggcttctccctctgctggctgccccactccgtctacagcctcctgtctgtgtttagccagcgcttttactgcggttcctccttctacgccaccagcacctgcgtcctgtggctcagttacctcaagtccgtcttcaaccccatcgtctactgctggagaatcaaaaaattccgcgaggcctgcatagagttgctgccccagaccttccaaatcctccccaaagtgcctgagcggatccgaaggagaatccagccaagcacagtctacgtgtgcaatgaaaaccagtctgcggtttagggggtcagggggccacagagaaggggcagctgagccccagtcccagggtggatctgtcctgctctgttccct

SEQ ID NO: 136010 - DNA, 1951 bp, Homo sapiens
  Payload ID: 6613
  Gene Symbol: GPR50
  Gene Name: G protein-coupled receptor 50
  Uniprot ID: Q13585
  ENST ID: ENST00000218316
  CDS Start-End: 70-1923
tgtttgctgtctggacctggctgctgatcctgagcctgctgggagatcttaacgatccccaggagcaacatggggcccaccctagcggttcccaccccctatggctgtattggctgtaagctaccccagccagaatacccaccggctctaatcatctttatgttctgcgcgatggttatcaccatcgttgtagacctaatcggcaactccatggtcattttggctgtgacgaagaacaagaagctccggaattctggcaacatcttcgtggtcagtctctctgtggccgatatgctggtggccatctacccataccctttgatgctgcatgccatgtccattgggggctgggatctgagccagttacagtgccagatggtcgggttcatcacagggctgagtgtggtcggctccatcttcaacatcgtggcaatcgctatcaaccgttactgctacatctgccacagcctccagtacgaacggatcttcagtgtgcgcaatacctgcatctacctggtcatcacctggatcatgaccgtcctggctgtcctgcccaacatgtacattggcaccatcgagtacgatcctcgcacctacacctgcatcttcaactatctgaacaaccctgtcttcactgttaccatcgtctgcatccacttcgtcctccctctcctcatcgtgggtttctgctacgtgaggatctggaccaaagtgctggcggcccgtgaccctgcagggcagaatcctgacaaccaacttgctgaggttcgcaattttctaaccatgtttgtgatcttcctcctctttgcagtgtgctggtgccctatcaacgtgctcactgtcttggtggctgtcagtccgaaggagatggcaggcaagatccccaactggctttatcttgcagcctacttcatagcctacttcaacagctgcctcaacgctgtgatctacgggctcctcaatgagaatttccgaagagaatactggaccatcttccatgctatgcggcaccctatcatattcttctctggcctcatcagtgatattcgtgagatgcaggaggcccgtaccctggcccgcgcccgtgcccatgctcgcgaccaagctcgtgaacaagaccgtgcccatgcctgtcctgctgtggaggaaaccccgatgaatgtccggaatgttccattacctggtgatgctgcagctggccaccccgaccgtgcctctggccaccctaagccccattccagatcctcctctgcctatcgcaaatctgcctctacccaccacaagtctgtctttagccactccaaggctgcctctggtcacctcaagcctgtctctggccactccaagcctgcctctggtcaccccaagtctgccactgtctaccctaagcctgcctctgtccatttcaaggctgactctgtccatttcaagggtgactctgtccatttcaagcctgactctgttcatttcaagcctgcttccagcaaccccaagcccatcactggccaccatgtctctgctggcagccactccaagtctgccttcagtgctgccaccagccaccctaaacccaccactggccacatcaagccagctaccagccatgctgagcccaccactgctgactatcccaagcctgccactaccagccaccctaagcccactgctgctgacaaccctgagctctctgcctcccattgccccgagatccctgccattgcccaccctgtgtctgacgacagtgacctccctgagtcggcctctagccctgccgctgggcccaccaagcctgctgccagccagctggagtctgacaccatcgctgaccttcctgaccctactgtagtcactaccagtaccaatgattaccatgatgtcgtggttattgatgttgaagatgatcctgatgaaatggctgtgtgaaaaatgctctcgtaggtggccaggcagt

SEQ ID NO: 136011 - DNA, 1848 bp, Homo sapiens
  Payload ID: 6613
  Gene Symbol: GPR50
  Gene Name: G protein-coupled receptor 50
  ENST ID: ENST00000617907
  CDS Start-End: 1-1848
atggggcccaccctagcggttcccaccccctatggctgtattggctgtaagctaccccagccagaatacccaccggctctaatcatctttatgttctgcgcgatggttatcaccatcgttgtagacctaatcggcaactccatggtcattttggctgtgacgaagaacaagaagctccggaattctggcaacatcttcgtggtcagtctctctgtggccgatatgctggtggccatctacccataccctttgatgctgcatgccatgtccattgggggctgggatctgagccagttacagtgccagatggtcgggttcatcacagggctgagtgtggtcggctccatcttcaacatcgtggcaatcgctatcaaccgttactgctacatctgccacagcctccagtacgaacggatcttcagtgtgcgcaatacctgcatctacctggtcatcacctggatcatgaccgtcctggctgtcctgcccaacatgtacattggcaccatcgagtacgatcctcgcacctacacctgcatcttcaactatctgaacaaccctgtcttcactgttaccatcgtctgcatccacttcgtcctccctctcctcatcgtgggtttctgctacgtgaggatctggaccaaagtgctggcggcccgtgaccctgcagggcagaatcctgacaaccaacttgctgaggttcgcaattttctaaccatgtttgtgatcttcctcctctttgcagtgtgctggtgccctatcaacgtgctcactgtcttggtggctgtcagtccgaaggagatggcaggcaagatccccaactggctttatcttgcagcctacttcatagcctacttcaacagctgcctcaacgctgtgatctacgggctcctcaatgagaatttccgaagagaatactggaccatcttccatgctatgcggcaccctatcatattcttctctggcctcatcagtgatattcgtgagatgcaggaggcccgtaccctggcccgcgcccgtgcccatgctcgcgaccaagctcgtgaacaagaccgtgcccatgcctgtcctgctgtggaggaaaccccgatgaatgtccggaatgttccattacctggtgatgctgcagctggccaccccgaccgtgcctctggccaccctaagccccattccagatcctcctctgcctatcgcaaatctgcctctacccaccacaagtctgtctttagccactccaaggctgcctctggtcacctcaagcctgtctctggccactccaagcctgcctctggtcaccccaagtctgccactgtctaccctaagcctgcctctgtccatttcaaggctgactctgtccatttcaagggtgactctgtccatttcaagcctgactctgttcatttcaagcctgcttccagcaaccccaagcccatcactggccaccatgtctctgctggcagccactccaagtctgccttcagtgctgccaccagccaccctaaacccaccactccacatcaagccagctaccaggctgagcccaccactgctgactatcccaagcctgccactaccagccaccctaagcccactgctgctgacaaccctgagctctctgcctcccattgccccgagatccctgccattgcccaccctgtgtctgacgacagtgacctccctgagtcggcctctagccctgccgctgggcccaccaagcctgctgccagccagctggagtctgacaccatcgctgaccttcctgaccctactgtagtcactaccagtaccaatgattaccatgatgtcgtggttattgatgttgaagatgatcctgatgaaatggctgtgtga

SEQ ID NO: 136012 - DNA, 1088 bp, Homo sapiens
  Payload ID: 6614
  Gene Symbol: GPR52
  Gene Name: G protein-coupled receptor 52
  Uniprot ID: Q9Y2T5
  ENST ID: ENST00000367685
  CDS Start-End: 2-1087
catgaatgaatccaggtggactgaatggaggatcctgaacatgagcagtggcattgtgaatgtgtccgagcgtcactcctgcccacttggatttggccactacagtgtggtggatgtctgcatcttcgagacagtggttattgtgttgctgacatttctgatcattgctgggaatctaacagttatctttgtctttcattgtgctccactgttacatcattatactaccagctatttcattcagacgatggcatatgctgatcttttcgttggagttagctgcttggttcctactctgtcacttctccactactccacaggtgtccacgagtcattgacttgccaggtttttggatatatcatctcagttctaaaaagtgtttctatggcatgtcttgcttgcatcagtgtggatcgttatcttgcaataaccaagcctctttcctacaatcaactggtcaccccttgtcgcttgagaatttgcattattttgatctggatctactcctgcctaattttcttgccttccttttttggctgggggaaacctggttaccatggtgacatttttgaatggtgtgccacgtcttggctcaccagtgcctattttactggctttattgtttgtttactttatgctcctgctgcctttgttgtctgcttcacttacttccacattttcaaaatttgccgtcagcacaccaaagagataaatgaccgaagagcccgattccctagtcatgaggtagattcttccagagagactggacacagccctgaccgtcgctacgccatggttttgtttaggataaccagtgtattttatatgctgtggctcccctatataatttactttcttctagaaagctcccgggtcttggacaatccaactctgtccttcttaacaacctggcttgcaataagtaatagtttttgtaactgtgtaatatacagcctctccaacagcgttttccggctaggcctccgaagactgtctgagacaatgtgcacatcctgtatgtgtgtgaaggatcaggaagcacaagaacccaaacctaggaaacgggctaattcttgctccatttgaa

SEQ ID NO: 136013 - DNA, 1523 bp, Homo sapiens
  Payload ID: 6615
  Gene Symbol: GPR55
  Gene Name: G protein-coupled receptor 55
  Uniprot ID: Q9Y2T6
  ENST ID: ENST00000392039
  CDS Start-End: 427-1386
agaatgctctgggctttcaaaatggttacttttcggctgggcatggttttaaatggttacttttcctctcctgttgcctgaagcctggggatttttctcctgtcttcacagtgagaaactggtgaccttcctggaggtaaccccaggaaaatgtggggcttccctactacagggaccccaggactttatgacacttaagctagcccaaacactcagcctccagcaattcgtcaggtaccatgtaagtgctcctacaagttgccggctcctgggtggcttctgcttctggaagttgtgattcaatgggcatgaattgctgtgtgatgctggggaggtgtttgtgattcttgacaaagtcatttgaatccatcacttcaagagagtgaaaggagccccgtctgatctgttggtgttgtaggaagaaacatgagtcagcaaaacaccagtggggactgcctgtttgacggtgtcaacgagctgatgaaaaccctacagtttgcagtccacatccccaccttcgtcctgggcctgctcctcaacctgctggccatccatggcttcagcaccttccttaagaacaggtggcccgattatgctgccacctccatctacatgatcaacctggcagtctttgacctgctgctggtgctctccctcccattcaagatggtcctgtcccaggtacagtcccccttcccgtccctgtgcaccctggtggagtgcctttacttcgtcagcatgtacggaagcgtcttcaccatctgcttcatcagcatggaccggttcttggccatccgttacccgctactggtgagccacctccggtcccccaggaagatctttgggatctgctgcaccatctgggtcctggtgtggaccggaagcatccctatctacagtttccatgggaaagtggaaaaatacatgtgcttccacaacatgtctgatgatacctggagcgccaaggtcttcttcccgctggaggtgtttggcttcctccttcccatgggcatcatgggcttctgctgctccaggagcatccacatcctgctgggccgccgagaccacacccaggactgggtgcagcagaaagcctgcatctacagcatcgcagccagcctggctgtcttcgtggtctccttcctcccagtccacctggggttcttcctgcagttcctggtgagaaacagctttatcgtagagtgcagagccaagcagagcatcagcttcttcttgcaattgtccatgtgtttctccaacgtcaactgctgcctggatgttttctgctactactttgtcatcaaagaattccgcatgaacatcagggcccaccggccttccagggtccagctggtcctgcaggacaccacgatctcccggggctaacggaaggacatcctgttcaggggaagaaagccctggccctgaattctggtaacggatatcgcgttccagggttttgatgtggtgggatgatccgcaccatcttcactgatgtgcttccctttgatgcccattgagtg

SEQ ID NO: 136014 - DNA, 3828 bp, Homo sapiens
  Payload ID: 6615
  Gene Symbol: GPR55
  Gene Name: G protein-coupled receptor 55
  Uniprot ID: Q9Y2T6
  ENST ID: ENST00000392040
  CDS Start-End: 194-1153
caggcctggaggagaaatgacatctctcagccctctcagctgcaccggaccaccaacagttgtgattcaatgggcatgaattgctgtgtgatgctggggaggtgtttgtgattcttgacaaagtcatttgaatccatcacttcaagagagtgaaaggagccccgtctgatctgttggtgttgtaggaagaaacatgagtcagcaaaacaccagtggggactgcctgtttgacggtgtcaacgagctgatgaaaaccctacagtttgcagtccacatccccaccttcgtcctgggcctgctcctcaacctgctggccatccatggcttcagcaccttccttaagaacaggtggcccgattatgctgccacctccatctacatgatcaacctggcagtctttgacctgctgctggtgctctccctcccattcaagatggtcctgtcccaggtacagtcccccttcccgtccctgtgcaccctggtggagtgcctttacttcgtcagcatgtacggaagcgtcttcaccatctgcttcatcagcatggaccggttcttggccatccgttacccgctactggtgagccacctccggtcccccaggaagatctttgggatctgctgcaccatctgggtcctggtgtggaccggaagcatccctatctacagtttccatgggaaagtggaaaaatacatgtgcttccacaacatgtctgatgatacctggagcgccaaggtcttcttcccgctggaggtgtttggcttcctccttcccatgggcatcatgggcttctgctgctccaggagcatccacatcctgctgggccgccgagaccacacccaggactgggtgcagcagaaagcctgcatctacagcatcgcagccagcctggctgtcttcgtggtctccttcctcccagtccacctggggttcttcctgcagttcctggtgagaaacagctttatcgtagagtgcagagccaagcagagcatcagcttcttcttgcaattgtccatgtgtttctccaacgtcaactgctgcctggatgttttctgctactactttgtcatcaaagaattccgcatgaacatcagggcccaccggccttccagggtccagctggtcctgcaggacaccacgatctcccggggctaacggaaggacatcctgttcaggggaagaaagccctggccctgaattctggtaacggatatcgcgttccagggttttgatgtggtgggatgatccgcaccatcttcactgatgtgcttccctttgatgcccattgagtgccagctttgctcattataccccaaagaccttttttccactgcccagacagcttataccacccagtgttcagggatctctgaagaacccacagaccaggtgaattactgatttctaagtccaaaaactatagagcagaagaattgagaaagagaatgagaccatgtcaacaaggctgtttccaactctccccattttcctgttcgactgggaggttctggaaagaaagagagagagagaaaagaggtaaaggagggagccaagagagtcagttattggggagagtgtcttgggcagaggtggggtggtagggatgagtgaagtccctttttagtttgggtgtcccagaacagagcagacttgcattttccagtcccttctggaactgtgttgccaaaagcctcactgagatgacagcaagaaggggtggtgttggggctgggcaagtagcatggatcaccccaagtttccagtgagcctcagaaaggtgaaggaagccagccacacctttccgtgcccgtgagaagactgcaaaatgactgagtggggtgttgatgacatccaagagccatgaggggggagaggaaaggacacttctggggaaggaagaagacaggcccagggctggaagcacacagcccctcccctatcaccatcagggtgtccacagcacggagtgttggtgctggcccagggtgaagagagacagtgagagacggcctgggagcggggagaccccgacctgctttctatcttaaacagactgggaagttgctcattacagctagcttccttgaaaacaatggcaaagaatcaggcctgccttggttccaccataggagggtggaggaggtgctgtcttactcacctgcatcctggctgggcagctggcacccgtggcactgcccatggagccgtccctccctggcagctgggagggagatgaggcagctaggcacaagggtgtggccttgagaaagaaggcaagggggggtccctgctggtcccaggaaactgtaaacaattgagtcacgcctggatggcttctcaacggatctggaggaggagtgcaagtgacagcggaagcctcccaatgactcagctgctccggagagtgaaatgatgagaaggatccattgtggggtggttttgcatgacagagcgagtgggatgaggagtaactgatgagacttcatgtgagcaaggtcttcaggaggaaaagcaactgaggtctacttgtaggatctgggctcagtgggggctgaagggcttgggaggggtggtgacctgaggggaagaagagaagcatttggataaacctggacctgtggggaggaggaggaggaagaggaagaggaaaaggaggggaagctgagccgtggccctaggcttgaagcctgcagggagtgcagggtgggtggggaacctggctgagctgcttcctgcctgagagctttcccagctggcctaagagccatggacggacaggagtcgccttctcaggagcagctcccgctgttgctgtgttcaagtggcaccctgtacacctcctcctaggtggatggagggaagggtgaggaagagagcgtcaatgaaggggtggaagtggatgtggaggagtgaccagaccagaccagaccagaccagagggatcggaggctcaggccccctgagctgggcctctaagaaccacagccacagagtcaggctctgcagacccagaggtaaggctgcctggctgccccaaaccccagacactcctctccttgcctgcaggctgccctctcccatggccaccctagacagagacccacccgtgatactctgagggagccagactttcacatgcaacggggcatttggggctggttcgggtcagtgtctacgggtggtggatttagtgaccaccctcctcccacttctttctctgcacgaggagttgggagcctgcctggtggagttgagtgatgcccgtcatgtgcacttgggtctaccaatgtgcttaaggccagatgggcttcctaagagacaagggtgggtggacctaaccaactatcatccccagcgatgttcaaacataaaatcttatctatgtgcagcatgactctctccaggtgacagaaagggctctagacagctgagaggacctgatcatgtagggagggacggggaggggagccaggacccaggagctgcatggctgtaagaggaaggtccttggagggtatcagcagtctcagtgtgatgtgacaactatggacctgtgggtgtgccctggggacccctgacccatcccaaaacactgtggaaagaagggcctcttctccgtggggacccgtgtctgtgggagcgggcacaggtccatgctgcaggccactacggctgctcggcaggagggccgagagtttggacccacatagctgcaacccaagctggcccataatcagcagtggggcccagcagcacaggaggggcggacggttagctttggaaaaaatgacttgattaatctgattcgccaaataaatagattcatgtga

SEQ ID NO: 136015 - DNA, 2527 bp, Homo sapiens
  Payload ID: 6615
  Gene Symbol: GPR55
  Gene Name: G protein-coupled receptor 55
  Uniprot ID: Q9Y2T6
  ENST ID: ENST00000444078
  CDS Start-End: 194-1153
caggcctggaggagaaatgacatctctcagccctctcagctgcaccggaccaccaacagttgtgattcaatgggcatgaattgctgtgtgatgctggggaggtgtttgtgattcttgacaaagtcatttgaatccatcacttcaagagagtgaaaggagccccgtctgatctgttggtgttgtaggaagaaacatgagtcagcaaaacaccagtggggactgcctgtttgacggtgtcaacgagctgatgaaaaccctacagtttgcagtccacatccccaccttcgtcctgggcctgctcctcaacctgctggccatccatggcttcagcaccttccttaagaacaggtggcccgattatgctgccacctccatctacatgatcaacctggcagtctttgacctgctgctggtgctctccctcccattcaagatggtcctgtcccaggtacagtcccccttcccgtccctgtgcaccctggtggagtgcctttacttcgtcagcatgtacggaagcgtcttcaccatctgcttcatcagcatggaccggttcttggccatccgttacccgctactggtgagccacctccggtcccccaggaagatctttgggatctgctgcaccatctgggtcctggtgtggaccggaagcatccctatctacagtttccatgggaaagtggaaaaatacatgtgcttccacaacatgtctgatgatacctggagcgccaaggtcttcttcccgctggaggtgtttggcttcctccttcccatgggcatcatgggcttctgctgctccaggagcatccacatcctgctgggccgccgagaccacacccaggactgggtgcagcagaaagcctgcatctacagcatcgcagccagcctggctgtcttcgtggtctccttcctcccagtccacctggggttcttcctgcagttcctggtgagaaacagctttatcgtagagtgcagagccaagcagagcatcagcttcttcttgcaattgtccatgtgtttctccaacgtcaactgctgcctggatgttttctgctactactttgtcatcaaagaattccgcatgaacatcagggcccaccggccttccagggtccagctggtcctgcaggacaccacgatctcccggggctaacggaaggacatcctgttcaggggaagaaagccctggccctgaattctggtaacggatatcgcgttccagggttttgatgtggtgggatgatccgcaccatcttcactgatgtgcttccctttgatgcccattgagtgccagctttgctcattataccccaaagaccttttttccactgcccagacagcttataccacccagtgttcagggatctctgaagaacccacagaccaggtgaattactgatttctaagtccaaaaactatagagcagaagaattgagaaagagaatgagaccatgtcaacaaggctgtttccaactctccccattttcctgttcgactgggaggttctggaaagaaagagagagagagaaaagaggtggatggagggaagggtgaggaagagagcgtcaatgaaggggtggaagtggatgtggaggagtgaccagaccagaccagaccagaccagagggatcggaggctcaggccccctgagctgggcctctaagaaccacagccacagagtcaggctctgcagacccagaggtaaggctgcctggctgccccaaaccccagacactcctctccttgcctgcaggctgccctctcccatggccaccctagacagagacccacccgtgatactctgagggagccagactttcacatgcaacggggcatttggggctggttcgggtcagtgtctacgggtggtggatttagtgaccaccctcctcccacttctttctctgcacgaggagttgggagcctgcctggtggagttgagtgatgcccgtcatgtgcacttgggtctaccaatgtgcttaaggccagatgggcttcctaagagacaagggtgggtggacctaaccaactatcatccccagcgatgttcaaacataaaatcttatctatgtgcagcatgactctctccaggtgacagaaagggctctagacagctgagaggacctgatcatgtagggagggacggggaggggagccaggacccaggagctgcatggctgtaagaggaaggtccttggagggtatcagcagtctcagtgtgatgtgacaactatggacctgtgggtgtgccctggggacccctgacccatcccaaaacactgtggaaagaagggcctcttctccgtggggacccgtgtctgtgggagcgggcacaggtccatgctgcaggccactacggctgctcggcaggagggccgagagtttggacccacatagctgcaacccaagctggcccataatcagcagtggggcccagcagcacaggaggggcggacggttagctttggaaaaaatgacttgattaatctgattcgccaaataaatagattcatgtgatgccttgtga

SEQ ID NO: 136016 - DNA, 919 bp, Homo sapiens
  Payload ID: 6615
  Gene Symbol: GPR55
  Gene Name: G protein-coupled receptor 55
  ENST ID: ENST00000438398
  CDS Start-End: 194-919
caggcctggaggagaaatgacatctctcagccctctcagctgcaccggaccaccaacagttgtgattcaatgggcatgaattgctgtgtgatgctggggaggtgtttgtgattcttgacaaagtcatttgaatccatcacttcaagagagtgaaaggagccccgtctgatctgttggtgttgtaggaagaaacatgagtcagcaaaacaccagtggggactgcctgtttgacggtgtcaacgagctgatgaaaaccctacagtttgcagtccacatccccaccttcgtcctgggcctgctcctcaacctgctggccatccatggcttcagcaccttccttaagaacaggtggcccgattatgctgccacctccatctacatgatcaacctggcagtctttgacctgctgctggtgctctccctcccattcaagatggtcctgtcccaggtacagtcccccttcccgtccctgtgcaccctggtggagtgcctttacttcgtcagcatgtacggaagcgtcttcaccatctgcttcatcagcatggaccggttcttggccatccgttacccgctactggtgagccacctccggtcccccaggaagatctttgggatctgctgcaccatctgggtcctggtgtggaccggaagcatccctatctacagtttccatgggaaagtggaaaaatacatgtgcttccacaacatgtctgatgatacctggagcgccaaggtcttcttcccgctggaggtgtttggcttcctccttcccatgggcatcatgggcttctgctgctccaggagcatccacatcctgctgggccgccgagaccacacccaggactgggtgcagcagaaagcctgcatctacagcatcgcagccagcctggctgtcttcgtggtctccttcctcccagtc

SEQ ID NO: 136017 - DNA, 2526 bp, Homo sapiens
  Payload ID: 6615
  Gene Symbol: GPR55
  Gene Name: G protein-coupled receptor 55
  Uniprot ID: Q9Y2T6
  ENST ID: ENST00000622008
  CDS Start-End: 194-1153
caggcctggaggagaaatgacatctctcagccctctcagctgcaccggaccaccaacagttgtgattcaatgggcatgaattgctgtgtgatgctggggaggtgtttgtgattcttgacaaagtcatttgaatccatcacttcaagagagtgaaaggagccccgtctgatctgttggtgttgtaggaagaaacatgagtcagcaaaacaccagtggggactgcctgtttgacggtgtcaacgagctgatgaaaaccctacagtttgcagtccacatccccaccttcgtcctgggcctgctcctcaacctgctggccatccatggcttcagcaccttccttaagaacaggtggcccgattatgctgccacctccatctacatgatcaacctggcagtctttgacctgctgctggtgctctccctcccattcaagatggtcctgtcccaggtacagtcccccttcccgtccctgtgcaccctggtggagtgcctttacttcgtcagcatgtacggaagcgtcttcaccatctgcttcatcagcatggaccggttcttggccatccgttacccgctactggtgagccacctccggtcccccaggaagatctttgggatctgctgcaccatctgggtcctggtgtggaccggaagcatccctatctacagtttccatgggaaagtggaaaaatacatgtgcttccacaacatgtctgatgatacctggagcgccaaggtcttcttcccgctggaggtgtttggcttcctccttcccatgggcatcatgggcttctgctgctccaggagcatccacatcctgctgggccgccgagaccacacccaggactgggtgcagcagaaagcctgcatctacagcatcgcagccagcctggctgtcttcgtggtctccttcctcccagtccacctggggttcttcctgcagttcctggtgagaaacagctttatcgtagagtgcagagccaagcagagcatcagcttcttcttgcaattgtccatgtgtttctccaacgtcaactgctgcctggatgttttctgctactactttgtcatcaaagaattccgcatgaacatcagggcccaccggccttccagggtccagctggtcctgcaggacaccacgatctcccggggctaacggaaggacatcctgttcaggggaagaaagccctggccctgaattctggtaacggatatcgcgttccagggttttgatgtggtgggatgatccgcaccatcttcactgatgtgcttccctttgatgcccattgagtgccagctttgctcattataccccaaagaccttttttccactgcccagacagcttataccacccagtgttcagggatctctgaagaacccacagaccaggtgaattactgatttctaagtccaaaaactatagagcagaagaattgagaaagagaatgagaccatgtcaacaaggctgtttccaactctccccattttcctgttcgactgggaggttctggaaagaaagagagagagagaaaagaggtggatggagggaagggtgaggaagagagcgtcaatgaaggggtggaagtggatgtggaggagtgaccagaccagaccagaccagaccagagggatcggaggctcaggccccctgagctgggcctctaagaaccacagccacagagtcaggctctgcagacccagaggtaaggctgcctggctgccccaaaccccagacactcctctccttgcctgcaggctgccctctcccatggccaccctagacagagacccacccgtgatactctgagggagccagactttcacatgcaacggggcatttggggctggttcgggtcagtgtctacgggtggtggatttagtgaccaccctcctcccacttctttctctgcacgaggagttgggagcctgcctggtggagttgagtgatgcccgtcatgtgcacttgggtctaccaatgtgcttaaggccagatgggcttcctaagagacaagggtgggtggacctaaccaactatcatccccagcgatgttcaaacataaaatcttatctatgtgcagcatgactctctccaggtgacagaaagggctctagacagctgagaggacctgatcatgtagggagggacggggaggggagccaggacccaggagctgcatggctgtaagaggaaggtccttggagggtatcagcagtctcagtgtgatgtgacaactatggacctgtgggtgtgccctggggacccctgacccatcccaaaacactgtggaaagaagggcctcttctccgtggggacccgtgtctgtgggagcgggcacaggtccatgctgcaggccactacggctgctcggcaggagggccgagagtttggacccacatagctgcaacccaagctggcccataatcagcagtggggcccagcagcacaggaggggcggacggttagctttggaaaaaatgacttgattaatctgattcgccaaataaatagattcatgtgatgccttgtg

SEQ ID NO: 136018 - DNA, 1089 bp, Homo sapiens
  Payload ID: 6616
  Gene Symbol: GPR6
  Gene Name: G protein-coupled receptor 6
  Uniprot ID: P46095
  ENST ID: ENST00000275169
  CDS Start-End: 1-1089
atgaacgcgagcgccgcctcgctcaacgactcccaggtggtggtagtggcggccgaaggagcggcggcggcggccacagcagcaggggggccggacacgggcgaatggggaccccctgctgcggcggctctaggagccggcggcggagctaatgggtctctggagctgtcctcgcagctgtcggctgggccaccgggactcctgctgccagcggtgaatccgtgggacgtgctcctgtgcgtgtcggggacagtgatcgctggagaaaacgcgctggtggtggcgctcatcgcgtccactccggcgctgcgcacgcccatgttcgtgctggtaggcagcctggccaccgctgacctgttggcgggctgtggcctcatcttgcactttgtgttccagtacttggtgccctcggagactgtgagtctgctcacggtgggcttcctcgtggcctccttcgccgcctctgtcagcagcctgctggccattacggtggaccgctacctgtccctgtataacgcgctcacctattactcgcgccggaccctgttgggcgtgcacctcctgcttgccgccacttggaccgtgtccctaggcctggggctgctgcccgtgctgggctggaactgcctggcagagcgcgccgcctgcagcgtggtgcgcccgctggcgcgcagccacgtggctctgctctccgccgccttcttcatggtcttcggcatcatgctgcacctgtacgtgcgcatctgccaggtggtctggcgccacgcgcaccagatcgcgctgcagcagcactgcctggcgccaccccatctcgctgccaccagaaagggtgtgggtacactggctgtggtgctgggcactttcggcgccagctggctgcccttcgccatctattgcgtggtgggcagccatgaggacccggcggtctacacttacgccaccctgctgcccgccacctacaactccatgatcaatcccatcatctatgccttccgcaaccaggagatccagcgcgccctgtggctcctgctctgtggctgtttccagtccaaagtgccctttcgttccaggtctcccagcgaggtctga

SEQ ID NO: 136019 - DNA, 1945 bp, Homo sapiens
  Payload ID: 6616
  Gene Symbol: GPR6
  Gene Name: G protein-coupled receptor 6
  Uniprot ID: P46095
  ENST ID: ENST00000414000
  CDS Start-End: 295-1428
aatctgcagcgcgcgccgctcgcagccgccttttctgccaccaactgtatctctcactcgcggagccggcacagcgacaggcgccccgcgcttgcctcctccccggcccggccgcctcctgcaggcagctgctctgtttgcgcggggagctcagcccggcgccccgcctcggcgcccatgaccagcgacttccagaagtcctgacgccccagcaccgcggacagcgtctctgctgcccagccccatggggatgtcctggtcgcgccgccacaacccaggcgggactctcccaggatgacactcctagcttggtgcactcggggtgcaaatccggccgcgatgaacgcgagcgccgcctcgctcaacgactcccaggtggtggtagtggcggccgaaggagcggcggcggcggccacagcagcaggggggccggacacgggcgaatggggaccccctgctgcggcggctctaggagccggcggcggagctaatgggtctctggagctgtcctcgcagctgtcggctgggccaccgggactcctgctgccagcggtgaatccgtgggacgtgctcctgtgcgtgtcggggacagtgatcgctggagaaaacgcgctggtggtggcgctcatcgcgtccactccggcgctgcgcacgcccatgttcgtgctggtaggcagcctggccaccgctgacctgttggcgggctgtggcctcatcttgcactttgtgttccagtacttggtgccctcggagactgtgagtctgctcacggtgggcttcctcgtggcctccttcgccgcctctgtcagcagcctgctggccattacggtggaccgctacctgtccctgtataacgcgctcacctattactcgcgccggaccctgttgggcgtgcacctcctgcttgccgccacttggaccgtgtccctaggcctggggctgctgcccgtgctgggctggaactgcctggcagagcgcgccgcctgcagcgtggtgcgcccgctggcgcgcagccacgtggctctgctctccgccgccttcttcatggtcttcggcatcatgctgcacctgtacgtgcgcatctgccaggtggtctggcgccacgcgcaccagatcgcgctgcagcagcactgcctggcgccaccccatctcgctgccaccagaaagggtgtgggtacactggctgtggtgctgggcactttcggcgccagctggctgcccttcgccatctattgcgtggtgggcagccatgaggacccggcggtctacacttacgccaccctgctgcccgccacctacaactccatgatcaatcccatcatctatgccttccgcaaccaggagatccagcgcgccctgtggctcctgctctgtggctgtttccagtccaaagtgccctttcgttccaggtctcccagcgaggtctgaagggctcgccccgtgtcctctcaccaacaccacaccccaacaagccagcctttggtaagctcggtgcctgctgacgaactctgagatcccaatggtgtgagtctgactttggaaagaaaaagggactaaagagaaatgtaacaaacttacaaggacaaagaggcttgttggcactttacatatacagtgtatacatgtgtacatatatatacaaatatttgtatcttctggaggtgttcaggatgtggagcttcctattctgtgaaaaaccaagaaaaagatatggttgtatactcaaattgtacatcacgtttgtcaaacgaagacattccaatactgcttaattatagcactttatttttagctgctgaactgccaaaacagtgttgccattttcaagggcagggaaaagggagtaaaaggtgtatttttgtcgtatgtgatagaatattttgctgcacatgcatcaacaaattacaacatgttttgtacacgaataaacccattacaagaatgt

SEQ ID NO: 136020 - DNA, 2834 bp, Homo sapiens
  Payload ID: 6617
  Gene Symbol: GPR61
  Gene Name: G protein-coupled receptor 61
  Uniprot ID: Q9BZJ8
  ENST ID: ENST00000404129
  CDS Start-End: 684-2039
gcagtgcttcaggcttcagcagccttggagaagcatcagctgagaggagctatcacatgggagccgggactgctcagcaaagatggatttatgaggaaactgaaattcagaagattcacagagttagtaatgcccagaactgggactagaaactaaattttgtgctccttctactccccagcagctcttgccattctgaggagacaagaaatcaggaaatttacataaggaaccctaaaactgaggcactatcccagagatcagcaggaccctgggaaggagaaacaggatttagaatccccggctaacagttctggaaagggtagaagggtatggagaacaagaatggcagaaaggagatggaaaaggaagaggtgaaggccattccgaaagcggagtgttgagtgggtcaggctcctgcacctctcacgtctcctgcttcttagcagtcaccaaggcagaccctgcagctacctccggccagaaaggggatgagcttctgatccttcagctgcctggcctggcgctctgtacgcagacaaacctgcccaagaggctccagtgggaggtgccccctacgaaaccaggaagcctgggcctgggctcgccatcccagggtcgctggactaggatgggggatgggcctgtgacaggaggtaccctgggtgccctctttcggccccatggagtcctcacccatcccccagtcatcagggaactcttccactttggggagggtccctcaaaccccaggtccctctactgccagtggggtcccggaggtggggctacgggatgttgcttcggaatctgtggccctcttcttcatgctcctgctggacttgactgctgtggctggcaatgccgctgtgatggccgtgatcgccaagacgcctgccctccgaaaatttgtcttcgtcttccacctctgcctggtggacctgctggctgccctgaccctcatgcccctggccatgctctccagctctgccctctttgaccacgccctctttggggaggtggcctgccgcctctacttgtttctgagcgtgtgctttgtcagcctggccatcctctcggtgtcagccatcaatgtggagcgctactattacgtagtccaccccatgcgctacgaggtgcgcatgacgctggggctggtggcctctgtgctggtgggtgtgtgggtgaaggccttggccatggcttctgtgccagtgttgggaagggtctcctgggaggaaggagctcccagtgtccccccaggctgttcactccagtggagccacagtgcctactgccagctttttgtggtggtctttgctgtcctttactttctgttgcccctgctcctcatacttgtggtctactgcagcatgttccgagtggcccgcgtggctgccatgcagcacgggccgctgcccacgtggatggagacaccccggcaacgctccgaatctctcagcagccgctccacgatggtcaccagctcgggggccccccagaccaccccacaccggacgtttgggggagggaaagcagcagtggttctcctggctgtggggggacagttcctgctctgttggttgccctacttctctttccacctctatgttgccctgagtgctcagcccatttcaactgggcaggtggagagtgtggtcacctggattggctacttttgcttcacttccaaccctttcttctatggatgtctcaaccggcagatccggggggagctcagcaagcagtttgtctgcttcttcaagccagctccagaggaggagctgaggctgcctagccgggagggctccattgaggagaacttcctgcagttccttcaggggactggctgtccttctgagtcctgggtttcccgacccctacccagccccaagcaggagccacctgctgttgactttcgaatcccaggccagatagctgaggagacctctgagttcctggagcagcaactcaccagcgacatcatcatgtcagacagctacctccgtcctgccgcctcaccccggctggagtcatgatgggccgctggacactcggagggatatggggctggggccagttatgattgcaaggaccaccttgtgggatcaccttttcccagctggctagggctgaggctggggtctctgcacacagcttttgcttagtgtttcctgggtcaggaacagagccaacaggatgaacgtgtgcaaaagccttggacttggctgtgatctttgactgctaggggagggaacctgggtatggtgagacggtgacgagagaaaagggtcacaaaggactggcctccctgatctctctcctcatggcagcgacccacctccagtcccctggacaatcgggtacaagagacttaaggttgggcatgggaagggtggggtttccatgatccattaaatgccttcctactcccattcatcgctctcaaaattagcttcagtgacaaagacttaaatctctctcctatctgcagcactgggttggagagagggcacgggagttggtcttggctgttcattgattgagactgtaggaactgtgttggttggtattggtggtggtattttcaacaaacagggaataactgcaaactggacaggacacccatctgggaccacctgtccatcctacttccctcaattgaatcaggtaacactaacggatcaaggcagggccagagggtggtgtggtctctatttgaacaaattcctggctcactgagcatcaaaaggggaaatgggctggtgggagtgggatagtctcccatttaagcagctaataaataatttttatgataaaaggttatactgata

SEQ ID NO: 136021 - DNA, 4921 bp, Homo sapiens
  Payload ID: 6617
  Gene Symbol: GPR61
  Gene Name: G protein-coupled receptor 61
  Uniprot ID: Q9BZJ8
  ENST ID: ENST00000527748
  CDS Start-End: 684-2039
gcagtgcttcaggcttcagcagccttggagaagcatcagctgagaggagctatcacatgggagccgggactgctcagcaaagatggatttatgaggaaactgaaattcagaagattcacagagttagtaatgcccagaactgggactagaaactaaattttgtgctccttctactccccagcagctcttgccattctgaggagacaagaaatcaggaaatttacataaggaaccctaaaactgaggcactatcccagagatcagcaggaccctgggaaggagaaacaggatttagaatccccggctaacagttctggaaagggtagaagggtatggagaacaagaatggcagaaaggagatggaaaaggaagaggtgaaggccattccgaaagcggagtgttgagtgggtcaggctcctgcacctctcacgtctcctgcttcttagcagtcaccaaggcagaccctgcagctacctccggccagaaaggggatgagcttctgatccttcagctgcctggcctggcgctctgtacgcagacaaacctgcccaagaggctccagtgggaggtgccccctacgaaaccaggaagcctgggcctgggctcgccatcccagggtcgctggactaggatgggggatgggcctgtgacaggaggtaccctgggtgccctctttcggccccatggagtcctcacccatcccccagtcatcagggaactcttccactttggggagggtccctcaaaccccaggtccctctactgccagtggggtcccggaggtggggctacgggatgttgcttcggaatctgtggccctcttcttcatgctcctgctggacttgactgctgtggctggcaatgccgctgtgatggccgtgatcgccaagacgcctgccctccgaaaatttgtcttcgtcttccacctctgcctggtggacctgctggctgccctgaccctcatgcccctggccatgctctccagctctgccctctttgaccacgccctctttggggaggtggcctgccgcctctacttgtttctgagcgtgtgctttgtcagcctggccatcctctcggtgtcagccatcaatgtggagcgctactattacgtagtccaccccatgcgctacgaggtgcgcatgacgctggggctggtggcctctgtgctggtgggtgtgtgggtgaaggccttggccatggcttctgtgccagtgttgggaagggtctcctgggaggaaggagctcccagtgtccccccaggctgttcactccagtggagccacagtgcctactgccagctttttgtggtggtctttgctgtcctttactttctgttgcccctgctcctcatacttgtggtctactgcagcatgttccgagtggcccgcgtggctgccatgcagcacgggccgctgcccacgtggatggagacaccccggcaacgctccgaatctctcagcagccgctccacgatggtcaccagctcgggggccccccagaccaccccacaccggacgtttgggggagggaaagcagcagtggttctcctggctgtggggggacagttcctgctctgttggttgccctacttctctttccacctctatgttgccctgagtgctcagcccatttcaactgggcaggtggagagtgtggtcacctggattggctacttttgcttcacttccaaccctttcttctatggatgtctcaaccggcagatccggggggagctcagcaagcagtttgtctgcttcttcaagccagctccagaggaggagctgaggctgcctagccgggagggctccattgaggagaacttcctgcagttccttcaggggactggctgtccttctgagtcctgggtttcccgacccctacccagccccaagcaggagccacctgctgttgactttcgaatcccaggccagatagctgaggagacctctgagttcctggagcagcaactcaccagcgacatcatcatgtcagacagctacctccgtcctgccgcctcaccccggctggagtcatgatgggccgctggacactcggagggatatggggctggggccagttatgattgcaaggaccaccttgtgggatcaccttttcccagctggctagggctgaggctggggtctctgcacacagcttttgcttagtgtttcctgggtcaggaacagagccaacaggatgaacgtgtgcaaaagccttggacttggctgtgatctttgactgctaggggagggaacctgggtatggtgagacggtgacgagagaaaagggtcacaaaggtgaggtgaaacctctcaattggtgaaatttccatgcttccagaagcagggaattctctaagggtaggagttggaggatacagggcagcaggccaggtttggagttattctaggggccatttaggatattttatttttcagtgtaattgtccagggcagtaattgcacccaagcaaggtaagaaaatgacccatgttttctcatttccttgctaggtttaaaaagaactaaattatagccaagtgtttccacttgagttaatagatcatttttctggttttatacctgagatttccttaaaatgagaggaccagtagggtgtattcctttactgagtttggccagaaacaaggcaaaatagaaattagggtacatggagtagaagataggaaagctgactgcagctctctctctcccacccttcaggaaaagcccttctgttctatttttctgtctctctcctgcacacaggagatcaagggtagagcctgatcttagcagagacaagaataaggcaggatggctttcctctcttttaggaggaagaattagaatgactgggggtcagacgggcgagggtggaggttagcatttgaattggtaaagtagctggaaacagagaggccaggtaatcagcctgatcaataatactgcgaatcttttctttccaggactggcctccctgatctctctcctcatggcagcgacccacctccagtcccctggacaatcgggtacaagagacttaaggttgggcatgggaagggtggggtttccatgatccattaaatgccttcctactcccattcatcgctctcaaaattagcttcagtgacaaagacttaaatctctctcctatctgcagcactgggttggagagagggcacgggagttggtcttggctgttcattgattgagactgtaggaactgtgttggttggtattggtggtggtattttcaacaaacagggaataactgcaaactggacaggacacccatctgggaccacctgtccatcctacttccctcaattgaatcaggtaacactaacggatcaaggcagggccagagggtggtgtggtctctatttgaacaaattcctggctcactgagcatcaaaaggggaaatgggctggtgggagtgggatagtctcccatttaagcagctaataaataatttttatgataaaaggttatactgataacaacattgactcctttagttcaattcagtgcataatagttgaacacccactagtccctgggacccacacagggcgtgtggtcattgcttttaaggagttcatagtctaagttgatgagataccttatattttcacaaagcactttgatttgataaagcactacagaatgtgcttgagaaatatattggagaatatgtccatggctctaacttctgagagttcagcccgtggcagcaagatgcataccttgaagcttcctgcagattgtggaaagcataggggttgtaaatgaaactctctaatgaagaaaaaaaattaaatgaaactgggcaaacagctttccccctttgttctaggaaaatttctaggttgtcttcctaccactagattattataccagtctagtgcctattacattgtggaagttccctaaaaacatagtatatatagggaggagagtcctttgtgattgaaaaacatgttcacctctcctccctattaaaataaatgcatacagaggaatcaatcattcctagacagggaaaaaactcttctttcaaacaccactgatcagctattagatccaaggaattgccagcaggtggcagtgtgagcccaatggaaggaggaaaggcgagtgtacgtggtgggaggaggaaggggagggcattaaacattgcctggcagccattttgttaatttattttgccttttcctttgactttgccctccagcccttccttcacatacatcaaagaagaaagttttaagagcaagggtatctttaattcaggctgaaatttcctgacactgtgatctcactggtgtttattacagagtttgacatacatgggttcatttgccatttatttttccctgtaggagtggatcatgaaggaaataaaaatttctcttttattatgctgagaactttcccaacaatttctgctatgaccaccttccaggagttttctagtcaccagatgccttggtaaagttcaatacgtaatctttggctctgaaagctgttcctggacaaaatctgagctaactcactgaagaatcaacagattgaggcaaccatccggtcagttactttttcctgcatcctgctggtgttggggtaactcccaatcctagatgaaaaccttagactttctgttgtcaggtgtccccaggcaatatcctacgggggcatgatagaaaagggtaactctggggtcagatagatgtacttactcactgtgtgaagttgggaaagctgcttaatttctctgagcctacttcctcacctgtaaaaatggggatcattattacctacctcacagggttgttgtgaggattaagagatgggatgtgggagcacctagccgtatctggcaaataggtactcaataaatactggttttacttcc

SEQ ID NO: 136022 - DNA, 2557 bp, Homo sapiens
  Payload ID: 6617
  Gene Symbol: GPR61
  Gene Name: G protein-coupled receptor 61
  Uniprot ID: Q9BZJ8
  ENST ID: ENST00000469383
  CDS Start-End: 635-1990
ctatcacatgggagccgggactgctcagcaaagatggatttatgaggaaactgaaattcagaagattcacagagttagtaatgcccagaactgggactagaaactaaattttgtgctccttctactccccagcagctcttgccattctgaggagacaagaaatcaggaaatttacataaggaaccctaaaactgaggcactatcccagagatcagcaggaccctgggaaggagaaacaggatttagaatccccggctaacagttctggaaagggtagaagggtatggagaacaagaatggcagaaaggagatggaaaaggaagaggtgaaggccattccgaaagcggagtgttgagtgggtcaggctcctgcacctctcacgtctcctgcttcttagcagtcaccaaggcagaccctgcagctacctccggccagaaaggggatgagcttctgatccttcagctgcctggcctggcgctctgtacgcagacaaacctgcccaagaggctccagtgggaggtgccccctacgaaaccaggaagcctgggcctgggctcgccatcccagggtcgctggactaggatgggggatgggcctgtgacaggaggtaccctgggtgccctctttcggccccatggagtcctcacccatcccccagtcatcagggaactcttccactttggggagggtccctcaaaccccaggtccctctactgccagtggggtcccggaggtggggctacgggatgttgcttcggaatctgtggccctcttcttcatgctcctgctggacttgactgctgtggctggcaatgccgctgtgatggccgtgatcgccaagacgcctgccctccgaaaatttgtcttcgtcttccacctctgcctggtggacctgctggctgccctgaccctcatgcccctggccatgctctccagctctgccctctttgaccacgccctctttggggaggtggcctgccgcctctacttgtttctgagcgtgtgctttgtcagcctggccatcctctcggtgtcagccatcaatgtggagcgctactattacgtagtccaccccatgcgctacgaggtgcgcatgacgctggggctggtggcctctgtgctggtgggtgtgtgggtgaaggccttggccatggcttctgtgccagtgttgggaagggtctcctgggaggaaggagctcccagtgtccccccaggctgttcactccagtggagccacagtgcctactgccagctttttgtggtggtctttgctgtcctttactttctgttgcccctgctcctcatacttgtggtctactgcagcatgttccgagtggcccgcgtggctgccatgcagcacgggccgctgcccacgtggatggagacaccccggcaacgctccgaatctctcagcagccgctccacgatggtcaccagctcgggggccccccagaccaccccacaccggacgtttgggggagggaaagcagcagtggttctcctggctgtggggggacagttcctgctctgttggttgccctacttctctttccacctctatgttgccctgagtgctcagcccatttcaactgggcaggtggagagtgtggtcacctggattggctacttttgcttcacttccaaccctttcttctatggatgtctcaaccggcagatccggggggagctcagcaagcagtttgtctgcttcttcaagccagctccagaggaggagctgaggctgcctagccgggagggctccattgaggagaacttcctgcagttccttcaggggactggctgtccttctgagtcctgggtttcccgacccctacccagccccaagcaggagccacctgctgttgactttcgaatcccaggccagatagctgaggagacctctgagttcctggagcagcaactcaccagcgacatcatcatgtcagacagctacctccgtcctgccgcctcaccccggctggagtcatgatgggccgctggacactcggagggatatggggctggggccagttatgattgcaaggaccaccttgtgggatcaccttttcccagctggctagggctgaggctggggtctctgcacacagcttttgcttagtgtttcctgggtcaggaacagagccaacaggatgaacgtgtgcaaaagccttggacttggctgtgatctttgactgctaggggagggaacctgggtatggtgagacggtgacgagagaaaagggtcacaaaggactggcctccctgatctctctcctcatggcagcgacccacctccagtcccctggacaatcgggtacaagagacttaaggagtggatcatgaaggaaataaaaatttctcttttattatgctgagaactttcccaacaatttctgctatgaccaccttccaggagttttctagtcaccagatgccttggtaaagttcaatacgtaatctttggctctgaaagctgttcctggacaaaatctgagctaactcactgaagaatcaacagattgaggcaaccatccggtagccgaaaggtaaatgaggc

SEQ ID NO: 136023 - DNA, 2459 bp, Homo sapiens
  Payload ID: 6617
  Gene Symbol: GPR61
  Gene Name: G protein-coupled receptor 61
  Uniprot ID: Q9BZJ8
  ENST ID: ENST00000616874
  CDS Start-End: 320-1675
tcagcagccttggagaagcatcagctgagaggagctatcacatgggagccgggactgctcagcaaagatggatttatgaggaaactgaaattcagaagattcacagagttagtaatgcccagaactgggactagaaactaaattttgtgctccttctactccccagcagctcttgccattctgaggagacaagaaatcaggaaatttacataaggaaccctaaaactgaggcactatcccagagatcagcagggtcgctggactaggatgggggatgggcctgtgacaggaggtaccctgggtgccctctttcggccccatggagtcctcacccatcccccagtcatcagggaactcttccactttggggagggtccctcaaaccccaggtccctctactgccagtggggtcccggaggtggggctacgggatgttgcttcggaatctgtggccctcttcttcatgctcctgctggacttgactgctgtggctggcaatgccgctgtgatggccgtgatcgccaagacgcctgccctccgaaaatttgtcttcgtcttccacctctgcctggtggacctgctggctgccctgaccctcatgcccctggccatgctctccagctctgccctctttgaccacgccctctttggggaggtggcctgccgcctctacttgtttctgagcgtgtgctttgtcagcctggccatcctctcggtgtcagccatcaatgtggagcgctactattacgtagtccaccccatgcgctacgaggtgcgcatgacgctggggctggtggcctctgtgctggtgggtgtgtgggtgaaggccttggccatggcttctgtgccagtgttgggaagggtctcctgggaggaaggagctcccagtgtccccccaggctgttcactccagtggagccacagtgcctactgccagctttttgtggtggtctttgctgtcctttactttctgttgcccctgctcctcatacttgtggtctactgcagcatgttccgagtggcccgcgtggctgccatgcagcacgggccgctgcccacgtggatggagacaccccggcaacgctccgaatctctcagcagccgctccacgatggtcaccagctcgggggccccccagaccaccccacaccggacgtttgggggagggaaagcagcagtggttctcctggctgtggggggacagttcctgctctgttggttgccctacttctctttccacctctatgttgccctgagtgctcagcccatttcaactgggcaggtggagagtgtggtcacctggattggctacttttgcttcacttccaaccctttcttctatggatgtctcaaccggcagatccggggggagctcagcaagcagtttgtctgcttcttcaagccagctccagaggaggagctgaggctgcctagccgggagggctccattgaggagaacttcctgcagttccttcaggggactggctgtccttctgagtcctgggtttcccgacccctacccagccccaagcaggagccacctgctgttgactttcgaatcccaggccagatagctgaggagacctctgagttcctggagcagcaactcaccagcgacatcatcatgtcagacagctacctccgtcctgccgcctcaccccggctggagtcatgatgggccgctggacactcggagggatatggggctggggccagttatgattgcaaggaccaccttgtgggatcaccttttcccagctggctagggctgaggctggggtctctgcacacagcttttgcttagtgtttcctgggtcaggaacagagccaacaggatgaacgtgtgcaaaagccttggacttggctgtgatctttgactgctaggggagggaacctgggtatggtgagacggtgacgagagaaaagggtcacaaaggactggcctccctgatctctctcctcatggcagcgacccacctccagtcccctggacaatcgggtacaagagacttaaggttgggcatgggaagggtggggtttccatgatccattaaatgccttcctactcccattcatcgctctcaaaattagcttcagtgacaaagacttaaatctctctcctatctgcagcactgggttggagagagggcacgggagttggtcttggctgttcattgattgagactgtaggaactgtgttggttggtattggtggtggtattttcaacaaacagggaataactgcaaactggacaggacacccatctgggaccacctgtccatcctacttccctcaattgaatcaggtaacactaacggatcaaggcagggccagagggtggtgtggtctctatttgaacaaattcctggctcactgagcatcaaaaggggaaatgggctggtgggagtgggatagtctcccatttaagcagctaataaataatttttatgataaaagg

SEQ ID NO: 136024 - DNA, 2823 bp, Homo sapiens
  Payload ID: 6617
  Gene Symbol: GPR61
  Gene Name: G protein-coupled receptor 61
  Uniprot ID: Q9BZJ8
  ENST ID: ENST00000618721
  CDS Start-End: 684-2039
gcagtgcttcaggcttcagcagccttggagaagcatcagctgagaggagctatcacatgggagccgggactgctcagcaaagatggatttatgaggaaactgaaattcagaagattcacagagttagtaatgcccagaactgggactagaaactaaattttgtgctccttctactccccagcagctcttgccattctgaggagacaagaaatcaggaaatttacataaggaaccctaaaactgaggcactatcccagagatcagcaggaccctgggaaggagaaacaggatttagaatccccggctaacagttctggaaagggtagaagggtatggagaacaagaatggcagaaaggagatggaaaaggaagaggtgaaggccattccgaaagcggagtgttgagtgggtcaggctcctgcacctctcacgtctcctgcttcttagcagtcaccaaggcagaccctgcagctacctccggccagaaaggggatgagcttctgatccttcagctgcctggcctggcgctctgtacgcagacaaacctgcccaagaggctccagtgggaggtgccccctacgaaaccaggaagcctgggcctgggctcgccatcccagggtcgctggactaggatgggggatgggcctgtgacaggaggtaccctgggtgccctctttcggccccatggagtcctcacccatcccccagtcatcagggaactcttccactttggggagggtccctcaaaccccaggtccctctactgccagtggggtcccggaggtggggctacgggatgttgcttcggaatctgtggccctcttcttcatgctcctgctggacttgactgctgtggctggcaatgccgctgtgatggccgtgatcgccaagacgcctgccctccgaaaatttgtcttcgtcttccacctctgcctggtggacctgctggctgccctgaccctcatgcccctggccatgctctccagctctgccctctttgaccacgccctctttggggaggtggcctgccgcctctacttgtttctgagcgtgtgctttgtcagcctggccatcctctcggtgtcagccatcaatgtggagcgctactattacgtagtccaccccatgcgctacgaggtgcgcatgacgctggggctggtggcctctgtgctggtgggtgtgtgggtgaaggccttggccatggcttctgtgccagtgttgggaagggtctcctgggaggaaggagctcccagtgtccccccaggctgttcactccagtggagccacagtgcctactgccagctttttgtggtggtctttgctgtcctttactttctgttgcccctgctcctcatacttgtggtctactgcagcatgttccgagtggcccgcgtggctgccatgcagcacgggccgctgcccacgtggatggagacaccccggcaacgctccgaatctctcagcagccgctccacgatggtcaccagctcgggggccccccagaccaccccacaccggacgtttgggggagggaaagcagcagtggttctcctggctgtggggggacagttcctgctctgttggttgccctacttctctttccacctctatgttgccctgagtgctcagcccatttcaactgggcaggtggagagtgtggtcacctggattggctacttttgcttcacttccaaccctttcttctatggatgtctcaaccggcagatccggggggagctcagcaagcagtttgtctgcttcttcaagccagctccagaggaggagctgaggctgcctagccgggagggctccattgaggagaacttcctgcagttccttcaggggactggctgtccttctgagtcctgggtttcccgacccctacccagccccaagcaggagccacctgctgttgactttcgaatcccaggccagatagctgaggagacctctgagttcctggagcagcaactcaccagcgacatcatcatgtcagacagctacctccgtcctgccgcctcaccccggctggagtcatgatgggccgctggacactcggagggatatggggctggggccagttatgattgcaaggaccaccttgtgggatcaccttttcccagctggctagggctgaggctggggtctctgcacacagcttttgcttagtgtttcctgggtcaggaacagagccaacaggatgaacgtgtgcaaaagccttggacttggctgtgatctttgactgctaggggagggaacctgggtatggtgagacggtgacgagagaaaagggtcacaaaggactggcctccctgatctctctcctcatggcagcgacccacctccagtcccctggacaatcgggtacaagagacttaaggttgggcatgggaagggtggggtttccatgatccattaaatgccttcctactcccattcatcgctctcaaaattagcttcagtgacaaagacttaaatctctctcctatctgcagcactgggttggagagagggcacgggagttggtcttggctgttcattgattgagactgtaggaactgtgttggttggtattggtggtggtattttcaacaaacagggaataactgcaaactggacaggacacccatctgggaccacctgtccatcctacttccctcaattgaatcaggtaacactaacggatcaaggcagggccagagggtggtgtggtctctatttgaacaaattcctggctcactgagcatcaaaaggggaaatgggctggtgggagtgggatagtctcccatttaagcagctaataaataatttttatgataaaagg

SEQ ID NO: 136025 - DNA, 2191 bp, Homo sapiens
  Payload ID: 6618
  Gene Symbol: GPR62
  Gene Name: G protein-coupled receptor 62
  Uniprot ID: Q9BZJ7
  ENST ID: ENST00000322241
  CDS Start-End: 340-1446
cagggggctggcgccaggccctgcccctcccttgccagccgtgtgtggcaacatcagagtgacagccagtaccatctccgacaggggctgagttgctggagctgggctggggcaggggagaaagacagcagactcatccttgcacccctccatgggcctggccaagcccccaagaggatggcagcctgggcgtcggagccacctcctgggcagccaatgaggtgaggggccggaggagcaagggacaagaggagcagaggacaggtgatggaaatcctgcagctttaggctccattctgccatctacatcccagcgcagggtgaagcctgagagcccaaatggccaactccacagggctgaacgcctcagaagtcgcaggctcgttggggttgatcctggcagctgtcgtggaggtgggggcactgctgggcaacggcgcgctgctggtcgtggtgctgcgcacgccgggactgcgcgacgcgctctacctggcgcacctgtgcgtcgtggacctgctggcggccgcctccatcatgccgctgggcctgctggccgcaccgccgcccgggctgggccgcgtgcgcctgggccccgcgccatgccgcgccgctcgcttcctctccgccgctctgctgccggcctgcacgctcggggtggccgcacttggcctggcacgctaccgcctcatcgtgcacccgctgcggccaggctcgcggccgccgcctgtgctcgtgctcaccgccgtgtgggccgcggcgggactgctgggcgcgctctccctgctcggcacgccgcccgcaccgccccctgctcctgctcgctgctcggtcctggctgggggcctcgggcccttccggccgctctgggccctgctggccttcgcgctgcccgccctcctgctgctcggcgcctacggcggcatcttcgtggtggcgcgtcgcgctgccctgaggcccccacggccggcgcgcgggtcccgactccactcggactctctggatagccgcctttccatcttgccgccgctccggcctcgcctgcccgggggcaaggcggccctggccccagcgctggccgtgggccaatttgcagcctgctggctgccttatggctgcgcgtgcctggcgcccgcagcgcgggccgcggaagccgaagcggctgtcacctgggtcgcctactcggccttcgcggctcaccccttcctgtacgggctgctgcagcgccccgtgcgcttggcactgggccgcctctctcgccgtgcactgcctggacctgtgcgggcctgcactccgcaagcctggcacccgcgggcactcttgcaatgcctccagagacccccagagggccctgccgtaggcccttctgaggctccagaacagacccccgagttggcaggagggcggagccccgcataccaggggccacctgagagttctctctcctgagcaggagaaaggagggtggtttccgtgggggctcatccaacccctgcacaggtcacagcaggtgccctgctggatatctgggtctggaacaggaggagaaagggtgtctgctgcctggtgaggcccacggacttctgagagccaggaatcctgcggtctgggcccaacactgcatagcactgtgcataggccgacccttccttaggcctcagctttcccatctgcaccctgcagcatctctaagggcccctccagcataggtggtttgtgaaactcacaggtggtccccaggccaagatgggcaggtgtcacaaagaagagggccctaagggctcacaaccaaagtgatccgccaagcagggcagtatctgggttacagccacagcaggaagaaccactggagagacactcagaaggacttccctgacatctgcaccaaggagagtctggacaaagctactgaaactcctccacctgcttctaaaatgcccagaagacaactggaccagtttggtattagaagtaggaggctggacgacttcacccccaaagggtcctgaagccccagaactggcatgtggaaggggctgaggcctaattgaggttggtggattcacacatgggggtcctccaggacctcagctgcacccattttctggaggttttgctgcccacaacaccagtatttcacaacttcctggtcgctgagaatatttattcaaaaacagggattgaaaaaactgta

SEQ ID NO: 136026 - DNA, 5952 bp, Homo sapiens
  Payload ID: 6619
  Gene Symbol: GPR63
  Gene Name: G protein-coupled receptor 63
  Uniprot ID: Q9BZJ6
  ENST ID: ENST00000229955
  CDS Start-End: 347-1606
ctcccgccaccgccgcctgtatcgccgccgccgccaccacctcctcttcgttgtcctccttcctcctccgcctggcagcgttgttctctgcagcggaggagagaagtgctatgtcaggaaagttccgggagggactacatggagccatgctccctgggctcttccgcgggcgcccgcgcgctgcccttcgcttgaggcaaaaggactcttgtggaagatggaactcattgtccattttccagaatgtatttccaagcccatcaatgggacctgatactgctgttctgtgttgaaatgcttgaagaactcctgcatctctgcttgcatcttccatcctactgaaaccatggtcttctcggcagtgttgactgcgttccataccgggacatccaacacaacatttgtcgtgtatgaaaacacctacatgaatattacactccctccaccattccagcatcctgacctcagtccattgcttagatatagttttgaaaccatggctcccactggtttgagttccttgaccgtgaatagtacagctgtgcccacaacaccagcagcatttaagagcctaaacttgcctcttcagatcaccctttctgctataatgatattcattctgtttgtgtcttttcttgggaacttggttgtttgcctcatggtttaccaaaaagctgccatgaggtctgcaattaacatcctccttgccagcctagcttttgcagacatgttgcttgcagtgctgaacatgccctttgccctggtaactattcttactacccgatggatttttgggaaattcttctgtagggtatctgctatgtttttctggttatttgtgatagaaggagtagccatcctgctcatcattagcatagataggttccttattatagtccagaggcaggataagctaaacccatatagagctaaggttctgattgcagtttcttgggcaacttccttttgtgtagcttttcctttagccgtaggaaaccccgacctgcagataccttcccgagctccccagtgtgtgtttgggtacacaaccaatccaggctaccaggcttatgtgattttgatttctctcatttctttcttcatacccttcctggtaatactgtactcatttatgggcatactcaacacccttcggcacaatgccttgaggatccatagctaccctgaaggtatatgcctcagccaggccagcaaactgggtctcatgagtctgcagagacctttccagatgagcattgacatgggctttaaaacacgtgccttcaccactattttgattctctttgctgtcttcattgtctgctgggccccattcaccacttacagccttgtggcaacattcagtaagcacttttactatcagcacaacttttttgagattagcacctggctactgtggctctgctacctcaagtctgcattgaatccgctgatctactactggaggattaagaaattccatgatgcttgcctggacatgatgcctaagtccttcaagtttttgccgcagctccctggtcacacaaagcgacggatacgtcctagtgctgtctatgtgtgtggggaacatcggacggtggtgtgaatattggaactggctgacattttgggtgatgcttgttctttattgacattgaattctctttctcatagcctctccactttatttttttttatagggtttgtgtatgtatgtgtgtgagcagtgtaaagaaagaatggtaattatagttctgttaccaagaataaataataggaaagtgattacaaatattacctccagggttcaatagaaatcctcaatttagggtgaggagacttttttttggttttggggtttttccttgattgattttgttttcatagtgggaatcaggattgtgctttattgagcctgcagttacattgaattgtaggtgtttcgtgtgctgctaaggtatgcttatttgagtttatcaagactttttttttctggaagacactgctgcttttaccatcacattggagccaaacatctcaatcaatatatatttagttttattttaaaaactaacccaggaaggttagcgacattttaagggtcattactatttactttggtgcactttaagagataatgtacaaattaattcagtcttatttttcagaattgtttttatacatgatatgtgctttaggaaatgtgcattatcatttatgggaagatagttttaagaaatgttttatctgcatgtacagttgtaaaagagaacataaaatgtagatacttttctaagcacaatagcaactcttcaagcaatagcgcaaaatctaggagacaggatccttgcaaatttaaaaggtgaatgtagtgagggggatggcaagtggctggtacaggctgtggtgattccttttactcaagggtttttgtggagtatagggagaaggggttgatatttatggacacctatgtgtcaggcactgtgcatcattttatccttacaggatgttgtgaggtaggtattattgttttcatttttacaggtgaagaaagcaggtctcagagggactaaaatcctgcccaaggttagtggtagagctgggatccaaaaatctgtcagaatcctgagactgcgctgttccactgtgccacgcagacagttcattcagtttagatgtcacatagtcaagagggaactctatgcatcctttaattttttagactatgatattctttttaaaaattagcctttattttctaactaccaaaagaaatatgaaagcattacagaaacactggaaaatagaaaagaaaaaataaaatcacttacaaccactttttgttttttggagtctcgctttgccacccaggctggagtgcagtggtgtgatcatggctcattgtagcctcaacctcccaggctcaggtaatcctcctgtctcagcctcctgaatagctggaaccacacacacacacgcacacacaggtgtgtgccaccacacccagctatttttttgtattttcttttgtaaagacaaggtttcaccatgttgcccaggctggtctcagagtcctgagctcaaacgatctgcctgccttggcctcccaaaatgttgggattacaggcatgagccaccacatctgacctacaaccactttttaatgtgagacttaaaaatcttagataaataaggctgtgaagcaaaaccagtgatttttttttttgtttttgatttgcaaaacaagtgactgacaattattgagaaattaaagatagctatgtgtaggtcttgcccctgcgggtttggaggtttccagttgtccatctgtgttagttgtaagtgttctgggcagaatagtattgttgccccaatgcttgccctagcagagctggagtttgtgaacgtgctcagatgtgtgtctcctacaaagaagggaaaatgaaccctcgtctgagcctagaacaagttttaatagggcatgtctgacatttcaaattgtttttctcttgctgacagtctgcccccaggtgcatctagggccttggtcagcttctctgttaccagtggctcactttataaaacagcccacagggataagggctgaaaatatagccacttggctacatcattgactaattaagtaagttaactgtggatttatagcatcttttcaggatgttagtgttttgtgagccagtggaaaaaataagcttctatttcttcatttgtaaaaccagagagttggattagatgaatctctaacgtcctgtccagctcaaatgtgctttcctctatactagggtatagatttttgaagagcctagctgacttcagcatcacctcaccctttggtctccagtattacttctttacattttacttcattagctatttcttaatattaaatgtctgaagagtgtggcactgtatcaggagttggggcattgaaaggttgaagacatcatgaaatatctgggaaactctgctcttaaggaaattgcaccgatgttggaactcattgtccagttaaagagctctttggggactcaagcatattattcaacatgttgttttgggattatcttcaaatgatagtcacctacctctttcatttctaatttttattcacaggtaaaattgtttttgtccatagggattttataggacataagcactgtagtagatactagtagcattttgaagtgtattatgctctccattttccatataaactagatttcaagcagatattgataaggacattttttattagacttttctctgaggaaagtcagcatgatctgtattcatcttacatattgataggtcatgaagactcctttttggctggaggtgaaactgagctttgttttctttgttcctgttttatgggcagtctttaggtactttcatgctgcttaataggcagtgcctcatttggtgagagctctggagtgcctgccgagacgctccctgtttgtgaacaaagattatgaaggggtctttgtgagaattcagcagcaacactgaacagcagttctttttacactggattatcttgatctgatgagagtttacaaatcattttgaacatttttattatgtatacattgtgaaagctttaaaaataagtactatggagcacctttgagaaacgtaggtgcaaaatcatatgttgcctattcccccatattttcttgaggcagggaaagataccactactaattctcactgcttacaggcataatcagaaatggttttttgtttgcctgtttttccttctggctagtaagaagcgtaaaagagataatgaaatatttgtggtcaaaagaaagatgcaagggaaattccaaatagtatggagtaacattatttaaactttaatacatgtttaagcatccccaagggagcttgttaacagtacagattcctgggcctccagagggtctgtggttgagcccaggaatgtgcatttttattttattgagcactctgcctgactctggctcaggtagtccctgggaaactcttcaggaaacattcctgtagaaaatatatctatttaaatatcatctgttttatcccacaatgtttgtttcgtgttgcaagccattatcttctaggcatgggtaatccacattgagaggaaaatccacacaacattgtgcctgatttgctgccacctgtgtttgtgctggatcttgccagtgttagctttattttctttcaactggcaaaattctgataaagcatatagcttcacagtagagcaaaatgggtgacttaattgaaagtcatgactttcagcagtctaattatgctcatattttattttcttatagagagctgtctttattgtgtgtaattcccggaagaatgtaaagatttatctaattcctattgctctgccagttgtgttcaatgcaagcattgaagtaaaataaaaataacctttttaatatgtgtatttctgttgcccacaaagatatttaatttttttcttgatctttgtttttgtttatgtgaaaatatttacatatgtatcatttctgtatatatcacagaaaagttttcacttgcttgacattttattctacaatgatttttagtttaagtttaaagaatggctacattcagatttattttcacaactatagtcctgctaaactgccttcattgaaaactcagtttttatgataaaaaatatcaaagcacaagtttgttattggaggtaaattatacatttcttagatatctattggtactagacctttgtaattaaaattaatttattttacaatagtaactgacctgtatggaaaaaaaaacaaccttgaattatgggttctaatatttaaatatcgaaaaatatggttatttgtgcatattcttattacaaccaagaaaagaactcctgataagaaaataaataaatatttaacattt

SEQ ID NO: 136027 - DNA, 4522 bp, Homo sapiens
  Payload ID: 6620
  Gene Symbol: GPR65
  Gene Name: G protein-coupled receptor 65
  Uniprot ID: Q8IYL9
  ENST ID: ENST00000267549
  CDS Start-End: 559-1572
cctgtcccctcagcagtgttggtttctcttcttgacttgatgcaggcacagatttatcaagctcctcagtcaacaaacacatcaccggaagaaatatggaaggaaaggaattttaaaaggaaataccaatctctgtgcaaacaaagccttgtatattcatgtttgcaccaatctactgtgagatttatgaagaaaaacaaattgcggacaactctctatgtacacttacaaatgcctcagttgatgcttgtgggctgtttgtcagcgttctgtgataatgaacacatggacttctgtttattaaattcagttgacccctttagccaattgccaggagcctggatttttacttccaactgctgatatctgtgtaaaaattgatctacatccaccctttaaaagcattgatgaattaattagaactttagacaacaaagaaaaattgaaaaagaattctcagtaaaagcgaattcgatgttcaaaacaaactacaaagagacaagacttctctgtttactttctaagaactaatataattgctaccttaaaaaggaaaaaatgaacagcacatgtattgaagaacagcatgacctggatcactatttgtttcccattgtttacatctttgtgattatagtcagcattccagccaatattggatctctgtgtgtgtctttcctgcaagcaaagaaggaaagtgaactaggaatttacctcttcagtttgtcactatcagatttactctatgcattaactctccctttatggattgattatacctggaataaagacaactggactttctctcctgccttgtgcaaagggagtgcttttctcatgtacatgaatttttacagcagcacagcattcctcacctgcattgccgttgatcggtatttggctgttgtctaccctttgaagttttttttcctaaggacaagaagatttgcactcatggtcagcctgtccatctggatattggaaaccatcttcaatgctgtcatgttgtgggaagatgaaacagttgttgaatattgcgatgccgaaaagtctaattttactttatgctatgacaaataccctttagagaaatggcaaatcaacctcaacttgttcaggacgtgtacaggctatgcaatacctttggtcaccatcctgatctgcaaccggaaagtctaccaagctgtgcggcacaataaagccacggaaaacaaggaaaagaagagaatcataaaactacttgtcagcatcacagttacttttgtcttatgctttactccctttcatgtgatgttgctgattcgctgcattttagagcatgctgtgaacttcgaagaccacagcaattctgggaagcgaacttacacaatgtatagaatcacggttgcattaacaagtttaaattgtgttgctgatccaattctgtactgttttgtaaccgaaacaggaagatatgatatgtggaatatattaaaattctgcactgggaggtgtaatacatcacaaagacaaagaaaacgcatactttctgtgtctacaaaagatactatggaattagaggtccttgagtagaaccaaggatgttttgaagggaagggaagtttaagttatgcattattatatcatcaagattacattttgaaaaggaaatctagcatgtgaggggactaagtgttctcagagtgatgttttaatccagtccaataaaaatatcttaaaactgcattgtacagctccctccctgcgttttattaaatgatgtatattaaacaaagatcaatattttcttaatgactcagggtctttattgttaatgccaattgtttttgtatctgtgctataatcccttagagtcagtaaagtatgtaggggactgtttcttcctttgtgtctgggtttatgatttttctcactctttctttggactccagggtgtcagccatcaggtctcctaattttgtgtaccggtctccaacaaccccagctactgaatactgcttctaatctcctcattcattaacaaatctttatttttttatcttgtataaaataactgctttattgacacaaaatttacataacttaaaattcaactttgtattgtgtacaattcagtgattttttgtatattcacagagctgtgcaaccatcaccacactcaaaaaattttcatcacccaccaaagaaatcttatactcttagcagtcgctccctgctctcccgtccatgccagttattaatttactttctgtctctaaggattttcattactctgaacatttcatataaatagaattatacaatatgtggcctactgtgacgtatttcacttagtataatggtttcaagttttatccatgtgtagaatgtatcagcacttcatttctttttatggcctgatagtattctgttgcatggttatactccattttgtttatctaatcacttggcttcattaacaaatatttattgaatccattccataaactaggttttgagttaagtactggggctatgaaagaaatggtctcatgaagcctcacgaagtttacattagttcaaaagcctagtcaccgagcttgaaagatttctatataaaggaaaaggaaataggctctgagttttattttgatctctttttaatttataactgggtataacatagctgaaattaccagaagtttaatgcatagacaaataaatagttctattatatctttctttttggacttagaatgttagaatattttgagagttctttttttttttttttttgagtcagagtcttgctctgtaatccaggctagagtgtagtggtgcgatctccactcactgcagcctccacctcccaggttcaagcgattctcctgcctcagcctcccaagtagctgggattacaggcacccaccaccatgcccagctaatttttgtatttttagtagagacggggtttcaccatgttgcacaggctggtctcaatcgaactcctgacctcaagtgatcatcccacctaggtctcccaaagtgctgagatgacaggcgtgagccaccatgcctggcaaagagagtcttgatacaacatattcttttgaatcctcattgtgtaaattgcctcgttgtaaatagacactcagtaaacattttcctcaccaaaatatttttaaggatttttctacccttctccttttctctttgctttccttttcttgcctgttctttccactccccccaaaatgatcagatagcaaatgtcttgataacatgaggtgccctcacattaaaaaacaaaatattgagccgggcgcggtggctcatgcctgtaatcccagcactttgggaggctgaggtgggcagatcgccttaggtcaggagttggagaccaggctgaccaatatgatgaaactctgtctctactaaaaattcaaaaatgtgccagacctggcctggtggcatgtgcctgtaatcccagctacttgggaggctgagtcataagcctgcaatgggaaaatggatcgaatctggggtgagggggaagtgatgtgggggttatggtacctcttttctcttccaaagatgctgttcttactgcatcacttgtggctggccaggaaaagccatgcaggagttttgtttgtggccactaggtgacgatcgtgttctgtacgggacctcttattaatagttcaccactagccgccactccagaagagcggaggaacccaggataatattttgtcaaccaagaaacaagaagtccctcccaggaactggaaatgaatggggaaaatgctgaaatctcatttgcactattcatttctcttctctctggaaagctcggcaatcatcaggtcatttcatttggcttaaattccatgtgtctttccaaacttttaaaagctggtgaaaattgttccacccatatgtaaaagaacataggttaagttgtctaattcttgcaggaatgtggatatagcattaaaaatatgtctttgtatacttatcttacccatgtaagaaaagagtggccaactttcatataaatagaaagagaacatttaagctatatgcagtttgcatttttgtctactattatgaaattattatctatgaaattcaagctgtaactcaacatatgtataattttaatttctaatttattgttagatctcagcacttaaaaaattacatcttgtatttgaattgttaaatctgttccctgcaaagaacagtaatacaatcatgttctaatttactagcatttgcatattttagaaatataatggcctgtaatttacttttcttttgcctataattttctgaagctctttatgatgcaccggtgcatttttatttaaaaaatagattgtgactcctcaaataatgttacaattcgatgttcaaaaagcaatccaggtacatagccataaagggatgagctagagaggtctccatattatcattcaatgtgagaataaaaattctatattttattctagaataaaattataaatttctttatcta

SEQ ID NO: 136028 - DNA, 1355 bp, Homo sapiens
  Payload ID: 6621
  Gene Symbol: GPR68
  Gene Name: G protein-coupled receptor 68
  ENST ID: ENST00000529102
  CDS Start-End: 342-1355
gctcctcacctggttgcagagaccacactgccttcctggggccctgaggctctaggagaagctggaaagcacaggtgggggtccatccagctgtttccaaactgcgggttgtgacccattcatgggtcagtaaatcaacttcatagctcatgacctgcatttaaaaaattgaaatagaatagaaatgatcagagtgcgtggcaagaagtaggggtcttgcccaccaccagcgatgcccagcccttggtagagcttgaaccaccttctataaacaggatggcggtggagagacaggcccagtccctgagcccatgaggagtgtggccccttcaggcccaaagatggggaacatcactgcagacaactcctcgatgagctgtaccatcgaccataccatccaccagacgctggccccggtggtctatgttaccgtgctggtggtgggcttcccggccaactgcctgtccctctacttcggctacctgcagatcaaggcccggaacgagctgggcgtgtacctgtgcaacctgacggtggccgacctcttctacatctgctcgctgcccttctggctgcagtacgtgctgcagcacgacaactggtctcacggcgacctgtcctgccaggtgtgcggcatcctcctgtacgagaacatctacatcagcgtgggcttcctctgctgcatctccgtggaccgctacctggctgtggcccatcccttccgcttccaccagttccggaccctgaaggcggccgtcggcgtcagcgtggtcatctgggccaaggagctgctgaccagcatctacttcctgatgcacgaggaggtcatcgaggacgagaaccagcaccgcgtgtgctttgagcactaccccatccaggcatggcagcgcgccatcaactactaccgcttcctggtgggcttcctcttccccatctgcctgctgctggcgtcctaccagggcatcctgcgcgccgtgcgccggagccacggcacccagaagagccgcaaggaccagatccagcggctggtgctcagcaccgtggtcatcttcctggcctgcttcctgccctaccacgtgttgctgctggtgcgcagcgtctgggaggccagctgcgacttcgccaagggcgttttcaacgcctaccacttctccctcctgctcaccagcttcaactgcgtcgccgaccccgtgctctactgcttcgtcagcgagaccacccaccgggacctggcccgcctccgcggggcctgcctggccttcctcacctgctccaggaccggccgggccagggaggcctacccgctgggtgcccccgaggcctccgggaaaagcggggcccagggtgaggagccc

SEQ ID NO: 136029 - DNA, 2859 bp, Homo sapiens
  Payload ID: 6621
  Gene Symbol: GPR68
  Gene Name: G protein-coupled receptor 68
  Uniprot ID: Q15743
  ENST ID: ENST00000531499
  CDS Start-End: 341-1438
gtcagcgtgaaaggcagggcatggaccctcactcagggctgcgtgtgcccgacgtgggtggggggggcgtggaatcggagcacaacttggccctgcgttcccaggaagggacccgaagacctccccaggccaccccgccatctgcgtgcgcgctggcaagaggaggggcgcggggtaatggtggccggcgccacagccccgcgccgcgcagggtcttgcccaccaccagcgatgcccagcccttggtagagcttgaaccaccttctataaacaggatggcggtggagagacaggcccagtccctgagcccatgaggagtgtggccccttcaggcccaaagatggggaacatcactgcagacaactcctcgatgagctgtaccatcgaccataccatccaccagacgctggccccggtggtctatgttaccgtgctggtggtgggcttcccggccaactgcctgtccctctacttcggctacctgcagatcaaggcccggaacgagctgggcgtgtacctgtgcaacctgacggtggccgacctcttctacatctgctcgctgcccttctggctgcagtacgtgctgcagcacgacaactggtctcacggcgacctgtcctgccaggtgtgcggcatcctcctgtacgagaacatctacatcagcgtgggcttcctctgctgcatctccgtggaccgctacctggctgtggcccatcccttccgcttccaccagttccggaccctgaaggcggccgtcggcgtcagcgtggtcatctgggccaaggagctgctgaccagcatctacttcctgatgcacgaggaggtcatcgaggacgagaaccagcaccgcgtgtgctttgagcactaccccatccaggcatggcagcgcgccatcaactactaccgcttcctggtgggcttcctcttccccatctgcctgctgctggcgtcctaccagggcatcctgcgcgccgtgcgccggagccacggcacccagaagagccgcaaggaccagatccagcggctggtgctcagcaccgtggtcatcttcctggcctgcttcctgccctaccacgtgttgctgctggtgcgcagcgtctgggaggccagctgcgacttcgccaagggcgttttcaacgcctaccacttctccctcctgctcaccagcttcaactgcgtcgccgaccccgtgctctactgcttcgtcagcgagaccacccaccgggacctggcccgcctccgcggggcctgcctggccttcctcacctgctccaggaccggccgggccagggaggcctacccgctgggtgcccccgaggcctccgggaaaagcggggcccagggtgaggagcccgagctgttgaccaagctccacccggccttccagacccctaactcgccagggtcgggcgggttccccacgggcaggttggcctagcctgggtcctccgcgggtggctccacgtgaggcctgagccttcagcccacgggcctcagggcctgccgcctcctgcttccctcgctgcggaggcagggaagcccctgtaactccggaagcctgctctcgcttgctgagcccgctgggaccgccgagggtgggaataagccccggttggctcgtgggaataagccgtgtcctctgccgcggctgcgatgtggccaggctggggctgctggtcgggggaagacagtgaactgcgttccctggcctgcttcctgcagagtttgtgcatggggagtgtgaggacatggagggtgggaggctgggcgttcagctgccagggccttccaatgccaccgttgtcacagacaatgcctgtccaaacgtcccggtgggatcagcactgcagcccgcccacaacagggtgggaagggaagactggagggggaaggaaggcaggagggggaaggaagaaagagggggaaggaaagaaagaggggggaaggaaaggaggaaggggagaaggaagggaggaggaaagaaggaaggtagggggtgttgggttgggagaattgagggagttataggcagaggaggatcctagctccagccataagaactgggagagccgcctgctgctccagaagacctgcccacctccacagaaatgctagcccttcagaccttctggtcagtgaactgggaccagctctgactaaggatgccttccatggcctgggactcgagttcttcagaaccaagaggctaactgggcttcctccaagaagggaccaggggctagaagcagaagttggcatcagcaaacatttctggaatctaccaaagggaggcccaggcagaaccccttcctcagtctcccttcccctcttccccccagccttgaagaggttgatcctttgtgctgtgtctcttagccctttcatcggggatgcccagaggcaacagcccaggctggaggtgccccagggaagggtgctcacagtggtcccagggctacacttggctttgactgcacagcccctgctcagatccttgtggagggtgtccgatgacttggggaggttctcttccccttcctagaggaggaagtgaccaagtttgaaggcggcagaaatggccacacagccaagaagagcccatgcaactcagtccaggattttactgggtcagtgacattggtggaagccttcatgcctcctcattccacagcacttcctcctatgttgaccttaaacactggcttcccactgatacagactgggatgagctgagggcagtctcatttactgtcaagagttgtatttttgtattgtcctttttgccaagtctacatgtgttgactctgtaatggatttatgtagcccacttcagtctgcaaataaagcaaagtaactgga

SEQ ID NO: 136030 - DNA, 2859 bp, Homo sapiens
  Payload ID: 6621
  Gene Symbol: GPR68
  Gene Name: G protein-coupled receptor 68
  Uniprot ID: Q15743
  ENST ID: ENST00000535815
  CDS Start-End: 342-1439
gctcctcacctggttgcagagaccacactgccttcctggggccctgaggctctaggagaagctggaaagcacaggtgggggtccatccagctgtttccaaactgcgggttgtgacccattcatgggtcagtaaatcaacttcatagctcatgacctgcatttaaaaaattgaaatagaatagaaatgatcagagtgcgtggcaagaagtaggggtcttgcccaccaccagcgatgcccagcccttggtagagcttgaaccaccttctataaacaggatggcggtggagagacaggcccagtccctgagcccatgaggagtgtggccccttcaggcccaaagatggggaacatcactgcagacaactcctcgatgagctgtaccatcgaccataccatccaccagacgctggccccggtggtctatgttaccgtgctggtggtgggcttcccggccaactgcctgtccctctacttcggctacctgcagatcaaggcccggaacgagctgggcgtgtacctgtgcaacctgacggtggccgacctcttctacatctgctcgctgcccttctggctgcagtacgtgctgcagcacgacaactggtctcacggcgacctgtcctgccaggtgtgcggcatcctcctgtacgagaacatctacatcagcgtgggcttcctctgctgcatctccgtggaccgctacctggctgtggcccatcccttccgcttccaccagttccggaccctgaaggcggccgtcggcgtcagcgtggtcatctgggccaaggagctgctgaccagcatctacttcctgatgcacgaggaggtcatcgaggacgagaaccagcaccgcgtgtgctttgagcactaccccatccaggcatggcagcgcgccatcaactactaccgcttcctggtgggcttcctcttccccatctgcctgctgctggcgtcctaccagggcatcctgcgcgccgtgcgccggagccacggcacccagaagagccgcaaggaccagatccagcggctggtgctcagcaccgtggtcatcttcctggcctgcttcctgccctaccacgtgttgctgctggtgcgcagcgtctgggaggccagctgcgacttcgccaagggcgttttcaacgcctaccacttctccctcctgctcaccagcttcaactgcgtcgccgaccccgtgctctactgcttcgtcagcgagaccacccaccgggacctggcccgcctccgcggggcctgcctggccttcctcacctgctccaggaccggccgggccagggaggcctacccgctgggtgcccccgaggcctccgggaaaagcggggcccagggtgaggagcccgagctgttgaccaagctccacccggccttccagacccctaactcgccagggtcgggcgggttccccacgggcaggttggcctagcctgggtcctccgcgggtggctccacgtgaggcctgagccttcagcccacgggcctcagggcctgccgcctcctgcttccctcgctgcggaggcagggaagcccctgtaactccggaagcctgctctcgcttgctgagcccgctgggaccgccgagggtgggaataagccccggttggctcgtgggaataagccgtgtcctctgccgcggctgcgatgtggccaggctggggctgctggtcgggggaagacagtgaactgcgttccctggcctgcttcctgcagagtttgtgcatggggagtgtgaggacatggagggtgggaggctgggcgttcagctgccagggccttccaatgccaccgttgtcacagacaatgcctgtccaaacgtcccggtgggatcagcactgcagcccgcccacaacagggtgggaagggaagactggagggggaaggaaggcaggagggggaaggaagaaagagggggaaggaaagaaagaggggggaaggaaaggaggaaggggagaaggaagggaggaggaaagaaggaaggtagggggtgttgggttgggagaattgagggagttataggcagaggaggatcctagctccagccataagaactgggagagccgcctgctgctccagaagacctgcccacctccacagaaatgctagcccttcagaccttctggtcagtgaactgggaccagctctgactaaggatgccttccatggcctgggactcgagttcttcagaaccaagaggctaactgggcttcctccaagaagggaccaggggctagaagcagaagttggcatcagcaaacatttctggaatctaccaaagggaggcccaggcagaaccccttcctcagtctcccttcccctcttccccccagccttgaagaggttgatcctttgtgctgtgtctcttagccctttcatcggggatgcccagaggcaacagcccaggctggaggtgccccagggaagggtgctcacagtggtcccagggctacacttggctttgactgcacagcccctgctcagatccttgtggagggtgtccgatgacttggggaggttctcttccccttcctagaggaggaagtgaccaagtttgaaggcggcagaaatggccacacagccaagaagagcccatgcaactcagtccaggattttactgggtcagtgacattggtggaagccttcatgcctcctcattccacagcacttcctcctatgttgaccttaaacactggcttcccactgatacagactgggatgagctgagggcagtctcatttactgtcaagagttgtatttttgtattgtcctttttgccaagtctacatgtgttgactctgtaatggatttatgtagcccacttcagtctgcaaataaagcaaagtaactgg

SEQ ID NO: 136031 - DNA, 2115 bp, Homo sapiens
  Payload ID: 6622
  Gene Symbol: GPR75
  Gene Name: G protein-coupled receptor 75
  Uniprot ID: O95800
  ENST ID: ENST00000394705
  CDS Start-End: 272-1894
gtgactgcgcctctgcgcccgcgtcttgccgcggctcccgggatgcgcggaggcggtggcgatggcgatgatgcctctagtcctgcatcatccagagcggcaggcggagctggggtccggactgcgagatggaggaggggcggcgctgcggccacccggcaggcttatctgtcttgggcctcttttgtcacatattgctcatctgtgagctgaggccctgactcactgagtatttttggggagcagaagaaggagacatttctctccgaaaatgaactcaacaggccaccttcaggatgcccccaatgccacctcgctccatgtgcctcactcacaggaaggaaacagcacctctctccaggagggtcttcaggatctcatccacacagccaccttggtgacctgtacttttctactggcggtcatcttctgcctgggttcctatggcaacttcattgtcttcttgtccttcttcgatccagccttcaggaaattcagaaccaactttgatttcatgatcctgaacctgtccttctgtgacctcttcatttgtggagtgacagcccccatgttcacctttgtgttattcttcagctcagccagtagtatcccggatgctttctgcttcactttccatctcaccagttcaggcttcatcatcatgtctctgaagacagtggcagtgatcgccctgcaccggctccggatggtgttggggaaacagcctaatcgcacggcctcctttccctgcaccgtactcctcaccctgcttctctgggccaccagtttcacccttgccaccttggctaccttgaaaaccagcaagtcccacctctgtcttcccatgtccagtctgattgctggaaaagggaaagccattttgtctctctatgtggtcgacttcaccttctgtgttgctgtggtctctgtctcttacatcatgattgctcagaccctgcggaagaacgctcaagtcagaaagtgcccccctgtaatcacagtcgatgcttccagaccacagcctttcatgggggtccctgtgcagggaggtggagatcccatccagtgtgccatgccggctctgtataggaaccagaattacaacaaactgcagcacgttcagacccgtggatataccaagagtcccaaccaactggtcacccctgcagcaagccgactccagctcgtatcagccatcaacctctccactgccaaggattccaaagccgtggtcacctgtgtgatcattgtgctgtcagtcctggtgtgctgtcttccactggggatttccttggtacaggtggttctctccagcaatgggagcttcattctttaccagtttgaattgtttggatttactcttatatttttcaagtcaggattaaacccttttatatattctcggaacagtgcagggctgagaaggaaagtgctctggtgcctccaatacataggcctgggttttttctgctgcaaacaaaagactcgacttcgagccatgggaaaagggaacctcgaagtcaacagaaacaaatcctcccatcatgaaacaaactctgcctacatgttatctccaaagccacagaagaaatttgtggaccaggcttgtggcccaagtcattcaaaagaaagtatggtgagtcccaagatctctgctggacatcaacactgtggtcagagcagctcgacccccatcaacactcggattgaaccttactacagcatctataacagcagcccttcccaggaggagagcagcccatgtaacttacagccagtaaactcttttggatttgccaattcatatattgccatgcattatcacaccactaatgacttagtgcaggaatatgacagcacttcagccaagcagattccagtcccctccgtttaaagtcatggaggctataggatcttatgtaaacagtttttgtttctgatagtaatggactttattctaacttgagatcagtggcggatcaaaacctacaagattcaactgaaaagttggcagttatggttttctttcatctgatgtgtcagtatctgttgatttgctttgtagtttgttgacatcttaagatttgatgtgaaagttttagattttttaccctg

SEQ ID NO: 136032 - DNA, 1694 bp, Homo sapiens
  Payload ID: 6623
  Gene Symbol: GPR78
  Gene Name: G protein-coupled receptor 78
  Uniprot ID: Q96P69
  ENST ID: ENST00000382487
  CDS Start-End: 418-1509
agaagcgcgcagagtcccatcctgccacgccacgaggagagaagaaggaaagatacagtgttaggaaagagacctccctcgcccctacgccccgcgcccctgcgcctcgcttcagcctcaggacagtcctgccgggacggtgagcgcattcagcaccctggacagcaccgcggttgcgctgcctccagggcggccccgggctgctcctgctccgcagagctacgccctccccccgggtgccccggaccctgcacttgccgccgctttcctcgcgctgctctggaccttgctagccggctctgcacctcccagaagccgtgggcgcgccgctcagctgctccatcgcctcactttcccaggctcgcgcccgaagcagagccatgagaaccccagggtgcctggcgagccgctagcgccatgggccccggcgaggcgctgctggcgggtctcctggtgatggtactggccgtggcgctgctatccaacgcactggtgctgctttgttgcgcctacagcgctgagctccgcactcgagcctcaggcgtcctcctggtgaatctgtctctgggccacctgctgctggcggcgctggacatgcccttcacgctgctcggtgtgatgcgcgggcggacaccgtcggcgcccggcgcatgccaagtcattggcttcctggacaccttcctggcgtccaacgcggcgctgagcgtggcggcgctgagcgcagaccagtggctggcagtgggcttcccactgcgctacgccggacgcctgcgaccgcgctatgccggcctgctgctgggctgtgcctggggacagtcgctggccttctcaggcgctgcacttggctgctcgtggcttggctacagcagcgccttcgcgtcctgttcgctgcgcctgccgcccgagcctgagcgtccgcgcttcgcagccttcaccgccacgctccatgccgtgggcttcgtgctgccgctggcggtgctctgcctcacctcgctccaggtgcaccgggtggcacgcagacactgccagcgcatggacaccgtcaccatgaaggcgctcgcgctgctcgccgacctgcaccccagtgtgcggcagcgctgcctcatccagcagaagcggcgccgccaccgcgccaccaggaagattggcattgctattgcgaccttcctcatctgctttgccccgtatgtcatgaccaggctggcggagctcgtgcccttcgtcaccgtgaacgcccagtggggcatcctcagcaagtgcctgacctacagcaaggcggtggccgacccgttcacgtactctctgctccgccggccgttccgccaagtcctggccggcatggtgcaccggctgctgaagagaaccccgcgcccagcatccacccatgacagctctctggatgtggccggcatggtgcaccagctgctgaagagaaccccgcgcccagcgtccacccacaacggctctgtggacacagagaatgattcctgcctgcagcagacacactgagggcctggcagggctcatcgcccccaccttctaagaagccctgtggaaagggcactggccctgccacagagatgccactggggacccccagacaccagtggcttgactttgagctaaggctgaagtacaggaggaggaggaggagagggccggatgtgggtgtggacagcagtagtggcggagga

SEQ ID NO: 136033 - DNA, 4944 bp, Homo sapiens
  Payload ID: 6623
  Gene Symbol: GPR78
  Gene Name: G protein-coupled receptor 78
  ENST ID: ENST00000514302
  CDS Start-End: 2053-2838
gaactaatcctgaactttatcattgcaatgcgtatctcagcaagaatgggcaggattgcatagttaggagtactgccttactttttaaagaagtggtgaaaatatttaatattttcatatactttttctttttggaagataaaaggattaggtccagcatttcaccctacagaggatttaaatttttcatcaggaatgagatttgagtgtaagaagatgaaacgatattatactgataagaccacagggttcaaaaccaccccctacaacccagggaaggggggcagccaggctggcaagatctgaggccagaagcactggggctttggggagagcagcaaacagaacagatctagacctatcaaggtgccctcaccagagtccagagatctcaccacacacattttctcattcatgcagttgtccagtacatccttgcagatgagcaaatggcctgcctttcataatacaggctggtggagcttccccatgctcatgtctcagaagagatgctctctgctcccctgcaagtggaattgtctccctttggagtagttgagaggtgacagaggctgctgtgagtggctagaccaaagtctccctgtgaagccacgtgatgactccaccgctccccagagctgcacatggtcgctcagaagccttggaggggttgggggaggcccctgctctcaagcccccactatcacaatcactttgtcccagctattcacctgcaaacttgcttgatctgcagaagctgcagagtggcccactcttcctggacatgtcaggaaaactttgacgtggctgctctagcttcagggaaggtctaatttggtgaaaatttgaaagcaggtttgtgggagtgccagggagaaatggggagagagaaagcctctgtatttgatggatggcaatggcttggagctggtgtgatggcctctctggatgacaaggacattggacttagagccagaaggactgagtggccacgaatggattagaagattcccactgggtgagaaggctcagaagccaccacagaggatggcggaggtgggagaggcctcgcaccgcggggctccaggagccaggtgaaggacaggcatttctgtatggcacccagttctgggtgggtcctcccaaggtgcccccttctttgtctctccctctgttgcttttctctcctcttccctcttcttccccccacttcctcttcactttttcttcactttttcttcttcttctctttccttcccccatgcctttctcaaccttgtttccacttcttgtcgctcttcttgcttcaacaaacgtcgatgcagtcacagttcctgggctgaggctgggggatgggaggaagtcctgagggcagcccccgcccccttccccgccccgtcactccctctgccccgcctgcacagcttcttgccaattcattcccgcccctaccgcccctataagccaccaggtcgctccagtttggtgccagcgcctggagggagaggcgtggcgagggctgtgctgcctaggatccactgagtggctcttgctggcgtgtcagctgcgcgcgaaccagggctgggaggctcggctggaggtgtgaccagggcagggactgacctggcccggaacagaagcgcgcagagtcccatcctgccacgccacgaggagagaagaaggaaagatacagtgttaggaaagagacctccctcgcccctacgccccgcgcccctgcgcctcgcttcagcctcaggacagtcctgccgggacggtgagcgcattcagcaccctggacagcaccgcggttgcgctgcctccagggcggccccgggctgctcctgctccgcagagctacgccctccccccgggtgccccggaccctgcacttgccgccgctttcctcgcgctgctctggaccttgctagccggctctgcacctcccagaagccgtgggcgcgccgctcagctgctccatcgcctcactttcccaggctcgcgcccgaagcagagccatgagaaccccagggtgcctggcgagccgctagcgccatgggccccggcgaggcgctgctggcgggtctcctggtgatggtactggccgtggcgctgctatccaacgcactggtgctgctttgttgcgcctacagcgctgagctccgcactcgagcctcaggcgtcctcctggtgaatctgtctctgggccacctgctgctggcggcgctggacatgcccttcacgctgctcggtgtgatgcgcgggcggacaccgtcggcgcccggcgcatgccaagtcattggcttcctggacaccttcctggcgtccaacgcggcgctgagcgtggcggcgctgagcgcagaccagtggctggcagtgggcttcccactgcgctacgccggacgcctgcgaccgcgctatgccggcctgctgctgggctgtgcctggggacagtcgctggccttctcaggcgctgcacttggctgctcgtggcttggctacagcagcgccttcgcgtcctgttcgctgcgcctgccgcccgagcctgagcgtccgcgcttcgcagccttcaccgccacgctccatgccgtgggcttcgtgctgccgctggcggtgctctgcctcacctcgctccaggtgcaccgggtggcacgcagacactgccagcgcatggacaccgtcaccatgaaggcgctcgcgctgctcgccgacctgcaccccagtgtgcggcagcgctgcctcatccagcagaagcggcgccgccaccgcgccaccaggaagattggcattgctattgcgaccttcctcatctgctttgccccgtatgtcatgaccaggtgaatgccacaggccaccagctgcagacagcgccacctgcgtggacctgcagctcaggacctgcagcgatgccgcctacaaccacaccaccttccccaacctgcttcagcaccggtcgtgggaggtggtggaggccagctccgagtacatcctgctgagcgttctacaccagctcctggaaggccagtgcaacccggacctgcggctgctgggctgtgctgtgctggccccccggtgtgagggcggctgggtgcgcagaccctgccggcacatctgcgagggcctgcgggaggtctgccagcccgccttcgacgccattgacatggcctggccctacttccttgactgccaccgctacttcacgagagaggacgagggctgctatgacccgctggagaagcttcggggaggcctggaggctgacgaggcactgccctcagggctgccgcccaccttcatccgcttcagccaccactcctacgcccagatggtgcgtgtgctgaggcggacggcctcccgctgcgcccacgtggccaggacctacagcatcgggcgcagcttcgacggcagggagctgctggtcatcgagttctccagccgccccggccagcacgagctgatggagcccgaggtgaagctcatcggcaacattcatggcaacgaggtggcgggccgggagatgctcatctacctagcccagtacctgtgctctgagtacctgcttggtaacccccgcatccagcgcctgctcaacaccacccgcatccacctgctgccctccatgaaccctgacggctatgaggtggcagctgccgagggtgccggctacaacgggtggacgagcgggaggcagaacgcgcagaacctggatctgaaccgaaatttcccggacctgacgtccgagtactaccggctggcggagacccgcggcgcacgcagcgaccacatccccatcccccagcactactggtggggtaaggtggccccggagacaaaggcaatcatgaagtggatgcagaccataccctttgtgctctcagccagccttcatgggggcgacctggtggtgtcctaccccttcgacttctccaagcacccccaggaggagaagatgttttctcccacgcccgacgagaagagggagccccctcctcagcacagacctgtcctgcttggtggggccctgatgagctcatgcagggtgagcccttcgcctgcctgacccaccaggagcctctgcccaagatgttcaagctgctgtccagagcctacgctgacgtccaccccatgatgatggacaggtcggagaataggtgtggaggcaatttcctgaagagggggagcatcatcaacggggcggactggtacagcttcacgggaggcatgtccgatttcaactacctgcacaccaactgctttgagatcacggtagagctgggctgtgtgaagttcccccccgaggaggccctgtacatactctggcagcacaacaaggagtcactcctgaatttcgtggagacggtgcaccggggcatcaaaggtgtggtgacagataaattcggcaagccagtcaaaaacgcccggatctcagtcaaaggcattcgccacgacatcaccacagccccagatggtgactactggagactgctgcccccaggtatccacattgtcattgcccaagcccctggctacgccaaagtcatcaagaaagtcatcatccccgcccggatgaagagggctggccgtgtggacttcattctgcaacctctggggatgggacccaagaactttattcatgggctgcggaggactgggccccacgacccactgggaggtgccagctctttgggggaggccacggagcccgacccgctccgggcgcgcaggcagccctcggccgacgggagtaagccctggtggtggtcctacttcacatcgctgagcacccacaggccacgctggctgctcaagtactagccccggccccagcacccgccaggatgtggagaccgaggcccatctccgcatcccgggctcctggctcttgattttgtctgccacagacatcccacaaagccgctgccattttattaaagtgttttgatccac

SEQ ID NO: 136034 - DNA, 3349 bp, Homo sapiens
  Payload ID: 6624
  Gene Symbol: GPR82
  Gene Name: G protein-coupled receptor 82
  Uniprot ID: Q96P67
  ENST ID: ENST00000302548
  CDS Start-End: 241-1251
agttggtgtcatgcaagaatctattcacactgactaaagatattggaagagtgaagatcagagaattttaagtctgaaatttggcatcactgccctgaacaatataaccttagttggcataaactactcatacagacaaaggcattatccatcacaataagtaactttttgtctttatttcaaccggacaatcgtgattagaaaagctcctgtgacaaaattcaagaaaacctgacataaatgaacaacaatacaacatgtattcaaccatctatgatctcttccatggctttaccaatcatttacatcctcctttgtattgttggtgtttttggaaacactctctctcaatggatatttttaacaaaaataggtaaaaaaacatcaacgcacatctacctgtcacaccttgtgactgcaaacttacttgtgtgcagtgccatgcctttcatgagtatctatttcctgaaaggtttccaatgggaatatcaatctgctcaatgcagagtggtcaattttctgggaactctatccatgcatgcaagtatgtttgtcagtctcttaattttaagttggattgccataagccgctatgctaccttaatgcaaaaggattcctcgcaagagactacttcatgctatgagaaaatattttatggccatttactgaaaaaatttcgccagcccaactttgctagaaaactatgcatttacatatggggagttgtactgggcataatcattccagttaccgtatactactcagtcatagaggctacagaaggagaagagagcctatgctacaatcggcagatggaactaggagccatgatctctcagattgcaggtctcattggaaccacatttattggattttcctttttagtagtactaacatcatactactcttttgtaagccatctgagaaaaataagaacctgtacgtccattatggagaaagatttgacttacagttctgtgaaaagacatcttttggtcatccagattctactaatagtttgcttccttccttatagtatttttaaacccattttttatgttctacaccaaagagataactgtcagcaattgaattatttaatagaaacaaaaaacattctcacctgtcttgcttcggccagaagtagcacagaccccattatatttcttttattagataaaacattcaagaagacactatataatctctttacaaagtctaattcagcacatatgcaatcatatggttgacttttgaatggaaaaccccacaatattaagaaaagcattcatgtgactttattagggacactaaactacatcattaacatgtcacagcttggttgacaataatcaccaagaaaatctctttggtttttaaaaataaataaacatatattcataaaactcaaaaaacagttatactgaacgttgagatggcagaaactttcagaagcaaaaattaagcatattgaaaggatcccactcatatgaaactaacaggctgttttctgtttaaactcaactgtcagtgcttctgttcagaacacgttatttcatgactaggataaagaagcaaatggtttatgacttgtctgctttctggtagttagaatacaagggtcaatctatggctagtgtttattggtaattttaaaatctttaaaaataagtagctgggcacagtggcttacgcctgtaatcccagcactttgggaggctgaggtgggtggatcattttgaggtcaggagttcaagaccagcctgggcaacatggtgaaaccctgtctctactaaaaatacaaaaatcagctggacatggtggtgggcgcctgtaatcccagctactcgggaggctgaggcaggagaatcgcttgagcccgggacggaggttgcagtgagcggagatcgtgccactgcactacagcctgggaggcagagcgagactctgtctcataaaacaaaacaaaaaaataaaaataagtaaaaaaataaataagaaatatcctcattcacatcttacctaaatgcatgaataatacagtgaaaaaaatccaaggttttataaacatattatttatttgaaattatctggctcatgttattggggagaagcaatattcattgactatatttttaaagcagatgatacttataaaaatgcttaaatatttggattaggctttgtcaaagtaaaaagctatgtcattatatgcccatcttcatcacattgtgcatattttcttctgtattcaatataaataatgttattagtgacaaacagtacctggcagttaattttttgtgaaataaatgaatgaataataagggagtgtaatagtattgcagttaagagattgatctctgaagttatacttcttgggttcaatctggctctactttttatttagctggacaatcttaggcaaattaacttatcctctgtacgtgttaatttcttcatttgtagagcagaaaatactatcttatttacagatcctattattaaatcagctgttactattatgagtagctaacgcttagtaagcacttgctgtttgccaagcattctacttatatgctttacatatattattttaatcaccacaactctaaagtatactaatttactgatgaaaatattgaagtgggctgggtgcggtggctcatgcctgtaatcccagcactctgggaggccgaggtgggcagatcacctgaggtcaggagttcgagactagcctggccaacatggcgaaacccacctctactaaaaatacaaaaattagctgggcgtggtggtgtgtgcctgtagtcccagctacttgggaggctgaggcagaagaatcacttgaactcgggaggctgaggcaggagaatcacttgaactcaggaggcggaggttgcagtgagccaagatcatgccattgcactccagcctgggcgacagagtgagactctgtctcaaaaaaaaaaaaaaaaaaaaaaaaaaaaaaaaatatatatatatatatatatatatatgtatgtatgtatgtatatgtgcatagttaagtaaatcaccccaattttttctaatatttaagtgaacatttaaagataagcatttcttaatgttaatttcttttctttcatgtaatcttgtcagtagacaaatgatggtgactatattctgtaataagtacatatattatgattaaaaaaaaaagcgtgtactatctgcccaaagagatcataagcactttggagctataaacttcttgtctatttctacttccatggtactgatattctcttctcagataaccaaacaaaaacagctgaataaaatcaaccattaatagtaacttgc

SEQ ID NO: 136035 - DNA, 4282 bp, Homo sapiens
  Payload ID: 6625
  Gene Symbol: GPR83
  Gene Name: G protein-coupled receptor 83
  Uniprot ID: Q9NYM4
  ENST ID: ENST00000243673
  CDS Start-End: 173-1444
gtgccgaccgcgggctggtggcgggcggcgcggtgctccgcgcgtccgggctccctggctcctcgggacggccttgtatgctgtgcgccccgcaccccggctgcgcgctccgatcccagcgggaggggacgcccggcccgcaggctcccaggggaggggtggctcctgcaaaatggtccctcacctcttgctgctctgtctcctccccttggtgcgagccaccgagccccacgagggccgggccgacgagcagagcgcggaggcggccctggccgtgcccaatgcctcgcacttcttctcttggaacaactacaccttctccgactggcagaactttgtgggcaggaggcgctacggcgctgagtcccagaaccccacggtgaaagccctgctcattgtggcttactccttcatcattgtcttctcactctttggcaacgtcctggtctgtcatgtcatcttcaagaaccagcgaatgcactcggccaccagcctcttcatcgtcaacctggcagttgccgacataatgatcacgctgctcaacacccccttcactttggttcgctttgtgaacagcacatggatatttgggaagggcatgtgccatgtcagccgctttgcccagtactgctcactgcacgtctcagcactgacactgacagccattgcggtggatcgccaccaggtcatcatgcaccccttgaaaccccggatctcaatcacaaagggtgtcatctacatcgctgtcatctggaccatggctacgttcttttcactcccacatgctatctgccagaaattatttaccttcaaatacagtgaggacattgtgcgctccctctgcctgccagacttccctgagccagctgacctcttctggaagtacctggacttggccaccttcatcctgctctacatcctgcccctcctcatcatctctgtggcctacgctcgtgtggccaagaaactgtggctgtgtaatatgattggcgatgtgaccacagagcagtactttgccctgcggcgcaaaaagaagaagaccatcaagatgttgatgctggtggtagtcctctttgccctctgctggttccccctcaactgctacgtcctcctcctgtccagcaaggtcatccgcaccaacaatgccctctactttgccttccactggtttgccatgagcagcacctgctataaccccttcatatactgctggctgaacgagaacttcaggattgagctaaaggcattactgagcatgtgtcaaagacctcccaagcctcaggaggacaggccaccctccccagttccttccttcagggtggcctggacagagaagaatgatggccagagggctccccttgccaataacctcctgcccacctcccaactccagtctgggaagacagacctgtcatctgtggaacccattgtgacgatgagttagaagaggttgggaagagggagtgggaggggtctgtctccacctgaggcagggaaagagagcctattctcacacatgatcttcagagtgctggaaacacactcctgcagaagctgtaggactcttgaattcctaggaaactgtccagcctcctagccccatgtgatgtgaaaactaaaaggcaccaccaactagacatgtgttcataaattcccatctaagaaacactgggaggcacagcagcctgtatctctgaggaagaggagcgaggacaacgttggcccagatgggggctgaatcattcaactgcctccatctgtggggcagctgctgccttacagcccttcctactgctgagcatccctaagggagacctaaatcatactttgggtgtggtgacccagatgcacagagctctgcttgaaacaggtacacgggccagggaaatgccagcaagccagagcgggcgtggagatttttatgcctcactttctggagtcactgggccatgatgaatcataagtcttcagtggcctagcaatatccagataagaaaggaccaacttgggttccttaaaacaaagggaaattattattgccacttagaaaaattcagaaaagcacacactcacatacacacacacaaaatcactctcttatcccatccatttgtgataacatctgtgaacatgctgtggctctatttgcaacattttccttcgtgtgtgtgattgtgtgcatgtgtgcatgaccttttttttttctttttttttttttttttgagatggaatctcgctctgtcacccaggttggagttcagtggcacaatctcggctcactgcaagctctgcctcccaggttcatgccgttctcctgcctcagcctccctagtagctgggactacaggtgcccgccaccatgcccggctaatcttttgcatttttagtagagacggggtttcaccgtgttagccaggatggtctcgatctcctgacctcgtgatccacctgcctaggcctcccaaagtgttgggattacaggcgtgagccaccccgcccggcccttttttttcatttatactttttcatttagattgtaatgattaacagaaacaggggtacctttcccaggggtgtccaccagaagagttgaagaagaggtgagaagatcccaaggtgaagcctgtcaccacgcagacagaactgccccctattgtagacagtggtgggaagggcctggctcacatgcccctccttagaggcagcctcaagatgaaccagggaatcaaactcaaccaggaggcatgattccttctctcctgcaattgcacaaaaacaagtggtggtgaaacattgttctgttttcacaagagatgagggagcaggctttccaatatgctggaagtaattgtgcttagacacctcatcctcccaagctgtctagaaaggccatttcgctgtgttgtctaaataatgagggttttttcacaccatttctcaaaaggagattcgctgtcaacatcattttggtggttcaggtgtaactttcacttacagaaacttatgcatccttaagagatctcaattcttaagggtctaacttgccagagaaatctcattccagggactgattgtttttatcaccttctgtctggtcctgagtgactcactgtgtcacccagaaaagagacctgtcaggcagaatcgagcttaattcacctgctctaaacaattgttactgacacactgcttttaggttttcttctagcaccagataaactctgaaatcaaagcatggatatgagctcagtaggaaactaaggtttgagggagaaagagtttgtcacttagacctcttggctgttaactgaaactgaacttgctcacatcatctgcttccctgtaatgaactatgagggttctttatcctagtttctatttatgaagatggttgaaaattttcaagacacaagattttgaaaactcactgaattatgggcaaaaccatgactttcattgggcagacagagtcttctaagcccacagggatccccagatggatttttcaggacaaatggctcatgtgcctgtacttattgtctctgtggtgtgtcaagaagtagctaatggtttcatctgaaagctgccatagaaattctgtgaaccagaatgagacaaggcagcaggcatacagaaggtttgtcctgctctgggaagcatggaggatgttgtacttcactcctctctgagggtgtctaggaatacagaagctccttgacttacatctcaataaacccatcgtaagtccaaaatattggaagttgaaaatgcattgaatacacccaacctactgaacatcgtagcttagccaagcctaccttaaatgctctgagaacacttatattagcctacagctgggaaaaatcatttaacacaaagcctatcttctaatgaagtatggaatatctcatgtaatttattgaatactgtactgaaggtgaaaaccagaatggttgtatggatatgcgaagtatggtttctactgaatgtgtattgctttcccatcatcataaaatttttaaaaatcctaagttgaatcattgttagtccgggaccttcagtactgccaagtcccagagaaaacccttttactctggggagaacccactgatggctcattagatctgtcccttccccgaggtccgtgtgtgactttgagcaaaaagtgacttctttttgtgaatgtaaaatttgtgaaacttgagtttttccaatgtgctgtaaagtgttttattgtaaattgctcatctcaataaaatttacttcaggtttgtggactgtg

SEQ ID NO: 136036 - DNA, 1909 bp, Homo sapiens
  Payload ID: 6625
  Gene Symbol: GPR83
  Gene Name: G protein-coupled receptor 83
  ENST ID: ENST00000539203
  CDS Start-End: 146-1291
gcgcggtgctccgcgcgtccgggctccctggctcctcgggacggccttgtatgctgtgcgccccgcaccccggctgcgcgctccgatcccagcgggaggggacgcccggcccgcaggctcccaggggaggggtggctcctgcaaaatggtccctcacctcttgctgctctgtctcctccccttggtgcgagccaccgagccccacgagggccgggccgacgagcagagcgcggaggcggccctggccgtgcccaatgcctcgcacttcttctcttggaacaactacaccttctccgactggcagaactttgtgggcaggaggcgctacggcgctgagtcccagaaccccacggtgaaagccctgctcattgtggcttactccttcatcattgtcttctcactctttggcaacgtcctggtctgtcatgtcatcttcaagaaccagcgaatgcactcggccaccagcctcttcatcgtcaacctggcagttgccgacataatgatcacgctgctcaacacccccttcactttggtcatcatgcaccccttgaaaccccggatctcaatcacaaagggtgtcatctacatcgctgtcatctggaccatggctacgttcttttcactcccacatgctatctgccagaaattatttaccttcaaatacagtgaggacattgtgcgctccctctgcctgccagacttccctgagccagctgacctcttctggaagtacctggacttggccaccttcatcctgctctacatcctgcccctcctcatcatctctgtggcctacgctcgtgtggccaagaaactgtggctgtgtaatatgattggcgatgtgaccacagagcagtactttgccctgcggcgcaaaaagaagaagaccatcaagatgttgatgctggtggtagtcctctttgccctctgctggttccccctcaactgctacgtcctcctcctgtccagcaaggtcatccgcaccaacaatgccctctactttgccttccactggtttgccatgagcagcacctgctataaccccttcatatactgctggctgaacgagaacttcaggattgagctaaaggcattactgagcatgtgtcaaagacctcccaagcctcaggaggacaggccaccctccccagttccttccttcagggtggcctggacagagaagaatgatggccagagggctccccttgccaataacctcctgcccacctcccaactccagtctgggaagacagacctgtcatctgtggaacccattgtgacgatgagttagaagaggttgggaagagggagtgggaggggtctgtctccacctgaggcagggaaagagagcctattctcacacatgatcttcagagtgctggaaacacactcctgcagaagctgtaggactcttgaattcctaggaaactgtccagcctcctagccccatgtgatgtgaaaactaaaaggcaccaccaactagacatgtgttcataaattcccatctaagaaacactgggaggcacagcagcctgtatctctgaggaagaggagcgaggacaacgttggcccagatgggggctgaatcattcaactgcctccatctgtggggcagctgctgccttacagcccttcctactgctgagcatccctaagggagacctaaatcatactttgggtgtggtgacccagatgcacagagctctgcttgaaacaggtacacgggccagggaaatgccagcaagccagagcgggcgtggagatttttatgcctcactttctggagtcactgggccatgatgaatcataagtcttcagtggcctagcaatatccagataagaaaggaccaacttgggttccttaaaacaaagggaaattattattgccacttagaaaaattcagaaaag

SEQ ID NO: 136037 - DNA, 1497 bp, Homo sapiens
  Payload ID: 6626
  Gene Symbol: GPR84
  Gene Name: G protein-coupled receptor 84
  Uniprot ID: Q9NQS5
  ENST ID: ENST00000267015
  CDS Start-End: 91-1281
taactgtccaccagaaaggactgctctttgggtgagttgaacttcttccattatagaaagaattgaaggctgagaaactcagcctctatcatgtggaacagctctgacgccaacttctcctgctaccatgagtctgtgctgggctatcgttatgttgcagttagctggggggtggtggtggctgtgacaggcaccgtgggcaatgtgctcaccctactggccttggccatccagcccaagctccgtacccgattcaacctgctcatagccaacctcacactggctgatctcctctactgcacgctccttcagcccttctctgtggacacctacctccacctgcactggcgcaccggtgccaccttctgcagggtatttgggctcctcctttttgcctccaattctgtctccatcctgaccctctgcctcatcgcactgggacgctacctcctcattgcccaccctaagctttttccccaagttttcagtgccaaggggatagtgctggcactggtgagcacctgggttgtgggcgtggccagctttgctcccctctggcctatttatatcctggtacctgtagtctgcacctgcagctttgaccgcatccgaggccggccttacaccaccatcctcatgggcatctactttgtgcttgggctcagcagtgttggcatcttctattgcctcatccaccgccaggtcaaacgagcagcacaggcactggaccaatacaagttgcgacaggcaagcatccactccaaccatgtggccaggactgatgaggccatgcctggtcgtttccaggagctggacagcaggttagcatcaggaggacccagtgaggggatttcatctgagccagtcagtgctgccaccacccagaccctggaaggggactcatcagaagtgggagaccagatcaacagcaagagagctaagcagatggcagagaaaagccctccagaagcatctgccaaagcccagccaattaaaggagccagaagagctccggattcttcatcggaatttgggaaggtgactcgaatgtgttttgctgtgttcctctgctttgccctgagctacatccccttcttgctgctcaacattctggatgccagagtccaggctccccgggtggtccacatgcttgctgccaacctcacctggctcaatggttgcatcaaccctgtgctctatgcagccatgaaccgccaattccgccaagcatatggctccattttaaaaagagggccccggagtttccataggctccattagaactgtgaccctagtcaccagaattcaggactgtctcctccaggaccaaagtggccaggtaataggagaataggtgaaataacacatgtgggcattttcacaacaatctctccccagcctcccaaatcaagtctctccatcacttgatcaatgtttcagccctagactgcccaaggagtattattaattattaataaatgaattctgtgcttttaa

SEQ ID NO: 136038 - DNA, 2041 bp, Homo sapiens
  Payload ID: 6626
  Gene Symbol: GPR84
  Gene Name: G protein-coupled receptor 84
  Uniprot ID: Q9NQS5
  ENST ID: ENST00000551809
  CDS Start-End: 637-1827
cctgcttgaagcctaactgtccaccagaaaggactgctctttgggtgagttgaacttcttccattatagaaagaattgaaggctgagaaactcaggtaagcacttttgttgtgggtatacttttaccttcttggtctcctcatctcccaggtggtaacaaacagaaatgactaaagcctatatgtgtgtgtagtggaaaggagcagagggaactgaatacagagaggatcctgaatacacgatgctgaatagagagaggggactcctgggggtctttggggatggggaaggaattaaaaaagttggagggcactgggtttactgagagcagcgggatggatatagaagaggactgaggtttggagcagaataagactaagatatttaggcaagagatatttagataaaaacttggggaaatatttgagaatgggaaaggactaagagaacctaaggagagagttagggatcttgagatgaagaggcctgggaatggttcaggaggatactgaattaaggtgaggtccaggaacagtttagatgtccagggtcccagaactgttcaagagatctaagttgaatgctaggttctgattccctcttcctcttccaccctctgcctctttagcctctatcatgtggaacagctctgacgccaacttctcctgctaccatgagtctgtgctgggctatcgttatgttgcagttagctggggggtggtggtggctgtgacaggcaccgtgggcaatgtgctcaccctactggccttggccatccagcccaagctccgtacccgattcaacctgctcatagccaacctcacactggctgatctcctctactgcacgctccttcagcccttctctgtggacacctacctccacctgcactggcgcaccggtgccaccttctgcagggtatttgggctcctcctttttgcctccaattctgtctccatcctgaccctctgcctcatcgcactgggacgctacctcctcattgcccaccctaagctttttccccaagttttcagtgccaaggggatagtgctggcactggtgagcacctgggttgtgggcgtggccagctttgctcccctctggcctatttatatcctggtacctgtagtctgcacctgcagctttgaccgcatccgaggccggccttacaccaccatcctcatgggcatctactttgtgcttgggctcagcagtgttggcatcttctattgcctcatccaccgccaggtcaaacgagcagcacaggcactggaccaatacaagttgcgacaggcaagcatccactccaaccatgtggccaggactgatgaggccatgcctggtcgtttccaggagctggacagcaggttagcatcaggaggacccagtgaggggatttcatctgagccagtcagtgctgccaccacccagaccctggaaggggactcatcagaagtgggagaccagatcaacagcaagagagctaagcagatggcagagaaaagccctccagaagcatctgccaaagcccagccaattaaaggagccagaagagctccggattcttcatcggaatttgggaaggtgactcgaatgtgttttgctgtgttcctctgctttgccctgagctacatccccttcttgctgctcaacattctggatgccagagtccaggctccccgggtggtccacatgcttgctgccaacctcacctggctcaatggttgcatcaaccctgtgctctatgcagccatgaaccgccaattccgccaagcatatggctccattttaaaaagagggccccggagtttccataggctccattagaactgtgaccctagtcaccagaattcaggactgtctcctccaggaccaaagtggccaggtaataggagaataggtgaaataacacatgtgggcattttcacaacaatctctccccagcctcccaaatcaagtctctccatcacttgatcaatgtttcagccctagactgcccaaggagtattattaattattaataaatgaattctgtgctttt

SEQ ID NO: 136039 - DNA, 5079 bp, Homo sapiens
  Payload ID: 6627
  Gene Symbol: GPR85
  Gene Name: G protein-coupled receptor 85
  Uniprot ID: P60893
  ENST ID: ENST00000297146
  CDS Start-End: 605-1717
tattttactgctgtctcaagatcagattattactgtagagaagatttttattttttgtttcattaacagattattataaagcaaaaagcatgcagaaaaagaagcagacgttttacattgggaattaatgaaagcgtgtctgctagttttgggtaggagaactgggaagttgttgcttaaaattttatatcacctccacaaacaaaactcttcggaaatggtaaaataagaaaatgcatgattctagaggcattcctaagcacccacgtgtcaggctttgtggtgtctgtggtatcatccgaccgtttggactggttagggcttactgagagctccatttctggaaagccttacaagactgaggaatatcagactgcgaatcaccgggaacggttcctttgcagcacagaagcaatctctctccccatcttcgcatattctgatggcaaaacaagtggaagaaaagaggaagcatgactgcagatcagatcagttctctttgtggattatattttcagtaaaatgtatggatctatcttttccttgttcttatatctagatcatgagacttgactgaggctgtatccttatcctccatccatctatggcgaactatagccatgcagctgacaacattttgcaaaatctctcgcctctaacagcctttctgaaactgacttccttgggtttcataataggagtcagcgtggtgggcaacctcctgatctccattttgctagtgaaagataagaccttgcatagagcaccttactacttcctgttggatctttgctgttcagatatcctcagatctgcaatttgtttcccatttgtgttcaactctgtcaaaaatggttctacctggacttatgggactctgacttgcaaagtgattgcctttctgggggttttgtcctgtttccacactgctttcatgctcttctgcatcagtgtcaccagatatttagctatcgcccatcaccgcttctatacaaagaggctgaccttttggacgtgtctggctgtgatctgtatggtgtggactctgtctgtggccatggcatttcccccggttttagacgtgggcacttactcattcattagggaggaagatcaatgcaccttccaacaccgctccttcagggctaatgattccttaggatttatgctgcttcttgctctcatcctcctagccacacagcttgtctacctcaagctgatatttttcgtccacgatcgaagaaaaatgaagccagtccagtttgtagcagcagtcagccagaactggacttttcatggtcctggagccagtggccaggcagctgccaattggctagcaggatttggaaggggtcccacaccacccaccttgctgggcatcaggcaaaatgcaaacaccacaggcagaagaaggctattggtcttagacgagttcaaaatggagaaaagaatcagcagaatgttctatataatgacttttctgtttctaaccttgtggggcccctacctggtggcctgttattggagagtttttgcaagagggcctgtagtaccagggggatttctaacagctgctgtctggatgagttttgcccaagcaggaatcaatccttttgtctgcattttctcaaacagggagctgaggcgctgtttcagcacaacccttctttactgcagaaaatccaggttaccaagggaaccttactgtgttatatgagggagcatctgtaaatctttagccttgtgaaaactaaccttctctgctgagcaattgtggcccatagccatattttgagaagaaattcaagaatggaatcagcagttttaaggatttgggcaacattctgcagtctttgcaatagttcacctataatcctattttaaatctcagagtgatcctgctgactgccagcaaaggtttgtaattaagaagggactgaaccactgccctaagtttctttatgtggtcaaaaactagataatgaaagtagcaggtgctaagtatcagtgctaaatgctctgtatgtcactacatatgaaaaaacatcaaaaaacaattagcattggacatcttaataaattaagttgacatgaggtaaatgtgttgataaaaactaattttagaagtttgaagactttaaaacatttcatactactattgttttgcaaagactaaaatatttggggacttaaagtactgtaatccactaaagacgtgccaatgaattattggaatatcacactttaaaaaccgccttgtaagttctggggagcattccaaagcagtatattggttccaattagagtttactttttttgtattaatacattgctatttctaaataccactttcctcatctactagtaagattgctagcattgaactgtattatgtggtttttgttgatttggtataaagtttttccaattcatttatattttacaaatgctagatattggtctgggaggcaacattaatggtaccagcctgtcacaactgagcagttctaataatgcagaataaatacatgttgccttaaagggttatctagtatccttcatcttatttagcactggagcaaatagccaagggaaatcaaatcagtaactggtcatggtcatgcatctaaaagtgcatggaagatcatttattactttttccttttttctcacatggtttgaaacttaaagtgcacatcactgaaataatgagattttcttctacggtgtgctaccctttctaaactgttctaagaagcaggcagttgatgtatgtttatattttaagtcagctgtcaaggggagaccacagccttagtatgacatcctgcacaatttgtgaagcatttattctactgaaggcacagtcttgtttatactttctgcacattcagtgtattggtaatttaaattatttcagttttaacttgtgaaagcttatattatgatttctggtattttagaaatacattagagtctgtgagtctcattctttaagatacagatgtgtgaacttcaatataaagttgcatttgccaaaatttacccgtgtagcctgttaattttcttgaaataagttttacatttttggcacataacaactttttttttaatttgggaggcaagcacaaactaggaagactagctttattatggttttgctttttgattcttgtagctactacattccagactggaaatgtatgaatgataatcaacataatgctgataaactgacataatattatctgtaaaagcattatttggtagtttattataatcatccctctattattcttaaatgccagtagtatttagagatgtgtacctgcttagttaattggctcagaattttaatataaacatcacactttaatttggagcatagtaccatagaaatttggggttctaaatatacaacttgtaagaagaatggtttacactaacattatgacaaaactagaaaaagttattatttttgtttgctttctgttgttttgtttattggttggtttttgtgaagtttatttttttttggtatttgataattaagattaggaatctaataacacagaattccatattgctatagtacttctgtaaagagaatatcaatataaataaggaaaataaatcaatgaaatgtttcaatgatatatgcaactattcagttttgctcttataaggacagctcaagccatgaattagtgagcattctgacctcatttttactttacaccaaagttgattagatctgagacaaaatttaatgcacaacagtgagttggatctagcaataaagtctccttggtactgaaatcattatctaaaataaaggaaatgttatcaaaagatgttctgataacattgtgattgtaactcaaaaaaatttatagtagaaacgtaattgcaatgatgataataactaactctgcttagaggttcaaatatcaccagcaatcagtaaaaaattcagcaataatcttaaggccagagagaacaggttcaccattgcatagacaagaaaacagatatgggttaagagttggggactgaggagtcaagagcaacggccacgtgaagctgcctgactccacctagctatttggaataaccgattcccacagttttggtaagaaaccagccccagtaatcagtaagtcaggctgaactgcagtgacttttatttaagcctactcctgactaacttggcatttgcaggtcaagcaggaagcagttgacaagacacatcctcagtgaatcaatgccatttgtaactcaactggtaacagtagtaatcatacaaaataaaaacctgcttcagtgtcttaatgaccaaatcacattatctattttagcactcattccaaaattcagtatttaatgtaattaatctttaatccataaaaatacatccccactgtagcggggcagggggtgtccaacttccctgtgagactgattatcaataataatgtgtctccctcttggactgagcacacatctgagctgaacggcctttaaattgtttttcataatagtggtgatatgtttgcgtggatacgtctgtactatttcatctggttcattttgcatgtaatagatttatctgtgagatgcctggctgaagctaggcattcagtctgtgactgtggaatcctatgcaggtattaaccaaggcagaaagaggtgagtaacttgcccatttctccacagagaccccatttaaataacacaaaattgaccacagtgattagatgaaaaaattatttgtagataggataatctattgactgaattatcttttgcagatatcagctggttggatttctcaccaggattgtctatagaagttaactgatttatgattgttaacacataaatatggccacttatccatttgcctcaacttccatggatgctacctgaattgtttgttcatttatttactttttcaacaaatatgtgctgggtgctgggcttggtgctgagtgcatagtggaaaacaaagcagaacagtctctcatttagatttcttaatctagtgggaaagaaacaataaatacatagtagcaatga

SEQ ID NO: 136040 - DNA, 2895 bp, Homo sapiens
  Payload ID: 6627
  Gene Symbol: GPR85
  Gene Name: G protein-coupled receptor 85
  Uniprot ID: P60893
  ENST ID: ENST00000424100
  CDS Start-End: 455-1567
cgccgccgagccctgcctggatgctcagtcaaggcactaaggcaaaaaaaaaaaaaaaaaaaacaaaaaacaaaaaaaaaaaaaaaaaaaagaaaaagaaaaaaagaaaaaaatcagcaatttatagaaagaagctatagtctgtcgggatatccaacaccaacagtagggcttactgagagctccatttctggaaagccttacaagactgaggaatatcagactgcgaatcaccgggaacggttcctttgcagcacagaagcaatctctctccccatcttcgcatattctgatggcaaaacaagtggaagaaaagaggaagcatgactgcagatcagatcagttctctttgtggattatattttcagtaaaatgtatggatctatcttttccttgttcttatatctagatcatgagacttgactgaggctgtatccttatcctccatccatctatggcgaactatagccatgcagctgacaacattttgcaaaatctctcgcctctaacagcctttctgaaactgacttccttgggtttcataataggagtcagcgtggtgggcaacctcctgatctccattttgctagtgaaagataagaccttgcatagagcaccttactacttcctgttggatctttgctgttcagatatcctcagatctgcaatttgtttcccatttgtgttcaactctgtcaaaaatggttctacctggacttatgggactctgacttgcaaagtgattgcctttctgggggttttgtcctgtttccacactgctttcatgctcttctgcatcagtgtcaccagatatttagctatcgcccatcaccgcttctatacaaagaggctgaccttttggacgtgtctggctgtgatctgtatggtgtggactctgtctgtggccatggcatttcccccggttttagacgtgggcacttactcattcattagggaggaagatcaatgcaccttccaacaccgctccttcagggctaatgattccttaggatttatgctgcttcttgctctcatcctcctagccacacagcttgtctacctcaagctgatatttttcgtccacgatcgaagaaaaatgaagccagtccagtttgtagcagcagtcagccagaactggacttttcatggtcctggagccagtggccaggcagctgccaattggctagcaggatttggaaggggtcccacaccacccaccttgctgggcatcaggcaaaatgcaaacaccacaggcagaagaaggctattggtcttagacgagttcaaaatggagaaaagaatcagcagaatgttctatataatgacttttctgtttctaaccttgtggggcccctacctggtggcctgttattggagagtttttgcaagagggcctgtagtaccagggggatttctaacagctgctgtctggatgagttttgcccaagcaggaatcaatccttttgtctgcattttctcaaacagggagctgaggcgctgtttcagcacaacccttctttactgcagaaaatccaggttaccaagggaaccttactgtgttatatgagggagcatctgtaaatctttagccttgtgaaaactaaccttctctgctgagcaattgtggcccatagccatattttgagaagaaattcaagaatggaatcagcagttttaaggatttgggcaacattctgcagtctttgcaatagttcacctataatcctattttaaatctcagagtgatcctgctgactgccagcaaaggtttgtaattaagaagggactgaaccactgccctaagtttctttatgtggtcaaaaactagataatgaaagtagcaggtgctaagtatcagtgctaaatgctctgtatgtcactacatatgaaaaaacatcaaaaaacaattagcattggacatcttaataaattaagttgacatgaggtaaatgtgttgataaaaactaattttagaagtttgaagactttaaaacatttcatactactattgttttgcaaagactaaaatatttggggacttaaagtactgtaatccactaaagacgtgccaatgaattattggaatatcacactttaaaaaccgccttgtaagttctggggagcattccaaagcagtatattggttccaattagagtttactttttttgtattaatacattgctatttctaaataccactttcctcatctactagtaagattgctagcattgaactgtattatgtggtttttgttgatttggtataaagtttttccaattcatttatattttacaaatgctagatattggtctgggaggcaacattaatggtaccagcctgtcacaactgagcagttctaataatgcagaataaatacatgttgccttaaagggttatctagtatccttcatcttatttagcactggagcaaatagccaagggaaatcaaatcagtaactggtcatggtcatgcatctaaaagtgcatggaagatcatttattactttttccttttttctcacatggtttgaaacttaaagtgcacatcactgaaataatgagattttcttctacggtgtgctaccctttctaaactgttctaagaagcaggcagttgatgtatgtttatattttaagtcagctgtcaaggggagaccacagccttagtatgacatcctgcacaatttgtgaagcatttattctactgaaggcacagtcttgtttatactttctgcacattcagtgtattggtaatttaaattatttcagttttaacttgtgaaagcttatattatgatttctggtattttagaaatacattagagtctgtgagtctcattctttaagatacagatgtgtgaacttcaatataaagttgcatttgccaaaattta

SEQ ID NO: 136041 - DNA, 1630 bp, Homo sapiens
  Payload ID: 6627
  Gene Symbol: GPR85
  Gene Name: G protein-coupled receptor 85
  Uniprot ID: P60893
  ENST ID: ENST00000449591
  CDS Start-End: 518-1630
atatccaacaccaacaggtaggaggatatactcttggttaagtttgggggatgtgggggaatgcacagtgttgatgaaactgcaggttcaccgagaaagagccctccctcaggttgtgtgtgtgtgtgtgtgtgtgtgtgtctctgtgtgtgtgtgtgtgtgtgtgtgtgtatgtgttttgtgacaataaactgcataatggaagtacattcagacaatgcatcttcagtagggcttactgagagctccatttctggaaagccttacaagactgaggaatatcagactgcgaatcaccgggaacggttcctttgcagcacagaagcaatctctctccccatcttcgcatattctgatggcaaaacaagtggaagaaaagaggaagcatgactgcagatcagatcagttctctttgtggattatattttcagtaaaatgtatggatctatcttttccttgttcttatatctagatcatgagacttgactgaggctgtatccttatcctccatccatctatggcgaactatagccatgcagctgacaacattttgcaaaatctctcgcctctaacagcctttctgaaactgacttccttgggtttcataataggagtcagcgtggtgggcaacctcctgatctccattttgctagtgaaagataagaccttgcatagagcaccttactacttcctgttggatctttgctgttcagatatcctcagatctgcaatttgtttcccatttgtgttcaactctgtcaaaaatggttctacctggacttatgggactctgacttgcaaagtgattgcctttctgggggttttgtcctgtttccacactgctttcatgctcttctgcatcagtgtcaccagatatttagctatcgcccatcaccgcttctatacaaagaggctgaccttttggacgtgtctggctgtgatctgtatggtgtggactctgtctgtggccatggcatttcccccggttttagacgtgggcacttactcattcattagggaggaagatcaatgcaccttccaacaccgctccttcagggctaatgattccttaggatttatgctgcttcttgctctcatcctcctagccacacagcttgtctacctcaagctgatatttttcgtccacgatcgaagaaaaatgaagccagtccagtttgtagcagcagtcagccagaactggacttttcatggtcctggagccagtggccaggcagctgccaattggctagcaggatttggaaggggtcccacaccacccaccttgctgggcatcaggcaaaatgcaaacaccacaggcagaagaaggctattggtcttagacgagttcaaaatggagaaaagaatcagcagaatgttctatataatgacttttctgtttctaaccttgtggggcccctacctggtggcctgttattggagagtttttgcaagagggcctgtagtaccagggggatttctaacagctgctgtctggatgagttttgcccaagcaggaatcaatccttttgtctgcattttctcaaacagggagctgaggcgctgtttcagcacaacccttctttactgcagaaaatccaggttaccaagggaaccttactgtgttatatga

SEQ ID NO: 136042 - DNA, 582 bp, Homo sapiens
  Payload ID: 6627
  Gene Symbol: GPR85
  Gene Name: G protein-coupled receptor 85
  ENST ID: ENST00000449735
  CDS Start-End: 219-582
aatttatagaaagaagctatagtctgtcgggatatccaacaccaacagatattctgatggcaaaacaagtggaagaaaagaggaagcatgactgcagatcagatcagttctctttgtggattatattttcagtaaaatgtatggatctatcttttccttgttcttatatctagatcatgagacttgactgaggctgtatccttatcctccatccatctatggcgaactatagccatgcagctgacaacattttgcaaaatctctcgcctctaacagcctttctgaaactgacttccttgggtttcataataggagtcagcgtggtgggcaacctcctgatctccattttgctagtgaaagataagaccttgcatagagcaccttactacttcctgttggatctttgctgttcagatatcctcagatctgcaatttgtttcccatttgtgttcaactctgtcaaaaatggttctacctggacttatgggactctgacttgcaaagtgattgcctttctgggggttttgtcctgtttccacactgctttcatgctcttctgcatcagtgtcaccagatatttag

SEQ ID NO: 136043 - DNA, 591 bp, Homo sapiens
  Payload ID: 6627
  Gene Symbol: GPR85
  Gene Name: G protein-coupled receptor 85
  ENST ID: ENST00000438062
  CDS Start-End: 379-591
aaaaaaaaaaaaaaaaaagaaaaagaaaaaaagaaaaaaatcagcaatttatagaaagaagctatagtctgtcgggatatccaacaccaacagggcttactgagagctccatttctggaaagccttacaagactgaggaatatcagactgcgaatcaccgggaacggttcctttgcagcacagaagcaatctctctccccatcttcgcatattctgatggcaaaacaagtggaagaaaagaggaagcatgactgcagatcagatcagttctctttgtggattatattttcagtaaaatgtatggatctatcttttccttgttcttatatctagatcatgagacttgactgaggctgtatccttatcctccatccatctatggcgaactatagccatgcagctgacaacattttgcaaaatctctcgcctctaacagcctttctgaaactgacttccttgggtttcataataggagtcagcgtggtgggcaacctcctgatctccattttgctagtgaaagataagaccttgcatagagcaccttactacttcctgttggatctttgctgttcagatatcctcagatctgca

SEQ ID NO: 136044 - DNA, 4106 bp, Homo sapiens
  Payload ID: 6627
  Gene Symbol: GPR85
  Gene Name: G protein-coupled receptor 85
  Uniprot ID: P60893
  ENST ID: ENST00000610164
  CDS Start-End: 269-1381
atttctggaaagccttacaagactgaggaatatcagactgcgaatcaccgggaacggttcctttgcagcacagaagcaatctctctccccatcttcgcatattctgatggcaaaacaagtggaagaaaagaggaagcatgactgcagatcagatcagttctctttgtggattatattttcagtaaaatgtatggatctatcttttccttgttcttatatctagatcatgagacttgactgaggctgtatccttatcctccatccatctatggcgaactatagccatgcagctgacaacattttgcaaaatctctcgcctctaacagcctttctgaaactgacttccttgggtttcataataggagtcagcgtggtgggcaacctcctgatctccattttgctagtgaaagataagaccttgcatagagcaccttactacttcctgttggatctttgctgttcagatatcctcagatctgcaatttgtttcccatttgtgttcaactctgtcaaaaatggttctacctggacttatgggactctgacttgcaaagtgattgcctttctgggggttttgtcctgtttccacactgctttcatgctcttctgcatcagtgtcaccagatatttagctatcgcccatcaccgcttctatacaaagaggctgaccttttggacgtgtctggctgtgatctgtatggtgtggactctgtctgtggccatggcatttcccccggttttagacgtgggcacttactcattcattagggaggaagatcaatgcaccttccaacaccgctccttcagggctaatgattccttaggatttatgctgcttcttgctctcatcctcctagccacacagcttgtctacctcaagctgatatttttcgtccacgatcgaagaaaaatgaagccagtccagtttgtagcagcagtcagccagaactggacttttcatggtcctggagccagtggccaggcagctgccaattggctagcaggatttggaaggggtcccacaccacccaccttgctgggcatcaggcaaaatgcaaacaccacaggcagaagaaggctattggtcttagacgagttcaaaatggagaaaagaatcagcagaatgttctatataatgacttttctgtttctaaccttgtggggcccctacctggtggcctgttattggagagtttttgcaagagggcctgtagtaccagggggatttctaacagctgctgtctggatgagttttgcccaagcaggaatcaatccttttgtctgcattttctcaaacagggagctgaggcgctgtttcagcacaacccttctttactgcagaaaatccaggttaccaagggaaccttactgtgttatatgagggagcatctgtaaatctttagccttgtgaaaactaaccttctctgctgagcaattgtggcccatagccatattttgagaagaaattcaagaatggaatcagcagttttaaggatttgggcaacattctgcagtctttgcaatagttcacctataatcctattttaaatctcagagtgatcctgctgactgccagcaaaggtttgtaattaagaagggactgaaccactgccctaagtttctttatgtggtcaaaaactagataatgaaagtagcaggtgctaagtatcagtgctaaatgctctgtatgtcactacatatgaaaaaacatcaaaaaacaattagcattggacatcttaataaattaagttgacatgaggtaaatgtgttgataaaaactaattttagaagtttgaagactttaaaacatttcatactactattgttttgcaaagactaaaatatttggggacttaaagtactgtaatccactaaagacgtgccaatgaattattggaatatcacactttaaaaaccgccttatatcagctggttggatttctcaccaggattgtctatagaagttaactgatttatgattgttaacacataaatatggccacttatccatttgcctcaacttccatggatgctacctgaattgtttgttcatttatttactttttcaacaaatatgtgctgggtgctgggcttggtgctgagtgcatagtggaaaacaaagcagaacagtctctcatttagatttcttaatctagtgggaaagaaacaataaatacatagtagcaatgagttgtgagtgttaatatggtaaaaattccctaagaagaacttggtcataatggccataaatggactgttctccattttcacttcagtgccttatcacctatctttgcccagtgttatttgggatctcgtatatattatacatactccctcaactgagagggaaccccctcattctattcaaagcaccaggaacctttcacccacacttacacgaatcagcgtgttgtattttagaaccagctcccatgtagttaattctatctacataataacagcaaaatctattttcccttccaaagttcccttcatatcccaactatccacttccaaaacagagatatttcaattgctttaagagacatggaggtgtcttttctgacatactcacatgttcctgcaagataggatgaaaatgcgtgggtaaaatgcaatcaaaggaatgacttatttgtgtgcatcttacgatgacttgcgggggccctcccaagtaacttgtgaaacagggtgcatatcttttattattaaagcatgccaccccgtcaatgttttttttttgctccttaattggaatacaataaaactccctaatcgcctatcagctgaaaacttggtttggcctccaaaatttacttctattgtaagtacaatgaaactgatttataaccatacagattacatttttcagctaaactgtgtcataatgagttgggttgcacctgggattactgtaggacagttgcaaacagagccaaaactcttcacttctgtgtattcactattggataaatttactgggtttcattatttcatgccatatgtagcatagactgtattattattattaaaacaaaagcagtttgcattaatttcatattaaaaagaaaagaaagaagctaagatgataaatggtgatgtttcaaatactggctaaagacattaatcaaggtagatggtaaccagaattgtgggttatttatggttctaaaaccttgtgagtttatttttctatgcaaaaatatatcattttcatgtttgttaatattctcttataaatgttttaaatggaaattgcaggatatactaagaactgtttactgctgaaattttttgttgttattgtcaactgtgggcatgtcagcatctgtgagttttctaattccctcagaaactttttttacaccacattaaaatggtagaattgctcagttttgatgcaaaaattcataattagtctgtatagtggttaaaatgaaaataacatttgcaaatgactggaatttcttttttggccatcagtcaaaacagtcaaataagttaaaggcatatttgaattggagcaacgtagagagaagtttttgttgttgttgttgttgttttgataactgtttttgccttatgctgcaatgtaacaggctctaaataatatattaaaaccaaaaaagctttaactgtatgaaaagattatataaacaagtcctggtttttaaaatggggcaggagttttacatcatccctttttgccaaagggatgatgtccattagctgctcaatccctttgggttaaaaggcttttaaagccagttttcctctcaccataacaggcagttattacaaggactggctccctgaaaggtccccagaggaaatcaaggagactgtgtttccctctgagtaattgaaaaaaaaaaaaaaaaaaaggcctcaaagccacaggtggtttggggttttgaattattcacacctgacattcatagctgcctccttggctccttctggggacgtaggacaacatcgtgctcagaaagacctaggttccaagttcagcttggaggcagaaagcaattcctttttcttctctctgtgtttggaaaataatagattattgacacaaatattaaaactgatactgtaatgca

SEQ ID NO: 136045 - DNA, 1608 bp, Homo sapiens
  Payload ID: 6628
  Gene Symbol: GPR87
  Gene Name: G protein-coupled receptor 87
  Uniprot ID: Q9BY21
  ENST ID: ENST00000260843
  CDS Start-End: 466-1542
agccctctgtgtttccttcaggtgaatcaccatctgattcctgcaggttcaggaaatactcttccccagtcgacaaatctcacctactcttagttatgagtcatttacattagcaagagagcaagttgttccagtagtcgcctggcaggagaatttgaaagggtgccccaaaggacaatctctaaaggggtaagggagatacctaccttgtctggtaggggagatgtttcgttttcatgctttaccagaaaatccacttccctgccgaccttagtttcaaagcttattcttaattagagacaagaaacctgtttcaacttgaagacaccgtatgaggtgaatggacagccagccaccacaatgaaagaaatcaaaccaggaataacctatgctgaacccacgcctcaatcgtccccaagtgtttcctgacacgcatctttgcttacagtgcatcacaactgaagaatggggttcaacttgacgcttgcaaaattaccaaataacgagctgcacggccaagagagtcacaattcaggcaacaggagcgacgggccaggaaagaacaccacccttcacaatgaatttgacacaattgtcttgccggtgctttatctcattatatttgtggcaagcatcttgctgaatggtttagcagtgtggatcttcttccacattaggaataaaaccagcttcatattctatctcaaaaacatagtggttgcagacctcataatgacgctgacatttccatttcgaatagtccatgatgcaggatttggaccttggtacttcaagtttattctctgcagatacacttcagttttgttttatgcaaacatgtatacttccatcgtgttccttgggctgataagcattgatcgctatctgaaggtggtcaagccatttggggactctcggatgtacagcataaccttcacgaaggttttatctgtttgtgtttgggtgatcatggctgttttgtctttgccaaacatcatcctaacaaatggtcagccaacagaggacaatatccatgactgctcaaaacttaaaagtcctttgggggtcaaatggcatacggcagtcacctatgtgaacagctgcttgtttgtggccgtgctggtgattctgatcggatgttacatagccatatccaggtacatccacaaatccagcaggcaattcataagtcagtcaagccgaaagcgaaaacataaccagagcatcagggttgttgtggctgtgttttttacctgctttctaccatatcacttgtgcagaattccttttacttttagtcacttagacaggcttttagatgaatctgcacaaaaaatcctatattactgcaaagaaattacacttttcttgtctgcgtgtaatgtttgcctggatccaataatttactttttcatgtgtaggtcattttcaagaaggctgttcaaaaaatcaaatatcagaaccaggagtgaaagcatcagatcactgcaaagtgtgagaagatcggaagttcgcatatattatgattacactgatgtgtaggccttttattgtttgttggaatcgatatgtacaaagtgtaaataaatgtttcttttcattatcctt

SEQ ID NO: 136046 - DNA, 3491 bp, Homo sapiens
  Payload ID: 6629
  Gene Symbol: GPR88
  Gene Name: G protein-coupled receptor 88
  Uniprot ID: Q9GZN0
  ENST ID: ENST00000315033
  CDS Start-End: 440-1594
gggttcaccacatcagccaccactcctgcttctgagcacagggtgctctcctcttgagctcagcttctgcttttgcagccaagcattcttgctgctgctgcctgcctgcccacccgcctgggcttgcagcccgccactttactttctccagccctgataccagctgagaagtctccctgcagctgctagttcctgcccaggaccatgtgtgtggatgctgcttgggagaagcgggcacttgctcctggcactgatcccagctgagtttctcctgttgatttctggaccactgatgctgttgctgaggaggtatttcccggcatccctccccctgagacaccggctaaggaccagcctaaacgcaaggcaggacagtgtcaggatggaccgcgctgccagaagccgacgctagcgagggaggtgtgaagagttggccagaatgaccaactcctcctccacatccacctcctccaccaccggtggctcgctgctgctgctctgcgaggaagaggagtcgtgggcgggccggcgcatcccggtgtcactcctgtattcgggcctggccatcgggggcacgctggccaacggcatggtcatctatctcgtgtcgtccttccgaaagctgcagaccaccagcaacgccttcatcgtgaacggctgcgccgccgacctcagcgtctgcgccctctggatgccgcaggaggcggtgctcgggctcctgcccaccggctctgcggagccccccgcagactgggacggcgctgggggcagctaccgcctgctacggggtgggctgctgggcctcggactcacggtgtccctcctctcccactgcctcgtggccctgaaccgctacctgctcatcacccgggcgcccgccacctaccaggcgctgtaccagaggcgccacacggcgggcatgctggcgctgtcctgggcgctcgccctgggcctcgtgctgctgctcccgccctgggcaccgcggcccggcgccgcgccaccgcgagtccactacccggcgctgctggccgccgcggcgctgctggcgcagacagctctgctgctgcactgctacctgggcatcgtgcgccgcgtgcgtgtcagcgtcaagcgggtcagcgtgctcaacttccacctgctgcaccagttgcccggctgcgccgccgccgccgccgccttcccgggcgcccagcacgcgccgggccccggtggcgccgcgcacccggcgcaggcccagcccctgccgcccgcgctgcacccgcggcgggcacagcggcgtctcagcggcctgtcggtgctgctgctctgctgcgtcttcctgctggccacgcagccactggtgtgggtgagcctggccagcggcttctcgctgccggtgccctggggagtgcaggcggccagctggctcctgtgctgcgccctgtccgcgctcaatccgctgctctacacgtggaggaacgaggagttccgccgctccgtgcgctcagtcctgccgggcgtcggcgacgcggcggccgctgccgttgccgccacagccgtgcccgcagtgtcccaggcgcaactgggcacccgcgccgcgggccagcactggtaacctagccggggcccgagggaagcggagatccccggcttccgacgtccttgggcaccgtcgcctccttccctcctagggcatcccctgcctgaacgaagacttccgccgcgaagcccgatagatcgggggaaaatggggccttcgaccccagcgggctacctgaaccaaggcgtctctttaagtggggcgcccgaagtcattttggacggccacctgatttttaccctttgtttctgtgttttagaggaatcctaaagtcaaaacaccagagacttgaagaacttgcaaactggcgttttaaaataaccggttaatttatttccacacagtttgtttttgaaaaagagctttcataatgtataaccctttccactttcatcgtcttatatatgaagcgccttgagtgtgcatgaaccaaaggaaataacattgaagaaggaaaacaatatgtagaaagtattttagaaagtaacctgtctttgatgatgcttctcttaccatttagtttttgtatattaccctggggcagtgaagccctaggtgtgcccaccagtatgagttgccattaagacctcaagccctttattcttaaaagggtttttaataaagtctttctcaaatgaggtagaatcttagccagtgagaaaaaaaattattttatgctccttttttttcgcactcttaagactgaaaattggcgttgagtgttatagtgaaaattttccagtttgataattgatggtcagagccagcactggaattttgaaaacaaataaggtgattatctattttaggtaccgtttcacattttctatagcatgcacacttgttgctaccctcattttgtaaccaatttatttgccttatgaatgtgattgcagctttgaacattctgtactataatggttgctaagaagaataagtccttctgttttctctttaacatttaaaatatctcaatgcacatgatataattaaacactaataataccatgactgcatagctaatattagctgctattgcatgctcctagatgctagaacttattgggcatgtggtatactgaagcaatacccgttagacaaggatattttacttcttccagacaccagaagaaatggccttcaattatttgaaaagagacacagagacacctctggctacctagagttcttcctgtcttgacccaatttatgagaaagctcccagttgggactttatctcacaagtggaatcacagtcaagacggatcaataatatggtttggctcagcaaagccagctgtgctcttttagggtttaaacaagccacacgttagaaagcaacactgtttttatgtagttcatatatattaccatgacatttaacatcaatatcgtatatgttgaaggaggtataataaactcagtcatatatagtgaacagttcaaatgggaaagtgttctaaaacatattatttgagatttgtcatattcatctttggtttactaaatttacttagaaatatttgaaatgcaaaattgtgtgaaatcaccttatcaaattaaaatgggaagaaagtaattttaataatttttaataatcatatgtcagcattctgactacttaccacatcaaatctgggcccaaacagcctcagttaactgcataattcaggaacaaaaccagcttgctttgttgcacgcctgggcaatttcagccaggacattaggaccacttgttgtacatctgaataattatggaagttgggacatgttaaggaaaacaaatatgttcatcaccaacaatcagctgtcattttattaatctatcccttttgtgcatgcaccatttctctcttactaacagtttcatctgttcacattttccttgattcaaatattaaagttcagacaa

SEQ ID NO: 136047 - DNA, 2120 bp, Homo sapiens
  Payload ID: 6630
  Gene Symbol: GPR89A
  Gene Name: G protein-coupled receptor 89A
  Uniprot ID: B7ZAQ6
  ENST ID: ENST00000313835
  CDS Start-End: 145-1512
agcttgatggcgtcgggctggagagccgcagtcccggctgcagcacctgggagaaggcagaccgtgtgagggggcctgtggccccagcgtgctgtggcctcggggagtgggaagtggaggcaggagccttccttacacttcgccatgagtttcctcatcgactccagcatcatgattacctcccagatactattttttggatttgggtggcttttcttcatgcgccaattgtttaaagactatgagatacgtcagtatgttgtacaggtgatcttctccgtgacgtttgcattttcttgcaccatgtttgagctcatcatctttgaaatcttaggagtattgaatagcagctcccgttattttcactggaaaatgaacctgtgtgtaattctgctgatcctggttttcatggtgcctttttacattggctattttattgtgagcaatatccgactactgcataaacaacgactgcttttttcctgtctcttatggctgacctttatgtatttcttctggaaactaggagatccctttcccattctcagcccaaaacatgggatcttatccatagaacagctcatcagccgggttggtgtgattggagtgactctcatggctcttctttctggatttggtgctgtcaactgcccatacacttacatgtcttacttcctcaggaatgtgactgacacggatattctagccctggaacggcgactgctgcaaaccatggatatgatcataagcaaaaagaaaaggatggcaatggcacggagaacaatgttccagaagggggaagtgcataacaaaccatcaggtttctggggaatgataaaaagtgttaccacttcagcatcaggaagtgaaaatcttactcttattcaacaggaagtggatgctttggaagaattaagcaggcagctttttctggaaacagctgatctatatgctaccaaggagagaatagaatactccaaaaccttcaaggggaaatattttaattttcttggttactttttctctatttactgtgtttggaaaattttcatggctaccatcaatattgtttttgatcgagttgggaaaacggatcctgtcacaagaggcattgagatcactgtgaattatctgggaatccaatttgatgtgaagttttggtcccaacacatttccttcattcttgttggaataatcatcgtcacatccatcagaggattgctgatcactcttaccaagttcttttatgccatctctagcagtaagtcctccaatgtcattgtcctgctattagcacagataatgggcatgtactttgtctcctctgtgctgctgatccgaatgagtatgcctttagaataccgcaccataatcactgaagtccttggagaactgcagttcaacttctatcaccgttggtttgatgtgatcttcctggtcagcgctctctctagcatactcttcctctatttggctcacaaacaggcaccagagaagcaaatggcaccttgaacttaagcctactacagactgttagaggccagtggtttcaaaatttagatataagaggggggaaaaatggaaccagggcctgacattttataaacaaacaaaatgctatggtagcatttttcaccttcatagcatactccttccccgtcaggtgatactatgaccatgagtagcatcagccagaacatgagagggagaactaactcaagacaatactcagcagagagcatcccgtgtggatatgaggctggtgtagaggcggagaggagccaagaaactaaaggtgaaaaatacactggaactctggggcaagacatgtctatggtagctgagccaaacacgtaggatttccgttttaaggttcacatggaaaaggttatagctttgccttgagattgactcattaaaatcagagactgtaacacttttgccttacgttcattttatcaagcatagcttggtatttattatgcttgtgtgatctaacatcagttagcatcccacacctcctcatctgatcctgccccattaaaataaccaagaaagaggttatctgttcttttccgggaaaggggtggtatgcacctgaaatagattttaccaaaaga

SEQ ID NO: 136048 - DNA, 548 bp, Homo sapiens
  Payload ID: 6630
  Gene Symbol: GPR89A
  Gene Name: G protein-coupled receptor 89A
  ENST ID: ENST00000524525
  CDS Start-End: 87-254
agaccgtgtgagggggcctgtggccccagcgtgctgtggcctcggggagtgggaagtggaggcaggagccttccttacacttcgccatgagtttcctcatcgactccagcatcatgattacctcccagccccggctgtcaggagactggcctgcggccgtccgcgtccccacccggcatccatccccggaatttcggtccacttttggaagcggtccgccgacctccaggctaagagccggcgccgccagctaaggcggcggttctaggagctcctcgaagcttccgggctgcgccaactgatcctggactggggaagcctgtgtggttctgggcgcgcggtgtgcgacgcgccaatactggatactgaggacacgtcagtgcaggctttgctgttagatgtcaaatcctgaatccgggtgtggagaaatttgctgcttcaaagtatcagtataagatactattttttggatttgggtggcttttcttcatgcgccaattgtttaaagactatgagatacgtcagtatgttgtacaggtgatcttctc

SEQ ID NO: 136049 - DNA, 1527 bp, Homo sapiens
  Payload ID: 6630
  Gene Symbol: GPR89A
  Gene Name: G protein-coupled receptor 89A
  Uniprot ID: B7ZAQ6
  ENST ID: ENST00000462900
  CDS Start-End: 97-1389
gttagatgtcaaatcctgaatccgggtgtggagaaatttgctgcttcaaagtatcagtataagatactattttttggatttgggtggcttttcttcatgcgccaattgtttaaagactatgagatacgtcagtatgttgtacaggtgatcttctccgtgacgtttgcattttcttgcaccatgtttgagctcatcatctttgaaatcttaggagtattgaatagcagctcccgttattttcactggaaaatgaacctgtgtgtaattctgctgatcctggttttcatggtgcctttttacattggctattttattgtgagcaatatccgactactgcataaacaacgactgcttttttcctgtctcttatggctgacctttatgtatttcttctggaaactaggagatccctttcccattctcagcccaaaacatgggatcttatccatagaacagctcatcagccgggttggtgtgattggagtgactctcatggctcttctttctggatttggtgctgtcaactgcccatacacttacatgtcttacttcctcaggaatgtgactgacacggatattctagccctggaacggcgactgctgcaaaccatggatatgatcataagcaaaaagaaaaggatggcaatggcacggagaacaatgttccagaagggggaagtgcataacaaaccatcaggtttctggggaatgataaaaagtgttaccacttcagcatcaggaagtgaaaatcttactcttattcaacaggaagtggatgctttggaagaattaagcaggcagctttttctggaaacagctgatctatatgctaccaaggagagaatagaatactccaaaaccttcaaggggaaatattttaattttcttggttactttttctctatttactgtgtttggaaaattttcatggctaccatcaatattgtttttgatcgagttgggaaaacggatcctgtcacaagaggcattgagatcactgtgaattatctgggaatccaatttgatgtgaagttttggtcccaacacatttccttcattcttgttggaataatcatcgtcacatccatcagaggattgctgatcactcttaccaagttcttttatgccatctctagcagtaagtcctccaatgtcattgtcctgctattagcacagataatgggcatgtactttgtctcctctgtgctgctgatccgaatgagtatgcctttagaataccgcaccataatcactgaagtccttggagaactgcagttcaacttctatcaccgttggtttgatgtgatcttcctggtcagcgctctctctagcatactcttcctctatttggctcacaaacaggcaccagagaagcaaatggcaccttgaacttaagcctactacagactgttagaggccagtggtttcaaaatttagatataagaggggggaaaaatggaaccagggcctgacattttataaacaaacaaaatgctatggtagcatttttcaccttcatagcatact

SEQ ID NO: 136050 - DNA, 919 bp, Homo sapiens
  Payload ID: 6630
  Gene Symbol: GPR89A
  Gene Name: G protein-coupled receptor 89A
  ENST ID: ENST00000466593
  CDS Start-End: 102-791
cacctgggagaaggcagaccgtgtgagggggcctgtggccccagcgtgctgtggcctcggggagtgggaagtggaggcaggagccttccttacacttcgccatgagtttcctcatcgactccagcatcatgattacctcccagatacgtcagtatgttgtacaggtgatcttctccgtgacgtttgcattttcttgcaccatgtttgagctcatcatctttgaaatcttaggagtattgaatagcagctcccgttattttcactggaaaatgaacctgtgtgtaattctgctgatcctggttttcatggtgcctttttacattggctattttattgtgagcaatatccgactactgcataaacaacgactgcttttttcctgtctcttatggctgacctttatgtatttcttctggaaactaggagatccctttcccattctcagcccaaaacatgggatcttatccatagaacagctcatcagccgggttggtgtgattggagtgactctcatggctcttctttctggatttggtgctgtcaactgcccatacacttacatgtcttacttcctcaggaatgtgactgacacggatattctagccctggaacggcgactgctgcaaaccatggatatgatcataagcaaaaagaaaaggatggcaatggcacggagaacaatgttccagaagggggaagtgcataacaaaccatcaggtttctggggaatgataaaaagtgttaccacttcagcatcaggaagtgaaagtatcctttgtccctctgcttgattctttttctcaactctggaccaagagcaaaagaaaaaaagtagtgttgggatagtcccttctaaggagagaatagaatactccaaaaccttcaaggggaaatattttaattttcttggttacttttt

SEQ ID NO: 136051 - DNA, 866 bp, Homo sapiens
  Payload ID: 6630
  Gene Symbol: GPR89A
  Gene Name: G protein-coupled receptor 89A
  Uniprot ID: B7ZAQ6
  ENST ID: ENST00000528944
  CDS Start-End: 108-482
ctgcagcacctgggagaaggcagaccgtgtgagggggcctgtggccccagcgtgctgtggcctcggggagtgggaagtggaggcaggagccttccttacacttcgccatgagtttcctcatcgactccagcatcatgattacctcccagatactattttttggatttgggtggcttttcttcatgcgccaattgtttaaagactatgagatacgtcagtatgttgtacaggtgatcttctccgtgacgtttgcattttcttgcaccatgtttgagctcatcatctttgaaatcttaggagtattgaatagcagctcccgttattttcactggaaaatgaacctgtgtgtaattctgctgatcctggttttcatggtgcctttttacattggctattttattgtgagcaatatccgactacttttgtctcctctgtctcagtgcataaacaacgactgcttttttcctgtctcttatggctgacctttatgtatttcttctggaaactaggagatccctttcccattctcagcccaaaacatggaatgtgactgacacggatattctagccctggaacggcgactgctgcaaaccatggatatgatcataagcaaaaagaaaaggatggcaatggcacggagaacaatgttccagaagggggaagtgcataacaaaccatcaggtttctggggaatgataaaaagtgttaccacttcagcatcaggaagtgaaaatcttactcttattcaacaggaagtggatgctttggaagaattaagcaggcagctttttctggaaacagctgatctatatgctaccaaggagagaatagaatactccaaaaccttcaaggggaaatattttaa

SEQ ID NO: 136052 - DNA, 1644 bp, Homo sapiens
  Payload ID: 6630
  Gene Symbol: GPR89A
  Gene Name: G protein-coupled receptor 89A
  Uniprot ID: B7ZAQ6
  ENST ID: ENST00000534502
  CDS Start-End: 208-1500
agaccgtgtgagggggcctgtggccccagcgtgctgtggcctcggggagtgggaagtggaggcaggagccttccttacacttcgccatgagtttcctcatcgactccagcatcatgattacctcccagcagataaccttgcctcgtacttactcaacaaaagtgaagccaaaagatactattttttggatttgggtggcttttcttcatgcgccaattgtttaaagactatgagatacgtcagtatgttgtacaggtgatcttctccgtgacgtttgcattttcttgcaccatgtttgagctcatcatctttgaaatcttaggagtattgaatagcagctcccgttattttcactggaaaatgaacctgtgtgtaattctgctgatcctggttttcatggtgcctttttacattggctattttattgtgagcaatatccgactactgcataaacaacgactgcttttttcctgtctcttatggctgacctttatgtatttcttctggaaactaggagatccctttcccattctcagcccaaaacatgggatcttatccatagaacagctcatcagccgggttggtgtgattggagtgactctcatggctcttctttctggatttggtgctgtcaactgcccatacacttacatgtcttacttcctcaggaatgtgactgacacggatattctagccctggaacggcgactgctgcaaaccatggatatgatcataagcaaaaagaaaaggatggcaatggcacggagaacaatgttccagaagggggaagtgcataacaaaccatcaggtttctggggaatgataaaaagtgttaccacttcagcatcaggaagtgaaaatcttactcttattcaacaggaagtggatgctttggaagaattaagcaggcagctttttctggaaacagctgatctatatgctaccaaggagagaatagaatactccaaaaccttcaaggggaaatattttaattttcttggttactttttctctatttactgtgtttggaaaattttcatggctaccatcaatattgtttttgatcgagttgggaaaacggatcctgtcacaagaggcattgagatcactgtgaattatctgggaatccaatttgatgtgaagttttggtcccaacacatttccttcattcttgttggaataatcatcgtcacatccatcagaggattgctgatcactcttaccaagttcttttatgccatctctagcagtaagtcctccaatgtcattgtcctgctattagcacagataatgggcatgtactttgtctcctctgtgctgctgatccgaatgagtatgcctttagaataccgcaccataatcactgaagtccttggagaactgcagttcaacttctatcaccgttggtttgatgtgatcttcctggtcagcgctctctctagcatactcttcctctatttggctcacaaacaggcaccagagaagcaaatggcaccttgaacttaagcctactacagactgttagaggccagtggtttcaaaatttagatataagaggggggaaaaatggaaccagggcctgacattttataaacaaacaaaatgctatggtagcatttttcaccttcatagcatactccttcc

SEQ ID NO: 136053 - DNA, 1955 bp, Homo sapiens
  Payload ID: 6630
  Gene Symbol: GPR89A
  Gene Name: G protein-coupled receptor 89A
  Uniprot ID: B7ZAQ6
  ENST ID: ENST00000460277
  CDS Start-End: 145-519
agcttgatggcgtcgggctggagagccgcagtcccggctgcagcacctgggagaaggcagaccgtgtgagggggcctgtggccccagcgtgctgtggcctcggggagtgggaagtggaggcaggagccttccttacacttcgccatgagtttcctcatcgactccagcatcatgattacctcccagatactattttttggatttgggtggcttttcttcatgcgccaattgtttaaagactatgagatacgtcagtatgttgtacaggtgatcttctccgtgacgtttgcattttcttgcaccatgtttgagctcatcatctttgaaatcttaggagtattgaatagcagctcccgttattttcactggaaaatgaacctgtgtgtaattctgctgatcctggttttcatggtgcctttttacattggctattttattgtgagcaatatccgactacttttgtctcctctgtctcagtgcataaacaacgactgcttttttcctgtctcttatggctgacctttatgtatttcttctggaaactaggagatccctttcccattctcagcccaaaacatgggatcttatccatagaacagctcatcagccgggttggtgtgattggagtgactctcatggctcttctttctggatttggtgctgtcaactgcccatacacttacatgtcttacttcctcaggaatgtgactgacacggatattctagccctggaacggcgactgctgcaaaccatggatatgatcataagcaaaaagaaaaggatggcaatggcacggagaacaatgttccagaagggggaagtgcataacaaaccatcaggtttctggggaatgataaaaagtgttaccacttcagcatcaggaagtgaaaatcttactcttattcaacaggaagtggatgctttggaagaattaagcaggcagctttttctggaaacagctgatctatatgctaccaaggagagaatagaatactccaaaaccttcaaggggaaatattttaattttcttggttactttttctctatttactgtgtttggaaaattttcatggctaccatcaatattgtttttgatcgagttgggaaaacggatcctgtcacaagaggcattgagatcactgtgaattatctgggaatccaatttgatgtgaagttttggtcccaacacatttccttcattcttgttggaataatcatcgtcacatccatcagaggattgctgatcactcttaccaagttcttttatgccatctctagcagtaagtcctccaatgtcattgtcctgctattagcacagataatgggcatgtactttgtctcctctgtgctgctgatccgaatgagtatgcctttagaataccgcaccataatcactgaagtccttggagaactgcagttcaacttctatcaccgttggtttgatgtgatcttcctggtcagcgctctctctagcatactcttcctctatttggctcacaaacaggcaccagagaagcaaatggcaccttgaacttaagcctactacagactgttagaggccagtggtttcaaaatttagatataagaggggggaaaaatggaaccagggcctgacattttataaacaaacaaaatgctatggtagcatttttcaccttcatagcatactccttccccgtcaggtgatactatgaccatgagtagcatcagccagaacatgagagggagaactaactcaagacaatactcagcagagagcatcccgtgtggatatgaggctggtgtagaggcggagaggagccaagaaactaaaggtgaaaaatacactggaactctggggcaagacatgtctatggtagctgagccaaacacgtaggatttccgttttaaggttcacatggaaaaggttatagctttgccttgagattgactcattaaaatcagagactgtaac

SEQ ID NO: 136054 - DNA, 1934 bp, Homo sapiens
  Payload ID: 6631
  Gene Symbol: GPR89B
  Gene Name: G protein-coupled receptor 89B
  Uniprot ID: P0CG08
  ENST ID: ENST00000314163
  CDS Start-End: 145-1512
agcttgacggcgtcgggctggagagccgcagtcccggctgcagcacctgggagaaggcagaccgtgtgagggggcctgtggccccagcgtgctgtggcctccgggagtgggaagtggaggcaggagccttccttacacttcgccatgagtttcctgatcgactccagcatcatgattacctcccagatactattttttggatttgggtggcttttcttcatgcgccaattgtttaaagactatgagatacgtcagtatgttgtacaggtgatcttctccgtgacgtttgcattttcttgcaccatgtttgagctcatcatctttgaaatcttaggagtattgaatagcagctcccgttattttcactggaaaatgaacctgtgtgtaattctgctgatcctggttttcatggtgcctttttacattggctattttattgtgagcaatatccgactactgcataaacaacgactgcttttttcctgtctcttatggctgacctttatgtatttcttctggaaactaggagatccctttcccattctcagcccaaaacatgggatcttatccatagaacagctcatcagccgggttggtgtgattggagtgactctcatggctcttctttctggatttggtgctgtcaactgcccatacacttacatgtcttacttcctcaggaatgtgactgacacggatattctagccctggaacggcgactgctgcaaaccatggatatgatcataagcaaaaagaaaaggatggcaatggcacggagaacaatgttccagaagggggaagtgcataacaaaccatcaggtttctggggaatgataaaaagtgttaccacttcagcatcaggaagtgaaaatcttactcttattcaacaggaagtggatgctttggaagaattaagcaggcagctttttctggaaacagctgatctatatgctaccaaggagagaatagaatactccaaaaccttcaaggggaaatattttaattttcttggttactttttctctatttactgtgtttggaaaattttcatggctaccatcaatattgtttttgatcgagttgggaaaacggatcctgtcacaagaggcattgagatcactgtgaattatctgggaatccaatttgatgtgaagttttggtcccaacacatttccttcattcttgttggaataatcatcgtcacatccatcagaggattgctgatcactcttaccaagttcttttatgccatctctagcagtaagtcctccaatgtcattgtcctgctattagcacagataatgggcatgtactttgtctcctctgtgctgctgatccgaatgagtatgcctttagaataccgcaccataatcactgaagtccttggagaactgcagttcaacttctatcaccgttggtttgatgtgatcttcctggtcagcgctctctctagcatactcttcctctatttggctcacaaacaggcaccagagaagcaaatggcaccttgaacttaagcctactacagactgttagaggccagtggtttcaaaatttagatataagaggggggaaaaatggaaccagggcctgacattttataaacaaacaaaatgctatggtagcatttttcaccttcatagcatactccttccccctcaggtgatactatgaccatgagtagcatcagccagaacatgagagggagaactaactcaagacaatactcagcagagagcatcccgtgtggatatgaggctggtgtagaggcggagaggagccaagaaactaaaggtgaaaaatacactggaactctggggcaagagatgtctatggtagctgagccaaacacgtaggatttccgttttaaggttcacatggaaaaggttatagctttgccttgagattgactcattaaaatcagagactgtaa

SEQ ID NO: 136055 - DNA, 750 bp, Homo sapiens
  Payload ID: 6631
  Gene Symbol: GPR89B
  Gene Name: G protein-coupled receptor 89B
  ENST ID: ENST00000468618
  CDS Start-End: 102-750
cacctgggagaaggcagaccgtgtgagggggcctgtggccccagcgtgctgtggcctccgggagtgggaagtggaggcaggagccttccttacacttcgccatgagtttcctgatcgactccagcatcatgattacctcccagatacgtcagtatgttgtacaggtgatcttctccgtgacgtttgcattttcttgcaccatgtttgagctcatcatctttgaaatcttaggagtattgaatagcagctcccgttattttcactggaaaatgaacctgtgtgtaattctgctgatcctggttttcatggtgcctttttacattggctattttattgtgagcaatatccgactactgcataaacaacgactgcttttttcctgtctcttatggctgacctttatgtatttcttctggaaactaggagatccctttcccattctcagcccaaaacatgggatcttatccatagaacagctcatcagccgggttggtgtgattggagtgactctcatggctcttctttctggatttggtgctgtcaactgcccatacacttacatgtcttacttcctcaggaatgtgactgacacggatattctagccctggaacggcgactgctgcaaaccatggatatgatcataagcaaaaagaaaaggatggcaatggcacggagaacaatgttccagaagggggaagtgcataacaaaccatcaggtttctggggaatgataaaaagtgttaccactt

SEQ ID NO: 136056 - DNA, 574 bp, Homo sapiens
  Payload ID: 6631
  Gene Symbol: GPR89B
  Gene Name: G protein-coupled receptor 89B
  ENST ID: ENST00000461786
  CDS Start-End: 1-280
ctgcccatacacttacatgtcttacttcctcaggaatgtgactgacacggatattctagccctggaacggcgactgctgcaaaccatggatatgatcataagcaaaaagaaaaggatggcaatggcacggagaacaatgttccagaagggggaagtgcataacaaaccatcaggtttctggggaatgataaaaagtgttaccacttcagcatcaggaagtgaaacttcactttccttatgtgcaaaatggataacaccatggcataagacaatcccatgaagataagatataaaagaagataatgtttgaaaagaaataaggaagtggatgctttggaagaattaagcaggcagctttttctggaaacagctgatctatatgctaccaaggagagaatagaatactccaaaaccttcaaggggaaatattttaattttcttggttactttttctctatttactgtgtttggaaaattttcatggctaccatcaatattgtttttgatcgagttgggaaaacggatcctgtcacaagaggcattgagatcactgtgaattatctgggaatccaat

SEQ ID NO: 136057 - DNA, 683 bp, Homo sapiens
  Payload ID: 6631
  Gene Symbol: GPR89B
  Gene Name: G protein-coupled receptor 89B
  ENST ID: ENST00000491975
  CDS Start-End: 1-385
tctcagcccaaaacatgggatcttatccatagaacagctcatcagccgggttggtgtgattggagtgactctcatggctcttctttctggatttggtgctgtcaactgcccatacacttacatgtcttacttcctcaggaatgtgactgacacggatattctagccctggaacggcgactgctgcaaaccatggatatgatcataagcaaaaagaaaaggatggcaatggcacggagaacaatgttccagaagggggaagtgcataacaaaccatcaggtttctggggaatgataaaaagtgttaccacttcagcatcaggaagtgaaacttcactttccttatgtgcaaaatggataacaccatggcataagacaatcccatgaagataagatataaaagaagataatgtttgaaaagaaataagatcttactcttattcaacaggaagtggatgctttggaagaattaagcaggcagctttttctggaaacagctgatctatatgctaccaaggagagaatagaatactccaaaaccttcaaggggaaatattttaattttcttggttactttttctctatttactgtgtttggaaaattttcatggctaccatcaatattgtttttgatcgagttgggaaaacggatcctgtcacaagaggcattgagatcactgtgaat

SEQ ID NO: 136058 - DNA, 1954 bp, Homo sapiens
  Payload ID: 6631
  Gene Symbol: GPR89B
  Gene Name: G protein-coupled receptor 89B
  ENST ID: ENST00000488165
  CDS Start-End: 145-519
agcttgacggcgtcgggctggagagccgcagtcccggctgcagcacctgggagaaggcagaccgtgtgagggggcctgtggccccagcgtgctgtggcctccgggagtgggaagtggaggcaggagccttccttacacttcgccatgagtttcctgatcgactccagcatcatgattacctcccagatactattttttggatttgggtggcttttcttcatgcgccaattgtttaaagactatgagatacgtcagtatgttgtacaggtgatcttctccgtgacgtttgcattttcttgcaccatgtttgagctcatcatctttgaaatcttaggagtattgaatagcagctcccgttattttcactggaaaatgaacctgtgtgtaattctgctgatcctggttttcatggtgcctttttacattggctattttattgtgagcaatatccgactacttttgtctcctctgtctcagtgcataaacaacgactgcttttttcctgtctcttatggctgacctttatgtatttcttctggaaactaggagatccctttcccattctcagcccaaaacatgggatcttatccatagaacagctcatcagccgggttggtgtgattggagtgactctcatggctcttctttctggatttggtgctgtcaactgcccatacacttacatgtcttacttcctcaggaatgtgactgacacggatattctagccctggaacggcgactgctgcaaaccatggatatgatcataagcaaaaagaaaaggatggcaatggcacggagaacaatgttccagaagggggaagtgcataacaaaccatcaggtttctggggaatgataaaaagtgttaccacttcagcatcaggaagtgaaaatcttactcttattcaacaggaagtggatgctttggaagaattaagcaggcagctttttctggaaacagctgatctatatgctaccaaggagagaatagaatactccaaaaccttcaaggggaaatattttaattttcttggttactttttctctatttactgtgtttggaaaattttcatggctaccatcaatattgtttttgatcgagttgggaaaacggatcctgtcacaagaggcattgagatcactgtgaattatctgggaatccaatttgatgtgaagttttggtcccaacacatttccttcattcttgttggaataatcatcgtcacatccatcagaggattgctgatcactcttaccaagttcttttatgccatctctagcagtaagtcctccaatgtcattgtcctgctattagcacagataatgggcatgtactttgtctcctctgtgctgctgatccgaatgagtatgcctttagaataccgcaccataatcactgaagtccttggagaactgcagttcaacttctatcaccgttggtttgatgtgatcttcctggtcagcgctctctctagcatactcttcctctatttggctcacaaacaggcaccagagaagcaaatggcaccttgaacttaagcctactacagactgttagaggccagtggtttcaaaatttagatataagaggggggaaaaatggaaccagggcctgacattttataaacaaacaaaatgctatggtagcatttttcaccttcatagcatactccttccccctcaggtgatactatgaccatgagtagcatcagccagaacatgagagggagaactaactcaagacaatactcagcagagagcatcccgtgtggatatgaggctggtgtagaggcggagaggagccaagaaactaaaggtgaaaaatacactggaactctggggcaagagatgtctatggtagctgagccaaacacgtaggatttccgttttaaggttcacatggaaaaggttatagctttgccttgagattgactcattaaaatcagagactgtaa

SEQ ID NO: 136059 - DNA, 5971 bp, Homo sapiens
  Payload ID: 6632
  Gene Symbol: GPRASP1
  Gene Name: G protein-coupled receptor associated sorting protein 1
  Uniprot ID: Q5JY77
  ENST ID: ENST00000361600
  CDS Start-End: 802-4989
gcactttcgcgccgtatccctccgccccccttcccgacaccctcgcggagagcggttcttgccgcatcctgcgcagcccctgcccagtttggtgcagaggcgtggggggcgggactcgtctttgccattcggatcgctgggaaagcggtgggaatccaactgaagagcagccagaggagagctgaagagaggagggggaggccgatgacctgggctctgggcctctgaaggtctggcgtattctgacaggacacagtgagcatctgtagaggagaggcttgaaataaaggaggagcacgaatattccctggatttctggaggcctgctttaaggctggccagttctgcaagaaaggcaaggaggaggagactggctcacacctctggaggacccccttctgtcagctgtggggcttgacactacttgaacaagaaaaggagggggaaactgcaccacataagtgaagatccacctccagtggctgctctgctggtggtggggttgctgctgacaaccaccctcaacgggtctgcacccatccaggaaatctctgtcttcctcaagcttggttgtgcctgttctacactctatctgtattattgaattactgactgagactgtgtttgggaaggaggctgagtgactactggactggatattgactctaactcttgtttccaagcttatatcctcaatcacctaaagatcagagtgtgaagaaacaaacctgtgacagatctgtggttgaggtttagactgggggaggagtatagtactggactttctttgtaacttgtaccatgactggggcagagattgagtctggtgcccaggtcaagcctgaaaagaagcctggggaagaggttgtaggtggggctgagatagagaatgatgtccctctggtggtcagacccaaggttaggacccaggcccagataatgcctggggcaaggcccaagaataagtccaaggttatgcctggagcaagcaccaaagttgagacaagtgcagtgggtggggcacgccctaagagtaaggccaaggcaatacctgtttcacgatttaaggaagaagcccagatgtgggctcagcccaggtttggtgctgaaagattgtctaagacagagagaaactcccagaccaatatcatagcctctccacttgtcagtactgattctgtcttggttgctaaaacaaagtacctgtctgaggatagagaactggttaatacagacactgagagctttcctagaaggaaggcccattaccaagcaggattccagccttcttttaggtcaaaggaggagaccaatatggggtcctggtgctgtcctaggcctacatccaaacaagaagcctctcctaattctgatttcaaatgggtagacaaatctgtgagttccttgttctggagtggagatgaggtcactgcaaaatttcatcctgggaatagggtaaaagacagtaacagatccatgcacatggccaatcaagaggctaataccatgtctaggtcccaaactaaccaggagctctatattgcatctagttctggttctgaggatgagtctgttaagacaccctggttctgggccagagataaaaccaatacctggtctgggcccagggaagatcccaatagcaggtccaggtttaggtctaagaaagaagtctatgttgaatcaagttctggatctgagcatgaagaccatttggagtcctggtttggggctggaaaggaggccaaattcaggtccaaaatgagagctgggaaggaggccaataacagggccaggcacagggccaagcgagaagcttgcattgatttcatgcctgggtctatagatgtaattaaaaaagagtcctgtttctggcctgaagaaaatgctaataccttttcaaggcccatgatcaagaaagaggccagggccagagcaatgacaaaggaagaggccaaaaccaaggcccgagccagggccaagcaagaagccaggtcagaggaggaagccctcattgggacctggttctgggctacagacgagtccagcatggcagatgaagccagcatagagtccagtctacaagtggaggatgagtccataattgggagttggttctggactgaagaagaggccagtatggggactggggctagcagtaaatccagaccaaggactgatggggagcgtattggtgattccttatttggggctagggaaaagaccagtatgaaaactggggctgaggccacctctgaatctatactagcagctgatgatgaacaggtcattattggttcctggttctgggctggtgaagaggtcaaccaagaggctgaggaagagaccatttttgggtcgtggttctgggtcattgatgcggccagtgtggaatctggtgttggggtcagctgtgagtccaggacaaggtctgaggaagaagaggtcattggtccctggttttggtctggagaacaagttgatatagaggctggaatcggagaagaggccaggccaggagctgaagaagagacaatattcgggtcctggttttgggctgaaaaccagacctatatggattgtagggctgaaactagctgtgacaccatgcaaggggctgaggaggaggagcccattattgggtcctggttttggaccagagtagaagcttgtgtggagggtgatgtcaacagcaagtctagcctggaggacaaggaagaggccatgataccatgttttggagccaaagaagaggtcagtatgaagcatgggactggtgtcagatgcagatttatggcaggggctgaggagaccaataataagtcttgcttctgggcagaaaaagaaccctgtatgtatcctgccggtggaggaagttggaagtctaggccagaggaggaagaggacattgtcaattcgtggttctggtccagaaaatacacaaagccagaggccattatagggtcctggttatgggctacagaagagagtaatatagatgggactggagaaaaggccaagttactgactgaagaggagaccataatcaattcctggttctggaaagaagatgaagccatttcagaggctactgacagagaagagtccaggccagaagctgaggagggggacattattggttcttggttctgggctggagaagaggacagactagagccagctgctgagactagagaagaagacaggctagcagctgagaaagaaggtattgttgggtcctggtttggggccagagaagagaccattagaagagaggctgggtcttgcagcaaatccagtcctaaagctgaagaggaagaagtcattattgggtcctggttctgggaagaagaggccagtccggaggcagtggcaggagtcggctttgagtcaaagcctgggactgaggaggaagaaatcactgttgggtcctggttctggcctgaagaagaagccagtatacaggctggatctcaggcagtagaggaaatggagtcagagactgaagaggaaaccatttttgggtcctggttctgggatggaaaagaagtcagtgaagaagcaggaccatgctgtgtatccaagccagaggatgatgaagagatgattgttgagtcctggttctggtctagagacaaagccattaaggaaactggaactgtggccacctgtgagtccaagccagaaaatgaggaaggggccattgttgggtcttggtttgaggctgaagatgaggtagataacaggactgacaatggaagcaactgtgggtccaggacattagctgatgaagatgaggccatagtggggtcctggttctgggcaggagatgaggcccattttgaatcaaatcctagccccgtgttcagggccatttgcaggtccacgtgttcagttgaacaggagcctgatccttcacgcaggcctcagagttgggaggaggtcactgttcagttcaagcctggtccatggggtagggtcggcttcccatctataagcccctttagatttccgaaagaggcagcatctttattctgtgaaatgtttgggggcaaacccaggaacatggtacttagcccagaaggggaagatcaggaatctttgcttcagcctgatcagcctagtcctgagttcccatttcagtatgatccttcctacaggtcagtccaggaaattcgagagcatcttagggccaaggagagtacagagcctgagagttcatcctgtaactgcatacaatgtgagctgaaaattggttctgaagagtttgaagaactccttttattaatggaaaaaattcgggatccttttattcatgaaatatctaaaatcgcaatgggtatgagaagtgcttctcaatttacccgagatttcattcgagattcaggtgttgtctcacttattgaaaccttgcttaattatccgtcctcccgagttagaacaagttttttggaaaatatgattcgcatggccccaccttatccgaatctaaacataattcagacatacatatgtaaagtgtgtgaggaaacccttgcttatagcgtggattccccggaacagctgtctggaataaggatgattagacatctcactactactactgactatcacacactggttgccaattatatgtctgggtttctctccttattagctacaggcaatgccaaaacaaggtttcatgttttgaaaatgctactgaatttgtctgaaaatcttttcatgacaaaagaactactcagtgctgaagcagtgtcagaatttataggcctctttaacagggaagagacaaatgacaatattcaaattgttcttgcaatatttgagaatattggcaacaatatcaaaaaagaaacagtgttctctgatgatgatttcaatattgagccgcttatttctgcattccacaaagttgagaaatttgctaaggaactgcaaggcaaaacagacaatcaaaatgaccctgaaggggaccaagaaaattagtaatggttaattgctggcctcagattgtccttatgttcctgagttatgatccttgagtaatgctttgattttaatagttggttctgtgttgcaacatatatctttagtgctgacactaactttgtccaactctgtctgtaagctggagcatttttctgatgccagctgaatattagagctgaaaacacatttgttgatatttgtcttgtccacattgtgatgttcagtatttgagcttatagtgaactgagcaatcataaataagccacccttctgattgtcgttctactgtatatatatatatatttgagtgttgtttgtgtttcaataaagtcctatgttaaagttggcagaaatcacccttcttcttgaaattaaaatacagacccaatgataacacatgaacacacatagagataattaatatatgaataatatgttcctttcaaaagtttttttctcagctttaaacgcaaaaattaccaggggctgctatgtagggcatacttcagagaaaaagtagctacttcggttggactctgaagtttgggaaagatattggtggtgtaaaaaaaaaaaaaagcatggagttaggaaaaattttcctatgggagtgaggtatcctgtttgcctagagtgagtgagaggaatatattgagcaacatagaggatgacataagttttaaagagctgaggatttgcattttacagctcaaagtacaactgctgcttccatactacctaaagggcaaaagaataagacaggaaagcatagggatttgattgagtcaggaagacaatttaatcatgatggtaccatggtaagtgttaaggcaacatcatacagccattaaacatgatgatgtatagggttttaggaaaagccctgacatttttgatatttcatataatagagaacactggtgtcatacatgggaagtatgatcccatttgaaaaataaatgtgaataaattgaccaaa

SEQ ID NO: 136060 - DNA, 5877 bp, Homo sapiens
  Payload ID: 6632
  Gene Symbol: GPRASP1
  Gene Name: G protein-coupled receptor associated sorting protein 1
  Uniprot ID: Q5JY77
  ENST ID: ENST00000415986
  CDS Start-End: 711-4898
gcactttcgcgccgtatccctccgccccccttcccgacaccctcgcggagagcggttcttgccgcatcctgcgcagcccctgcccagtttggtgcagaggcgtggggggcgggactcgtctttgccattcggatcgctgggaaagcggtgggaatccaactgaagagcagccagaggagagctgaagagaggagggggaggccgatgacctgggctctgggcctctgaaggcctgctttaaggctggccagttctgcaagaaaggcaaggaggaggagactggctcacacctctggaggacccccttctgtcagctgtggggcttgacactacttgaacaagaaaaggagggggaaactgcaccacataagtgaagatccacctccagtggctgctctgctggtggtggggttgctgctgacaaccaccctcaacgggtctgcacccatccaggaaatctctgtcttcctcaagcttggttgtgcctgttctacactctatctgtattattgaattactgactgagactgtgtttgggaaggaggctgagtgactactggactggatattgactctaactcttgtttccaagcttatatcctcaatcacctaaagatcagagtgtgaagaaacaaacctgtgacagatctgtggttgaggtttagactgggggaggagtatagtactggactttctttgtaacttgtaccatgactggggcagagattgagtctggtgcccaggtcaagcctgaaaagaagcctggggaagaggttgtaggtggggctgagatagagaatgatgtccctctggtggtcagacccaaggttaggacccaggcccagataatgcctggggcaaggcccaagaataagtccaaggttatgcctggagcaagcaccaaagttgagacaagtgcagtgggtggggcacgccctaagagtaaggccaaggcaatacctgtttcacgatttaaggaagaagcccagatgtgggctcagcccaggtttggtgctgaaagattgtctaagacagagagaaactcccagaccaatatcatagcctctccacttgtcagtactgattctgtcttggttgctaaaacaaagtacctgtctgaggatagagaactggttaatacagacactgagagctttcctagaaggaaggcccattaccaagcaggattccagccttcttttaggtcaaaggaggagaccaatatggggtcctggtgctgtcctaggcctacatccaaacaagaagcctctcctaattctgatttcaaatgggtagacaaatctgtgagttccttgttctggagtggagatgaggtcactgcaaaatttcatcctgggaatagggtaaaagacagtaacagatccatgcacatggccaatcaagaggctaataccatgtctaggtcccaaactaaccaggagctctatattgcatctagttctggttctgaggatgagtctgttaagacaccctggttctgggccagagataaaaccaatacctggtctgggcccagggaagatcccaatagcaggtccaggtttaggtctaagaaagaagtctatgttgaatcaagttctggatctgagcatgaagaccatttggagtcctggtttggggctggaaaggaggccaaattcaggtccaaaatgagagctgggaaggaggccaataacagggccaggcacagggccaagcgagaagcttgcattgatttcatgcctgggtctatagatgtaattaaaaaagagtcctgtttctggcctgaagaaaatgctaataccttttcaaggcccatgatcaagaaagaggccagggccagagcaatgacaaaggaagaggccaaaaccaaggcccgagccagggccaagcaagaagccaggtcagaggaggaagccctcattgggacctggttctgggctacagacgagtccagcatggcagatgaagccagcatagagtccagtctacaagtggaggatgagtccataattgggagttggttctggactgaagaagaggccagtatggggactggggctagcagtaaatccagaccaaggactgatggggagcgtattggtgattccttatttggggctagggaaaagaccagtatgaaaactggggctgaggccacctctgaatctatactagcagctgatgatgaacaggtcattattggttcctggttctgggctggtgaagaggtcaaccaagaggctgaggaagagaccatttttgggtcgtggttctgggtcattgatgcggccagtgtggaatctggtgttggggtcagctgtgagtccaggacaaggtctgaggaagaagaggtcattggtccctggttttggtctggagaacaagttgatatagaggctggaatcggagaagaggccaggccaggagctgaagaagagacaatattcgggtcctggttttgggctgaaaaccagacctatatggattgtagggctgaaactagctgtgacaccatgcaaggggctgaggaggaggagcccattattgggtcctggttttggaccagagtagaagcttgtgtggagggtgatgtcaacagcaagtctagcctggaggacaaggaagaggccatgataccatgttttggagccaaagaagaggtcagtatgaagcatgggactggtgtcagatgcagatttatggcaggggctgaggagaccaataataagtcttgcttctgggcagaaaaagaaccctgtatgtatcctgccggtggaggaagttggaagtctaggccagaggaggaagaggacattgtcaattcgtggttctggtccagaaaatacacaaagccagaggccattatagggtcctggttatgggctacagaagagagtaatatagatgggactggagaaaaggccaagttactgactgaagaggagaccataatcaattcctggttctggaaagaagatgaagccatttcagaggctactgacagagaagagtccaggccagaagctgaggagggggacattattggttcttggttctgggctggagaagaggacagactagagccagctgctgagactagagaagaagacaggctagcagctgagaaagaaggtattgttgggtcctggtttggggccagagaagagaccattagaagagaggctgggtcttgcagcaaatccagtcctaaagctgaagaggaagaagtcattattgggtcctggttctgggaagaagaggccagtccggaggcagtggcaggagtcggctttgagtcaaagcctgggactgaggaggaagaaatcactgttgggtcctggttctggcctgaagaagaagccagtatacaggctggatctcaggcagtagaggaaatggagtcagagactgaagaggaaaccatttttgggtcctggttctgggatggaaaagaagtcagtgaagaagcaggaccatgctgtgtatccaagccagaggatgatgaagagatgattgttgagtcctggttctggtctagagacaaagccattaaggaaactggaactgtggccacctgtgagtccaagccagaaaatgaggaaggggccattgttgggtcttggtttgaggctgaagatgaggtagataacaggactgacaatggaagcaactgtgggtccaggacattagctgatgaagatgaggccatagtggggtcctggttctgggcaggagatgaggcccattttgaatcaaatcctagccccgtgttcagggccatttgcaggtccacgtgttcagttgaacaggagcctgatccttcacgcaggcctcagagttgggaggaggtcactgttcagttcaagcctggtccatggggtagggtcggcttcccatctataagcccctttagatttccgaaagaggcagcatctttattctgtgaaatgtttgggggcaaacccaggaacatggtacttagcccagaaggggaagatcaggaatctttgcttcagcctgatcagcctagtcctgagttcccatttcagtatgatccttcctacaggtcagtccaggaaattcgagagcatcttagggccaaggagagtacagagcctgagagttcatcctgtaactgcatacaatgtgagctgaaaattggttctgaagagtttgaagaactccttttattaatggaaaaaattcgggatccttttattcatgaaatatctaaaatcgcaatgggtatgagaagtgcttctcaatttacccgagatttcattcgagattcaggtgttgtctcacttattgaaaccttgcttaattatccgtcctcccgagttagaacaagttttttggaaaatatgattcgcatggccccaccttatccgaatctaaacataattcagacatacatatgtaaagtgtgtgaggaaacccttgcttatagcgtggattccccggaacagctgtctggaataaggatgattagacatctcactactactactgactatcacacactggttgccaattatatgtctgggtttctctccttattagctacaggcaatgccaaaacaaggtttcatgttttgaaaatgctactgaatttgtctgaaaatcttttcatgacaaaagaactactcagtgctgaagcagtgtcagaatttataggcctctttaacagggaagagacaaatgacaatattcaaattgttcttgcaatatttgagaatattggcaacaatatcaaaaaagaaacagtgttctctgatgatgatttcaatattgagccgcttatttctgcattccacaaagttgagaaatttgctaaggaactgcaaggcaaaacagacaatcaaaatgaccctgaaggggaccaagaaaattagtaatggttaattgctggcctcagattgtccttatgttcctgagttatgatccttgagtaatgctttgattttaatagttggttctgtgttgcaacatatatctttagtgctgacactaactttgtccaactctgtctgtaagctggagcatttttctgatgccagctgaatattagagctgaaaacacatttgttgatatttgtcttgtccacattgtgatgttcagtatttgagcttatagtgaactgagcaatcataaataagccacccttctgattgtcgttctactgtatatatatatatatttgagtgttgtttgtgtttcaataaagtcctatgttaaagttggcagaaatcacccttcttcttgaaattaaaatacagacccaatgataacacatgaacacacatagagataattaatatatgaataatatgttcctttcaaaagtttttttctcagctttaaacgcaaaaattaccaggggctgctatgtagggcatacttcagagaaaaagtagctacttcggttggactctgaagtttgggaaagatattggtggtgtaaaaaaaaaaaaaagcatggagttaggaaaaattttcctatgggagtgaggtatcctgtttgcctagagtgagtgagaggaatatattgagcaacatagaggatgacataagttttaaagagctgaggatttgcattttacagctcaaagtacaactgctgcttccatactacctaaagggcaaaagaataagacaggaaagcatagggatttgattgagtcaggaagacaatttaatcatgatggtaccatggtaagtgttaaggcaacatcatacagccattaaacatgatgatgtatagggttttaggaaaagccctgacatttttgatatttcatataatagagaacactggtgtcatacatgggaagtatgatcccatttgaaaaataaatgtgaataaattgacc

SEQ ID NO: 136061 - DNA, 5809 bp, Homo sapiens
  Payload ID: 6632
  Gene Symbol: GPRASP1
  Gene Name: G protein-coupled receptor associated sorting protein 1
  Uniprot ID: Q5JY77
  ENST ID: ENST00000444152
  CDS Start-End: 643-4830
gcactttcgcgccgtatccctccgccccccttcccgacaccctcgcggagagcggttcttgccgcatcctgcgcagcccctgcccagtttggtgcagaggcgtggggggcgggactcgtctttgccattcggatcgctgggaaagcggtgggaatccaactgaagagcagccagaggagagctgaagagaggagggggaggccgatgacctgggctctgggcctctgaaggacccccttctgtcagctgtggggcttgacactacttgaacaagaaaaggagggggaaactgcaccacataagtgaagatccacctccagtggctgctctgctggtggtggggttgctgctgacaaccaccctcaacgggtctgcacccatccaggaaatctctgtcttcctcaagcttggttgtgcctgttctacactctatctgtattattgaattactgactgagactgtgtttgggaaggaggctgagtgactactggactggatattgactctaactcttgtttccaagcttatatcctcaatcacctaaagatcagagtgtgaagaaacaaacctgtgacagatctgtggttgaggtttagactgggggaggagtatagtactggactttctttgtaacttgtaccatgactggggcagagattgagtctggtgcccaggtcaagcctgaaaagaagcctggggaagaggttgtaggtggggctgagatagagaatgatgtccctctggtggtcagacccaaggttaggacccaggcccagataatgcctggggcaaggcccaagaataagtccaaggttatgcctggagcaagcaccaaagttgagacaagtgcagtgggtggggcacgccctaagagtaaggccaaggcaatacctgtttcacgatttaaggaagaagcccagatgtgggctcagcccaggtttggtgctgaaagattgtctaagacagagagaaactcccagaccaatatcatagcctctccacttgtcagtactgattctgtcttggttgctaaaacaaagtacctgtctgaggatagagaactggttaatacagacactgagagctttcctagaaggaaggcccattaccaagcaggattccagccttcttttaggtcaaaggaggagaccaatatggggtcctggtgctgtcctaggcctacatccaaacaagaagcctctcctaattctgatttcaaatgggtagacaaatctgtgagttccttgttctggagtggagatgaggtcactgcaaaatttcatcctgggaatagggtaaaagacagtaacagatccatgcacatggccaatcaagaggctaataccatgtctaggtcccaaactaaccaggagctctatattgcatctagttctggttctgaggatgagtctgttaagacaccctggttctgggccagagataaaaccaatacctggtctgggcccagggaagatcccaatagcaggtccaggtttaggtctaagaaagaagtctatgttgaatcaagttctggatctgagcatgaagaccatttggagtcctggtttggggctggaaaggaggccaaattcaggtccaaaatgagagctgggaaggaggccaataacagggccaggcacagggccaagcgagaagcttgcattgatttcatgcctgggtctatagatgtaattaaaaaagagtcctgtttctggcctgaagaaaatgctaataccttttcaaggcccatgatcaagaaagaggccagggccagagcaatgacaaaggaagaggccaaaaccaaggcccgagccagggccaagcaagaagccaggtcagaggaggaagccctcattgggacctggttctgggctacagacgagtccagcatggcagatgaagccagcatagagtccagtctacaagtggaggatgagtccataattgggagttggttctggactgaagaagaggccagtatggggactggggctagcagtaaatccagaccaaggactgatggggagcgtattggtgattccttatttggggctagggaaaagaccagtatgaaaactggggctgaggccacctctgaatctatactagcagctgatgatgaacaggtcattattggttcctggttctgggctggtgaagaggtcaaccaagaggctgaggaagagaccatttttgggtcgtggttctgggtcattgatgcggccagtgtggaatctggtgttggggtcagctgtgagtccaggacaaggtctgaggaagaagaggtcattggtccctggttttggtctggagaacaagttgatatagaggctggaatcggagaagaggccaggccaggagctgaagaagagacaatattcgggtcctggttttgggctgaaaaccagacctatatggattgtagggctgaaactagctgtgacaccatgcaaggggctgaggaggaggagcccattattgggtcctggttttggaccagagtagaagcttgtgtggagggtgatgtcaacagcaagtctagcctggaggacaaggaagaggccatgataccatgttttggagccaaagaagaggtcagtatgaagcatgggactggtgtcagatgcagatttatggcaggggctgaggagaccaataataagtcttgcttctgggcagaaaaagaaccctgtatgtatcctgccggtggaggaagttggaagtctaggccagaggaggaagaggacattgtcaattcgtggttctggtccagaaaatacacaaagccagaggccattatagggtcctggttatgggctacagaagagagtaatatagatgggactggagaaaaggccaagttactgactgaagaggagaccataatcaattcctggttctggaaagaagatgaagccatttcagaggctactgacagagaagagtccaggccagaagctgaggagggggacattattggttcttggttctgggctggagaagaggacagactagagccagctgctgagactagagaagaagacaggctagcagctgagaaagaaggtattgttgggtcctggtttggggccagagaagagaccattagaagagaggctgggtcttgcagcaaatccagtcctaaagctgaagaggaagaagtcattattgggtcctggttctgggaagaagaggccagtccggaggcagtggcaggagtcggctttgagtcaaagcctgggactgaggaggaagaaatcactgttgggtcctggttctggcctgaagaagaagccagtatacaggctggatctcaggcagtagaggaaatggagtcagagactgaagaggaaaccatttttgggtcctggttctgggatggaaaagaagtcagtgaagaagcaggaccatgctgtgtatccaagccagaggatgatgaagagatgattgttgagtcctggttctggtctagagacaaagccattaaggaaactggaactgtggccacctgtgagtccaagccagaaaatgaggaaggggccattgttgggtcttggtttgaggctgaagatgaggtagataacaggactgacaatggaagcaactgtgggtccaggacattagctgatgaagatgaggccatagtggggtcctggttctgggcaggagatgaggcccattttgaatcaaatcctagccccgtgttcagggccatttgcaggtccacgtgttcagttgaacaggagcctgatccttcacgcaggcctcagagttgggaggaggtcactgttcagttcaagcctggtccatggggtagggtcggcttcccatctataagcccctttagatttccgaaagaggcagcatctttattctgtgaaatgtttgggggcaaacccaggaacatggtacttagcccagaaggggaagatcaggaatctttgcttcagcctgatcagcctagtcctgagttcccatttcagtatgatccttcctacaggtcagtccaggaaattcgagagcatcttagggccaaggagagtacagagcctgagagttcatcctgtaactgcatacaatgtgagctgaaaattggttctgaagagtttgaagaactccttttattaatggaaaaaattcgggatccttttattcatgaaatatctaaaatcgcaatgggtatgagaagtgcttctcaatttacccgagatttcattcgagattcaggtgttgtctcacttattgaaaccttgcttaattatccgtcctcccgagttagaacaagttttttggaaaatatgattcgcatggccccaccttatccgaatctaaacataattcagacatacatatgtaaagtgtgtgaggaaacccttgcttatagcgtggattccccggaacagctgtctggaataaggatgattagacatctcactactactactgactatcacacactggttgccaattatatgtctgggtttctctccttattagctacaggcaatgccaaaacaaggtttcatgttttgaaaatgctactgaatttgtctgaaaatcttttcatgacaaaagaactactcagtgctgaagcagtgtcagaatttataggcctctttaacagggaagagacaaatgacaatattcaaattgttcttgcaatatttgagaatattggcaacaatatcaaaaaagaaacagtgttctctgatgatgatttcaatattgagccgcttatttctgcattccacaaagttgagaaatttgctaaggaactgcaaggcaaaacagacaatcaaaatgaccctgaaggggaccaagaaaattagtaatggttaattgctggcctcagattgtccttatgttcctgagttatgatccttgagtaatgctttgattttaatagttggttctgtgttgcaacatatatctttagtgctgacactaactttgtccaactctgtctgtaagctggagcatttttctgatgccagctgaatattagagctgaaaacacatttgttgatatttgtcttgtccacattgtgatgttcagtatttgagcttatagtgaactgagcaatcataaataagccacccttctgattgtcgttctactgtatatatatatatatttgagtgttgtttgtgtttcaataaagtcctatgttaaagttggcagaaatcacccttcttcttgaaattaaaatacagacccaatgataacacatgaacacacatagagataattaatatatgaataatatgttcctttcaaaagtttttttctcagctttaaacgcaaaaattaccaggggctgctatgtagggcatacttcagagaaaaagtagctacttcggttggactctgaagtttgggaaagatattggtggtgtaaaaaaaaaaaaaagcatggagttaggaaaaattttcctatgggagtgaggtatcctgtttgcctagagtgagtgagaggaatatattgagcaacatagaggatgacataagttttaaagagctgaggatttgcattttacagctcaaagtacaactgctgcttccatactacctaaagggcaaaagaataagacaggaaagcatagggatttgattgagtcaggaagacaatttaatcatgatggtaccatggtaagtgttaaggcaacatcatacagccattaaacatgatgatgtatagggttttaggaaaagccctgacatttttgatatttcatataatagagaacactggtgtcatacatgggaagtatgatcccatttgaaaaataaatgtgaataaattgacc

SEQ ID NO: 136062 - DNA, 5980 bp, Homo sapiens
  Payload ID: 6632
  Gene Symbol: GPRASP1
  Gene Name: G protein-coupled receptor associated sorting protein 1
  Uniprot ID: Q5JY77
  ENST ID: ENST00000537097
  CDS Start-End: 814-5001
gacaccctcgcggagagcggttcttgccgcatcctgcgcagcccctgcccagtttggtgcagaggcgtggggggcgggactcgtctttgccattcggatcgctgggaaagcggtgggaatccaactgaagagcagccagaggagagctgaagagaggagggggaggccgatgacctgggctctgggcctctgaagcctggcaacgaggagacgatccgttcggagccgggcgctagagagaggtctggcgtattctgacaggacacagtgagcatctgtagaggagaggcttgaaataaaggaggagcacgaatattccctggatttctggaggcctgctttaaggctggccagttctgcaagaaaggcaaggaggaggagactggctcacacctctggaggacccccttctgtcagctgtggggcttgacactacttgaacaagaaaaggagggggaaactgcaccacataagtgaagatccacctccagtggctgctctgctggtggtggggttgctgctgacaaccaccctcaacgggtctgcacccatccaggaaatctctgtcttcctcaagcttggttgtgcctgttctacactctatctgtattattgaattactgactgagactgtgtttgggaaggaggctgagtgactactggactggatattgactctaactcttgtttccaagcttatatcctcaatcacctaaagatcagagtgtgaagaaacaaacctgtgacagatctgtggttgaggtttagactgggggaggagtatagtactggactttctttgtaacttgtaccatgactggggcagagattgagtctggtgcccaggtcaagcctgaaaagaagcctggggaagaggttgtaggtggggctgagatagagaatgatgtccctctggtggtcagacccaaggttaggacccaggcccagataatgcctggggcaaggcccaagaataagtccaaggttatgcctggagcaagcaccaaagttgagacaagtgcagtgggtggggcacgccctaagagtaaggccaaggcaatacctgtttcacgatttaaggaagaagcccagatgtgggctcagcccaggtttggtgctgaaagattgtctaagacagagagaaactcccagaccaatatcatagcctctccacttgtcagtactgattctgtcttggttgctaaaacaaagtacctgtctgaggatagagaactggttaatacagacactgagagctttcctagaaggaaggcccattaccaagcaggattccagccttcttttaggtcaaaggaggagaccaatatggggtcctggtgctgtcctaggcctacatccaaacaagaagcctctcctaattctgatttcaaatgggtagacaaatctgtgagttccttgttctggagtggagatgaggtcactgcaaaatttcatcctgggaatagggtaaaagacagtaacagatccatgcacatggccaatcaagaggctaataccatgtctaggtcccaaactaaccaggagctctatattgcatctagttctggttctgaggatgagtctgttaagacaccctggttctgggccagagataaaaccaatacctggtctgggcccagggaagatcccaatagcaggtccaggtttaggtctaagaaagaagtctatgttgaatcaagttctggatctgagcatgaagaccatttggagtcctggtttggggctggaaaggaggccaaattcaggtccaaaatgagagctgggaaggaggccaataacagggccaggcacagggccaagcgagaagcttgcattgatttcatgcctgggtctatagatgtaattaaaaaagagtcctgtttctggcctgaagaaaatgctaataccttttcaaggcccatgatcaagaaagaggccagggccagagcaatgacaaaggaagaggccaaaaccaaggcccgagccagggccaagcaagaagccaggtcagaggaggaagccctcattgggacctggttctgggctacagacgagtccagcatggcagatgaagccagcatagagtccagtctacaagtggaggatgagtccataattgggagttggttctggactgaagaagaggccagtatggggactggggctagcagtaaatccagaccaaggactgatggggagcgtattggtgattccttatttggggctagggaaaagaccagtatgaaaactggggctgaggccacctctgaatctatactagcagctgatgatgaacaggtcattattggttcctggttctgggctggtgaagaggtcaaccaagaggctgaggaagagaccatttttgggtcgtggttctgggtcattgatgcggccagtgtggaatctggtgttggggtcagctgtgagtccaggacaaggtctgaggaagaagaggtcattggtccctggttttggtctggagaacaagttgatatagaggctggaatcggagaagaggccaggccaggagctgaagaagagacaatattcgggtcctggttttgggctgaaaaccagacctatatggattgtagggctgaaactagctgtgacaccatgcaaggggctgaggaggaggagcccattattgggtcctggttttggaccagagtagaagcttgtgtggagggtgatgtcaacagcaagtctagcctggaggacaaggaagaggccatgataccatgttttggagccaaagaagaggtcagtatgaagcatgggactggtgtcagatgcagatttatggcaggggctgaggagaccaataataagtcttgcttctgggcagaaaaagaaccctgtatgtatcctgccggtggaggaagttggaagtctaggccagaggaggaagaggacattgtcaattcgtggttctggtccagaaaatacacaaagccagaggccattatagggtcctggttatgggctacagaagagagtaatatagatgggactggagaaaaggccaagttactgactgaagaggagaccataatcaattcctggttctggaaagaagatgaagccatttcagaggctactgacagagaagagtccaggccagaagctgaggagggggacattattggttcttggttctgggctggagaagaggacagactagagccagctgctgagactagagaagaagacaggctagcagctgagaaagaaggtattgttgggtcctggtttggggccagagaagagaccattagaagagaggctgggtcttgcagcaaatccagtcctaaagctgaagaggaagaagtcattattgggtcctggttctgggaagaagaggccagtccggaggcagtggcaggagtcggctttgagtcaaagcctgggactgaggaggaagaaatcactgttgggtcctggttctggcctgaagaagaagccagtatacaggctggatctcaggcagtagaggaaatggagtcagagactgaagaggaaaccatttttgggtcctggttctgggatggaaaagaagtcagtgaagaagcaggaccatgctgtgtatccaagccagaggatgatgaagagatgattgttgagtcctggttctggtctagagacaaagccattaaggaaactggaactgtggccacctgtgagtccaagccagaaaatgaggaaggggccattgttgggtcttggtttgaggctgaagatgaggtagataacaggactgacaatggaagcaactgtgggtccaggacattagctgatgaagatgaggccatagtggggtcctggttctgggcaggagatgaggcccattttgaatcaaatcctagccccgtgttcagggccatttgcaggtccacgtgttcagttgaacaggagcctgatccttcacgcaggcctcagagttgggaggaggtcactgttcagttcaagcctggtccatggggtagggtcggcttcccatctataagcccctttagatttccgaaagaggcagcatctttattctgtgaaatgtttgggggcaaacccaggaacatggtacttagcccagaaggggaagatcaggaatctttgcttcagcctgatcagcctagtcctgagttcccatttcagtatgatccttcctacaggtcagtccaggaaattcgagagcatcttagggccaaggagagtacagagcctgagagttcatcctgtaactgcatacaatgtgagctgaaaattggttctgaagagtttgaagaactccttttattaatggaaaaaattcgggatccttttattcatgaaatatctaaaatcgcaatgggtatgagaagtgcttctcaatttacccgagatttcattcgagattcaggtgttgtctcacttattgaaaccttgcttaattatccgtcctcccgagttagaacaagttttttggaaaatatgattcgcatggccccaccttatccgaatctaaacataattcagacatacatatgtaaagtgtgtgaggaaacccttgcttatagcgtggattccccggaacagctgtctggaataaggatgattagacatctcactactactactgactatcacacactggttgccaattatatgtctgggtttctctccttattagctacaggcaatgccaaaacaaggtttcatgttttgaaaatgctactgaatttgtctgaaaatcttttcatgacaaaagaactactcagtgctgaagcagtgtcagaatttataggcctctttaacagggaagagacaaatgacaatattcaaattgttcttgcaatatttgagaatattggcaacaatatcaaaaaagaaacagtgttctctgatgatgatttcaatattgagccgcttatttctgcattccacaaagttgagaaatttgctaaggaactgcaaggcaaaacagacaatcaaaatgaccctgaaggggaccaagaaaattagtaatggttaattgctggcctcagattgtccttatgttcctgagttatgatccttgagtaatgctttgattttaatagttggttctgtgttgcaacatatatctttagtgctgacactaactttgtccaactctgtctgtaagctggagcatttttctgatgccagctgaatattagagctgaaaacacatttgttgatatttgtcttgtccacattgtgatgttcagtatttgagcttatagtgaactgagcaatcataaataagccacccttctgattgtcgttctactgtatatatatatatatttgagtgttgtttgtgtttcaataaagtcctatgttaaagttggcagaaatcacccttcttcttgaaattaaaatacagacccaatgataacacatgaacacacatagagataattaatatatgaataatatgttcctttcaaaagtttttttctcagctttaaacgcaaaaattaccaggggctgctatgtagggcatacttcagagaaaaagtagctacttcggttggactctgaagtttgggaaagatattggtggtgtaaaaaaaaaaaaaagcatggagttaggaaaaattttcctatgggagtgaggtatcctgtttgcctagagtgagtgagaggaatatattgagcaacatagaggatgacataagttttaaagagctgaggatttgcattttacagctcaaagtacaactgctgcttccatactacctaaagggcaaaagaataagacaggaaagcatagggatttgattgagtcaggaagacaatttaatcatgatggtaccatggtaagtgttaaggcaacatcatacagccattaaacatgatgatgtatagggttttaggaaaagccctgacatttttgatatttcatataatagagaacactggtgtcatacatgggaagtatgatcccatttgaaaaataaatgtgaataaattgacc

SEQ ID NO: 136063 - DNA, 3720 bp, Homo sapiens
  Payload ID: 6633
  Gene Symbol: GPRASP2
  Gene Name: G protein-coupled receptor associated sorting protein 2
  Uniprot ID: Q96D09
  ENST ID: ENST00000332262
  CDS Start-End: 857-3373
agcagcgacagaaatatggtagtggtcgccacgttagggtccgtgggggcctcctgaggcagcctggtgccaacccgcacgcccaggctggggctcatcctggccctgcccacctcggggtcggaactacggtgggcctgggatgggggcgtcaagcactttcgcgccgtatccctccgccccccttcccgacaccctcgcggcgagcggttcttgccgcatcctgcgcagcccctgcctactttggtgcagaggcgtggggggcgggacgcgtctttcccgttcggatcgcggggaaagcagtggctccaagtgagccagaggagagctgaggagaggagggggaggccgacgacctgggccctgggcctctgaaggcctactttaaggctggccaattctgcaagaaaggcaaggaggaggagactggctcacagctctggaggacccccttctgtcagctgtggggcttgacaccacttgaacaagaaaaggagggggaaactgcaccacatcagtgaagatccacctccagtggctgctctgctggtggtggagttgctgctgacaaccaccctcaacgggtctgcacccatccaggaaatatctgtcttcctttagcttggttgtacctgttctcactctatctgtattattgaattattgactgagactgtgtttgggaaggaggctgagtgactactggactggatattgactctaactcttattcccaagcttatatccttaatcacctaaagatcagagtgtgaagaaacaaacctgtgacagatctgtggttgaggtttagactacgggaggagtatattacctgactttctttgtaacttgtaccatgactggggcagagattgagcctagtgcccaggccaagcctgaaaagaaggctggggaagaggttatcgctgggcctgagagagagaatgatgtccctctggtggtcagacccaaggttaggacccaggcaactactggggcaaggcccaaaactgagaccaagtctgtgcctgcggcaaggcccaaaactgaggcccaagcaatgtctggggcaaggcccaaaactgaggtccaagtaatgggtggtgcaagacccaaaacggaggctcaaggaatcacaggggccaggcccaaaaccgatgccagggcagtaggtggcgctcgttctaaaactgatgccaaggcaatccctggagcaaggcccaaggatgaggcccaggcatgggcccagagtgaatttgggactgaagcagtgtcacaggcagaaggagtgtcccagactaatgccgttgcttggccactggccactgctgagtctggatcagttactaaatctaagggcctgtctatggatagagaactagtcaatgtggatgctgaaacctttcctggcacccagggtcagaaaggaatccagccctggtttggaccaggggaggagactaatatggggtcttggtgctattccaggcccagggccagagaggaggcctctaatgagtctgggttctggtcagcagatgagacctctacagcgtcttctttctggactggagaagagacaagtgtcagatcatggcccagggaagagtccaataccaggtccaggcacagggctaaacatcagactaatcccaggtccaggcccagatccaagcaagaagcctatgttgattcctggtctggatctgaggatgaggccagcaacccattctccttctgggttggagaaaataccaataacttgttcaggcccagagtcagggaggaggcaaatatcaggtccaagctcaggacaaatagagaagattgttttgaatctgagtctgaagatgagttctataagcagtcctgggttttgcctggagaagaggccaatagtagattcaggcacagagacaaagaagatcctaatactgccttgaaactcagggcccagaaagatgttgacagtgatagggtcaaacaagaacccaggtttgaggaggaagtcattattgggtcctggttctgggcagaaaaagaggccagtttggagggtggagcttcagcaatctgtgaatctgagccaggaactgaggagggggccattggcggatccgcgtactgggctgaggaaaagtccagtttgggggctgtggccagagaagaggccaagccggagtctgaagaagaggccatatttgggtcctggttctgggacagagatgaggcctgctttgacctaaatccctgtcctgtgtacaaggtcagtgataggttcagagatgcagctgaggagcttaatgcatcctccaggccccaaacctgggacgaggtcactgttgaattcaaacctggtctttttcatggggttggcttccgatccacaagcccctttggaattcccgaagaggcttctgaaatgcttgaggcaaagcccaagaacctggaacttagcccagaaggagaagagcaggaatctttgcttcagcctgatcagcctagtcctgagttcacatttcagtatgatccttcctaccggtcagtccgggaaattcgagagcatcttagggccagggagagtgcagagtctgagagttggtcctgcagctgcatacaatgtgagctgaaaattggttctgaagagtttgaagaattccttttattaatggacaaaattcgggatccttttattcatgaaatatctaaaattgcaatgggtatgagaagtgcttctcaatttacccgagatttcattcgagattcaggtgttgtctcacttattgaaaccttgcttaattatccatcctctagagttaggacaagttttttggaaaatatgattcacatggctccaccttatccaaatctaaacatgattgagacattcatatgtcaagtgtgtgaggaaacccttgcacatagtgtggattcccttgagcagctgactggaataaggatgcttagacacctcactatgactattgactatcacacactgattgccaactatatgtccgggtttctctccttattaaccacagccaatgcgagaacgaagtttcacgttctgaaaatgctattgaatttgtctgaaaatcctgctgtggcaaaaaaactattcagtgccaaagctctttcaatatttgtgggtctctttaacatagaagagacaaatgataatattcaaattgttattaaaatgtttcagaatatcagtaacattataaaaagtggaaagatgtccttaattgatgatgatttcagtcttgagccgcttatttctgcatttcgtgaatttgaggagttagctaagcaactacaagcccaaatagacaaccaaaatgatcctgaggtgggacaacaaagttaatatgattaaccacctgccgctgatcagccttatgttcccaaagagccctgagtagtgctttggtgttcacagtctgtttttttgttgtaacttatattttttaatgctgatgttaactttgtcaaactcttgttttgagctggatcattttgtggatgccaaatgaatatcaaaactgaaaacacatttgttgatatttgtcttgctgtccagattgcggtatttttcagtattaagttttcaatgaactgtgtcacctaagtaagctaccctgctattcgttgtttaaatatatggttctctatttgagtctgtgttttcaataaagttctatgttaaaattggca

SEQ ID NO: 136064 - DNA, 3847 bp, Homo sapiens
  Payload ID: 6633
  Gene Symbol: GPRASP2
  Gene Name: G protein-coupled receptor associated sorting protein 2
  Uniprot ID: Q96D09
  ENST ID: ENST00000535209
  CDS Start-End: 985-3501
agcagcgacagaaatatggtagtggtcgccacgttagggtccgtgggggcctcctgaggcagcctggtgccaacccgcacgcccaggctggggctcatcctggccctgcccacctcggggtcggaactacggtgggcctgggatgggggcgtcaagcactttcgcgccgtatccctccgccccccttcccgacaccctcgcggcgagcggttcttgccgcatcctgcgcagcccctgcctactttggtgcagaggcgtggggggcgggacgcgtctttcccgttcggatcgcggggaaagcagtggctccaagtgagccagaggagagctgaggagaggagggggaggccgacgacctgggccctgggcctctgaaggcctactttaaggctggccaattctgcaagaaaggcaaggaggaggagactggctcacagctctggaggacccccttctgtcagctgtggggcttgacaccacttgaacaagaaaaggagggggaaactgcaccacatcagtgaaggaggcagccggtccagagagactttctcaaagcccagctgtcccacctagcattcaacatcagtcgcactgcatacgtctcatacaattggaagagactcaaagcctcatttcattctctctccctagatccacctccagtggctgctctgctggtggtggagttgctgctgacaaccaccctcaacgggtctgcacccatccaggaaatatctgtcttcctttagcttggttgtacctgttctcactctatctgtattattgaattattgactgagactgtgtttgggaaggaggctgagtgactactggactggatattgactctaactcttattcccaagcttatatccttaatcacctaaagatcagagtgtgaagaaacaaacctgtgacagatctgtggttgaggtttagactacgggaggagtatattacctgactttctttgtaacttgtaccatgactggggcagagattgagcctagtgcccaggccaagcctgaaaagaaggctggggaagaggttatcgctgggcctgagagagagaatgatgtccctctggtggtcagacccaaggttaggacccaggcaactactggggcaaggcccaaaactgagaccaagtctgtgcctgcggcaaggcccaaaactgaggcccaagcaatgtctggggcaaggcccaaaactgaggtccaagtaatgggtggtgcaagacccaaaacggaggctcaaggaatcacaggggccaggcccaaaaccgatgccagggcagtaggtggcgctcgttctaaaactgatgccaaggcaatccctggagcaaggcccaaggatgaggcccaggcatgggcccagagtgaatttgggactgaagcagtgtcacaggcagaaggagtgtcccagactaatgccgttgcttggccactggccactgctgagtctggatcagttactaaatctaagggcctgtctatggatagagaactagtcaatgtggatgctgaaacctttcctggcacccagggtcagaaaggaatccagccctggtttggaccaggggaggagactaatatggggtcttggtgctattccaggcccagggccagagaggaggcctctaatgagtctgggttctggtcagcagatgagacctctacagcgtcttctttctggactggagaagagacaagtgtcagatcatggcccagggaagagtccaataccaggtccaggcacagggctaaacatcagactaatcccaggtccaggcccagatccaagcaagaagcctatgttgattcctggtctggatctgaggatgaggccagcaacccattctccttctgggttggagaaaataccaataacttgttcaggcccagagtcagggaggaggcaaatatcaggtccaagctcaggacaaatagagaagattgttttgaatctgagtctgaagatgagttctataagcagtcctgggttttgcctggagaagaggccaatagtagattcaggcacagagacaaagaagatcctaatactgccttgaaactcagggcccagaaagatgttgacagtgatagggtcaaacaagaacccaggtttgaggaggaagtcattattgggtcctggttctgggcagaaaaagaggccagtttggagggtggagcttcagcaatctgtgaatctgagccaggaactgaggagggggccattggcggatccgcgtactgggctgaggaaaagtccagtttgggggctgtggccagagaagaggccaagccggagtctgaagaagaggccatatttgggtcctggttctgggacagagatgaggcctgctttgacctaaatccctgtcctgtgtacaaggtcagtgataggttcagagatgcagctgaggagcttaatgcatcctccaggccccaaacctgggacgaggtcactgttgaattcaaacctggtctttttcatggggttggcttccgatccacaagcccctttggaattcccgaagaggcttctgaaatgcttgaggcaaagcccaagaacctggaacttagcccagaaggagaagagcaggaatctttgcttcagcctgatcagcctagtcctgagttcacatttcagtatgatccttcctaccggtcagtccgggaaattcgagagcatcttagggccagggagagtgcagagtctgagagttggtcctgcagctgcatacaatgtgagctgaaaattggttctgaagagtttgaagaattccttttattaatggacaaaattcgggatccttttattcatgaaatatctaaaattgcaatgggtatgagaagtgcttctcaatttacccgagatttcattcgagattcaggtgttgtctcacttattgaaaccttgcttaattatccatcctctagagttaggacaagttttttggaaaatatgattcacatggctccaccttatccaaatctaaacatgattgagacattcatatgtcaagtgtgtgaggaaacccttgcacatagtgtggattcccttgagcagctgactggaataaggatgcttagacacctcactatgactattgactatcacacactgattgccaactatatgtccgggtttctctccttattaaccacagccaatgcgagaacgaagtttcacgttctgaaaatgctattgaatttgtctgaaaatcctgctgtggcaaaaaaactattcagtgccaaagctctttcaatatttgtgggtctctttaacatagaagagacaaatgataatattcaaattgttattaaaatgtttcagaatatcagtaacattataaaaagtggaaagatgtccttaattgatgatgatttcagtcttgagccgcttatttctgcatttcgtgaatttgaggagttagctaagcaactacaagcccaaatagacaaccaaaatgatcctgaggtgggacaacaaagttaatatgattaaccacctgccgctgatcagccttatgttcccaaagagccctgagtagtgctttggtgttcacagtctgtttttttgttgtaacttatattttttaatgctgatgttaactttgtcaaactcttgttttgagctggatcattttgtggatgccaaatgaatatcaaaactgaaaacacatttgttgatatttgtcttgctgtccagattgcggtatttttcagtattaagttttcaatgaactgtgtcacctaagtaagctaccctgctattcgttgtttaaatatatggttctctatttgagtctgtgttttcaataaagttctatgttaaaattggc

SEQ ID NO: 136065 - DNA, 3935 bp, Homo sapiens
  Payload ID: 6633
  Gene Symbol: GPRASP2
  Gene Name: G protein-coupled receptor associated sorting protein 2
  Uniprot ID: Q96D09
  ENST ID: ENST00000543253
  CDS Start-End: 1073-3589
agcagcgacagaaatatggtagtggtcgccacgttagggtccgtgggggcctcctgaggcagcctggtgccaacccgcacgcccaggctggggctcatcctggccctgcccacctcggggtcggaactacggtgggcctgggatgggggcgtcaagcactttcgcgccgtatccctccgccccccttcccgacaccctcgcggcgagcggttcttgccgcatcctgcgcagcccctgcctactttggtgcagaggcgtggggggcgggacgcgtctttcccgttcggatcgcggggaaagcagtggctccaagtgagccagaggagagctgaggagaggagggggaggccgacgacctgggccctgggcctctgaaggtctggcgtattctgacaggacacagtgagcgtctgtagaggagaggcttgaaataaaggagcacgaatattgcctggatttctggaggcctactttaaggctggccaattctgcaagaaaggcaaggaggaggagactggctcacagctctggaggacccccttctgtcagctgtggggcttgacaccacttgaacaagaaaaggagggggaaactgcaccacatcagtgaaggaggcagccggtccagagagactttctcaaagcccagctgtcccacctagcattcaacatcagtcgcactgcatacgtctcatacaattggaagagactcaaagcctcatttcattctctctccctagatccacctccagtggctgctctgctggtggtggagttgctgctgacaaccaccctcaacgggtctgcacccatccaggaaatatctgtcttcctttagcttggttgtacctgttctcactctatctgtattattgaattattgactgagactgtgtttgggaaggaggctgagtgactactggactggatattgactctaactcttattcccaagcttatatccttaatcacctaaagatcagagtgtgaagaaacaaacctgtgacagatctgtggttgaggtttagactacgggaggagtatattacctgactttctttgtaacttgtaccatgactggggcagagattgagcctagtgcccaggccaagcctgaaaagaaggctggggaagaggttatcgctgggcctgagagagagaatgatgtccctctggtggtcagacccaaggttaggacccaggcaactactggggcaaggcccaaaactgagaccaagtctgtgcctgcggcaaggcccaaaactgaggcccaagcaatgtctggggcaaggcccaaaactgaggtccaagtaatgggtggtgcaagacccaaaacggaggctcaaggaatcacaggggccaggcccaaaaccgatgccagggcagtaggtggcgctcgttctaaaactgatgccaaggcaatccctggagcaaggcccaaggatgaggcccaggcatgggcccagagtgaatttgggactgaagcagtgtcacaggcagaaggagtgtcccagactaatgccgttgcttggccactggccactgctgagtctggatcagttactaaatctaagggcctgtctatggatagagaactagtcaatgtggatgctgaaacctttcctggcacccagggtcagaaaggaatccagccctggtttggaccaggggaggagactaatatggggtcttggtgctattccaggcccagggccagagaggaggcctctaatgagtctgggttctggtcagcagatgagacctctacagcgtcttctttctggactggagaagagacaagtgtcagatcatggcccagggaagagtccaataccaggtccaggcacagggctaaacatcagactaatcccaggtccaggcccagatccaagcaagaagcctatgttgattcctggtctggatctgaggatgaggccagcaacccattctccttctgggttggagaaaataccaataacttgttcaggcccagagtcagggaggaggcaaatatcaggtccaagctcaggacaaatagagaagattgttttgaatctgagtctgaagatgagttctataagcagtcctgggttttgcctggagaagaggccaatagtagattcaggcacagagacaaagaagatcctaatactgccttgaaactcagggcccagaaagatgttgacagtgatagggtcaaacaagaacccaggtttgaggaggaagtcattattgggtcctggttctgggcagaaaaagaggccagtttggagggtggagcttcagcaatctgtgaatctgagccaggaactgaggagggggccattggcggatccgcgtactgggctgaggaaaagtccagtttgggggctgtggccagagaagaggccaagccggagtctgaagaagaggccatatttgggtcctggttctgggacagagatgaggcctgctttgacctaaatccctgtcctgtgtacaaggtcagtgataggttcagagatgcagctgaggagcttaatgcatcctccaggccccaaacctgggacgaggtcactgttgaattcaaacctggtctttttcatggggttggcttccgatccacaagcccctttggaattcccgaagaggcttctgaaatgcttgaggcaaagcccaagaacctggaacttagcccagaaggagaagagcaggaatctttgcttcagcctgatcagcctagtcctgagttcacatttcagtatgatccttcctaccggtcagtccgggaaattcgagagcatcttagggccagggagagtgcagagtctgagagttggtcctgcagctgcatacaatgtgagctgaaaattggttctgaagagtttgaagaattccttttattaatggacaaaattcgggatccttttattcatgaaatatctaaaattgcaatgggtatgagaagtgcttctcaatttacccgagatttcattcgagattcaggtgttgtctcacttattgaaaccttgcttaattatccatcctctagagttaggacaagttttttggaaaatatgattcacatggctccaccttatccaaatctaaacatgattgagacattcatatgtcaagtgtgtgaggaaacccttgcacatagtgtggattcccttgagcagctgactggaataaggatgcttagacacctcactatgactattgactatcacacactgattgccaactatatgtccgggtttctctccttattaaccacagccaatgcgagaacgaagtttcacgttctgaaaatgctattgaatttgtctgaaaatcctgctgtggcaaaaaaactattcagtgccaaagctctttcaatatttgtgggtctctttaacatagaagagacaaatgataatattcaaattgttattaaaatgtttcagaatatcagtaacattataaaaagtggaaagatgtccttaattgatgatgatttcagtcttgagccgcttatttctgcatttcgtgaatttgaggagttagctaagcaactacaagcccaaatagacaaccaaaatgatcctgaggtgggacaacaaagttaatatgattaaccacctgccgctgatcagccttatgttcccaaagagccctgagtagtgctttggtgttcacagtctgtttttttgttgtaacttatattttttaatgctgatgttaactttgtcaaactcttgttttgagctggatcattttgtggatgccaaatgaatatcaaaactgaaaacacatttgttgatatttgtcttgctgtccagattgcggtatttttcagtattaagttttcaatgaactgtgtcacctaagtaagctaccctgctattcgttgtttaaatatatggttctctatttgagtctgtgttttcaataaagttctatgttaaaattggc

SEQ ID NO: 136066 - DNA, 4296 bp, Homo sapiens
  Payload ID: 6634
  Gene Symbol: GRK1
  Gene Name: G protein-coupled receptor kinase 1
  Uniprot ID: Q15835
  ENST ID: ENST00000335678
  CDS Start-End: 233-1924
ctccgtgaccccggctgggatttagcctggtgctgtgtcagccccgggctcccaggggcttcccagtggtccccaggaaccctcgacagggccagggcgtctctctcgtccagcaagggcagggacgggccacaggccaagggcagcagtcaggcctgctctgtctgtgaacgctcccggcttggcctcggctgatgggccctcacgcctgaagcgggcaggaagctccgggatggatttcgggtctttggagaccgtggtggccaactctgccttcatcgccgcccgaggcagctttgacggcagcagctcccaaccctcccgggacaagaagtacctggccaagctcaagctgcccccgctgtccaagtgtgagtccctccgcgacagcctcagcctggagtttgagagtgtgtgcttggagcagcccatcggcaagaagctctttcagcagttcctacaatcggcagagaagcacctgccggccctggagctctggaaagacatcgaggactatgacacggcagacaatgacctccagccacagaaggcccagaccatcctggcccagtacctggacccccaggccaaactcttctgcagcttcctggatgaggggatagtggcgaagtttaaggaggggcctgtggagatccaggacgggctcttccagcccctgctgcaggccaccctggcacacctgggccaagcccccttccaggagtacctgggcagcctgtacttcctgaggttcctgcagtggaagtggctggaagcccagcccatgggggaggactggttcctggacttcagggtcctagggaaagggggcttcggggaggtgtcggcctgccagatgaaggcgaccggcaagctgtatgcctgcaagaagctgaacaagaagcggctgaagaagaggaagggctaccagggtgctatggtggagaagaagattctgatgaaagtacacagcaggttcatcgtgtctctggcctatgcgtttgaaaccaaagccgacctctgtctggtgatgaccatcatgaacggaggtgacatcaggtaccacatctacaacgtgaatgaggagaaccctggcttcccggagccgcgcgccctcttctacacggcgcagatcatctgcggcctggagcacctgcaccagaggcggatcgtctaccgcgacctcaagcccgagaacgtgctgctggacaatgacggcaatgtccggatctctgaccttgggctggccgtggagctgctggacggacagagcaagaccaagggctacgcagggaccccaggtttcatggcccccgagctcctgcagggcgaggagtacgacttctccgtggactactttgccctgggggtcaccctgtatgagatgattgcggccagaggacccttccgagcccgtggagagaaggtggagaacaaggagctgaagcaccggatcatctcagagcccgtgaagtaccctgataagttcagccaggccagcaaggacttctgcgaggcgctgctggagaaggacccggagaagcgcctggggttcagagatgagacctgcgacaagctccgtgcccaccccctcttcaaggaccttaactggaggcagctggaggctgggatgctgatgccccctttcatcccagactccaaaactgtctacgcaaaggatattcaggacgtgggtgccttttccaccgtcaaaggtgtggcctttgacaaaacagacacagaattctttcaggaatttgccactggcaactgccccatcccctggcaggaggagatgatcgagacgggcatctttggcgagctgaacgtgtggcgctcggacggtcagatgccggacgacatgaagggcatctccgggggctccagctcctcgtccaagtcagggatgtgtctggtttcctaggtgacgccccagagtccacgtggaggaaaaggacccatacggctcgatgggggccgcctgcctccgtggtgccagcctggggtctgctagcaaggggacacgtggttccctccacccaggtccccatcacgccatctccttgcggcccaaggaggagaaagcccacatcggcctgagccgccagacgcacatgctggtgccgtgagcccccgactgcatatttcacgtcttttgctccatctcactgagaagacataagatgctctccagagggagtaagccaaaaatctacaaactcttagggagcctcctgcattggtgattgaccaaccgtgtggtcaggggcagagactcggttttggcctcccaagaccttagccattggcttcccagagccacgctcctcagcgggaggtgcacggtggccaggtcaggggtcagtgaaccctggccgcagcccctggccccactggggagggctggacctcgccccccccaggtccctctgtgcaggctcctgacttccagggtgcccgggccctgtgctggtggcctgcacgccacatggtcccctgcaccctgcggcgccgtggtcctctgcacactggggcaccatggtcccctgcactccggggtgccatggtccacatctgccaggcgcaggctctgttgggctgttgggaggaggggagcgggtgtggagtctgggggtctcagtgcatcttggggtctccttatctcagggtgtccagctgacggcagctggtgcaaagttcccacccctgagctggggagctgaaaatgttttctgtcttgaccctgagtcccggaagcacctcagctgctcttggcgggcaaagccaggaccgtttgctctctgaccctcctccccactggggctggtccgtctcatctcccaggggacacttcaggccacgggccttgtgcatagggacagagctccttgctgcaacccctctctgtgttcccagtagcagcagcactggagtcctaaagccatagcccgggaagacactcacagcccaccttctcatacagctcggccccacccacaatgcacctggcatttccaactgcactttgaacactgaaggttccccaaatgctttgtgtgttttaactgcaggaagttagttctgttgcaactgcctccaggacacactccctcttgagggccggcggtgctggcctgggttccatggcctcagcagccggctcagagggagtgcatccaagccgcagggaagcagtggtgatgggcggcctgaggactcctttccagagagggcctctgagctccttttaggaaagaacttcctttgagccccggccactgttgtaccagtgggagaagaagcctgaccctgccacatgtggtcacggggagagaagatggtaggacgtccccgtgagccttggggcagagctggtggtagaaagaagccctgtctactctaatttggtgagaggggccgcggcaagtggctgatgatgtgactgatggagacagggtggcttgggaaggtcccacttgggggtgtcacgtcctgcagggagtggaagagatggatcctccgtagcctggactggtgggtctcggcctctctcccagaaatggcagagacagctgcctgagagtcagtgctgcagtgggcagggcctatgccctcacagtcctcaggctgccaggtcgtcctcttcctgttggggagaagaggaccctggcaatccacaattttggagatttgctggctgcagccaaaatggggacccaactccctcctatgtggttttagagcttctggagggaagataggccacgcccctgggtgaggagcacgtcttcccacagatcctaagtcggccacaccctgggtgaggagcacgtcttcccataggtcccacgtcagccacaccctgggtgaggagcacgtcttcccatagatcccacatcggccacaccctgggtgaggagcatgtcttcccatagatcccacgtcggccacaccctgggtgaggagcacgtcttcccatagatcccacatcggccacaccctgggtgaggagcatgtcttcccatagatcccacgtcggccacaccctgggtgaggagcacgtcttcccatagatcccacgtcggccacaccctgggtgaggagcatgtcttcccatagaacccacgtcggccacaccctgggtgaggagcacgtcttcccacagatctcaacagaactccacatcgtctggttttgtggagactttcatatgtcctgtcaagttgcctcatgcacctgcagactgttcttgggaagcaaacctggactgcaaaataaacctcccggcctcctcct

SEQ ID NO: 136067 - DNA, 2867 bp, Homo sapiens
  Payload ID: 6634
  Gene Symbol: GRK1
  Gene Name: G protein-coupled receptor kinase 1
  ENST ID: ENST00000631997
  CDS Start-End: 1-623
gtttcatggcccccgagctcctgcagggcgaggagtacgacttctccgtggactactttgccctgggggtcaccctgtatgagatgattgcggccagaggacccttccgagcccgtggagagaaggtggagaacaaggagctgaagcaccggatcatctcagagcccgtgaagtaccctgataagttcagccaggccagcaaggacttctgcgaggcgctgctggagaaggacccggagaagcgcctggggttcagagatgagacctgcgacaagctccgtgcccaccccctcttcaaggaccttaactggaggcagctggaggctgggatgctgatgccccctttcatcccagactccaaaactgtctacgcaaaggatattcaggacgtgggtgccttttccaccgtcaaaggtgtggcctttgacaaaacagacacagaattctttcaggaatttgccactggcaactgccccatcccctggcaggaggagatgatcgagacgggcatctttggcgagctgaacgtgtggcgctcggacggtcagatgccggacgacatgaagggcatctccgggggctccagctcctcgtccaagtcagggatgtgtctggtttcctaggtgacgccccagagtccacgtggaggaaaaggacccatacggctcgatgggggccgcctgcctccgtggtgccagcctggggtctgctagcaaggggacacgtggttccctccacccaggtccccatcacgccatctccttgcggcccaaggaggagaaagcccacatcggcctgagccgccagacgcacatgctggtgccgtgagcccccgactgcatatttcacgtcttttgctccatctcactgagaagacataagatgctctccagagggagtaagccaaaaatctacaaactcttagggagcctcctgcattggtgattgaccaaccgtgtggtcaggggcagagactcggttttggcctcccaagaccttagccattggcttcccagagccacgctcctcagcgggaggtgcacggtggccaggtcaggggtcagtgaaccctggccgcagcccctggccccactggggagggctggacctcgccccccccaggtccctctgtgcaggctcctgccttccagggtgcccgggccctgtgctggtggcctgcacgccacatggtcccctgcaccctgcggcgccgtggtcctctgcacactggggcaccatggtcccctgcactccggggtgccgtggtccacatctgccaggcgcaggctctgttgggctgttgggaggaggggagcgggtgtggagtctgggggtctcagtgcatcttggggtctccttatctcagggtgtccagctgacggcagctggtgcaaagttcccacccctgagctggggagctgaaaatgttttctgtcttgaccctgagtcccggaagcacctcagctgctcttggcgggcaaagccaggaccgtttgctctctgaccctcctccccactggggctggtccgtctcatctcccaggggacacttcaggccacgggccttgtgcatagggacagagctccttgctgcaacccctctctgtgttcccagtagcagcagcactggagtcctaaagccatagcccgggaagacactcacagcccaccttctcatacagctcggccccacccacaatgcacctggcatttccaactgcactttgaacactgaaggttccccaaatgctttgtgtgttttaactgcaggaagttagttctgttgcaactgcctccaggacacactccctcttgagggccggcggtgctggcctgggttccatggcctcagcagccggctcagagggagtgcatccaagccgcagggaagcagtggtgatgggtggcctgaggactcctttccagagagggcctctgagctccttttaggaaagaacttcctttgagccccggccactgttgtaccagtgggagaagaagcctgaccctgccacatgtggtcacggggagagaagatggtaggacgtccccgtgagccttggggcagagctggtggtagaaagaagccctgtctactctaatttggtgagaggggccgcggcaagtggctgatgatgtgactgatggagacagggtggcttgggaaggtcccacttgggggtgtcacgtcctgcagggagtggaagagatggatcctccgtagcctggactggtgggtctcggcctctctcccagaaatggcagagacagctgcctgagagtcagtgctgcagtgggcagggcctatgccctcacagtcctcaggctgccaggtcgtcctcttcctgttggggagaagaggaccctggcaatccacaattttggagatttgctggctgcagccaaaatggggacccaactccctcctatgtggttttagagcttctggagggaagataggccacgcccctgggtgaggagcacgtcttcccacagatcctaagtcggccacaccctgggtgaggagcacgtcttcccataggtcccacatcagccacaccctgggtgaggagcacgtcttcccatagatcccaagtcggccacaccctgggtgaggagcacgtcttcccatagatcccacgtcggccacaccccgggtgaggagcacgtcttcccatagatcccacatcggccacaccccgggtgaggagcatgtcttcccatagatcccacatcggccacaccccgggtgaggagcacgtcttcccatagatcccacgtcggccacaccctgggtgaggagcacgtcttcccatagatcccacatcggccacaccctgggtgaggagcacgtcttcccatagatc

SEQ ID NO: 136068 - DNA, 2013 bp, Homo sapiens
  Payload ID: 6635
  Gene Symbol: GRK4
  Gene Name: G protein-coupled receptor kinase 4
  Uniprot ID: P32298
  ENST ID: ENST00000345167
  CDS Start-End: 251-1891
ccgccgcggtcgggctgccccctcccctcgccccgaccgctcccctgctggtgagggcctgcggaggcggcggcggcggcgcccttggtggcagtggtggcggcggagcagcctcccgggatcgtgtccggagctcgaggagagggtggtgcccggcgagctatgcacgggggcggcggcgtctcctcctgttccgcctcctcagtctcctcggtctcgcagaatccgccggcggcggcggcgccaggacatggagctcgagaacatcgtggccaactcgctgctgctgaaagcgcgtcaagaaaaggattatagcagtctttgtgacaagcaaccgataggaagacgtctcttcaggcagttctgtgataccaaacccactctaaagaggcacattgaattcttggatgcagtggcagaatatgaagttgccgatgatgaggaccgaagtgattgtggactgtcaatcttagatagattcttcaatgataagttggcagcccctttaccagaaatacctccagatgttgtgacagaatgtagattgggactgaaggaggagaacccttccaaaaaagcctttgaggaatgtactagagttgcccataactacctaagaggggaaccatttgaagaataccaagaaagctcatatttttctcagtttttacaatggaaatggctggaaaggcaacccgtaacaaagaacacatttagacattacagagttctaggaaaaggcggatttggagaggtttgcgcctgtcaagtgcgagccacaggaaaaatgtatgcctgcaaaaagctacaaaaaaaaagaataaagaagaggaaaggtgaagctatggctctaaatgagaaaagaattctggagaaagtgcaaagtagattcgtagttagtttagcctacgcttatgaaaccaaagatgccttgtgcttggtgctcaccattatgaatggaggggatttgaagtttcacatttacaacctgggcaatcccggctttgatgagcagagagccgttttctatgctgcagagctgtgttgcggcttggaagatttacagagggaaagaattgtatacagagacttgaagcctgagaatattctccttgatgatcgtggacacatccggatttcagacctcggtttggccacagagatcccagaaggacagagggttcgaggaagagttggaacagtcggctacatggcacctgaagttgtcaataatgaaaagtatacgtttagtcccgattggtggggacttggctgtctgatctatgaaatgattcagggacattctccattcaaaaaatacaaagagaaagtcaaatgggaggaggtcgatcaaagaatcaagaatgataccgaggagtattctgagaagttttcagaggatgccaaatctatctgcaggatgttactcaccaagaatccaagcaagcggctgggctgcaggggcgagggagcggctggggtgaagcagcaccccgtgttcaaggacatcaacttcaggaggctggaggcaaacatgctggagccccctttctgtcctgatcctcatgccgtttactgtaaggacgtcctggatatcgagcagttctcggtggtgaaagggatctacctggacaccgcagatgaagacttctatgctcggtttgctaccgggtgtgtctccatcccctggcagaatgagatgatcgaatctgggtgtttcaaagacatcaacaaaagtgaaagtgaggaagctttgccattagatctagacaagaacatacataccccggtttccagaccaaacagaggcttcttctatagactcttcagaagagggggctgcctgaccatggtccccagtgagaaggaagtggaacccaagcaatgctgagcaccccggtgcggaccacagagcagaccctggcgccaggaaggagcatgtgttagcgtctcgtcccacctggaattgtaataaatacatctaaataaaacatgccttgggagtgtacagac

SEQ ID NO: 136069 - DNA, 2068 bp, Homo sapiens
  Payload ID: 6635
  Gene Symbol: GRK4
  Gene Name: G protein-coupled receptor kinase 4
  Uniprot ID: P32298
  ENST ID: ENST00000398051
  CDS Start-End: 464-1966
ttcagctaagccgttagcgccgagcccgcccgggagcgggtcgccggccgcggcgggcgcccctgccagtgagcccctgtccgaagtgagccacggcattgactcggggctgcccgggggcagggcactgaggagggagttgcgcgcgcgaggcgagggcgatggggccaagaagaaccggggcgatagcgcggcagcggtgacagctgggacccgccgcggtcgggctgccccctcccctcgccccgaccgctcccctgctggtgagggcctgcggaggcggcggcggcggcgcccttggtggcagtggtggcggcggagcagcctcccgggatcgtgtccggagctcgaggagagggtggtgcccggcgagctatgcacgggggcggcggcgtctcctcctgttccgcctcctcagtctcctcggtctcgcagaatccgccggcggcggcggcgccaggacatggagctcgagaacatcgtggccaactcgctgctgctgaaagcgcgtcaagaaaaggattatagcagtctttgtgacaagcaaccgataggaagacgtctcttcaggcagttctgtgataccaaacccactctaaagaggcacattgaattcttggatgcagtggcagaatatgaagttgccgatgatgaggaccgaagtgattgtggactgtcaatcttagatagattcttcaatgataagttggcagcccctttaccagaaatacctccagatgttgtgacagaatgtagattgggactgaaggaggagaacccttccaaaaaagcctttgaggaatgtactagagttgcccataactacctaagaggggaaccatttgaagaataccaagaaagctcatatttttctcagtttttacaatggaaatggctggaaaggcaacccgtaacaaagaacacatttagacattacagagttctaggaaaaggcggatttggagaggtttgcgcctgtcaagtgcgagccacaggaaaaatgtatgcctgcaaaaagctacaaaaaaaaagaataaagaagaggaaaggtgaagctatggctctaaatgagaaaagaattctggagaaagtgcaaagtagattcgtagttagtttagcctacgcttatgaaaccaaagatgccttgtgcttggtgctcaccattatgaatggaggggatttgaagtttcacatttacaacctgggcaatcccggctttgatgagcagagagccgttttctatgctgcagagctgtgttgcggcttggaagatttacagagggaaagaattgtatacagagacttgaagcctgagaatattctccttgatgatcgtggacacatccggatttcagacctcggtttggccacagagatcccagaaggacagagggttcgaggaagagttggaacagtcggctacatggcacctgaagttgtcaataatgaaaagtatacgtttagtcccgattggtggggacttggctgtctgatctatgaaatgattcagggacattctccattcaaaaaatacaaagagaaagtcaaatgggaggaggtcgatcaaagaatcaagaatgataccgaggagtattctgagaagttttcagaggatgccaaatctatctgcaggatgttactcaccaagaatccaagcaagcggctgggctgcaggggcgagggagcggctggggtgaagcagcaccccgtgttcaaggacatcaacttcaggaggctggaggcaaacatgctggagccccctttctgtcctgatcctcatgccgtttactgtaaggacgtcctggatatcgagcagttctcggtggtgaaagggatctacctggacaccgcagatgaagacttctatgctcggtttgctaccgggtgtgtctccatcccctggcagaatgagggctgcctgaccatggtccccagtgagaaggaagtggaacccaagcaatgctgagcaccccggtgcggaccacagagcagaccctggcgccaggaaggagcatgtgttagcgtctcgtcccacctggaattgtaataaatacatctaaataaaaca

SEQ ID NO: 136070 - DNA, 2202 bp, Homo sapiens
  Payload ID: 6635
  Gene Symbol: GRK4
  Gene Name: G protein-coupled receptor kinase 4
  Uniprot ID: P32298
  ENST ID: ENST00000398052
  CDS Start-End: 344-2080
cagggcactgaggagggagttgcgcgcgcgaggcgagggcgatggggccaagaagaaccggggcgatagcgcggcagcggtgacagctgggacccgccgcggtcgggctgccccctcccctcgccccgaccgctcccctgctggtgagggcctgcggaggcggcggcggcggcgcccttggtggcagtggtggcggcggagcagcctcccgggatcgtgtccggagctcgaggagagggtggtgcccggcgagctatgcacgggggcggcggcgtctcctcctgttccgcctcctcagtctcctcggtctcgcagaatccgccggcggcggcggcgccaggacatggagctcgagaacatcgtggccaactcgctgctgctgaaagcgcgtcaaggaggatatggcaaaaaaagtggtcgtagtaaaaaatggaaggagatactgacactgcctcctgtcagccagtgcagtgagcttagacattccattgaaaaggattatagcagtctttgtgacaagcaaccgataggaagacgtctcttcaggcagttctgtgataccaaacccactctaaagaggcacattgaattcttggatgcagtggcagaatatgaagttgccgatgatgaggaccgaagtgattgtggactgtcaatcttagatagattcttcaatgataagttggcagcccctttaccagaaatacctccagatgttgtgacagaatgtagattgggactgaaggaggagaacccttccaaaaaagcctttgaggaatgtactagagttgcccataactacctaagaggggaaccatttgaagaataccaagaaagctcatatttttctcagtttttacaatggaaatggctggaaaggcaacccgtaacaaagaacacatttagacattacagagttctaggaaaaggcggatttggagaggtttgcgcctgtcaagtgcgagccacaggaaaaatgtatgcctgcaaaaagctacaaaaaaaaagaataaagaagaggaaaggtgaagctatggctctaaatgagaaaagaattctggagaaagtgcaaagtagattcgtagttagtttagcctacgcttatgaaaccaaagatgccttgtgcttggtgctcaccattatgaatggaggggatttgaagtttcacatttacaacctgggcaatcccggctttgatgagcagagagccgttttctatgctgcagagctgtgttgcggcttggaagatttacagagggaaagaattgtatacagagacttgaagcctgagaatattctccttgatgatcgtggacacatccggatttcagacctcggtttggccacagagatcccagaaggacagagggttcgaggaagagttggaacagtcggctacatggcacctgaagttgtcaataatgaaaagtatacgtttagtcccgattggtggggacttggctgtctgatctatgaaatgattcagggacattctccattcaaaaaatacaaagagaaagtcaaatgggaggaggtcgatcaaagaatcaagaatgataccgaggagtattctgagaagttttcagaggatgccaaatctatctgcaggatgttactcaccaagaatccaagcaagcggctgggctgcaggggcgagggagcggctggggtgaagcagcaccccgtgttcaaggacatcaacttcaggaggctggaggcaaacatgctggagccccctttctgtcctgatcctcatgccgtttactgtaaggacgtcctggatatcgagcagttctcggtggtgaaagggatctacctggacaccgcagatgaagacttctatgctcggtttgctaccgggtgtgtctccatcccctggcagaatgagatgatcgaatctgggtgtttcaaagacatcaacaaaagtgaaagtgaggaagctttgccattagatctagacaagaacatacataccccggtttccagaccaaacagaggcttcttctatagactcttcagaagagggggctgcctgaccatggtccccagtgagaaggaagtggaacccaagcaatgctgagcaccccggtgcggaccacagagcagaccctggcgccaggaaggagcatgtgttagcgtctcgtcccacctggaattgtaataaatacatctaaataaaacatgccttgggagtgtacagac

SEQ ID NO: 136071 - DNA, 2136 bp, Homo sapiens
  Payload ID: 6635
  Gene Symbol: GRK4
  Gene Name: G protein-coupled receptor kinase 4
  ENST ID: ENST00000503518
  CDS Start-End: 438-692
cgcccgggagcgggtcgccggccgcggcgggcgcccctgccagtgagcccctgtccgaagtgagccacggcattgactcggggctgcccgggggcagggcactgaggagggagttgcgcgcgcgaggcgagggcgatggggccaagaagaaccggggcgatagcgcggcagcggtgacagctgggacccgccgcggtcgggctgccccctcccctcgccccgaccgctcccctgctggtgagggcctgcggaggcggcggcggcggcgcccttggtggcagtggtggcggcggagcagcctcccgggatcgtgtccggagctcgaggagagggtggtgcccggcgagctatgcacgggggcggcggcgtctcctcctgttccgcctcctcagtctcctcggtctcgcagaatccgccggcggcggcggcgccaggacatggagctcgagaacatcgtggccaactcgctgctgctgaaagcgcgtcaagtcctctgcatcccgccacaaaagcatcagttggtccagcccttcagcgggagacccccacaatcctctgtgcaatcctctgtctcggacctcatgtctcccttgcctgcgtctcaagagagctggcgacagagcctcggacctcaagtccctgtgctagccacggtagttcttcacaccccgtcactcttacggaattgctgatttcctctatttccttgcgtgatggagcagctctgctcggactgtgctccaggacagtgtaaatgccgactgaagatgccacagcagccggcgatgcatatttaaaggacagtctggagccgaaggtggcggccacgcttgtagtcccagctactctggaagctgaggtggaaggctcacttgggcccaggagagtccagcctgggcaaaacacagcaagaccatctctttaaaaaagtctaaaacaaagacttcatcttctcagtatttttgtgcaccaactcacactattttgaatagaagaactgagaatgggtgggaagagaatgggatctttttcccttaagataatcagggagtcccagagcagtatgcgttctcagcagccattttcagtggagcatttgactgtgcctcttatccctgactgtgaactccaaataggtcatggaaaataatcatccttagtggaagtcagattgaagctaagccagttttctttttacactaccttcctatctgcatgtaatttacaaaaaggaactataccaagccgccttccttataatgctgcagagattagataatgagataaatacaagtgctctataaatgctaaataacataaaaccagattctgtcacaaaacctaagaccacagtgatagtttgaaaaatgaaagttttggccgggcacggtggctcacagctgtaatcccagcacttttggaggccgaggcgggcggatcacaaggtcaggagattgagaccatcctggctaacatggtgaaaccccgtctctactaaaaatacaaaaattagccgggcgtggtggcgggcgcctgtagtcccagctacatgggaggctgaggcaggagaatggcgtgaaccctggaggcagagcttgcagtgagccgagatcgcgccacggcactccagcctgggtgacagagcgagactccgtctcgaaaaaaaaaaaaaagaaagttttaattttttccctgaaatatctcatattaactccacagtagtgtgattatgaggcctgtccccattgagtgagagtatttgctcctgtggtcagaaagcatcattatgtatagcttgattaatggttagagaagttgaatatataatattagatatacatggatacatgctgagtattggttataatttagggctttttcccaagttgatgactgtgtttgttactttaaagtatctcccaggaagtaccaggaggtgtcttcttggacacataacttcatggacagctccttgtttagcttcactggctcatatactagaaaattaacctttgaaatgaatgaacgtagcacaagagttatattctggtcctgagaagcgcaatgttgatttaatattattagtgagtccggtcatttcctggatttatttcaaatagaatcagtcagtctcaa

SEQ ID NO: 136072 - DNA, 1971 bp, Homo sapiens
  Payload ID: 6635
  Gene Symbol: GRK4
  Gene Name: G protein-coupled receptor kinase 4
  Uniprot ID: P32298
  ENST ID: ENST00000504933
  CDS Start-End: 251-1849
ccgccgcggtcgggctgccccctcccctcgccccgaccgctcccctgctggtgagggcctgcggaggcggcggcggcggcgcccttggtggcagtggtggcggcggagcagcctcccgggatcgtgtccggagctcgaggagagggtggtgcccggcgagctatgcacgggggcggcggcgtctcctcctgttccgcctcctcagtctcctcggtctcgcagaatccgccggcggcggcggcgccaggacatggagctcgagaacatcgtggccaactcgctgctgctgaaagcgcgtcaaggaggatatggcaaaaaaagtggtcgtagtaaaaaatggaaggagatactgacactgcctcctgtcagccagtgcagtgagcttagacattccattgaaaaggattatagcagtctttgtgacaagcaaccgataggaagacgtctcttcaggcagttctgtgataccaaacccactctaaagaggcacattgaattcttggatgcagtggcagaatatgaagttgccgatgatgaggaccgaagtgattgtggactgtcaatcttagatagattcttcaatgataagttggcagcccctttaccagaaatacctccagatgttgtgacagaatgtagattgggactgaaggaggagaacccttccaaaaaagcctttgaggaatgtactagagttgcccataactacctaagaggggaaccatttgaagaataccaagaaagctcatatttttctcagtttttacaatggaaatggctggaaaggcaacccgtaacaaagaacacatttagacattacagagttctaggaaaaggcggatttggagaggtttgcgcctgtcaagtgcgagccacaggaaaaatgtatgcctgcaaaaagctacaaaaaaaaagaataaagaagaggaaaggtgaagctatggctctaaatgagaaaagaattctggagaaagtgcaaagtagattcgtagttagtttagcctacgcttatgaaaccaaagatgccttgtgcttggtgctcaccattatgaatggaggggatttgaagtttcacatttacaacctgggcaatcccggctttgatgagcagagagccgttttctatgctgcagagctgtgttgcggcttggaagatttacagagggaaagaattgtatacagagacttgaagcctgagaatattctccttgatgatcgtggacacatccggatttcagacctcggtttggccacagagatcccagaaggacagagggttcgaggaagagttggaacagtcggctacatggcacctgaagttgtcaataatgaaaagtatacgtttagtcccgattggtggggacttggctgtctgatctatgaaatgattcagggacattctccattcaaaaaatacaaagagaaagtcaaatgggaggaggtcgatcaaagaatcaagaatgataccgaggagtattctgagaagttttcagaggatgccaaatctatctgcaggatgttactcaccaagaatccaagcaagcggctgggctgcaggggcgagggagcggctggggtgaagcagcaccccgtgttcaaggacatcaacttcaggaggctggaggcaaacatgctggagccccctttctgtcctgatcctcatgccgtttactgtaaggacgtcctggatatcgagcagttctcggtggtgaaagggatctacctggacaccgcagatgaagacttctatgctcggtttgctaccgggtgtgtctccatcccctggcagaatgagggctgcctgaccatggtccccagtgagaaggaagtggaacccaagcaatgctgagcaccccggtgcggaccacagagcagaccctggcgccaggaaggagcatgtgttagcgtctcgtcccacctggaattgtaataaatacatctaaataaaacatgccttgggagtgtacagac

SEQ ID NO: 136073 - DNA, 2654 bp, Homo sapiens
  Payload ID: 6636
  Gene Symbol: GRK5
  Gene Name: G protein-coupled receptor kinase 5
  Uniprot ID: P34947
  ENST ID: ENST00000392870
  CDS Start-End: 330-2102
aaagcatccgagggagccggaggggaggagaatggagtgacagagacacgcggagggtggggggtgggggggagcgtgttgagggaggggggaggggggacacagagggaggaagaagcggcggcggcggcggcggcggcggcggctcctctttgcagagggggaaactcttgggctgagagcaggaataatgcggtaggcaaggcgggctgctggctcccccggctccggcagcagcggcggcagcccgagcagcggcagcagcagcggcagcaccccaggcgctgacagccccgccggccggctccgttgctgaccgccgactgtcaatggagctggaaaacatcgtggccaacacggtcttgctgaaagccagggaagggggcggaggaaagcgcaaagggaaaagcaagaagtggaaagaaatcctgaagttccctcacattagccagtgtgaagacctccgaaggaccatagacagagattactgcagtttatgtgacaagcagccaatcgggaggctgcttttccggcagttttgtgaaaccaggcctgggctggagtgttacattcagttcctggactccgtggcagaatatgaagttactccagatgaaaaactgggagagaaagggaaggaaattatgaccaagtacctcaccccaaagtcccctgttttcatagcccaagttggccaagacctggtctcccagacggaggagaagctcctacagaagccgtgcaaagaactcttttctgcctgtgcacagtctgtccacgagtacctgaggggagaaccattccacgaatatctggacagcatgttttttgaccgctttctccagtggaagtggttggaaaggcaaccggtgaccaaaaacactttcaggcagtatcgagtgctaggaaaagggggcttcggggaggtctgtgcctgccaggttcgggccacgggtaaaatgtatgcctgcaagcgcttggagaagaagaggatcaaaaagaggaaaggggagtccatggccctcaatgagaagcagatcctcgagaaggtcaacagtcagtttgtggtcaacctggcctatgcctacgagaccaaggatgcactgtgcttggtcctgaccatcatgaatgggggtgacctgaagttccacatctacaacatgggcaaccctggcttcgaggaggagcgggccttgttttatgcggcagagatcctctgcggcttagaagacctccaccgtgagaacaccgtctaccgagatctgaaacctgaaaacatcctgttagatgattatggccacattaggatctcagacctgggcttggctgtgaagatccccgagggagacctgatccgcggccgggtgggcactgttggctacatggctccagaggtcctgaacaaccagaggtacggcctgagccccgactactggggccttggctgcctcatctatgagatgatcgagggccagtcgccgttccgcggccgcaaggagaaggtgaagcgggaggaggtggaccgccgggtcctggagacggaggaggtgtactcccacaagttctccgaggaggccaagtccatctgcaagatgctgctcacgaaagatgcgaagcagaggctgggctgccaggaggagggggctgcagaggtcaagagacaccccttcttcaggaacatgaacttcaagcgcttagaagccgggatgttggaccctcccttcgttccagacccccgcgctgtgtactgtaaggacgtgctggacatcgagcagttctccactgtgaagggcgtcaatctggaccacacagacgacgacttctactccaagttctccacgggctctgtgtccatcccatggcaaaacgagatgatagaaacagaatgctttaaggagctgaacgtgtttggacctaatggtaccctcccgccagatctgaacagaaaccaccctccggaaccgcccaagaaagggctgctccagagactcttcaagcggcagcatcagaacaattccaagagttcgcccagctccaagaccagttttaaccaccacataaactcaaaccatgtcagctcgaactccaccggaagcagctagtttcggctctggcctccaagtccacagtggaaccagcccagacccttctccttagaagtggaagtagtggagcccctgctctggtggggctgccaggggagaccccgggagccggggaaggaggccgtccatcccgtcgacgtagaacctcgaggtttctcaaagaaatttccactcaggtctgttttccgaggcggccccggccggggtggattggatttgtctttggtgaacattgcaatagaaatccaattggatacgacaacttgcacgtattttaatagcgtcataactagaactgaattttgtctttatgatttttaaagaaaagttttgtaaatttctctactgtctcagtttacattttgtatatttgtatttaaatgaaagtgagactttgagggtgtatattttctgtgcagccactgttaagccatgtgttccaaggcattttagcggggagggggttatcaaaaaaaaaaaaatgtgactcaagacttccagagcctcaaatgagaaaatgtctttattaaatgtagaaagtgatccata

SEQ ID NO: 136074 - DNA, 2939 bp, Homo sapiens
  Payload ID: 6637
  Gene Symbol: GRK6
  Gene Name: G protein-coupled receptor kinase 6
  Uniprot ID: P43250
  ENST ID: ENST00000355472
  CDS Start-End: 169-1899
agagtgcgcggctggctgcggcggccggggaggccggggaggccgcggcgcggtcactgcgagccgagccgagccgcgccgagccgcgccgatcgccatccggcctcggcactcgcgcgcgatcccggccggcggcgcggcccggcgggccaggcggcgccacagcccatggagctcgagaacatcgtagcgaacacggtgctactcaaggcccgggaaggtggcggtggaaatcgcaaaggcaaaagcaagaaatggcggcagatgctccagttccctcacatcagccagtgcgaagagctgcggctcagcctcgagcgtgactatcacagcctgtgcgagcggcagcccattgggcgcctgctgttccgagagttctgtgccacgaggccggagctgagccgctgcgtcgccttcctggatggggtggccgagtatgaagtgaccccggatgacaagcggaaggcatgtgggcggcagctaacgcagaattttctgagccacacgggtcctgacctcatccctgaggtcccccggcagctggtgacgaactgcacccagcggctggagcagggtccctgcaaagaccttttccaggaactcacccggctgacccacgagtacctgagcgtggccccttttgccgactacctcgacagcatctacttcaaccgtttcctgcagtggaagtggctggaaaggcagccagtgaccaaaaacaccttcaggcaataccgagtcctgggcaaaggtggctttggggaggtgtgcgcctgccaggtgcgggccacaggtaagatgtatgcctgcaagaagctagagaaaaagcggatcaagaagcggaaaggggaggccatggcgctgaacgagaagcagatcctggagaaagtgaacagtaggtttgtagtgagcttggcctacgcctatgagaccaaggacgcgctgtgcctggtgctgacactgatgaacgggggcgacctcaagttccacatctaccacatgggccaggctggcttccccgaagcgcgggccgtcttctacgccgccgagatctgctgtggcctggaggacctgcaccgggagcgcatcgtgtacagggacctgaagcccgagaacatcttgctggatgaccacggccacatccgcatctctgacctgggactagctgtgcatgtgcccgagggccagaccatcaaagggcgtgtgggcaccgtgggttacatggctccggaggtggtgaagaatgaacggtacacgttcagccctgactggtgggcgctcggctgcctcctgtacgagatgatcgcaggccagtcgcccttccagcagaggaagaagaagatcaagcgggaggaggtggagcggctggtgaaggaggtccccgaggagtattccgagcgcttttccccgcaggcccgctcactttgctcacagctcctctgcaaggaccctgccgaacgcctggggtgtcgtgggggcagtgcccgcgaggtgaaggagcaccccctctttaagaagctgaacttcaagcggctgggagctggcatgctggagccgccgttcaagcctgacccccaggccatttactgcaaggatgttctggacattgaacagttctctacggtcaagggcgtggagctggagcctaccgaccaggacttctaccagaagtttgccacaggcagtgtgcccatcccctggcagaacgagatggtggagaccgagtgcttccaagagctgaatgtctttgggctggatggctcagttcccccagacctggactggaagggccagccacctgcacctcctaaaaagggactgctgcagagactcttcagtcgccaagattgctgtggaaactgcagcgacagcgaggaagagctccccacccgcctctagcccccagcccgaggcccccaccagcagttggcggtagcagctactccgagcgccgtttacagttttgcacagtgatcttccccattgtccactcaagtcgtggcctggggaacacagacggagctgtccccagtgtcctccgtccctcagcccctggcctggctgagtttggcagggcctgggccatccctgggacaaaggtgcgtcccttcagctcttctccgtggagctcggggctttctgtatttatgtatttgtacgaatgtatatagcgaccagagcattcttaattcccgccgcagacctggcgcccccgccttggctcctgggggcagccagccctggctgggagagcgggagctggcagaggagccactgccaaactcaaggctcctctggcccagcttggatggctgagggtggtcacacccctgagccttcagcactgtgctggccaccccggcctctgagtaagactcgtgcctccccctgctgccctgggctcaggctgctaccctctggggcccaaagctgtcccttctcagtgcttgtcagcgctgggtctggggcctctgtatgccctaggcctgtgccaaagtggccagagattgggctgcctgtgatacccatcagcccactgccccggccggcccagataggtctgcctctgccttccagctcccacagcctggtccctgatactgggctctgtcctgcagacacctctttcagaaacgcccaagcccagcccctaggagggggtggggcatccctggtcaaccctcaaacattccggactcccctcataacaatagacacatgtgcccagcaataatccgccccttcctgtgtgcgcctgtggggtgcgtgcgcgcgcgtgtgtacctgtgtgggtgaaggggatagggcgaggctgtgcctgtgccccaggtcccagccctggcccttcccagactgtgatggccatcctggtcccagtgttagggtagcatgggattacagggccctgttttttccatatttaaagccaatttttatta

SEQ ID NO: 136075 - DNA, 1789 bp, Homo sapiens
  Payload ID: 6637
  Gene Symbol: GRK6
  Gene Name: G protein-coupled receptor kinase 6
  Uniprot ID: P43250
  ENST ID: ENST00000355958
  CDS Start-End: 4-1686
cccatggagctcgagaacatcgtagcgaacacggtgctactcaaggcccgggaaggtggcggtggaaatcgcaaaggcaaaagcaagaaatggcggcagatgctccagttccctcacatcagccagtgcgaagagctgcggctcagcctcgagcgtgactatcacagcctgtgcgagcggcagcccattgggcgcctgctgttccgagagttctgtgccacgaggccggagctgagccgctgcgtcgccttcctggatggggtggccgagtatgaagtgaccccggatgacaagcggaaggcatgtgggcggcagctaacgcagaattttctgagccacacgggtcctgacctcatccctgaggtcccccggcagctggtgacgaactgcacccagcggctggagcagggtccctgcaaagaccttttccaggaactcacccggctgacccacgagtacctgagcgtggccccttttgccgactacctcgacagcatctacttcaaccgtttcctgcagtggaagtggctggaaaggcagccagtgaccaaaaacaccttcaggcaataccgagtcctgggcaaaggtggctttggggaggtgtgcgcctgccaggtgcgggccacaggtaagatgtatgcctgcaagaagctagagaaaaagcggatcaagaagcggaaaggggaggccatggcgctgaacgagaagcagatcctggagaaagtgaacagtaggtttgtagtgagcttggcctacgcctatgagaccaaggacgcgctgtgcctggtgctgacactgatgaacgggggcgacctcaagttccacatctaccacatgggccaggctggcttccccgaagcgcgggccgtcttctacgccgccgagatctgctgtggcctggaggacctgcaccgggagcgcatcgtgtacagggacctgaagcccgagaacatcttgctggatgaccacggccacatccgcatctctgacctgggactagctgtgcatgtgcccgagggccagaccatcaaagggcgtgtgggcaccgtgggttacatggctccggaggtggtgaagaatgaacggtacacgttcagccctgactggtgggcgctcggctgcctcctgtacgagatgatcgcaggccagtcgcccttccagcagaggaagaagaagatcaagcgggaggaggtggagcggctggtgaaggaggtccccgaggagtattccgagcgcttttccccgcaggcccgctcactttgctcacagctcctctgcaaggaccctgccgaacgcctggggtgtcgtgggggcagtgcccgcgaggtgaaggagcaccccctctttaagaagctgaacttcaagcggctgggagctggcatgctggagccgccgttcaagcctgacccccaggccatttactgcaaggatgttctggacattgaacagttctctacggtcaagggcgtggagctggagcctaccgaccaggacttctaccagaagtttgccacaggcagtgtgcccatcccctggcagaacgagatggtggagaccgagtgcttccaagagctgaatgtctttgggctggatggctcagttcccccagacctggactggaagggccagccacctgcacctcctaaaaagggactgctgcagagactcttcagtcgccaaaggtgagcagtgtgggctccccgtgggttggccttgctgcctggcctcggggagccacgggcagcccttccatggcaaaggcaagatgtgggagaaagaagtctggtgc

SEQ ID NO: 136076 - DNA, 2792 bp, Homo sapiens
  Payload ID: 6637
  Gene Symbol: GRK6
  Gene Name: G protein-coupled receptor kinase 6
  ENST ID: ENST00000393576
  CDS Start-End: 53-1681
gcgcgatcccggccggcggcgcggcccggcgggccaggcggcgccacagcccatggagctcgagaacatcgtagcgaacacggtgctactcaaggcccgggaaggtggcggtggaaatcgcaaaggcaaaagcaagaaatggcggcagatgctccagttccctcacatcagccagtgcgaagagctgcggctcagcctcgagcgtgactatcacagcctgtgcgagcggcagcccattgggcgcctgctgttccgagagttctgtgccacgaggccggagctgagccgctgcgtcgccttcctggatggggtggccgagtatgaagtgaccccggatgacaagcggaaggcatgtgggcggcagctaacgcagaattttctgagccacacgggtcctgacctcatccctgaggtcccccggcagctggtgacgaactgcacccagcggctggagcagggtccctgcaaagaccttttccaggaactcacccggctgacccacgagtacctgagcgtggccccttttgccgactacctcgacagcatctacttcaaccgtttcctgcagtggaagtggctggaaaggcagccagtgaccaaaaacaccttcaggcaataccgagtcctgggcaaaggtggctttggggaggtgtgcgcctgccaggtgcgggccacaggtaagatgtatgcctgcaagaagctagagaaaaagcggatcaagaagcggaaaggggaggccatggcgctgaacgagaagcagatcctggagaaagtgaacagtaggtttgtagctggcttccccgaagcgcgggccgtcttctacgccgccgagatctgctgtggcctggaggacctgcaccgggagcgcatcgtgtacagggacctgaagcccgagaacatcttgctggatgaccacggccacatccgcatctctgacctgggactagctgtgcatgtgcccgagggccagaccatcaaagggcgtgtgggcaccgtgggttacatggctccggaggtggtgaagaatgaacggtacacgttcagccctgactggtgggcgctcggctgcctcctgtacgagatgatcgcaggccagtcgcccttccagcagaggaagaagaagatcaagcgggaggaggtggagcggctggtgaaggaggtccccgaggagtattccgagcgcttttccccgcaggcccgctcactttgctcacagctcctctgcaaggaccctgccgaacgcctggggtgtcgtgggggcagtgcccgcgaggtgaaggagcaccccctctttaagaagctgaacttcaagcggctgggagctggcatgctggagccgccgttcaagcctgacccccaggccatttactgcaaggatgttctggacattgaacagttctctacggtcaagggcgtggagctggagcctaccgaccaggacttctaccagaagtttgccacaggcagtgtgcccatcccctggcagaacgagatggtggagaccgagtgcttccaagagctgaatgtctttgggctggatggctcagttcccccagacctggactggaagggccagccacctgcacctcctaaaaagggactgctgcagagactcttcagtcgccaagattgctgtggaaactgcagcgacagcgaggaagagctccccacccgcctctagcccccagcccgaggcccccaccagcagttggcggtagcagctactccgagcgccgtttacagttttgcacagtgatcttccccattgtccactcaagtcgtggcctggggaacacagacggagctgtccccagtgtcctccgtccctcagcccctggcctggctgagtttggcagggcctgggccatccctgggacaaaggtgcgtcccttcagctcttctccgtggagctcggggctttctgtatttatgtatttgtacgaatgtatatagcgaccagagcattcttaattcccgccgcagacctggcgcccccgccttggctcctgggggcagccagccctggctgggagagcgggagctggcagaggagccactgccaaactcaaggctcctctggcccagcttggatggctgagggtggtcacacccctgagccttcagcactgtgctggccaccccggcctctgagtaagactcgtgcctccccctgctgccctgggctcaggctgctaccctctggggcccaaagctgtcccttctcagtgcttgtcagcgctgggtctggggcctctgtatgccctaggcctgtgccaaagtggccagagattgggctgcctgtgatacccatcagcccactgccccggccggcccagataggtctgcctctgccttccagctcccacagcctggtccctgatactgggctctgtcctgcagacacctctttcagaaacgcccaagcccagcccctaggagggggtggggcatccctggtcaaccctcaaacattccggactcccctcataacaatagacacatgtgcccagcaataatccgccccttcctgtgtgcgcctgtggggtgcgtgcgcgcgcgtgtgtacctgtgtgggtgaaggggatagggcgaggctgtgcctgtgccccaggtcccagccctggcccttcccagactgtgatggccatcctggtcccagtgttagggtagcatgggattacagggccctgttttttccatatttaaagccaatttttattactcgttttgtccaacgtaagctgccacatgtctctgtgtgaatagtccgagcacaaacctggctagccgcc

SEQ ID NO: 136077 - DNA, 955 bp, Homo sapiens
  Payload ID: 6637
  Gene Symbol: GRK6
  Gene Name: G protein-coupled receptor kinase 6
  ENST ID: ENST00000506296
  CDS Start-End: 197-955
ccgggttcctgtagccacacgacggggcgccgttagagcgccgggagcccggagccctggggcggaggggtcacccagccccacgcggcgcaccggcagaaggcgtggccgcccagtccccagttccgcgcttgctcggcagtcacgttccggtggcggtggaaatcgcaaaggcaaaagcaagaaatggcggcagatgctccagttccctcacatcagccagtgcgaagagctgcggctcagcctcgagcgtgactatcacagcctgtgcgagcggcagcccattgggcgcctgctgttccgagagttctgtgccacgaggccggagctgagccgctgcgtcgccttcctggatggggtggccgagtatgaagtgaccccggatgacaagcggaaggcatgtgggcggcagctaacgcagaattttctgagccacacgggtcctgacctcatccctgaggtcccccggcagctggtgacgaactgcacccagcggctggagcagggtccctgcaaagaccttttccaggaactcacccggctgacccacgagtacctgagcgtggccccttttgccgactacctcgacagcatctacttcaaccgtttcctgcagtggaagtggctggaaaggcagccagtgaccaaaaacaccttcaggcaataccgagtcctgggcaaaggtggctttggggaggtgtgcgcctgccaggtgcgggccacaggtaagatgtatgcctgcaagaagctagagaaaaagcggatcaagaagcggaaaggggaggccatggcgctgaacgagaagcagatcctggagaaagtgaacagtaggtttgtagtgagcttggcctacgcctatgagaccaaggacgcgctgtgcctggtgctgacactgatgaacgggggcgacctcaagttccacatctaccacatgggccaggctggcttccccgaa

SEQ ID NO: 136078 - DNA, 336 bp, Homo sapiens
  Payload ID: 6637
  Gene Symbol: GRK6
  Gene Name: G protein-coupled receptor kinase 6
  ENST ID: ENST00000512684
  CDS Start-End: 285-336
cgagaacatcgtagcgaacacggtgctactcaaggcccgggaaggagcctgaagcaggagaagcacgtgtgtcctggaacgcagcaagggcgtgctggagcgtgcagagggaaggcctgaggtgctgttctgcctcagctctgccttggctgggccctagaggccgtggaccgcactgaggacccagaggcagttctgaggcagtgggactcgagacccagtgtcctattgctcccacaggtggcggtggaaatcgcaaaggcaaaagcaagaaatggcggcagatgctccagttccctcacatcagccagtgcgaagagctgcggctcagcctcg

SEQ ID NO: 136079 - DNA, 557 bp, Homo sapiens
  Payload ID: 6637
  Gene Symbol: GRK6
  Gene Name: G protein-coupled receptor kinase 6
  ENST ID: ENST00000502598
  CDS Start-End: 368-557
agtgatcaaaggtctcctcccctacccctgcccctagcagttgtgcctaccctcgaactggtggccccagccggccacctggcagagcgtggtctcggagggtcgcgcggcgccgcttggcaggcacaccggctgaacgtaaggcgacaggagcgcgcagctgccgtccgcatcctcctgaaggcgcaacagagctaacccgggcggagaggagcgtgaggcggggacgccggggccccaagctctcttcccgtccccgcggggcgcccccacgcacccaggtcgtgctggtagctgacgggcgagaaggcctcgtgcaagcggtggcggtggaaatcgcaaaggcaaaagcaagaaatggcggcagatgctccagttccctcacatcagccagtgcgaagagctgcggctcagcctcgagcgtgactatcacagcctgtgcgagcggcagcccattgggcgcctgctgttccgagagttctgtgccacgaggccggagctgagccgctgcgtcgccttcctggatggggtggccgagtatgaagtgaccccggatg

SEQ ID NO: 136080 - DNA, 744 bp, Homo sapiens
  Payload ID: 6637
  Gene Symbol: GRK6
  Gene Name: G protein-coupled receptor kinase 6
  ENST ID: ENST00000508705
  CDS Start-End: 1-267
gccgagtatgaagtgaccccggatgacaagcggaaggcatgtgggcggcagctaacgcagaattttctgagccacacggctgacccacgagtacctgagcgtggccccttttgccgactacctcgacagcatctacttcaaccgtttcctgcagtggaagtggctggaaaggcagccagtgaccaaaaacaccttcaggcaataccgagtcctgggcaaaggtggctttggggaggtgtgcgcctgccaggtgcgggccacaggtaagatgtatgcctgcaagaagctagagaaaaagcggatcaagaagcggaaaggggaggccatggcgctgaacgagaagcagatcctggagaaagtgaacagtaggtttgtagtgagcttggcctacgcctatgagaccaaggacgcgctgtgcctggtgctgacactgatgaacgggggcgacctcaagttccacatctaccacatgggccaggctggcttccccgaagcgcgggccgtcttctacgccgccgagatctgctgtggcctggaggacctgcaccgggagcgcatcgtgtacagggacctgaagcccgagaacatcttgctggatgaccacggccacatccgcatctctgacctgggactagctgtgcatgtgcccgagggccagaccatcaaagggcgtgtgggcaccgtgggttacatggctccggaggtggtgaagaatgaacggtacacgttcagccctgactggtg

SEQ ID NO: 136081 - DNA, 555 bp, Homo sapiens
  Payload ID: 6637
  Gene Symbol: GRK6
  Gene Name: G protein-coupled receptor kinase 6
  ENST ID: ENST00000511244
  CDS Start-End: 169-555
gattggtcccgcccccgtacttctttgagcgagtccccagctgggggggcgggggaaaaaatgaagaggaagactaatgggaagacggcgcggggagcttctgcccggtgattggtcaaatgaggtggcggtggaaatcgcaaaggcaaaagcaagaaatggcggcagatgctccagttccctcacatcagccagtgcgaagagctgcggctcagcctcgagcgtgactatcacagcctgtgcgagcggcagcccattgggcgcctgctgttccgagagttctgtgccacgaggccggagctgagccgctgcgtcgccttcctggatggggtggccgagtatgaagtgaccccggatgacaagcggaaggcatgtgggcggcagctaacgcagaattttctgagccacacgggtcctgacctcatccctgaggtcccccggcagctggtgacgaactgcacccagcggctggagcagggtccctgcaaagaccttttccaggaactcacccggctgacccacgagtacctgagcgtggccccttttgccgactac

SEQ ID NO: 136082 - DNA, 1660 bp, Homo sapiens
  Payload ID: 6637
  Gene Symbol: GRK6
  Gene Name: G protein-coupled receptor kinase 6
  ENST ID: ENST00000507633
  CDS Start-End: 102-1529
gccgagccgcgccgagccgcgccgatcgccatccggcctcggcactcgcgcgcgatcccggccggcggcgcggcccggcgggccaggcggcgccacagcccatggagctcgagaacatcgtagcgaacacggtgctactcaaggcccgggaaggtggcggtggaaatcgcaaaggcaaaagcaagaaatggcggcagatgctccagttccctcacatcagccagtgcgaagagctgcggctcagcctcgagcgtgactatcacagcctgtgcgagcggcagcccattgggcgcctgctgttccgagagttctgtgccacgaggccggagctgagccgctgcgtcgccttcctggatggggtggccgagtatgaagtgaccccggatgacaagcggaaggcatgtgggcggcagctaacgcagaattttctgagccacacgggtcctgacctcatccctgaggtcccccggcagctggtgacgaactgcacccagcggctggagcagggtccctgcaaagaccttttccaggaactcacccggctgacccacgagtacctgagcgtggccccttttgccgactacctcgacagcatctacttcaaccgtttcctgcagtggaagtggctggaaaggcagccagtgaccaaaaacaccttcaggcaataccgagtcctgggcaaaggtggctttggggaggtgtgcgcctgccaggtgcgggccacaggtaagatgtatgcctgcaagaagctagagaaaaagcggatcaagaagcggaaaggggaggccatggcgctgaacgagaagcagatcctggagaaagtgaacagtaggtttgtagtgagcttggcctacgcctatgagaccaaggacgcgctgtgcctggtgctgacactgatgaacgggggcgacctcaagttccacatctaccacatgggccaggctggcttccccgaagcgcgggccgtcttctacgccgccgagatctgctgtggcctggaggacctgcaccgggagcgcatcgtgtacagggacctgaagcccgagaacatcttgctggatgaccacggccacatccgcatctctgacctgggactagctgtgcatgtgcccgagggccagaccatcaaagggcgtgtgggcaccgtgggttacatggctccggaggtggtgaagaatgaacggtacacgttcagccctgactggtgggcgctcggctgcctcctgtacgagatgatcgcaggccagtcgcccttccagcagaggaagaagaagatcaagcgggaggaggtggagcggctggtgaaggaggtccccgaggagtattccgagcgcttttccccgcaggcccgctcactttgctcacagctcctctgcaaggaccctgccgaacgcctggggtgtcgtgggggcagtgcccgcgaggtgaaggagcaccccctctttaagaagctgaacttcaagcggctgggagctggcatgctggagccgccgttcaagcctgacgtgagtgcagcccactcctgctgagggcggggcccagccagggctggggctcaggggctcttgtagtatcagccaggatgcttccagtgcaagtggcagaaaaaacaatctagtggcttagccacagaaataaagataattcacaaaaaggaaaa

SEQ ID NO: 136083 - DNA, 2571 bp, Homo sapiens
  Payload ID: 6637
  Gene Symbol: GRK6
  Gene Name: G protein-coupled receptor kinase 6
  Uniprot ID: P43250
  ENST ID: ENST00000528793
  CDS Start-End: 4-1773
cccatggagctcgagaacatcgtagcgaacacggtgctactcaaggcccgggaaggtggcggtggaaatcgcaaaggcaaaagcaagaaatggcggcagatgctccagttccctcacatcagccagtgcgaagagctgcggctcagcctcgagcgtgactatcacagcctgtgcgagcggcagcccattgggcgcctgctgttccgagagttctgtgccacgaggccggagctgagccgctgcgtcgccttcctggatggggtggccgagtatgaagtgaccccggatgacaagcggaaggcatgtgggcggcagctaacgcagaattttctgagccacacgggtcctgacctcatccctgaggtcccccggcagctggtgacgaactgcacccagcggctggagcagggtccctgcaaagaccttttccaggaactcacccggctgacccacgagtacctgagcgtggccccttttgccgactacctcgacagcatctacttcaaccgtttcctgcagtggaagtggctggaaaggcagccagtgaccaaaaacaccttcaggcaataccgagtcctgggcaaaggtggctttggggaggtgtgcgcctgccaggtgcgggccacaggtaagatgtatgcctgcaagaagctagagaaaaagcggatcaagaagcggaaaggggaggccatggcgctgaacgagaagcagatcctggagaaagtgaacagtaggtttgtagtgagcttggcctacgcctatgagaccaaggacgcgctgtgcctggtgctgacactgatgaacgggggcgacctcaagttccacatctaccacatgggccaggctggcttccccgaagcgcgggccgtcttctacgccgccgagatctgctgtggcctggaggacctgcaccgggagcgcatcgtgtacagggacctgaagcccgagaacatcttgctggatgaccacggccacatccgcatctctgacctgggactagctgtgcatgtgcccgagggccagaccatcaaagggcgtgtgggcaccgtgggttacatggctccggaggtggtgaagaatgaacggtacacgttcagccctgactggtgggcgctcggctgcctcctgtacgagatgatcgcaggccagtcgcccttccagcagaggaagaagaagatcaagcgggaggaggtggagcggctggtgaaggaggtccccgaggagtattccgagcgcttttccccgcaggcccgctcactttgctcacagctcctctgcaaggaccctgccgaacgcctggggtgtcgtgggggcagtgcccgcgaggtgaaggagcaccccctctttaagaagctgaacttcaagcggctgggagctggcatgctggagccgccgttcaagcctgacccccaggccatttactgcaaggatgttctggacattgaacagttctctacggtcaagggcgtggagctggagcctaccgaccaggacttctaccagaagtttgccacaggcagtgtgcccatcccctggcagaacgagatggtggagaccgagtgcttccaagagctgaatgtctttgggctggatggctcagttcccccagacctggactggaagggccagccacctgcacctcctaaaaagggactgctgcagagactcttcagtcgccaaaggattgctgtggaaactgcagcgacagcgaggaagagctccccacccgcctctagcccccagcccgaggcccccaccagcagttggcggtagcagctactccgagcgccgtttacagttttgcacagtgatcttccccattgtccactcaagtcgtggcctggggaacacagacggagctgtccccagtgtcctccgtccctcagcccctggcctggctgagtttggcagggcctgggccatccctgggacaaaggtgcgtcccttcagctcttctccgtggagctcggggctttctgtatttatgtatttgtacgaatgtatatagcgaccagagcattcttaattcccgccgcagacctggcgcccccgccttggctcctgggggcagccagccctggctgggagagcgggagctggcagaggagccactgccaaactcaaggctcctctggcccagcttggatggctgagggtggtcacacccctgagccttcagcactgtgctggccaccccggcctctgagtaagactcgtgcctccccctgctgccctgggctcaggctgctaccctctggggcccaaagctgtcccttctcagtgcttgtcagcgctgggtctggggcctctgtatgccctaggcctgtgccaaagtggccagagattgggctgcctgtgatacccatcagcccactgccccggccggcccagataggtctgcctctgccttccagctcccacagcctggtccctgatactgggctctgtcctgcagacacctctttcagaaacgcccaagcccagcccctaggagggggtggggcatccctggtcaaccctcaaacattccggactcccctcataacaatagacacatgtgcccagcaataa

SEQ ID NO: 136084 - DNA, 3239 bp, Homo sapiens
  Payload ID: 6638
  Gene Symbol: GRK7
  Gene Name: G protein-coupled receptor kinase 7
  Uniprot ID: Q8WTQ7
  ENST ID: ENST00000264952
  CDS Start-End: 138-1799
accctccacgggtcccacccacaggccacaggactcactgtaaatcccttggacgttgtctcacccgggaagggaaagcagccagcagccctccagccctcttgtgctttccctgggagtgcgccccgtgctcagccatggtggacatgggggccctggacaacctgatcgccaacaccgcctacctgcaggcccggaagccctcggactgcgacagcaaagagctgcagcggcggcggcgtagcctggccctgcccgggctgcagggctgcgcggagctccgccagaagctgtccctgaacttccacagcctgtgtgagcagcagcccatcggtcgccgcctcttccgtgacttcctagccacagtgcccacgttccgcaaggcggcaaccttcctagaggacgtgcagaactgggagctggccgaggagggacccaccaaagacagcgcgctgcaggggctggtggccacttgtgcgagtgcccctgccccggggaacccgcaacccttcctcagccaggccgtggccaccaagtgccaagcagccaccactgaggaagagcgagtggctgcagtgacgctggccaaggctgaggccatggctttcttgcaagagcagccctttaaggatttcgtgaccagcgccttctacgacaagtttctgcagtggaaactcttcgagatgcaaccagtgtcagacaagtacttcactgagttcagagtgctggggaaaggtggttttggggaggtatgtgccgtccaggtgaaaaacactgggaagatgtatgcctgtaagaaactggacaagaagcggctgaagaagaaaggtggcgagaagatggctctcttggaaaaggaaatcttggagaaggtcagcagccctttcattgtctctctggcctatgcctttgagagcaagacccatctctgccttgtcatgagcctgatgaatgggggagacctcaagttccacatctacaacgtgggcacgcgtggcctggacatgagccgggtgatcttttactcggcccagatagcctgtgggatgctgcacctccatgaactcggcatcgtctatcgggacatgaagcctgagaatgtgcttctggatgacctcggcaactgcaggttatctgacctggggctggccgtggagatgaagggtggcaagcccatcacccagagggctggaaccaatggttacatggctcctgagatcctaatggaaaaggtaagttattcctatcctgtggactggtttgccatgggatgcagcatttatgaaatggttgctggacgaacaccattcaaagattacaaggaaaaggtcagtaaagaggatctgaagcaaagaactctgcaagacgaggtcaaattccagcatgataacttcacagaggaagcaaaagatatttgcaggctcttcttggctaagaaaccagagcaacgcttaggaagcagagaaaagtctgatgatcccaggaaacatcatttctttaaaacgatcaactttcctcgcctggaagctggcctaattgaacccccatttgtgccagacccttcagtggtttatgccaaagacatcgctgaaattgatgatttctctgaggttcggggggtggaatttgatgacaaagataagcagttcttcaaaaactttgcgacaggtgctgttcctatagcatggcaggaagaaattatagaaacgggactgtttgaggaactgaatgaccccaacagacctacgggttgtgaggagggtaattcatccaagtctggcgtgtgtttgttattgtaaattgctctctttaccagacaggcagcaggagtctcggctgacataatcctcgaatgttccacacgtggaaatctgtggaatgagggctaatcagttaggagggacatcacaaccacaaaacaattcaaaagacaggcaagctcactactagaacacattttattttctttttctttcttcataaagatgagtaaagtctcagttttcactgagggcagggaaaaggaacactcaggtttattttgataaactgaaagcatcagccttttaccatcatgtccctgtgtattacgcaaagtcctaggaacagagaatggaactttgtggtgtgcccagaaaatgagcatttgcaattcttagtaaataatcattttagtttttctttgtttatatctttttttcccttcatctttcttcgcttctatacttataaaaaggattttgaagctggaaacaaatgtttctgacattctccccctaaaaaggagtggattacaatattttggcaatgttttaaatcacagaataattttcaatttcagtgacagtttcttttgcaattttgtggaaataatttactatcataatgttgaagcattttaaacataaacatccatgacatctgtgaattaaagcattctgtaaatttagttgagtcctttaagtaatatggtacaaattgcttcaacttgcactaccatatgccatcggttcccaaactctgctgaactttggaatcatctagggatcttttaaaaaactaatgcctgattcccatccatagacattctgatccccactcccaggtatgagaacagcttgaccatttagaatttcagaagctccccaggtgattctaatgtgcagcagagtttggcaggcactgctgtgcacatttgaatgttattacattcaatcttattttggttgctcaaaacttcaatcatacattttgatggcaacttttcaaatgtccccaaagcatgtcattttagtaattgcagtataaatgaaacaagacagtctattcatcttatggcttctcttgtccttgcacactttagtttctcacacgtatcttgggagctcggtctcttggctatttcaagtcctgaaggagacctatgggcttagaaattgagttgaacaggccaggtgcggtggctcatgcctgcaattccagcactttgggaggccaaggcagatggatcatgaggtcaggggctcaagactagcctggccaacatgttgtaaaccccgtctctactaaaaatacaaaaattagcccggtgtggtggtgcacatctataatcccagttacccgggagcctgaggcaggagaattgcttgaacccaggaggcggaggttgtagtgagccaagatcgcaacattgcactccaggctgggcagcaagagcaagactctatctcaaaaaaaaa

SEQ ID NO: 136085 - DNA, 3768 bp, Homo sapiens
  Payload ID: 6639
  Gene Symbol: GIT1
  Gene Name: G protein-coupled receptor kinase interacting ArfGAP 1
  Uniprot ID: Q9Y2X7
  ENST ID: ENST00000225394
  CDS Start-End: 250-2535
agggggcggagagaggagccgcgagcggcggcggggcggcgcggggcggagggcgcccgagggcgagcgggcaggcgggcacggcgggttccgggccagccccggggcggacggttggccgggcgcgcggagcctcgccggggcctcgccggagccgggccgggcagcaggggccgccgccgccgcccgggcccgccgcccgcgccccccacgctggcccagagggctgcggccgcgtcgccgctgaggatgtcccgaaaggggccgcgagcggaggtgtgtgcggactgcagcgccccggaccctggctgggcatccatcagcaggggtgtgctggtgtgtgacgagtgctgcagcgtgcaccggagcctgggacgccacatctccattgtcaagcaccttcgccacagcgcctggcctcccacgctgctgcagatggtgcacacgcttgccagcaacggggccaactccatctgggagcactccctgctggaccccgcacaagtgcagagcggccggcgtaaagccaacccccaagacaaagtccaccccatcaagtcagagttcatcagggccaagtaccagatgctggcatttgtgcacaagcttccctgccgggacgatgatggagtcaccgccaaagacctcagcaagcaactacactcgagcgtgcggacaggcaacctggagacatgtctgcgcctgctctccctgggtgcccaggccaacttcttccacccagagaagggcaccacacctctgcacgtggctgccaaggcaggacagacactgcaggccgagctgcttgtagtgtatggggctgaccctggctcccctgatgttaatggccgcacacccattgactatgccaggcaggcggggcaccatgagctggcggaaaggctggttgagtgccaatatgagctcactgaccggctggccttctacctctgtggacgcaagccggatcacaagaatgggcattacatcatcccacagatggctgacagccttgacttatccgaattggccaaagctgctaagaagaagctgcaggcgctcagcaaccggctttttgaggaactcgccatggacgtgtatgacgaggtggatcgaagagaaaatgatgcagtgtggctggctacccaaaaccacagcactctggtgacagagcgcagtgccgtgcccttcctgcctgttaacccggaatactcagccacgcggaatcaggggcgacaaaagctggcccgctttaatgcccgagagtttgccaccttgatcatcgacattctcagtgaggccaagcggagacagcagggcaagagcctgagcagccccacagacaacctcgagctgtctctgcggagccagagtgacctcgacgaccaacacgactacgacagcgtggcctctgacgaggacacagaccaggagcccctgcgcagcaccggcgccactcggagcaaccgggcccggagcatggactcctcggacttgtctgacggggctgtgacgctgcaggagtacctggagctgaagaaggccctggctacatcggaggcaaaggtgcagcagctcatgaaggtcaacagtagcctgagcgacgagctccggaggctgcagcgagagatccacaagctgcaggcggagaacctgcagctccggcagcctccagggccggtgcccacacctccactccccagtgaacgggcggaacacacacccatggcgccaggcgggagcacacaccgcagggatcgccaggccttttccatgtatgaacctggctctgccctgaagccctttgggggcccccctggggacgagctcactacgcggctgcagcctttccacagcactgagctagaggacgacgccatctattcagtgcacgtccctgctggcctttaccggatccggaaaggggtgtctgcctcagctgtgcccttcactccctcctccccgctgctgtcctgctcccaggagggaagccgccacacgagcaagctttcccgccacggcagtggagccgacagtgactatgagaacacgcaaagtggggacccactgctggggctggaagggaagaggtttctagagctgggcaaagaggaagacttccacccagagctggaaagcctggatggagacctagatcctgggcttcccagcacagaggatgtcatcttgaagacagagcaggtcaccaagaacattcaggaactgttgcgggcagcccaggagttcaagcatgacagcttcgtgccctgctcagagaagatccatttggctgtgaccgagatggcctccctcttcccaaagaggccagccctggagccagtgcggagctcactgcggctgctcaacgccagcgcctaccggctgcagagtgagtgccggaagacagtgcccccagagcccggcgccccagtggacttccagctgctgactcagcaggtgatccagtgcgcctatgacatcgccaaggctgccaagcagctggtcaccatcaccacccgagagaagaagcagtgacctctctccccacaccctcacctgcaccctaggacctcactggccataggagctgggccactccagacattaatccccaccccaacagagccactggcacaagtgcccttagtgctgccacactccctggcagccaggtgccctggtgcccacccctgtcgagcccctaaggatggggaggtgggggggcaggagcttctgtcccccacattccatgcacctcccctctgtatatagcatctcccccctcctagtgagcaggggcctgcaaggcatcactcccagcccctcgccttctagggcaccctcagcaaaggggcaggtggggacactccaagtggggcagctctccgtacatgcgccccacccccatgagccagttcagccctactgggggctgagcgggggcatcccctcctttgtacatagtctccatggatgtccctgccctgtagccaccagccccttgctgctctccctttaatgccatatggcccctgcctagggcacaggccccaacctgtgtgctggggtccccagcagcaaacactggaaagtctgttttttttttttctttcttcttccccaccccttaattttaactttgtggtaactgagtgcccccgcgtgcctgcgtgttgagtgtgtgggcggcagtgccgttccggaggcctggtccatctggagttttgaggggtgaggggaccagagcagtgggaccagcatggggatcagcttcccttccccacctggagccagggactgtccgggtagccagttttggtcctgccagctgcctccctgatccctccccactctcgccccttctctatgaacttaaatcaaaaaccacttccctccatctcctcctgctcctgcgtggagggggaatgtgtgctggctagggtggaggactgagcacctgagcctggggctggctccccggggtccccgactcagctggtggctgtggagctgagtcccctccccgtaacctctgcaaggccagcacccaccatcactacctgcacctgctgtggtcccaccctctggaggcctgggaacctggctgcagcctgggaaggctggagaggcagacggtgggacccaccagctctctccccatcccgcttcttccctgggggccaggccctacctgtgtggtggtgggtgggctgtcaagacgtgtcatgtacatttgtatcaaaaataaagaagtgaccatgagctgtt

SEQ ID NO: 136086 - DNA, 660 bp, Homo sapiens
  Payload ID: 6639
  Gene Symbol: GIT1
  Gene Name: G protein-coupled receptor kinase interacting ArfGAP 1
  ENST ID: ENST00000335356
  CDS Start-End: 219-660
cggggcggcgcggggcggagggcgcccgagggcgagcgggcaggcgggcacggcgggttccgggccagccccggggcggacggttggccgggcgcgcggagcctcgccggggcctcgccggagccgggccgggcagcaggggccgccgccgccgcccgggcccgccgcccgcgccccccacgctggcccagagggctgcggccgcgtcgccgctgaggatgtcccgaaaggggccgcgagcggaggtgtgtgcggactgcagcgccccgggggtgtgctggtgtgtgacgagtgctgcagcgtgcaccggagcctgggacgccacatctccattgtcaagcaccttcgccacagcgcctggcctcccacgctgctgcagatggtgcacacgcttgccagcaacggggccaactccatctgggagcactccctgctggaccccgcacaagtgcagagcggccggcgtaaagccaacccccaagacaaagtccaccccatcaagtcagagttcatcagggccaagtaccagatgctggcatttgtgcacaagcttccctgccgggacgatgatggagtcaccgccaaagacctcagcaagcaactacactcgagcgtgcggacaggcaacctggagacatgtctgcgcctgctctccctggg

SEQ ID NO: 136087 - DNA, 3711 bp, Homo sapiens
  Payload ID: 6639
  Gene Symbol: GIT1
  Gene Name: G protein-coupled receptor kinase interacting ArfGAP 1
  Uniprot ID: Q9Y2X7
  ENST ID: ENST00000394869
  CDS Start-End: 172-2484
gcacggcgggttccgggccagccccggggcggacggttggccgggcgcgcggagcctcgccggggcctcgccggagccgggccgggcagcaggggccgccgccgccgcccgggcccgccgcccgcgccccccacgctggcccagagggctgcggccgcgtcgccgctgaggatgtcccgaaaggggccgcgagcggaggtgtgtgcggactgcagcgccccggaccctggctgggcatccatcagcaggggtgtgctggtgtgtgacgagtgctgcagcgtgcaccggagcctgggacgccacatctccattgtcaagcaccttcgccacagcgcctggcctcccacgctgctgcagatggtgcacacgcttgccagcaacggggccaactccatctgggagcactccctgctggaccccgcacaagtgcagagcggccggcgtaaagccaacccccaagacaaagtccaccccatcaagtcagagttcatcagggccaagtaccagatgctggcatttgtgcacaagcttccctgccgggacgatgatggagtcaccgccaaagacctcagcaagcaactacactcgagcgtgcggacaggcaacctggagacatgtctgcgcctgctctccctgggtgcccaggccaacttcttccacccagagaagggcaccacacctctgcacgtggctgccaaggcaggacagacactgcaggccgagctgcttgtagtgtatggggctgaccctggctcccctgatgttaatggccgcacacccattgactatgccaggcaggcggggcaccatgagctggcggaaaggctggttgagtgccaatatgagctcactgaccggctggccttctacctctgtggacgcaagccggatcacaagaatgggcattacatcatcccacagatggctgacagatctcggcaaaagtgcatgtctcagagccttgacttatccgaattggccaaagctgctaagaagaagctgcaggcgctcagcaaccggctttttgaggaactcgccatggacgtgtatgacgaggtggatcgaagagaaaatgatgcagtgtggctggctacccaaaaccacagcactctggtgacagagcgcagtgccgtgcccttcctgcctgttaacccggaatactcagccacgcggaatcaggggcgacaaaagctggcccgctttaatgcccgagagtttgccaccttgatcatcgacattctcagtgaggccaagcggagacagcagggcaagagcctgagcagccccacagacaacctcgagctgtctctgcggagccagagtgacctcgacgaccaacacgactacgacagcgtggcctctgacgaggacacagaccaggagcccctgcgcagcaccggcgccactcggagcaaccgggcccggagcatggactcctcggacttgtctgacggggctgtgacgctgcaggagtacctggagctgaagaaggccctggctacatcggaggcaaaggtgcagcagctcatgaaggtcaacagtagcctgagcgacgagctccggaggctgcagcgagagatccacaagctgcaggcggagaacctgcagctccggcagcctccagggccggtgcccacacctccactccccagtgaacgggcggaacacacacccatggcgccaggcgggagcacacaccgcagggatcgccaggccttttccatgtatgaacctggctctgccctgaagccctttgggggcccccctggggacgagctcactacgcggctgcagcctttccacagcactgagctagaggacgacgccatctattcagtgcacgtccctgctggcctttaccggatccggaaaggggtgtctgcctcagctgtgcccttcactccctcctccccgctgctgtcctgctcccaggagggaagccgccacacgagcaagctttcccgccacggcagtggagccgacagtgactatgagaacacgcaaagtggggacccactgctggggctggaagggaagaggtttctagagctgggcaaagaggaagacttccacccagagctggaaagcctggatggagacctagatcctgggcttcccagcacagaggatgtcatcttgaagacagagcaggtcaccaagaacattcaggaactgttgcgggcagcccaggagttcaagcatgacagcttcgtgccctgctcagagaagatccatttggctgtgaccgagatggcctccctcttcccaaagaggccagccctggagccagtgcggagctcactgcggctgctcaacgccagcgcctaccggctgcagagtgagtgccggaagacagtgcccccagagcccggcgccccagtggacttccagctgctgactcagcaggtgatccagtgcgcctatgacatcgccaaggctgccaagcagctggtcaccatcaccacccgagagaagaagcagtgacctctctccccacaccctcacctgcaccctaggacctcactggccataggagctgggccactccagacattaatccccaccccaacagagccactggcacaagtgcccttagtgctgccacactccctggcagccaggtgccctggtgcccacccctgtcgagcccctaaggatggggaggtgggggggcaggagcttctgtcccccacattccatgcacctcccctctgtatatagcatctcccccctcctagtgagcaggggcctgcaaggcatcactcccagcccctcgccttctagggcaccctcagcaaaggggcaggtggggacactccaagtggggcagctctccgtacatgcgccccacccccatgagccagttcagccctactgggggctgagcgggggcatcccctcctttgtacatagtctccatggatgtccctgccctgtagccaccagccccttgctgctctccctttaatgccatatggcccctgcctagggcacaggccccaacctgtgtgctggggtccccagcagcaaacactggaaagtctgttttttttttttctttcttcttccccaccccttaattttaactttgtggtaactgagtgcccccgcgtgcctgcgtgttgagtgtgtgggcggcagtgccgttccggaggcctggtccatctggagttttgaggggtgaggggaccagagcagtgggaccagcatggggatcagcttcccttccccacctggagccagggactgtccgggtagccagttttggtcctgccagctgcctccctgatccctccccactctcgccccttctctatgaacttaaatcaaaaaccacttccctccatctcctcctgctcctgcgtggagggggaatgtgtgctggctagggtggaggactgagcacctgagcctggggctggctccccggggtccccgactcagctggtggctgtggagctgagtcccctccccgtaacctctgcaaggccagcacccaccatcactacctgcacctgctgtggtcccaccctctggaggcctgggaacctggctgcagcctgggaaggctggagaggcagacggtgggacccaccagctctctccccatcccgcttcttccctgggggccaggccctacctgtgtggtggtgggtgggctgtcaagacgtgtcatgtacatttgtatcaaaaataaagaagtgaccatga

SEQ ID NO: 136088 - DNA, 2827 bp, Homo sapiens
  Payload ID: 6639
  Gene Symbol: GIT1
  Gene Name: G protein-coupled receptor kinase interacting ArfGAP 1
  ENST ID: ENST00000581348
  CDS Start-End: 54-2297
cgcccgcgccccccacgctggcccagagggctgcggccgcgtcgccgctgaggatgtcccgaaaggggccgcgagcggaggtgtgtgcggactgcagcgccccggaccctggctgggcatccatcagcaggggtgtgctggtgtgtgacgagtgctgcagcgtgcaccggagcctgggacgccacatctccattgtcaagcaccttcgccacagcgcctggcctcccacgctgctgcagatggtgcacacgcttgccagcaacggggccaactccatctgggagcactccctgctggaccccgcacaagtgcagagcggccggcgtaaagccaacccccaagacaaagtccaccccatcaagtcagagttcatcagggccaagtaccagatgctggcatttgtgcacaagcttccctgccgggacgatgatggagtcaccgccaaagacctcagcaagcaactacactcgagcgtgcggacaggcaacctggagacatgtctgcgcctgctctccctgggtgcccaggccaacttcttccacccagagaagggcaccacacctctgcacgtggctgccaaggcaggacagacactgcaggccgagctgcttgtagtgtatggggctgaccctggctcccctgatgttaatggccgcacacccattgactatgccaggcaggcggggcaccatgagctggcggaaaggctggttgagtgccaatatgagctcactgaccggctggccttctacctctgtggacgcaagccggatcacaagaatgggcattacatcatcccacagatggctgacagatctcggcaaaagtgcatgtctcagagccttgacttatccgaattggccaaagctgctaagaagaagctgcaggcgctcagcaaccggctttttgaggaactcgccatggacgtgtatgacgaggtggatcgaagagaaaatgatgcagtgtggctggctacccaaaaccacagcactctggtgacagagcgcagtgccgtgcccttcctgcctgttaacccggaatactcagccacgcggaatcaggggcgacaaaagctggcccgctttaatgcccgagagtttgccaccttgatcatcgacattctcagtgaggccaagcggagacagcagggcaagagcctgagcagccccacagacaacctcgagctgtctctgcggagccagagtgacctcgacgaccaacacgactacgacagcgtggcctctgacgaggacacagaccaggagcccctgcgcagcaccggcgccactcggagcaaccgggcccggagcatggactcctcggacttgtctgacggggctgtgacgctgcaggagtacctggagctgaagaaggccctggctacatcggaggcaaaggtgcagcagctcatgaaggtcaacagtagcctgagcgacgagctccggaggctgcagcgagagatccacaagctgcaggcggagaacctgcagctccggcagcctccagggccggtgcccacacctccactccccagtgaacgggcggaacacacacccatggcgccaggcgggagcacacaccgcagggatcgccaggccttttccatgtatgaacctggctctgccctgaagccctttgggggcccccctggggacgagctcactacgcggctgcagcctttccacagcactgagctagaggacgacgccatctattcagtgcacgtccctgctggcctttaccgggagggaagccgccacacgagcaagctttcccgccacggcagtggagccgacagtgactatgagaacacgcaaagtggggacccactgctggggctggaagggaagaggtttctagagctgggcaaagaggaagacttccacccagagctggaaagcctggatggagacctagatcctgggcttcccagcacagaggatgtcatcttgaagacagagcaggtcaccaagaacattcaggaactgttgcgggcagcccaggagttcaagcatgacagcttcgtgccctgctcagagaagatccatttggctgtgaccgagatggcctccctcttcccaaagaggccagccctggagccagtgcggagctcactgcggctgctcaacgccagcgcctaccggctgcagagtgagtgccggaagacagtgcccccagagcccggcgccccagtggacttccagctgctgactcagcaggtgatccagtgcgcctatgacatcgccaaggctgccaagcagctggtcaccatcaccacccgagagaagaagcagtgacctctctccccacaccctcacctgcaccctaggacctcactggccataggagctgggccactccagacattaatccccaccccaacagagccactggcacaagtgcccttagtgctgccacactccctggcagccaggtgccctggtgcccacccctgtcgagcccctaaggatggggaggtgggggggcaggagcttctgtcccccacattccatgcacctcccctctgtatatagcatctcccccctcctagtgagcaggggcctgcaaggcatcactcccagcccctcgccttctagggcaccctcagcaaaggggcaggtggggacactccaagtggggcagctctccgtacatgcgccccacccccatgagccagttcagccctactgggggctgagcgggggcatcccctcctttgtacatagtctccatggatgtccctgccctgtagccaccagccccttgctgctctccctttaatgccatatggcccctgcctagggcacaggccccaacctgtgtgctg

SEQ ID NO: 136089 - DNA, 555 bp, Homo sapiens
  Payload ID: 6639
  Gene Symbol: GIT1
  Gene Name: G protein-coupled receptor kinase interacting ArfGAP 1
  ENST ID: ENST00000578266
  CDS Start-End: 1-534
gagctagaggacgacgccatctattcagtgcacgtccctgctggcctttaccggatccggaaaggggtgtctgcctcagctgtgcccttcactccctcctccccgctgctgtcctgctcccaggagggaagccgccacacgagcaagctttcccgccacggcagtggagccgacagtgactatgagaacacgcaaagtggggacccactgctggggctggaagggaagaggtttctagagctgggcaaagaggaagacttccacccagagctggaaagcctggatggagacctagatcctgggcttcccagcacagaggatgtcatcttgaagacagagcaggtcaccaagaacattcaggaactgttgcgggcagcccaggagttcaagcatgacagcttcgtgccctgctcagagaagatccatttggctgtgaccgagatggcctccctcttcccaaaggtacaggggccaaagagaggaccaggagtgggagggcctcgagctggggcaggcgtggagaatcccatctgatcgctacctgggtggagacac

SEQ ID NO: 136090 - DNA, 686 bp, Homo sapiens
  Payload ID: 6639
  Gene Symbol: GIT1
  Gene Name: G protein-coupled receptor kinase interacting ArfGAP 1
  ENST ID: ENST00000585148
  CDS Start-End: 1-686
gatcacaagaatgggcattacatcatcccacagatggctgacagccttgacttatccgaattggccaaagctgctaagaagaagctgcaggcgctcagcaaccggctttttgaggaactcgccatggacgtgtatgacgaggtggatcgaagagaaaatgatgcagtgtggctggctacccaaaaccacagcactctggtgacagagcgcagtgccgtgcccttcctgcctgttaacccggaatactcagccacgcggaatcaggggcgacaaaagctggcccgctttaatgcccgagagtttgccaccttgatcatcgacattctcaacaacctcgagctgtctctgcggagccagagtgacctcgacgaccaacacgactacgacagcgtggcctctgacgaggacacagaccaggagcccctgcgcagcaccggcgccactcggagcaaccgggcccggagcatggactcctcggacttgtctgacggggctgtgacgctgcaggagtacctggagctgaagaaggccctggctacatcggaggcaaaggtgcagcagctcatgaaggtcaacagtagcctgagcgacgagctccggaggctgcagcgagagatccacaagctgcaggcggagaacctgcagctccggcagcctccagggccggtgcccacacctccactccc

SEQ ID NO: 136091 - DNA, 918 bp, Homo sapiens
  Payload ID: 6639
  Gene Symbol: GIT1
  Gene Name: G protein-coupled receptor kinase interacting ArfGAP 1
  ENST ID: ENST00000578670
  CDS Start-End: 1-449
cggagaacctgcagctccggcagcctccagggccggtgcccacacctccactccccagtgaacgggcggaacacacacccatggcgccaggcgggagcacacaccgcagggatcgccaggccttttccatgtatgaacctggctctgccctgaagccctttgggggcccccctggggacgagctcactacgcggctgcagcctttccacagcactgagctagaggacgacgccatctattcagtgcacgtccctgctggcctttaccgggctggaagggaagaggtttctagagctgggcaaagaggaagacttccacccagagctggaaagcctggatggagacctagatcctgggcttcccagcacagaggatgtcatcttgaagacagagcaggtcaccaagaacattcaggaactgttgcgggcagcccaggagttcaagcatgacagcttcgtgccctgctcagagaagatccatttggctgtgaccgagatggcctccctcttcccaaagaggccagccctggagccagtgcggagctcactgcggctgctcaacgccagcgcctaccggctgcagagtgagtgccggaagacagtgcccccagagcccggcgccccagtggacttccagctgctgactcagcaggtgatccagtgcgcctatgacatcgccaaggctgccaagcagctggtcaccatcaccacccgagagaagaagcagtgacctctctccccacaccctcacctgcaccctaggacctcactggccataggagctgggccactccagacattaatccccaccccaacagagccactggcacaagtgcccttagtgctgccacactccctggcagccaggtgccctggtgcccacccctgtcgagcccctaaggatggggaggtggggggg

SEQ ID NO: 136092 - DNA, 2798 bp, Homo sapiens
  Payload ID: 6639
  Gene Symbol: GIT1
  Gene Name: G protein-coupled receptor kinase interacting ArfGAP 1
  ENST ID: ENST00000579937
  CDS Start-End: 215-2299
gcggcgcggggcggagggcgcccgagggcgagcgggcaggcgggcacggcgggttccgggccagccccggggcggacggttggccgggcgcgcggagcctcgccggggcctcgccggagccgggccgggcagcaggggccgccgccgccgcccgggcccgccgcccgcgccccccacgctggcccagagggctgcggccgcgtcgccgctgaggatgtcccgaaaggggccgcgagcggaggtgtgtgcggactgcagcgccccggaccctggctgggcatccatcagcaggggtgtgctggtgtgtgacgagtgctgcagcgtgcaccggagcctgggacgccacatctccattgtcaagcaccttcgccacagcgcctggcctcccacgctgctgcagatggtgcacacgcttgccagcaacggggccaactccatctgggagcactccctgctggaccccgcacaagtgcagagcggccggcgtaaagccaacccccaagacaaagtccaccccatcaagtcagagttcatcagggccaagtaccagatgctggcatttgtgcacaagcttccctgccgggacgatgatggagtcaccgccaaagacctcagcaagcaactacactcgagcgtgcggacaggcaacctggagacatgtctgcgcctgctctccctgggtgcccaggccaacttcttccacccagagaagggcaccacacctctgcacgtggctgccaaggcaggacagacactgcaggccgagctgcttgtagtgtatggggctgaccctggctcccctgatgttaatggccgcacacccattgactatgccaggcaggcggggcaccatgagctggcggaaaggctggttgagtgccaatatgagctcactgaccggctggccttctacctctgtggacgcaagccggatcacaagaatgggcattacatcatcccacagatggctgacagccttgacttatccgaattggccaaagctgctaagaagaagctgcaggcgctcagcaaccggctttttgaggaactcgccatggacgtgtatgacgaggtggatcgaagagaaaatgatgcagtgtggctggctacccaaaaccacagcactctggtgacagagcgcagtgccgtgcccttcctgcctgttaacccggaatactcagccacgcggaatcaggggcgacaaaagctggcccgctttaatgcccgagagtttgccaccttgatcatcgacattctcagtgaggccaagcggagacagcagggcaagagcctgagcagccccacagacaacctcgagctgtctctgcggagccagagtgacctcgacgaccaacacgactacgacagcgtggcctctgacgaggacacagaccaggagcccctgcgcagcaccggcgccactcggagcaaccgggcccggagcatggactcctcggacttgtctgacggggctgtgacgctgcaggagtacctggagctgaagaaggccctggctacatcggaggcaaaggtgcagcagctcatgaaggtcaacagtagcctgagcgacgagctccggaggctgcagcgagagatccacaagctgcaggcggagaacctgcagctccggcagcctccagggccggtgcccacacctccactccccagtgaacgggcggaacacacacccatggcgccaggcgggagcacacaccgcagggatcgccaggccttttccatgtatgaacctggctctgccctgaagccctttgggggcccccctggggacgagctcactacgcggctgcagcctttccacagcactgagctagaggacgacgccatctattcagtgcacgtccctgctggcctttaccggatccggaaaggggtgtctgcctcagctgtgcccttcactccctcctccccgctgctgtcctgctcccaggagggaagccgccacacgagcaagctttcccgccacggcagtggagccgacagtgactatgagaacacgcaaagtggggacccactgctggggctggaagggaagaggtttctagagctgggcaaagaggaagacttccacccagagctggaaagcctggatggagacctagatcctgggcttcccagcacagaggatgtcatcttgaagacagagcaggtcaccaagaacattcaggaactgttgcgggcagcccaggagttcaagcatgacagcttcgtgccctgctcagagaagatccatttggctgtgaccgagatggcctccctcttcccaaagctggtggcttaaagtccaaggtccagcctcactcctgccccctccagaggccagccctggagccagtgcggagctcactgcggctgctcaacgccagcgcctaccggctgcagagtgagtgccggaagacagtgcccccagagcccggcgccccagtggacttccagctgctgactcagcaggtgatccagtgcgcctatgacatcgccaaggctgccaagcagctggtcaccatcaccacccgagagaagaagcagtgacctctctccccacaccctcacctgcaccctaggacctcactggccataggagctgggccactccagacattaatccccaccccaacagagccactggcacaagtgcccttagtgctgccacactccctggcagccaggtgccctggtgcccacccctgtcgagcccctaaggatggggaggtgggggggcaggagcttctgtcccccacattccatgcacctcccctctgtatatagcatctcccccctcc

SEQ ID NO: 136093 - DNA, 547 bp, Homo sapiens
  Payload ID: 6639
  Gene Symbol: GIT1
  Gene Name: G protein-coupled receptor kinase interacting ArfGAP 1
  ENST ID: ENST00000577466
  CDS Start-End: 391-547
atgggccctggggactgcatatcccagaggggtaaggatgtaggaaagggcatggctctgtcagcccccagctgtgagctcttggggagatccctcactggtaacctggccgtagtgatggtcccagctcctaggctgttggagactgagtgagtgaatgtgtggagagtactaggcttggcacgggccagagcaggtgctcaggaggtctggcccatcatctggctccggctgacccttgccctcaccctggcagaccctggctgggcatccatcagcaggggtgtgctggtgtgtgacgagtgctgcagcgtgcaccggagcctgggacgccacatctccattgtcaagcaccttcgccacagcgcctggcctcccacgctgctgcagatggtgcacacgcttgccagcaacggggccaactccatctgggagcactccctgctggaccccgcacaagtgcagagcggccggcgtaaagccaacccccaagacaaagtccaccccatcaagtcagagttcatcagggccaagtaccagatgctgg

SEQ ID NO: 136094 - DNA, 546 bp, Homo sapiens
  Payload ID: 6639
  Gene Symbol: GIT1
  Gene Name: G protein-coupled receptor kinase interacting ArfGAP 1
  ENST ID: ENST00000583413
  CDS Start-End: 26-546
tggctggggcggactctcccaccacatggaacaccgacacagcccgcagcccctccctgcagccctcactgccccggcggaggaggggcacagaggcctctactctcatctagaccctggctgggcatccatcagcaggggtgtgctggtgtgtgacgagtgctgcagcgtgcaccggagcctgggacgccacatctccattgtcaagcaccttcgccacagcgcctggcctcccacgctgctgcagatggtgcacacgcttgccagcaacggggccaactccatctgggagcactccctgctggaccccgcacaagtgcagagcggccggcgtaaagccaacccccaagacaaagtccaccccatcaagtcagagttcatcagggccaagtaccagatgctggcatttgtgcacaagcttccctgccgggacgatgatggagtcaccgccaaagacctcagcaagcaactacactcgagcgtgcggacaggcaacctggagacatgtctgcgcctgctctccctgggtgcccaggccaacttctt

SEQ ID NO: 136095 - DNA, 2094 bp, Homo sapiens
  Payload ID: 6640
  Gene Symbol: GIT2
  Gene Name: G protein-coupled receptor kinase interacting ArfGAP 2
  ENST ID: ENST00000320063
  CDS Start-End: 68-1333
cgccgccgccaccgccgcctttgctgtcccccggcctctagttccccgcaggtgggaggtgggagccatgtcgaaacggctccggagcagcgaggtgtgcgctgactgcagcgggccggatccttcctgggcatcagtaaataggggaacgtttttatgtgatgagtgctgcagtgtccatcggagtctagggcgccatatctcccaagtgaggcatctgaaacacacaccgtggcctccaacactgcttcagatggttgagaccttgtataataacggtgctaactctatatgggagcattctttgctggaccctgcgtctattatgagtggaagacgtaaagctaatccacaggataaagtacatcccaataaagcggaattcatcagagccaagtatcagatgttagcgttcgtccatcgcttgccctgccgggatgacgatagtgtgactgccaaagatcttagcaagcaactccattcgagcgtgagaacagggaatcttgaaacctgtttgagactgttatctttaggagcacaagccaacttctttcatcctgaaaaaggaaacaccccactccatgttgcctccaaagcagggcagattttacaggctgaattattggcagtatatggagcagacccaggcacacaggattctagtgggaaaactcccgttgattatgcaaggcaaggagggcaccatgagctggcagagcgcctcgtggaaatacagtatgagctaacggacagactagccttctatctctgtggcaggaaaccagatcacaaaaatggacagcactttataatacctcaaatggcagacagcagcctggatttgtctgaattggcaaaagctgctaagaagaaacttcaatctctaagtaatcatttgtttgaagaacttgccatggatgtgtacgatgaagttgacaggcgagagacggatgcagtctggcttgccacgcaaaaccacagcgccctggtaaccgagacaacggtcgtcccctttcttccggtcaatcctgagtactcatcaacacgaaatcagggcagacagaagttagctcggttcaacgcccatgagtttgccacgctggtcattgacattctcagtgacgccaagaggagacagcagggcagttctctctcgggttcaaaagacaatgtggagctcatactgaaaaccatcaataaccagcacagcgttgagagtcaagacaacgatcagcccgactatgacagcgtggcatcagacgaagacacagatttggaaaccactgcaagcaaaacaaaccggcagaagttgcttggaaaagatgctaattaatgaagaggagcaactactattggtgtatttttcacagattggtgctttctaaataaaaattgaaagtaactcctaacattgaatgggtttgctactgaaaaagtaatgatcttctggtgcaaacagttgcttgtggacttaaaccttggcactggtggggaatttggtcagattttacaatctctgtcaaagagtagacagctgaactcacaccacacccagcttatagaatgtccatggaagatgaaggcgcaccagaagggaaggaccctgcgcagaatggacgtggtgaatggtgtttaaaatgccagatgccaaagagtaacacgattccctgctgaccccttaactctaatccatccagcaccatggagcagcctgcatgtgaggaatggaaggagcattcagggcctccaagtgacagtctctaaaatggggtggtgccaggcagattagcatgttcaaagctgacaccactgaggtcgtgttttttgggtgacaaagccaaaggagagaaaggccaaatattccagccctggccgaaagatgatcactcaccagacggaagcaagcgtgctgcgtggagcatccatgcgaagatgtcaattccatagatcaataggtttccagttttcttcgtgatatgttaatatagcaaacttaccatgatccggttttctcttttttctttttttttttacaaagtgctgaattgtttggaatatcaagagtattatgtaataaaaacttgttgatcataa

SEQ ID NO: 136096 - DNA, 5387 bp, Homo sapiens
  Payload ID: 6640
  Gene Symbol: GIT2
  Gene Name: G protein-coupled receptor kinase interacting ArfGAP 2
  ENST ID: ENST00000354574
  CDS Start-End: 166-2211
acctccccgcgcgtgcgtgctgtgccaaggctgcaaggcgctgaggggagaggcgccgccgtcagcgccgccgcagctgggacccgttagagcggaagcgccgccgccaccgccgcctttgctgtcccccggcctctagttccccgcaggtgggaggtgggagccatgtcgaaacggctccggagcagcgaggtgtgcgctgactgcagcgggccggatccttcctgggcatcagtaaataggggaacgtttttatgtgatgagtgctgcagtgtccatcggagtctagggcgccatatctcccaagtgaggcatctgaaacacacaccgtggcctccaacactgcttcagatggttgagaccttgtataataacggtgctaactctatatgggagcattctttgctggaccctgcgtctattatgagtggaagacgtaaagctaatccacaggataaagtacatcccaataaagcggaattcatcagagccaagtatcagatgttagcgttcgtccatcgcttgccctgccgggatgacgatagtgtgactgccaaagatcttagcaagcaactccattcgagcgtgagaacagggaatcttgaaacctgtttgagactgttatctttaggagcacaagccaacttctttcatcctgaaaaaggaaacaccccactccatgttgcctccaaagcagggcagattttacaggctgaattattggcagtatatggagcagacccaggcacacaggattctagtgggaaaactcccgttgattatgcaaggcaaggagggcaccatgagctggcagagcgcctcgtggaaatacagtatgagctaacggacagactagccttctatctctgtggcaggaaaccagatcacaaaaatggacagcactttataatacctcaaatggcagacagaaggagcagcctggatttgtctgaattggcaaaagctgctaagaagaaacttcaatctctaagtaatcatttgtttgaagaacttgccatggatgtgtacgatgaagttgacaggcgagagacggatgcagtctggcttgccacgcaaaaccacagcgccctggtaaccgagacaacggtcgtcccctttcttccggtcaatcctgagtactcatcaacacgaaatcagggcagacagaagttagctcggttcaacgcccatgagtttgccacgctggtcattgacattctcagtgacgccaagaggagacagcagggcagttctctctcgggttcaaaagacaatgtggagctcatactgaaaaccatcaataaccagcacagcgttgagagtcaagacaacgatcagcccgactatgacagcgtggcatcagacgaagacacagatttggaaaccactgcaagcaaaacaaaccggcagaagcttcaaacactccagagtgaaaattcgaacctcaggaaacaggccacaaccaatgtatatcaggtgcaaactggttctgagtacacagacacttccaaccactcttccttaaagagacgtccgtctgcccggggcagtaggcccatgtccatgtacgagaccggatcaggtcagaaaccatatctcccaatgggagaagcgagccgccccgaagagagcaggatgagactccagcccttccccgcgcacgcatccaggctggagaagcagaacagcacacctgagagtgactacgacaacactcccaacgacatggagccagatggcatggggtcaagccgaaagggacggcaaagaagtatggtgtggccaggggatggcttggtaccagacacagcagaaccccatgtggccccaagccccactctccctagcaccgaagatgtcatcaggaagactgaacagatcaccaaaaacatacaggagctcttaagagcagcccaagaaaataaacatgacagttatattccctgctcagagaggatacacgtagctgttacagaaatggcagcattattccccaaaaaacccaagtctgatatggtgaggacttcccttcgtttactgacgtccagtgcctaccgactgcagtcagagtgcaagaagaccctcccaggggaccccggctcacccacagacgttcagctggtcacgcagcaggtcatccagtgtgcgtacgacatcgccaaggctgccaagcagctggttaccatcaccaccaaagagaacaacaactgacaagggcagggcaccgcctcctctgttttctaggctttataaagtccaatttcaaattcagacgcagaactcttcagatttctacaaaaagaaacatttaatgacggtttaaaactttttaaaagaaaactcagtattatttttgcatgttttctaaccaattttcaactatttaacccacttgccttattttgtgcctatttgctggtttagtttctgatgttcggttgtgttgtcaacaactgttgagttgatcacatacatccaaaagtatagtttcattgtctaaagtttgtgaaaacttttccatcccttaaaactccctgcctatggctgaaactataaatgaaatttttcataaaacattttcttgagagagttcagttaaaaaagaaaaaatcagcgtcatttgttccctgccaagcatcgtgcaataagtgaatttcctggcctacttcataatctctaagtttggggtatctccaagcatgtatgtagagaaaggactttgccgctttttaaaactagtgtcacagtctctcttgggaggaaacaatgaattggttcatttcttctcagtgttttaccctgttacatgttctgttatttaatgttgttatctcaagctcctatctcttgatgttttcttgtcatcttgaaggctccatggaatgagataaagcattgacccaccacaggacatctcatgaagccatgttcagggtaggagctccacgcacatcaccacccattgtcaggtgctctccctcacccctgtaagccagacagtttgttcaaaacctgcagcaaagagaagcatcagtctaacaagccagaactcattttgtgccacccatttaggtatcactaccatgaactatagggaaaagaaatcacctactccctgacactgtgttgtacccttcatccaaaagtcagcttgcttctctgaccacttacagctttctcacatgagttgcttcacatttttcatcatctttaaggacttcttataaggaaagatgtatcgtatcgcagtcatctgagttagtttctcctccatcacctcatgagtacttaaaaattagacatcaactttcaagagttccttagagagtgtgctctagctggctgcctgctaccccaaagctctgaaagagtaaggttgaagtgctggaacatgctcagattgttttttagttactcaaaagccccttcttgttctgaatgtgaaagctcttcccgttcctgcttactgcagccattctgtgtgtgtggttcagaccctggcctagggccggtgatgtggatgagtgaagggagccaggtacacggcagcagggcagaggagactatggggagcccaccgcctacacagtaggggcagtagcccccagctccacgcctgttgccatgtggaaaagtgggcctagggtggccacagctttgatttttcaagagacaagaaacctagatgttttttggtgccatctctccatttataaatgttggcaaccaatttgaacactttcagagaccatgtgcaggtgagctgtgtcctctaggctgccagctcacagcccccaccccagggccctgtaagctgtgcagtgtgagggcctggcttccccggacacacctggagcagcctctgagtcttacccgtaatggagccggccaaccctgtgtgttatgttgctgtcgctcctgtttttaaccatatgttctgtcccatagcagtcattcacacatgtgaagaagacacaagaatcaaagtacaagttgcctcaatacatgctaataactaagcttctattttcacaggactgatcgatgcacacctttatagcttgaccatatgctgtcatgaaagtagcaccccgacggtgcttgctttactaagtcaccgtgtgtggatgcttttgtcgcattttgcttcactgtgagtagcatgggaaaagggtccacgtctccaaaagactcttccacttgtttgtcccacagccctaagtgccacattgctgttggatgctcccgggatgccttctagaagggggcctcccaccttaagttcaggcgccatctgatagccttttctgcaggcttcatgtccttagctgaccctcctttatcttgcaaacccctgcccctgctgtcccagggaggacgggcttctgtagaggcttctgggaaatgagctgtctgcaggaggtgaagcagtgttttccttggaatgtttgaggacctgcaatagaagatgttgcctttatggccctagagaaagtcaaggaacatggggaccaacaaagcatttccagttgtaagaatatgtcagaagagtgctcggttagcccacggtgccaaaactccaaacaagttccccggtggaatgacgtggccattggagggctgcaggtcgtcctctctgtatgtgccccgcgcatttccttggcctcatctgagatctggtgtcagagttctctgctcctgttggcaaatcgcaccttatctgaacatttgttccagccaccttttgcacatggattccgtaccttgcactagcaatgtctaccttcagtaacgtcgttctttttcaccctgtattctcaatgatcccttcctccccatatgccacccttcccccaaagctgatagggcagaggtgcactttatgaaactggcacttgactgaacagaaggaaacagctgtacctctaagctcctttcacagaaatcgtcatctgccttggaatgcaaatagttcttatttgccaaagaacagtgaattgggcccaaagatcaaacacagcatttcatgtaatcagaattctaaacgcacaactcgggagctgtgcacggcttctcaagtgattcagttgcagaaccaagagcaaaactcgcctgtttttgtcctcaatggcacccatgagctttccaatagtatagttttctttctttccttgtcctggttgaaggtaacgtgttcctagaaaagaaaatgctgcataggaaaactgagatgccttttattccaacgtgtttgatccctgtcactcattattctgtactttttattgtacattctattcctgtaattattgtgccctttaagtgttgtaaaatcgttttggaatttgtgcctgctagttatgcaataaacaggctctacaagtgtt

SEQ ID NO: 136097 - DNA, 5466 bp, Homo sapiens
  Payload ID: 6640
  Gene Symbol: GIT2
  Gene Name: G protein-coupled receptor kinase interacting ArfGAP 2
  Uniprot ID: Q14161
  ENST ID: ENST00000355312
  CDS Start-End: 1-2280
atgtcgaaacggctccggagcagcgaggtgtgcgctgactgcagcgggccggatccttcctgggcatcagtaaataggggaacgtttttatgtgatgagtgctgcagtgtccatcggagtctagggcgccatatctcccaagtgaggcatctgaaacacacaccgtggcctccaacactgcttcagatggttgagaccttgtataataacggtgctaactctatatgggagcattctttgctggaccctgcgtctattatgagtggaagacgtaaagctaatccacaggataaagtacatcccaataaagcggaattcatcagagccaagtatcagatgttagcgttcgtccatcgcttgccctgccgggatgacgatagtgtgactgccaaagatcttagcaagcaactccattcgagcgtgagaacagggaatcttgaaacctgtttgagactgttatctttaggagcacaagccaacttctttcatcctgaaaaaggaaacaccccactccatgttgcctccaaagcagggcagattttacaggctgaattattggcagtatatggagcagacccaggcacacaggattctagtgggaaaactcccgttgattatgcaaggcaaggagggcaccatgagctggcagagcgcctcgtggaaatacagtatgagctaacggacagactagccttctatctctgtggcaggaaaccagatcacaaaaatggacagcactttataatacctcaaatggcagacagcagcctggatttgtctgaattggcaaaagctgctaagaagaaacttcaatctctaagtaatcatttgtttgaagaacttgccatggatgtgtacgatgaagttgacaggcgagagacggatgcagtctggcttgccacgcaaaaccacagcgccctggtaaccgagacaacggtcgtcccctttcttccggtcaatcctgagtactcatcaacacgaaatcagggcagacagaagttagctcggttcaacgcccatgagtttgccacgctggtcattgacattctcagtgacgccaagaggagacagcagggcagttctctctcgggttcaaaagacaatgtggagctcatactgaaaaccatcaataaccagcacagcgttgagagtcaagacaacgatcagcccgactatgacagcgtggcatcagacgaagacacagatttggaaaccactgcaagcaaaacaaaccggcagaagagcctagattcagatttatcagatggaccagtcactgtacaggaatttatggaggtcaaaaacgctctagtggcttctgaggccaagatacagcagctaatgaaggtgaataacaacttgagtgacgagctgagaattatgcagaaaaagcttcaaacactccagagtgaaaattcgaacctcaggaaacaggccacaaccaatgtatatcaggtgcaaactggttctgagtacacagacacttccaaccactcttccttaaagagacgtccgtctgcccggggcagtaggcccatgtccatgtacgagaccggatcaggtcagaaaccatatctcccaatgggagaagcgagccgccccgaagagagcaggatgagactccagcccttccccgcgcacatcgggaggagtgcacttgtgacctcctcttcatctctgccttccttcccctccacactttcctggtcgagggacgaaagcgcccgaagggcatccaggctggagaagcagaacagcacacctgagagtgactacgacaacactcccaacgacatggagccagatggcatggggtcaagccgaaagggacggcaaagaagtatggtgtggccaggggatggcttggtaccagacacagcagaaccccatgtggccccaagccccactctccctagcaccgaagatgtcatcaggaagactgaacagatcaccaaaaacatacaggagctcttaagagcagcccaagaaaataaacatgacagttatattccctgctcagagaggatacacgtagctgttacagaaatggcagcattattccccaaaaaacccaagtctgatatggtgaggacttcccttcgtttactgacgtccagtgcctaccgactgcagtcagagtgcaagaagaccctcccaggggaccccggctcacccacagacgttcagctggtcacgcagcaggtcatccagtgtgcgtacgacatcgccaaggctgccaagcagctggttaccatcaccaccaaagagaacaacaactgacaagggcagggcaccgcctcctctgttttctaggctttataaagtccaatttcaaattcagacgcagaactcttcagatttctacaaaaagaaacatttaatgacggtttaaaactttttaaaagaaaactcagtattatttttgcatgttttctaaccaattttcaactatttaacccacttgccttattttgtgcctatttgctggtttagtttctgatgttcggttgtgttgtcaacaactgttgagttgatcacatacatccaaaagtatagtttcattgtctaaagtttgtgaaaacttttccatcccttaaaactccctgcctatggctgaaactataaatgaaatttttcataaaacattttcttgagagagttcagttaaaaaagaaaaaatcagcgtcatttgttccctgccaagcatcgtgcaataagtgaatttcctggcctacttcataatctctaagtttggggtatctccaagcatgtatgtagagaaaggactttgccgctttttaaaactagtgtcacagtctctcttgggaggaaacaatgaattggttcatttcttctcagtgttttaccctgttacatgttctgttatttaatgttgttatctcaagctcctatctcttgatgttttcttgtcatcttgaaggctccatggaatgagataaagcattgacccaccacaggacatctcatgaagccatgttcagggtaggagctccacgcacatcaccacccattgtcaggtgctctccctcacccctgtaagccagacagtttgttcaaaacctgcagcaaagagaagcatcagtctaacaagccagaactcattttgtgccacccatttaggtatcactaccatgaactatagggaaaagaaatcacctactccctgacactgtgttgtacccttcatccaaaagtcagcttgcttctctgaccacttacagctttctcacatgagttgcttcacatttttcatcatctttaaggacttcttataaggaaagatgtatcgtatcgcagtcatctgagttagtttctcctccatcacctcatgagtacttaaaaattagacatcaactttcaagagttccttagagagtgtgctctagctggctgcctgctaccccaaagctctgaaagagtaaggttgaagtgctggaacatgctcagattgttttttagttactcaaaagccccttcttgttctgaatgtgaaagctcttcccgttcctgcttactgcagccattctgtgtgtgtggttcagaccctggcctagggccggtgatgtggatgagtgaagggagccaggtacacggcagcagggcagaggagactatggggagcccaccgcctacacagtaggggcagtagcccccagctccacgcctgttgccatgtggaaaagtgggcctagggtggccacagctttgatttttcaagagacaagaaacctagatgttttttggtgccatctctccatttataaatgttggcaaccaatttgaacactttcagagaccatgtgcaggtgagctgtgtcctctaggctgccagctcacagcccccaccccagggccctgtaagctgtgcagtgtgagggcctggcttccccggacacacctggagcagcctctgagtcttacccgtaatggagccggccaaccctgtgtgttatgttgctgtcgctcctgtttttaaccatatgttctgtcccatagcagtcattcacacatgtgaagaagacacaagaatcaaagtacaagttgcctcaatacatgctaataactaagcttctattttcacaggactgatcgatgcacacctttatagcttgaccatatgctgtcatgaaagtagcaccccgacggtgcttgctttactaagtcaccgtgtgtggatgcttttgtcgcattttgcttcactgtgagtagcatgggaaaagggtccacgtctccaaaagactcttccacttgtttgtcccacagccctaagtgccacattgctgttggatgctcccgggatgccttctagaagggggcctcccaccttaagttcaggcgccatctgatagccttttctgcaggcttcatgtccttagctgaccctcctttatcttgcaaacccctgcccctgctgtcccagggaggacgggcttctgtagaggcttctgggaaatgagctgtctgcaggaggtgaagcagtgttttccttggaatgtttgaggacctgcaatagaagatgttgcctttatggccctagagaaagtcaaggaacatggggaccaacaaagcatttccagttgtaagaatatgtcagaagagtgctcggttagcccacggtgccaaaactccaaacaagttccccggtggaatgacgtggccattggagggctgcaggtcgtcctctctgtatgtgccccgcgcatttccttggcctcatctgagatctggtgtcagagttctctgctcctgttggcaaatcgcaccttatctgaacatttgttccagccaccttttgcacatggattccgtaccttgcactagcaatgtctaccttcagtaacgtcgttctttttcaccctgtattctcaatgatcccttcctccccatatgccacccttcccccaaagctgatagggcagaggtgcactttatgaaactggcacttgactgaacagaaggaaacagctgtacctctaagctcctttcacagaaatcgtcatctgccttggaatgcaaatagttcttatttgccaaagaacagtgaattgggcccaaagatcaaacacagcatttcatgtaatcagaattctaaacgcacaactcgggagctgtgcacggcttctcaagtgattcagttgcagaaccaagagcaaaactcgcctgtttttgtcctcaatggcacccatgagctttccaatagtatagttttctttctttccttgtcctggttgaaggtaacgtgttcctagaaaagaaaatgctgcataggaaaactgagatgccttttattccaacgtgtttgatccctgtcactcattattctgtactttttattgtacattctattcctgtaattattgtgccctttaagtgttgtaaaatcgttttggaatttgtgcctgctagttatgcaataaacaggctctacaagtgtttttgtggtaa

SEQ ID NO: 136098 - DNA, 5444 bp, Homo sapiens
  Payload ID: 6640
  Gene Symbol: GIT2
  Gene Name: G protein-coupled receptor kinase interacting ArfGAP 2
  Uniprot ID: Q14161
  ENST ID: ENST00000361006
  CDS Start-End: 81-2270
gttagagcggaagcgccgccgccaccgccgcctttgctgtcccccggcctctagttccccgcaggtgggaggtgggagccatgtcgaaacggctccggagcagcgaggtgtgcgctgactgcagcgggccggatccttcctgggcatcagtaaataggggaacgtttttatgtgatgagtgctgcagtgtccatcggagtctagggcgccatatctcccaagtgaggcatctgaaacacacaccgtggcctccaacactgcttcagatggttgagaccttgtataataacggtgctaactctatatgggagcattctttgctggaccctgcgtctattatgagtggaagacgtaaagctaatccacaggataaagtacatcccaataaagcggaattcatcagagccaagtatcagatgttagcgttcgtccatcgcttgccctgccgggatgacgatagtgtgactgccaaagatcttagcaagcaactccattcgagcgtgagaacagggaatcttgaaacctgtttgagactgttatctttaggagcacaagccaacttctttcatcctgaaaaaggaaacaccccactccatgttgcctccaaagcagggcagattttacaggctgaattattggcagtatatggagcagacccaggcacacaggattctagtgggaaaactcccgttgattatgcaaggcaaggagggcaccatgagctggcagagcgcctcgtggaaatacagtatgagctaacggacagactagccttctatctctgtggcaggaaaccagatcacaaaaatggacagcactttataatacctcaaatggcagacagcagcctggatttgtctgaattggcaaaagctgctaagaagaaacttcaatctctaagtaatcatttgtttgaagaacttgccatggatgtgtacgatgaagttgacaggcgagagacggatgcagtctggcttgccacgcaaaaccacagcgccctggtaaccgagacaacggtcgtcccctttcttccggtcaatcctgagtactcatcaacacgaaatcagggcagacagaagttagctcggttcaacgcccatgagtttgccacgctggtcattgacattctcagtgacgccaagaggagacagcagggcagttctctctcgggttcaaaagacaatgtggagctcatactgaaaaccatcaataaccagcacagcgttgagagtcaagacaacgatcagcccgactatgacagcgtggcatcagacgaagacacagatttggaaaccactgcaagcaaaacaaaccggcagaagagcctagattcagatttatcagatggaccagtcactgtacaggaatttatggaggtcaaaaacgctctagtggcttctgaggccaagatacagcagctaatgaaggtgaataacaacttgagtgacgagctgagaattatgcagaaaaagcttcaaacactccagagtgaaaattcgaacctcaggaaacaggccacaaccaatgtatatcaggtgcaaactggttctgagtacacagacacttccaaccactcttccttaaagagacgtccgtctgcccggggcagtaggcccatgtccatgtacgagaccggatcaggtcagaaaccatatctcccaatgggagaagcgagccgccccgaagagagcaggatgagactccagcccttccccgcgcacgcatccaggctggagaagcagaacagcacacctgagagtgactacgacaacactcccaacgacatggagccagatggcatggggtcaagccgaaagggacggcaaagaagtatggtgtggccaggggatggcttggtaccagacacagcagaaccccatgtggccccaagccccactctccctagcaccgaagatgtcatcaggaagactgaacagatcaccaaaaacatacaggagctcttaagagcagcccaagaaaataaacatgacagttatattccctgctcagagaggatacacgtagctgttacagaaatggcagcattattccccaaaaaacccaagtctgatatggtgaggacttcccttcgtttactgacgtccagtgcctaccgactgcagtcagagtgcaagaagaccctcccaggggaccccggctcacccacagacgttcagctggtcacgcagcaggtcatccagtgtgcgtacgacatcgccaaggctgccaagcagctggttaccatcaccaccaaagagaacaacaactgacaagggcagggcaccgcctcctctgttttctaggctttataaagtccaatttcaaattcagacgcagaactcttcagatttctacaaaaagaaacatttaatgacggtttaaaactttttaaaagaaaactcagtattatttttgcatgttttctaaccaattttcaactatttaacccacttgccttattttgtgcctatttgctggtttagtttctgatgttcggttgtgttgtcaacaactgttgagttgatcacatacatccaaaagtatagtttcattgtctaaagtttgtgaaaacttttccatcccttaaaactccctgcctatggctgaaactataaatgaaatttttcataaaacattttcttgagagagttcagttaaaaaagaaaaaatcagcgtcatttgttccctgccaagcatcgtgcaataagtgaatttcctggcctacttcataatctctaagtttggggtatctccaagcatgtatgtagagaaaggactttgccgctttttaaaactagtgtcacagtctctcttgggaggaaacaatgaattggttcatttcttctcagtgttttaccctgttacatgttctgttatttaatgttgttatctcaagctcctatctcttgatgttttcttgtcatcttgaaggctccatggaatgagataaagcattgacccaccacaggacatctcatgaagccatgttcagggtaggagctccacgcacatcaccacccattgtcaggtgctctccctcacccctgtaagccagacagtttgttcaaaacctgcagcaaagagaagcatcagtctaacaagccagaactcattttgtgccacccatttaggtatcactaccatgaactatagggaaaagaaatcacctactccctgacactgtgttgtacccttcatccaaaagtcagcttgcttctctgaccacttacagctttctcacatgagttgcttcacatttttcatcatctttaaggacttcttataaggaaagatgtatcgtatcgcagtcatctgagttagtttctcctccatcacctcatgagtacttaaaaattagacatcaactttcaagagttccttagagagtgtgctctagctggctgcctgctaccccaaagctctgaaagagtaaggttgaagtgctggaacatgctcagattgttttttagttactcaaaagccccttcttgttctgaatgtgaaagctcttcccgttcctgcttactgcagccattctgtgtgtgtggttcagaccctggcctagggccggtgatgtggatgagtgaagggagccaggtacacggcagcagggcagaggagactatggggagcccaccgcctacacagtaggggcagtagcccccagctccacgcctgttgccatgtggaaaagtgggcctagggtggccacagctttgatttttcaagagacaagaaacctagatgttttttggtgccatctctccatttataaatgttggcaaccaatttgaacactttcagagaccatgtgcaggtgagctgtgtcctctaggctgccagctcacagcccccaccccagggccctgtaagctgtgcagtgtgagggcctggcttccccggacacacctggagcagcctctgagtcttacccgtaatggagccggccaaccctgtgtgttatgttgctgtcgctcctgtttttaaccatatgttctgtcccatagcagtcattcacacatgtgaagaagacacaagaatcaaagtacaagttgcctcaatacatgctaataactaagcttctattttcacaggactgatcgatgcacacctttatagcttgaccatatgctgtcatgaaagtagcaccccgacggtgcttgctttactaagtcaccgtgtgtggatgcttttgtcgcattttgcttcactgtgagtagcatgggaaaagggtccacgtctccaaaagactcttccacttgtttgtcccacagccctaagtgccacattgctgttggatgctcccgggatgccttctagaagggggcctcccaccttaagttcaggcgccatctgatagccttttctgcaggcttcatgtccttagctgaccctcctttatcttgcaaacccctgcccctgctgtcccagggaggacgggcttctgtagaggcttctgggaaatgagctgtctgcaggaggtgaagcagtgttttccttggaatgtttgaggacctgcaatagaagatgttgcctttatggccctagagaaagtcaaggaacatggggaccaacaaagcatttccagttgtaagaatatgtcagaagagtgctcggttagcccacggtgccaaaactccaaacaagttccccggtggaatgacgtggccattggagggctgcaggtcgtcctctctgtatgtgccccgcgcatttccttggcctcatctgagatctggtgtcagagttctctgctcctgttggcaaatcgcaccttatctgaacatttgttccagccaccttttgcacatggattccgtaccttgcactagcaatgtctaccttcagtaacgtcgttctttttcaccctgtattctcaatgatcccttcctccccatatgccacccttcccccaaagctgatagggcagaggtgcactttatgaaactggcacttgactgaacagaaggaaacagctgtacctctaagctcctttcacagaaatcgtcatctgccttggaatgcaaatagttcttatttgccaaagaacagtgaattgggcccaaagatcaaacacagcatttcatgtaatcagaattctaaacgcacaactcgggagctgtgcacggcttctcaagtgattcagttgcagaaccaagagcaaaactcgcctgtttttgtcctcaatggcacccatgagctttccaatagtatagttttctttctttccttgtcctggttgaaggtaacgtgttcctagaaaagaaaatgctgcataggaaaactgagatgccttttattccaacgtgtttgatccctgtcactcattattctgtactttttattgtacattctattcctgtaattattgtgccctttaagtgttgtaaaatcgttttggaatttgtgcctgctagttatgcaataaacaggctctacaagtg

SEQ ID NO: 136099 - DNA, 5291 bp, Homo sapiens
  Payload ID: 6640
  Gene Symbol: GIT2
  Gene Name: G protein-coupled receptor kinase interacting ArfGAP 2
  Uniprot ID: Q14161
  ENST ID: ENST00000457474
  CDS Start-End: 72-2117
gaagcgccgccgccaccgccgcctttgctgtcccccggcctctagttccccgcaggtgggaggtgggagccatgtcgaaacggctccggagcagcgaggtgtgcgctgactgcagcgggccggatccttcctgggcatcagtaaataggggaacgtttttatgtgatgagtgctgcagtgtccatcggagtctagggcgccatatctcccaagtgaggcatctgaaacacacaccgtggcctccaacactgcttcagatggttgagaccttgtataataacggtgctaactctatatgggagcattctttgctggaccctgcgtctattatgagtggaagacgtaaagctaatccacaggataaagtacatcccaataaagcggaattcatcagagccaagtatcagatgttagcgttcgtccatcgcttgccctgccgggatgacgatagtgtgactgccaaagatcttagcaagcaactccattcgagcgtgagaacagggaatcttgaaacctgtttgagactgttatctttaggagcacaagccaacttctttcatcctgaaaaaggaaacaccccactccatgttgcctccaaagcagggcagattttacaggctgaattattggcagtatatggagcagacccaggcacacaggattctagtgggaaaactcccgttgattatgcaaggcaaggagggcaccatgagctggcagagcgcctcgtggaaatacagtatgagctaacggacagactagccttctatctctgtggcaggaaaccagatcacaaaaatggacagcactttataatacctcaaatggcagacagacggctcagcctggatttgtctgaattggcaaaagctgctaagaagaaacttcaatctctaagtaatcatttgtttgaagaacttgccatggatgtgtacgatgaagttgacaggcgagagacggatgcagtctggcttgccacgcaaaaccacagcgccctggtaaccgagacaacggtcgtcccctttcttccggtcaatcctgagtactcatcaacacgaaatcagggcagacagaagttagctcggttcaacgcccatgagtttgccacgctggtcattgacattctcagtgacgccaagaggagacagcagggcagttctctctcgggttcaaaagacaatgtggagctcatactgaaaaccatcaataaccagcacagcgttgagagtcaagacaacgatcagcccgactatgacagcgtggcatcagacgaagacacagatttggaaaccactgcaagcaaaacaaaccggcagaagcttcaaacactccagagtgaaaattcgaacctcaggaaacaggccacaaccaatgtatatcaggtgcaaactggttctgagtacacagacacttccaaccactcttccttaaagagacgtccgtctgcccggggcagtaggcccatgtccatgtacgagaccggatcaggtcagaaaccatatctcccaatgggagaagcgagccgccccgaagagagcaggatgagactccagcccttccccgcgcacgcatccaggctggagaagcagaacagcacacctgagagtgactacgacaacactcccaacgacatggagccagatggcatggggtcaagccgaaagggacggcaaagaagtatggtgtggccaggggatggcttggtaccagacacagcagaaccccatgtggccccaagccccactctccctagcaccgaagatgtcatcaggaagactgaacagatcaccaaaaacatacaggagctcttaagagcagcccaagaaaataaacatgacagttatattccctgctcagagaggatacacgtagctgttacagaaatggcagcattattccccaaaaaacccaagtctgatatggtgaggacttcccttcgtttactgacgtccagtgcctaccgactgcagtcagagtgcaagaagaccctcccaggggaccccggctcacccacagacgttcagctggtcacgcagcaggtcatccagtgtgcgtacgacatcgccaaggctgccaagcagctggttaccatcaccaccaaagagaacaacaactgacaagggcagggcaccgcctcctctgttttctaggctttataaagtccaatttcaaattcagacgcagaactcttcagatttctacaaaaagaaacatttaatgacggtttaaaactttttaaaagaaaactcagtattatttttgcatgttttctaaccaattttcaactatttaacccacttgccttattttgtgcctatttgctggtttagtttctgatgttcggttgtgttgtcaacaactgttgagttgatcacatacatccaaaagtatagtttcattgtctaaagtttgtgaaaacttttccatcccttaaaactccctgcctatggctgaaactataaatgaaatttttcataaaacattttcttgagagagttcagttaaaaaagaaaaaatcagcgtcatttgttccctgccaagcatcgtgcaataagtgaatttcctggcctacttcataatctctaagtttggggtatctccaagcatgtatgtagagaaaggactttgccgctttttaaaactagtgtcacagtctctcttgggaggaaacaatgaattggttcatttcttctcagtgttttaccctgttacatgttctgttatttaatgttgttatctcaagctcctatctcttgatgttttcttgtcatcttgaaggctccatggaatgagataaagcattgacccaccacaggacatctcatgaagccatgttcagggtaggagctccacgcacatcaccacccattgtcaggtgctctccctcacccctgtaagccagacagtttgttcaaaacctgcagcaaagagaagcatcagtctaacaagccagaactcattttgtgccacccatttaggtatcactaccatgaactatagggaaaagaaatcacctactccctgacactgtgttgtacccttcatccaaaagtcagcttgcttctctgaccacttacagctttctcacatgagttgcttcacatttttcatcatctttaaggacttcttataaggaaagatgtatcgtatcgcagtcatctgagttagtttctcctccatcacctcatgagtacttaaaaattagacatcaactttcaagagttccttagagagtgtgctctagctggctgcctgctaccccaaagctctgaaagagtaaggttgaagtgctggaacatgctcagattgttttttagttactcaaaagccccttcttgttctgaatgtgaaagctcttcccgttcctgcttactgcagccattctgtgtgtgtggttcagaccctggcctagggccggtgatgtggatgagtgaagggagccaggtacacggcagcagggcagaggagactatggggagcccaccgcctacacagtaggggcagtagcccccagctccacgcctgttgccatgtggaaaagtgggcctagggtggccacagctttgatttttcaagagacaagaaacctagatgttttttggtgccatctctccatttataaatgttggcaaccaatttgaacactttcagagaccatgtgcaggtgagctgtgtcctctaggctgccagctcacagcccccaccccagggccctgtaagctgtgcagtgtgagggcctggcttccccggacacacctggagcagcctctgagtcttacccgtaatggagccggccaaccctgtgtgttatgttgctgtcgctcctgtttttaaccatatgttctgtcccatagcagtcattcacacatgtgaagaagacacaagaatcaaagtacaagttgcctcaatacatgctaataactaagcttctattttcacaggactgatcgatgcacacctttatagcttgaccatatgctgtcatgaaagtagcaccccgacggtgcttgctttactaagtcaccgtgtgtggatgcttttgtcgcattttgcttcactgtgagtagcatgggaaaagggtccacgtctccaaaagactcttccacttgtttgtcccacagccctaagtgccacattgctgttggatgctcccgggatgccttctagaagggggcctcccaccttaagttcaggcgccatctgatagccttttctgcaggcttcatgtccttagctgaccctcctttatcttgcaaacccctgcccctgctgtcccagggaggacgggcttctgtagaggcttctgggaaatgagctgtctgcaggaggtgaagcagtgttttccttggaatgtttgaggacctgcaatagaagatgttgcctttatggccctagagaaagtcaaggaacatggggaccaacaaagcatttccagttgtaagaatatgtcagaagagtgctcggttagcccacggtgccaaaactccaaacaagttccccggtggaatgacgtggccattggagggctgcaggtcgtcctctctgtatgtgccccgcgcatttccttggcctcatctgagatctggtgtcagagttctctgctcctgttggcaaatcgcaccttatctgaacatttgttccagccaccttttgcacatggattccgtaccttgcactagcaatgtctaccttcagtaacgtcgttctttttcaccctgtattctcaatgatcccttcctccccatatgccacccttcccccaaagctgatagggcagaggtgcactttatgaaactggcacttgactgaacagaaggaaacagctgtacctctaagctcctttcacagaaatcgtcatctgccttggaatgcaaatagttcttatttgccaaagaacagtgaattgggcccaaagatcaaacacagcatttcatgtaatcagaattctaaacgcacaactcgggagctgtgcacggcttctcaagtgattcagttgcagaaccaagagcaaaactcgcctgtttttgtcctcaatggcacccatgagctttccaatagtatagttttctttctttccttgtcctggttgaaggtaacgtgttcctagaaaagaaaatgctgcataggaaaactgagatgccttttattccaacgtgtttgatccctgtcactcattattctgtactttttattgtacattctattcctgtaattattgtgccctttaagtgttgtaaaatcgttttggaatttgtgcctgctagttatgcaataaacaggctctacaagtg

SEQ ID NO: 136100 - DNA, 2424 bp, Homo sapiens
  Payload ID: 6640
  Gene Symbol: GIT2
  Gene Name: G protein-coupled receptor kinase interacting ArfGAP 2
  Uniprot ID: Q14161
  ENST ID: ENST00000553118
  CDS Start-End: 166-2061
acctccccgcgcgtgcgtgctgtgccaaggctgcaaggcgctgaggggagaggcgccgccgtcagcgccgccgcagctgggacccgttagagcggaagcgccgccgccaccgccgcctttgctgtcccccggcctctagttccccgcaggtgggaggtgggagccatgtcgaaacggctccggagcagcgaggtgtgcgctgactgcagcgggccggatccttcctgggcatcagtaaataggggaacgtttttatgtgatgagtgctgcagtgtccatcggagtctagggcgccatatctcccaagtgaggcatctgaaacacacaccgtggcctccaacactgcttcagatggttgagaccttgtataataacggtgctaactctatatgggagcattctttgctggaccctgcgtctattatgagtggaagacgtaaagctaatccacaggataaagtacatcccaataaagcggaattcatcagagccaagtatcagatgttagcgttcgtccatcgcttgccctgccgggatgacgatagtgtgactgccaaagatcttagcaagcaactccattcgagcgtgagaacagggaatcttgaaacctgtttgagactgttatctttaggagcacaagccaacttctttcatcctgaaaaaggaaacaccccactccatgttgcctccaaagcagggcagattttacaggctgaattattggcagtatatggagcagacccaggcacacaggattctagtgggaaaactcccgttgattatgcaaggcaaggagggcaccatgagctggcagagcgcctcgtggaaatacagtatgagctaacggacagactagccttctatctctgtggcaggaaaccagatcacaaaaatggacagcactttataatacctcaaatggcagacagcagcctggatttgtctgaattggcaaaagctgctaagaagaaacttcaatctctaagtaatcatttgtttgaagaacttgccatggatgtgtacgatgaagttgacaggcgagagacggatgcagtctggcttgccacgcaaaaccacagcgccctggtaaccgagacaacggtcgtcccctttcttccggtcaatcctgagtactcatcaacacgaaatcagggcagacagaagttagctcggttcaacgcccatgagtttgccacgctggtcattgacattctcagtgacgccaagaggagacagcagggcagttctctctcgggttcaaaagacaatgtggagctcatactgaaaaccatcaataaccagcacagcgttgagagtcaagacaacgatcagcccgactatgacagcgtggcatcagacgaagacacagatttggaaaccactgcaagcaaaacaaaccggcagaagagcctagattcagatttatcagatggaccagtcactgtacaggaatttatggaggtcaaaaacgctctagtggcttctgaggccaagatacagcagctaatgaaggcatccaggctggagaagcagaacagcacacctgagagtgactacgacaacactcccaacgacatggagccagatggcatggggtcaagccgaaagggacggcaaagaagtatggtgtggccaggggatggcttggtaccagacacagcagaaccccatgtggccccaagccccactctccctagcaccgaagatgtcatcaggaagactgaacagatcaccaaaaacatacaggagctcttaagagcagcccaagaaaataaacatgacagttatattccctgctcagagaggatacacgtagctgttacagaaatggcagcattattccccaaaaaacccaagtctgatatggtgaggacttcccttcgtttactgacgtccagtgcctaccgactgcagtcagagtgcaagaagaccctcccaggggaccccggctcacccacagacgttcagctggtcacgcagcaggtcatccagtgtgcgtacgacatcgccaaggctgccaagcagctggttaccatcaccaccaaagagaacaacaactgacaagggcagggcaccgcctcctctgttttctaggctttataaagtccaatttcaaattcagacgcagaactcttcagatttctacaaaaagaaacatttaatgacggtttaaaactttttaaaagaaaactcagtattatttttgcatgttttctaaccaattttcaactatttaacccacttgccttattttgtgcctatttgctggtttagtttctgatgttcggttgtgttgtcaacaactgttgagttgatcacatacatccaaaagtatagtttcattgtctaaagtttgtgaaaacttttccatcccttaaaactccctgcctatggctgaaactataaatgaaatttttcataaaa

SEQ ID NO: 136101 - DNA, 2127 bp, Homo sapiens
  Payload ID: 6640
  Gene Symbol: GIT2
  Gene Name: G protein-coupled receptor kinase interacting ArfGAP 2
  ENST ID: ENST00000551209
  CDS Start-End: 1-2127
atgtcgaaacggctccggagcagcgaggtgtgcgctgactgcagcgggccggatccttcctgggcatcagtaaataggggaacgtttttatgtgatgagtgctgcagtgtccatcggagtctagggcgccatatctcccaagtgaggcatctgaaacacacaccgtggcctccaacactgcttcagatggttgagaccttgtataataacggtgctaactctatatgggagcattctttgctggaccctgcgtctattatgagtggaagacgtaaagctaatccacaggataaagtacatcccaataaagcggaattcatcagagccaagtatcagatgttagcgttcgtccatcgcttgccctgccgggatgacgatagtgtgactgccaaagatcttagcaagcaactccattcgagcgtgagaacagggaatcttgaaacctgtttgagactgttatctttaggagcacaagccaacttctttcatcctgaaaaaggaaacaccccactccatgttgcctccaaagcagggcagattttacaggctgaattattggcagtatatggagcagacccaggcacacaggattctagtgggaaaactcccgttgattatgcaaggcaaggagggcaccatgagctggcagagcgcctcgtggaaatacagtatgagctaacggacagactagccttctatctctgtggcaggaaaccagatcacaaaaatggacagcactttataatacctcaaatggcagacagcctggatttgtctgaattggcaaaagctgctaagaagaaacttcaatctctaagtaatcatttgtttgaagaacttgccatggatgtgtacgatgaagttgacaggcgagagacggatgcagtctggcttgccacgcaaaaccacagcgccctggtaaccgagacaacggtcgtcccctttcttccggtcaatcctgagtactcatcaacacgaaatcagggcagacagaagttagctcggttcaacgcccatgagtttgccacgctggtcattgacattctcagtgacgccaagaggagacagcagggcagttctctctcgggttcaaaagacaatgtggagctcatactgaaaaccatcaataaccagcacagcgttgagagtcaagacaacgatcagcccgactatgacagcgtggcatcagacgaagacacagatttggaaaccactgcaagcaaaacaaaccggcagaagcttcaaacactccagagtgaaaattcgaacctcaggaaacaggccacaaccaatgtatatcaggtgcaaactggttctgagtacacagacacttccaaccactcttccttaaagagacgtccgtctgcccggggcagtaggcccatgtccatgtacgagaccggatcaggtcagaaaccatatctcccaatgggagaagcgagccgccccgaagagagcaggatgagactccagcccttccccgcgcacatcgggaggagtgcacttgtgacctcctcttcatctctgccttccttcccctccacactttcctggtcgagggacgaaagcgcccgaagggcatccaggctggagaagcagaacagcacacctgagagtgactacgacaacactcccaacgacatggagccagatggcatggggtcaagccgaaagggacggcaaagaagtatggtgtggccaggggatggcttggtaccagacacagcagaaccccatgtggccccaagccccactctccctagcaccgaagatgtcatcaggaagactgaacagatcaccaaaaacatacaggagctcttaagagcagcccaagaaaataaacatgacagttatattccctgctcagagaggatacacgtagctgttacagaaatggcagcattattccccaaaaaacccaagtctgatatggtgaggacttcccttcgtttactgacgtccagtgcctaccgactgcagtcagagtgcaagaagaccctcccaggggaccccggctcacccacagacgttcagctggtcacgcagcaggtcatccagtgtgcgtacgacatcgccaaggctgccaagcagctggttaccatcaccaccaaagagaacaacaactga

SEQ ID NO: 136102 - DNA, 2989 bp, Homo sapiens
  Payload ID: 6640
  Gene Symbol: GIT2
  Gene Name: G protein-coupled receptor kinase interacting ArfGAP 2
  Uniprot ID: Q14161
  ENST ID: ENST00000547815
  CDS Start-End: 73-1488
ggaagcgccgccgccaccgccgcctttgctgtcccccggcctctagttccccgcaggtgggaggtgggagccatgtcgaaacggctccggagcagcgaggtgtgcgctgactgcagcgggccggatccttcctgggcatcagtaaataggggaacgtttttatgtgatgagtgctgcagtgtccatcggagtctagggcgccatatctcccaagtgaggcatctgaaacacacaccgtggcctccaacactgcttcagatggttgagaccttgtataataacggtgctaactctatatgggagcattctttgctggaccctgcgtctattatgagtggaagacgtaaagctaatccacaggataaagtacatcccaataaagcggaattcatcagagccaagtatcagatgttagcgttcgtccatcgcttgccctgccgggatgacgatagtgtgactgccaaagatcttagcaagcaactccattcgagcgtgagaacagggaatcttgaaacctgtttgagactgttatctttaggagcacaagccaacttctttcatcctgaaaaaggaaacaccccactccatgttgcctccaaagcagggcagattttacaggctgaattattggcagtatatggagcagacccaggcacacaggattctagtgggaaaactcccgttgattatgcaaggcaaggagggcaccatgagctggcagagcgcctcgtggaaatacagtatgagctaacggacagactagccttctatctctgtggcaggaaaccagatcacaaaaatggacagcactttataatacctcaaatggcagacagcagcctggatttgtctgaattggcaaaagctgctaagaagaaacttcaatctctaagtaatcatttgtttgaagaacttgccatggatgtgtacgatgaagttgacaggcgagagacggatgcagtctggcttgccacgcaaaaccacagcgccctggtaaccgagacaacggtcgtcccctttcttccggtcaatcctgagtactcatcaacacgaaatcagggcagacagaagttagctcggttcaacgcccatgagtttgccacgctggtcattgacattctcagtgacgccaagaggagacagcagggcagttctctctcgggttcaaaagacaatgtggagctcatactgaaaaccatcaataaccagcacagcgttgagagtcaagacaacgatcagcccgactatgacagcgtggcatcagacgaagacacagatttggaaaccactgcaagcaaaacaaaccggcagaagagcctagattcagatttatcagatggaccagtcactgtacaggaatttatggaggtcaaaaacgctctagtggcttctgaggccaagatacagcagctaatgaaggtgaataacaacttgagtgacgagctgagaattatgcagaaaaagttgcttggaaaagatgctaattaatgaagaggagcaactactattggtgtatttttcacagattggtgctttctaaataaaaattgaaagtaactcctaacattgaatgggtttgctactgaaaaagtaatgatcttctggtgcaaacagttgcttgtggacttaaaccttggcactggtggggaatttggtcagattttacaatctctgtcaaagagtagacagctgaactcacaccacacccagcttatagaatgtccatggaagatgaaggcgcaccagaagggaaggaccctgcgcagaatggacgtggtgaatggtgtttaaaatgccagatgccaaagagtaacacgattccctgctgaccccttaactctaatccatccagcaccatggagcagcctgcatgtgaggaatggaaggagcattcagggcctccaagtgacagtctctaaaatggggtggtgccaggcagattagcatgttcaaagctgacaccactgaggtcgtgttttttgggtgacaaagccaaaggagagaaaggccaaatattccagccctggccgaaagatgatcactcaccagacggaagcaagcgtgctgcgtggagcatccatgcgaagatgtcaattccatagatcaataggtttccagttttcttcgtgatatgttaatatagcaaacttaccatgatccggttttctcttttttctttttttttttacaaagtgctgaattgtttggaatatcaagagtattatgtaataaaaacttgttgatcataatttttcttgttggctttttggaaagcaataggcgatctgatttttcacaagctgaacttctgtctttcttgctttgcaaagcaaccctagtcatctttgtgctgcttccatggtgtctgctgtcatttttggcctttacaaattgctcagggctcatttgaaaagcaagttacctaaatgatgttttaatgatctcgaactcttgcttgaaacagccttagtaataatccagtgtacagcttgcctgcaaacatttcccagccccaccatgacaaattttaaagtggttagacattttgttttgaggaagtccaaaccacaacttttccacattcagaaatgaagctatttaatttgcttacgtgatgaagggagttgattgtgtttcacccaatccagaagaaagggtccttgtttgtattggctttttactttcagcccggctagctgttactgtccttattgtttaaaactggtagttgtattcatttacttggtgtttgctttttctgcttgctgtaaaaaaacacagtcccactgccaaacatttctttcagcttcaaacactccagagtgaaaattcgaacctcaggaaacaggccacaaccaatgtatatcaggtgcaaactggttctgagtacacagacacttccaaccactcttccttaaagagacgtccgtctgcccggggcagtaggcccatgtccatgtacgagaccggatcaggtcagaaaccatat

SEQ ID NO: 136103 - DNA, 1977 bp, Homo sapiens
  Payload ID: 6640
  Gene Symbol: GIT2
  Gene Name: G protein-coupled receptor kinase interacting ArfGAP 2
  ENST ID: ENST00000550186
  CDS Start-End: 53-1977
atgtcgaaacggctccggagcagcgaggtgtgcgctgactgcagcgggccggatggttgagaccttgtataataacggtgctaactctatatgggagcattctttgctggaccctgcgtctattatgagtggaagacgtaaagctaatccacaggataaagtacatcccaataaagcggaattcatcagagccaagtatcagatgttagcgttcgtccatcgcttgccctgccgggatgacgatagtgtgactgccaaagatcttagcaagcaactccattcgagcgtgagaacagggaatcttgaaacctgtttgagactgttatctttaggagcacaagccaacttctttcatcctgaaaaaggaaacaccccactccatgttgcctccaaagcagggcagattttacaggctgaattattggcagtatatggagcagacccaggcacacaggattctagtgggaaaactcccgttgattatgcaaggcaaggagggcaccatgagctggcagagcgcctcgtggaaatacagtatgagctaacggacagactagccttctatctctgtggcaggaaaccagatcacaaaaatggacagcactttataatacctcaaatggcagacagcagcctggatttgtctgaattggcaaaagctgctaagaagaaacttcaatctctaagtaatcatttgtttgaagaacttgccatggatgtgtacgatgaagttgacaggcgagagacggatgcagtctggcttgccacgcaaaaccacagcgccctggtaaccgagacaacggtcgtcccctttcttccggtcaatcctgagtactcatcaacacgaaatcagggcagacagaagttagctcggttcaacgcccatgagtttgccacgctggtcattgacattctcagtgacgccaagaggagacagcagggcagttctctctcgggttcaaaagacaatgtggagctcatactgaaaaccatcaataaccagcacagcgttgagagtcaagacaacgatcagcccgactatgacagcgtggcatcagacgaagacacagatttggaaaccactgcaagcaaaacaaaccggcagaagagcctagattcagatttatcagatggaccagtcactgtacaggaatttatggaggtcaaaaacgctctagtggcttctgaggccaagatacagcagctaatgaaggtgaataacaacttgagtgacgagctgagaattatgcagaaaaagcttcaaacactccagagtgaaaattcgaacctcaggaaacaggccacaaccaatgtatatcaggtgcaaactggttctgagtacacagacacttccaaccactcttccttaaagagacgtccgtctgcccggggcagtaggcccatgtccatgtacgagaccggatcaggtcagaaaccatatctcccaatgggagaagcgagccgccccgaagagagcaggatgagactccagcccttccccgcgcacgcatccaggctggagaagcagaacagcacacctgagagtgactacgacaacactcccaacgacatggagccagatggcatggggtcaagccgaaagggacggcaaagaagtatggtgtggccaggggatggcttggtaccagacacagcagaaccccatgtggccccaagccccactctccctagcaccgaagatgtcatcaggaagactgaacagatcaccaaaaacatacaggagctcttaagagcagcccaagaaaataaacatgacagttatattccctgctcagagaggatacacgtagctgttacagaaatggcagcattattccccaaaaaacccaagtctgatatggtgaggacttcccttcgtttactgacgtccagtgcctaccgactgcagtcagagtgcaagaagaccctcccaggggaccccggctcacccacagacgttcagctggtcacgcagca

SEQ ID NO: 136104 - DNA, 7362 bp, Homo sapiens
  Payload ID: 6641
  Gene Symbol: GPRC5A
  Gene Name: G protein-coupled receptor, class C, group 5, member A
  Uniprot ID: Q8NFJ5
  ENST ID: ENST00000014914
  CDS Start-End: 891-1964
aatttcatctggcgcccccgttcaatcagcctgcattgtcgaggctttaggagaggcagttaggaaaggagagatactgatctctcagccccagggcagcactaatggtgcctgtctagactctgacaggtggagctgctgagctaactacggacctggtgggggaagttttccttggctttcacgtggctttggctggggagccctgagaaggtggctgcctcctttttctgaagcctggcttcccatacggcagtggctgggggagagtgatggagagaaaggctaagctaaggtcaaagaaagtggaggaaggctggcttgtcccgctggacttgacggcggagctgctgcaatctcgcgggctgggcccttgccccgggtggacccgagtgcctgcggggaggcgggtgtggctcccccgggaggtgacagctggcggggcccgtaaggagctggtctgctccggctcccctctcgtagccggcgccctgggaccagcgcgtgagcacgtctcggaggagtccgatgcgctgggcagggccgggtggtcacccccgcccagcttccaggggtgactgtgcctctgacgtcagacggtttttgggtcattccctggcacggggactttattttcataacagcatgaagtgccgtggaactggaataggcgtgtcctctccctcgaccctccccctccttgtccctctgctcacccctcgctcgttccctccctccggcgagggccgcctttataacaactgctcagagtgcgagggcgggatagctgtccaaggtctcccccagcactgaggagctcgcctgctgccctcttgcgcgcgggaagcagcaccaagttcacggccaacgccttggcactagggtccagaatggctacaacagtccctgatggttgccgcaatggcctgaaatccaagtactacagactttgtgataaggctgaagcttggggcatcgtcctagaaacggtggccacagccggggttgtgacctcggtggccttcatgctcactctcccgatcctcgtctgcaaggtgcaggactccaacaggcgaaaaatgctgcctactcagtttctcttcctcctgggtgtgttgggcatctttggcctcaccttcgccttcatcatcggactggacgggagcacagggcccacacgcttcttcctctttgggatcctcttttccatctgcttctcctgcctgctggctcatgctgtcagtctgaccaagctcgtccgggggaggaagcccctttccctgttggtgattctgggtctggccgtgggcttcagcctagtccaggatgttatcgctattgaatatattgtcctgaccatgaataggaccaacgtcaatgtcttttctgagctttccgctcctcgtcgcaatgaagactttgtcctcctgctcacctacgtcctcttcttgatggcgctgaccttcctcatgtcctccttcaccttctgtggttccttcacgggctggaagagacatggggcccacatctacctcacgatgctcctctccattgccatctgggtggcctggatcaccctgctcatgcttcctgactttgaccgcaggtgggatgacaccatcctcagctccgccttggctgccaatggctgggtgttcctgttggcttatgttagtcccgagttttggctgctcacaaagcaacgaaaccccatggattatcctgttgaggatgctttctgtaaacctcaactcgtgaagaagagctatggtgtggagaacagagcctactctcaagaggaaatcactcaaggttttgaagagacaggggacacgctctatgccccctattccacacattttcagctgcagaaccagcctccccaaaaggaattctccatcccacgggcccacgcttggccgagcccttacaaagactatgaagtaaagaaagagggcagctaactctgtcctgaagagtgggacaaatgcagccgggcggcagatctagcgggagctcaaagggatgtgggcgaaatcttgagtcttctgagaaaactgtacaagacactacgggaacagtttgcctccctcccagcctcaaccacaattcttccatgctggggctgatgtgggctagtaagactccagttcttagaggcgctgtagtatttttttttttttgtctcatcctttggatacttcttttaagtgggagtctcaggcaactcaagtttagacccttactctttttgtttgttttttgaaacaggatcttgctctgtcacccaggcttgagtgcagtggtgcgatcacagcccagtgcagcctcgaccacctgtgctcaagcaatcctcccatctccatctcccaaagtgctgggatgacaggcgtgagccacagctcccagcctaggcccttaatcttgctgttattttccatggactaaaggtctggtcatctgagctcacgctggctcacacagctctaggggcctgctcctctaactcacagtgggttttgtgaggctctgtggcccagagcagacctgcatatctgagcaaaaatagcaaaagcctctctcagcccactggcctgaatctacactggaagccaacttgctggcacccccgctccccaacccttcttgcctgggtaggagaggctaaagatcaccctaaatttactcatctctctagtgctgcctcacattgggcctcagcagctccccagcaccaattcacaggtcacccctctcttcttgcactgtccccaaacttgctgtcaattccgagatctaatctccccctacgctctgccaggaattctttcagacctcactagcacaagcccggttgctccttgtcaggagaatttgtagatcattctcacttcaaattcctggggctgatacttctctcatcttgcaccccaacctctgtaaatagatttaccgcatttacggctgcattctgtaagtgggcatggtctcctaatggaggagtgttcattgtataataagttattcacctgagtatgcaataaagatgtggtggccactctttcatggtggtggcagcagttaccagtaatgagcattagactctgggggatagaacacgggctgccctgagagcttcatgttggagctgaagttcaaggttcacttcctttgggtttgtacttgacccttcttcatgtgtctctcccgttccctctaaaacaagtgtgtttcccctcatttttgaggctgtcaatggtgtgagagccaggatcatcacggggcctgaggttttactccagaaaagcagaggagtggcaaccttggcttggggtttggcagcccaggaaaggcagggaggagagctcaaagccggtttcatgtttcacccaaggtctaattgtgggagaggacaaatccagatcccctgtttgacagaattagttcacaaatgtctcttggcaaaaacatgtgacacctaaccatgataattgacttaatccaagaaagagctctgtagggcagagcaataggaaatctctctttcgttatggaaaaaaaataatccctctacatagaaactgagtgacatgtaaaaatgtgtagctaagtcagggagttacttcctaagagcctgacgctctgcttttcatcaaaaggaaaaaccagcgtgaggcagaggcgagggaggtggaggtgagtggatgatgtgctgagttagggatgtttatatgccgcaaaggtttggttggtaggcttcgcgctaagattagcctggctttgtactgaaaagggggaaggacacatagtgacacagatccttctggtctttcccaggaggtgtgacctaatgaggtttgttgtgagaataaagcaatgtggtttcacatatattatctatcataggctagggactcaagaaatgcatattccccccccactttctttctctctttccttccttccttcctttcttctttctttctttctttctttctttctttctttctttctttctttctctctctctctctctctctctttctttctttctttttgagatagagtctcactctgtcatccaggctggagtgcagtggcatgatctcagctcactgcagcctccgcatcctgggttcaagcgattttcgtgcctcggccttctgagtagctgggattacaggcgtgcgtgcgccaccacgcctggctaatttttgtatttttagtacagacgaggtttcaccatgttgaccaggctggtcttgaactcctgatcttaagtgatctgcccgccttggcctcccaaagtgctgggattacgggtgggaatcaccatgcccagcctcctttccatcttttctttccttctctggtcttcatactaccaaccaagcaagggaggaggagtaaaaggtaaaatcacaaaatactctggatcggcatttttttttttttttttttttgagacagggtctagctctatggcccaggctggagtgcagtggcacaatcatagctcactgcagcctcaactttctgtgctcgagtgattctcctgcctcagtctcctgagtagctgggaccacagacgtgcactaccacacttggctaattttattttttcagagatcacatgtggtttgagggaggatagagaggacagggtgtcaagaacagcatttttaccaagttgatataaaaatgaaacaggatccaggcatgggtctttacactgatagttacagtaagttttaaaatctgagcagcaatttgaatcacttgttgaaaaacacacaaaatatattttttgtagaggtgggggtcttgctctgttgcccaggctggtcttgaactcgagattctcctgctttggcctcccacaagtgctgggattacaggcgtgagctactgcacccggcctgctttctttttagtgaaaaggatctgtgggagcttttattcccatggctgccttcctcaagtcaacctctttccccggaaatggcatcatctctggactgttgtttctccttcttccttctcctccttctcctcctcctcctcctccaccatgcccggctgatttttgtatttttagtagagacagggtttcactatatgggccaggcagatctcgaactccaaacctcgtgatccacctaccttggcctctgaaagtgctgggataccgtggcctctgaaagtgctgggattacaggcatgagccaccgcgcccggccccgttgtttcccttctaagaaacgcagtggtctctgaagcctgcaggggcaggccagccctgcactgaacgcctgttcttgccaggtggcagaaggttgctgctcatttgagcagtacctgtcacccctcctcccactgctgcggctgttaactcatcttcaggtctcacaccttctgcacataaataagctatttttaaaagttattatttttttactctttcttttctttggagagggtaccaaaggatagctgttctgtttaagtagggacctctcatggcctacaggctttgacatctgagaatcaaactggagaacattccgaagccgttcttataagtgtctccatctctacctgggctgaaatggaatgtgcaaatgtagcccagcctggtccttgggtgttgccagttgattgatgactgggagccaaagtggcatctcctttgacctaaacgggcgatgatgaaataaaactcaacagcctttctctcatcttgcattgtgagatgcgaaatagagcgtgtctctctgcctctcattttaggctgaggccgtccaaagcggccatgccccatgtttccactagatggcgctgacacttcaggcatcaaccctcatggcctctcagccttgcaaaggcagccacttaaagtcggtgtcctgtgtggggcaccaagctgagctgcagacacccagtaggcgcgaggcaaatgcgtcccattttaagaggcttgtatttatgagctctttgcttcctccctcccactaactttaaagaattgctctccatctcctttggcaaagttcctttgccctttgtcttatttttgtgaaaccctccaaggtatttccagtccatttgcatccaatctggcatctttacggagagcggtctcatatgctattgttgttaacgtggactagtatttatgtgttgagaacactggctgtttgtcaggaaaagtgtgccaaaacaaagagtacggccggccctggaaatgcatcagcaaaacccatttcccccgtgcactcattctgagcttccttccttcatttctgtcattactgctgagaactggactgtgcccagctgacctttcccttccttgccctcatcttgctgccagggtctgcaggtttgccaccgtcccggccccagtctgaaacatgggattatttcagaattggaggtggcagcttcagaaaaaaatccttctcgtgtgttgactgctgagatccaggaactgggaaatcaacccccagtttgtagattgctctctttggaaattctgtggcccaacctcgtggctgttttctggaattccttctatcggggcagacagtgctgtgcctttcttgacttcaggatgttccaaggatgctgctggatctgtgtgtgtgtgtgtgtgtgtgtgtgtgtgtgtgtgtgtgcgtgcgtgcgtgtatgtgcgcctgaccctgatttctgcaacctccagatttctttcttgacccttcaaagtggaacagtccagtgccaaaaattttagagtttgagaaggtcacagaaatcctctagttggtgcctccacagtcttcattttacagaggaactcagggctaatggagttaatgcaactagatcagggttttgggtctgtgttctttctaccgtcagcacctgtgtggtcaattctggacacttcccagagaagtctttgagtagagaatcctactcaaatttcactgtatattttaagcattcctctcctttccctttgcctcccctgttgccttttcttcccctgatttctcctctggtcatctcctctcccttctgcgtgtaagccatgggaaagggatgagggaggacagcttctggttaaacacaggtccctcttccacatcaaatgaacattggcttcctgggacagaaggccttcaaaggagggattgcaaagcaaggcaaagcgttctgtcttcattttccccatccccatgagacaagactgatggaaagggtggtggggcaacactgcttaatggatgccttttcacatcatttcagtttttagccctcatgactgtattttctaatcagagacaataacattttaaataaaacaacgacaaagaa

SEQ ID NO: 136105 - DNA, 529 bp, Homo sapiens
  Payload ID: 6641
  Gene Symbol: GPRC5A
  Gene Name: G protein-coupled receptor, class C, group 5, member A
  ENST ID: ENST00000540125
  CDS Start-End: 1-201
cccatggattatcctgttgaggatgctttctgtaaacctcaactcgtgaagaagagctatggtgtggagaacagagcctactctcaagaggaaatcactcaaggttttgaagagacaggggacacgctctatgccccctattccacacattttcagctgcaggtaagtgatttttttctccctcttcatcaaaggcattagcacctcaggaacactgatcctttggaaacagacgatgttacctttctcatggcccctagatggccacttgaaggaatgatgggtcttctttcctctaagcggcctcacggggttagtgggtaagaatgagtgcttggcatagagaggacttgggggtgggaggcctgggagaaagggaaggaaatgagacttctgcccagactggagacctgttgaaatggcaggaactggagtgggtttcacgatatgactgtttccttttcagaaccagcctccccaaaaggaattctccatcccacgggcccacgcttggccgagcccttacaaa

SEQ ID NO: 136106 - DNA, 897 bp, Homo sapiens
  Payload ID: 6641
  Gene Symbol: GPRC5A
  Gene Name: G protein-coupled receptor, class C, group 5, member A
  ENST ID: ENST00000534831
  CDS Start-End: 77-897
gaggtgagcagctctgggatcactctgcaggaaaagaatagagggagaaagatctcagaggacccgaaggtccagaatggctacaacagtccctgatggttgccgcaatggcctgaaatccaagtactacagactttgtgataaggctgaagcttggggcatcgtcctagaaacggtggccacagccggggttgtgacctcggtggccttcatgctcactctcccgatcctcgtctgcaaggtgcaggactccaacaggcgaaaaatgctgcctactcagtttctcttcctcctgggtgtgttgggcatctttggcctcaccttcgccttcatcatcggactggacgggagcacagggcccacacgcttcttcctctttgggatcctcttttccatctgcttctcctgcctgctggctcatgctgtcagtctgaccaagctcgtccgggggaggaagcccctttccctgttggtgattctgggtctggccgtgggcttcagcctagtccaggatgttatcgctattgaatatattgtcctgaccatgaataggaccaacgtcaatgtcttttctgagctttccgctcctcgtcgcaatgaagactttgtcctcctgctcacctacgtcctcttcttgatggcgctgaccttcctcatgtcctccttcaccttctgtggttccttcacgggctggaagagacatggggcccacatctacctcacgatgctcctctccattgccatctgggtggcctggatcaccctgctcatgcttcctgactttgaccgcaggtgggatgacaccatcctcagctccgccttggctgccaatggctgggtgttcctgttggcttatgttagtcccgagttttggctgctcacaaagcaacgaaaccc

SEQ ID NO: 136107 - DNA, 5213 bp, Homo sapiens
  Payload ID: 6642
  Gene Symbol: GPRC5B
  Gene Name: G protein-coupled receptor, class C, group 5, member B
  Uniprot ID: Q9NZH0
  ENST ID: ENST00000300571
  CDS Start-End: 193-1404
gggccgcggccgctgcagcagcgcgggccgggccagggggcgcctcgcgcggcagcgactctggcaggcgctgcagtgaagctggacccgcaggcgggcgtgcgtggagcgggggccgcggccgcgccgcagagatgtgactcgggccgaaggccagctggagcgtcggcgctgcggggccgcgggggtcgaatgttcgtggcatcagagagaaagatgagagctcaccaggtgctcaccttcctcctgctcttcgtgatcacctcggtggcctctgaaaacgccagcacatcccgaggctgtgggctggacctcctccctcagtacgtgtccctgtgcgacctggacgccatctggggcattgtggtggaggcggtggccggggcgggcgccctgatcacactgctcctgatgctcatcctcctggtgcggctgcccttcatcaaggagaaggagaagaagagccctgtgggcctccactttctgttcctcctggggaccctgggcctctttgggctgacgtttgccttcatcatccaggaggacgagaccatctgctctgtccgccgcttcctctggggcgtcctctttgcgctctgcttctcctgcctgctgagccaggcatggcgcgtgcggaggctggtgcggcatggcacgggccccgcgggctggcagctggtgggcctggcgctgtgcctgatgctggtgcaagtcatcatcgctgtggagtggctggtgctcaccgtgctgcgtgacacaaggccagcctgcgcctacgagcccatggactttgtgatggccctcatctacgacatggtactgcttgtggtcaccctggggctggccctcttcactctgtgcggcaagttcaagaggtggaagctgaacggggccttcctcctcatcacagccttcctctctgtgctcatctgggtggcctggatgaccatgtacctcttcggcaatgtcaagctgcagcagggggatgcctggaacgaccccaccttggccatcacgctggcggccagcggctgggtcttcgtcatcttccacgccatccctgagatccactgcacccttctgccagccctgcaggagaacacgcccaactacttcgacacgtcgcagcccaggatgcgggagacggccttcgaggaggacgtgcagctgccgcgggcctatatggagaacaaggccttctccatggatgaacacaatgcagctctccgaacagcaggatttcccaacggcagcttgggaaaaagacccagtggcagcttggggaaaagacccagcgctccgtttagaagcaacgtgtatcagccaactgagatggccgtcgtgctcaacggtgggaccatcccaactgctccgccaagtcacacaggaagacacctttggtgaaagactttaagttccagagaatcagaatttctcttaccgatttgcctccctggctgtgtctttcttgagggagaaatcggtaacagttgccgaaccaggccgcctcacagccaggaaatttggaaatcctagccaaggggatttcgtgtaaatgtgaacactgacgaactgaaaagctaacaccgactgcccgcccctcccctgccacacacacagacacgtaataccagaccaacctcaatccccgcaaactaaagcaaagctaattgcaaatagtattaggctcactggaaaatgtggctgggaagactgtttcatcctctgggggtagaacagaaccaaattcacagctggtgggccagactggtgttggttggaggtggggggctcccactcttatcacctctccccagcaagtgctggaccccaggtagcctcttggagatgaccgttgcgttgaggacaaatggggactttgccaccggcttgcctggtggtttgcacatttcaggggggtcaggagagttaaggaggttgtgggtgggattccaaggtgaggcccaactgaatcgtggggtgagctttatagccagtagaggtggagggaccctggcatgtgccaaagaagaggccctctgggtgatgaagtgaccatcacatttggaaagtgatcaaccactgttccttctatggggctcttgctctagtgtctatggtgagaacacaggccccgccccttcccttgtagagccatagaaatattctggcttggggcagcagtcccttcttcccttgatcatctcgccctgttcctacacttacgggtgtatctccaaatcctctcccaattttattcccttattcatttcaagagctccaatggggtctccagctgaaagcccctccgggaggcaggttggaaggcaggcaccacggcaggttttccgcgatgatgtcacctagcagggcttcaggggttcccactaggatgcagagatgacctctcgctgcctcacaagcagtgacacctcgggtcctttccgttgctatggtgaaaattcctggatggaatggatcacatgagggtttcttgttgcttttggagggtgtgggggatattttgttttggtttttctgcaggttccatgaaaacagcccttttccaagcccattgtttctgtcatggtttccatctgtcctgagcaagtcattcctttgttatttagcatttcgaacatctcggccattcaaagcccccatgttctctgcactgtttggccagcataacctctagcatcgattcaaagcagagttttaacctgacggcatggaatgtataaatgagggtgggtccttctgcagatactctaatcactacattgctttttctataaaactacccataagcctttaacctttaaagaaaaatgaaaaaggttagtgtttgggggccgggggaggactgaccgcttcataagccagtacgtctgagctgagtatgtttcaataaaccttttgatatttctcaaggccctagtctctgctgtctcccctccccaccccatccttgcaaagcactggggaaagtaaggccaatctggccctccctgtgtgacccgccttcgagttttccttaacagttagtacatttccttgtgttaccacgcatggggaagaaaacgcatggccccagaatgccacccccacctgacctccccggaagcaccccgcctctgcccagagcatgtgcttgcttctagagaatcccgttccagtcattgcgtggacagaaaacgtaagagtcctggggaggggtgggagggaatgaagctaggacctggggtgggggtgggggcggttgcatgcggacccggtattctgaaaagaaagaaatcttcaaacacctcggtcctgtccggtgaaaaaacgacagcattacacattctcgtgccaggaaatggttactcacccccgctctctggagtcctttggagctttctgataccattcacacgatggagcaattcacacgttcgttttctaagttctttattgtccaagcatataaggtgagcacagcacaaatggctgccatggaaagtcgtgcttccccagcataagaacagagccatctttgagccatgggaagcctcatttaatgagacctttttccccccttttaaatctgatatgttatcgcacttagggttttgttttattttggcttttaaggttgagagtgggctgaacgccttcataatgggggcggaggcgggagtgagaggagaagggagagagctgttctttttctaatgactacacctgaaaagtatcaagagacatctttgccaagagactgtagcagccagctgccccccgtggagcaaggtttaaagacaaaattaaatggcacctctgtttaagatctgcgtgtgtaaacaagactcgtttggggaaaacgacccgggaggagagcatctgtgatcaaaatctctcattgtaagcacaaattgttccgtgtctggttattaaaatcgctttgggtctataacagccactcttgtccccccttttaatagaaaattgtcattctagcctggatttctccccactggaggtggagggtgggaagagaagggagtcagctctgacagcttacaaactgggaagttctgtgcatctccagggattccagagttgaagatctggttgttggaagctgggcgcccagtgcttttttttttttttttttttagcccagatgccgtcaggacccactgaacaagggtgaactcgggtggtggtctcggttggccaaggctgagttgaacgcctcaggccaaaccccaagttgaaagggagcattgtggcttttataatccaatgatgcaatgatgataccagcttacaggagttctcagcaggtgctttttattaactgatgaagagctaaggctcacttttgatagataatatatatttattaaatgcattaatgtgtgttttataatgtacctttatcttcccccggctgactgttgcatacttataaaaaagaagttaaagaaatttcaagacaatcaatatgtaccataaacgactatataaatattacaaatttaaaaggctgtaaaccatgggcagataggttttattttcaaaatgctgttcttaacacaaaaataaaggctttactatttacttaagacgtgtggtagcttgtcaaaacaacccagtgcaactaactactaggctttcggatctgccttgagggtcggtctgtggcattttaaatgggagaatcttggttaacagcaaaccacagaacatattaaggtaataagtttacccataaaagcaggaactttctatataatactttgggacttagacaacaaaaatcctttgttacatctgtctgggtttaagtgtctcatcttgttgggtttgcagtaaaagttaaggagtggtctcctttggaaatgatcattaagtataaggtcttttttataaagagagtagtcagtcactaggtaaacttaaaaccaaattcagaggttggggacttaaattagaatatggatctttgcaaaggcggccacaagtgggaaaactggtaataagagcacttctgtattccttgggactagagttcattgtacattttaacagcagctggtgtagaagaatactcctgaggcactgaagaagtaatctggatgaatgaataaaatgtggggataatgcagaaagtgaagactggtcctttcttttctaaactatttgcattaaagcttgtttgcaatgaa

SEQ ID NO: 136108 - DNA, 1215 bp, Homo sapiens
  Payload ID: 6642
  Gene Symbol: GPRC5B
  Gene Name: G protein-coupled receptor, class C, group 5, member B
  Uniprot ID: Q9NZH0
  ENST ID: ENST00000535671
  CDS Start-End: 1-1215
atgttcgtggcatcagagagaaagatgagagctcaccaggtgctcaccttcctcctgctcttcgtgatcacctcggtggcctctgaaaacgccagcacatcccgaggctgtgggctggacctcctccctcagtacgtgtccctgtgcgacctggacgccatctggggcattgtggtggaggcggtggccggggcgggcgccctgatcacactgctcctgatgctcatcctcctggtgcggctgcccttcatcaaggagaaggagaagaagagccctgtgggcctccactttctgttcctcctggggaccctgggcctctttgggctgacgtttgccttcatcatccaggaggacgagaccatctgctctgtccgccgcttcctctggggcgtcctctttgcgctctgcttctcctgcctgctgagccaggcatggcgcgtgcggaggctggtgcggcatggcacgggccccgcgggctggcagctggtgggcctggcgctgtgcctgatgctggtgcaagtcatcatcgctgtggagtggctggtgctcaccgtgctgcgtgacacaaggccagcctgcgcctacgagcccatggactttgtgatggccctcatctacgacatggtactgcttgtggtcaccctggggctggccctcttcactctgtgcggcaagttcaagaggtggaagctgaacggggccttcctcctcatcacagccttcctctctgtgctcatctgggtggcctggatgaccatgtacctcttcggcaatgtcaagctgcagcagggggatgcctggaacgaccccaccttggccatcacgctggcggccagcggctgggtcttcgtcatcttccacgccatccctgagatccactgcacccttctgccagccctgcaggagaacacgcccaactacttcgacacgtcgcagcccaggatgcgggagacggccttcgaggaggacgtgcagctgccgcgggcctatatggagaacaaggccttctccatggatgaacacaatgcagctctccgaacagcaggatttcccaacggcagcttgggaaaaagacccagtggcagcttggggaaaagacccagcgctccgtttagaagcaacgtgtatcagccaactgagatggccgtcgtgctcaacggtgggaccgaaatggttactcacccccgctctctggagtcctttggagctttctga

SEQ ID NO: 136109 - DNA, 763 bp, Homo sapiens
  Payload ID: 6642
  Gene Symbol: GPRC5B
  Gene Name: G protein-coupled receptor, class C, group 5, member B
  ENST ID: ENST00000566822
  CDS Start-End: 231-763
actgtggatcgggcagccaaggatgcaatttgcatttcaatgattgcttttatttacaggactggagctgctttgcatattcatggatcacagagcttgtgttcttgcaaccctgtttactaacctatgaggattttttaatttgagagccctcaaatgggccagtggtctagtcagcattgggaaatgaagatgatgagatcctgtaactcggaaaagatatcagaggaatgttcgtggcatcagagagaaagatgagagctcaccaggtgctcaccttcctcctgctcttcgtgatcacctcggtggcctctgaaaacgccagcacatcccgaggctgtgggctggacctcctccctcagtacgtgtccctgtgcgacctggacgccatctggggcattgtggtggaggcggtggccggggcgggcgccctgatcacactgctcctgatgctcatcctcctggtgcggctgcccttcatcaaggagaaggagaagaagagccctgtgggcctccactttctgttcctcctggggaccctgggcctctttgggctgacgtttgccttcatcatccaggaggacgagaccatctgctctgtccgccgcttcctctggggcgtcctctttgcgctctgcttctcctgcctgctgagccaggcatggcgcgtgcggaggctggtgcggcatggcacgggccccgcgggctggcagctggtgggcctggcgctgtgcctgatgctggtgcaagtcatcatcgctgt

SEQ ID NO: 136110 - DNA, 2984 bp, Homo sapiens
  Payload ID: 6642
  Gene Symbol: GPRC5B
  Gene Name: G protein-coupled receptor, class C, group 5, member B
  Uniprot ID: Q9NZH0
  ENST ID: ENST00000569479
  CDS Start-End: 244-1455
atctggaagggccacggtccccaaagatcaggggctgccactattcccagaaggaggtgttctgcatctccccttcctgcagcccccgggagaggggagcaggggtccgtcctatcccttttggtcttatgtggctgggatggttgcggcgacgggggtagagattggggggcgcaccgcggagggagaaaggaaatctcaccctgagaatctggagtgcagggaagggatgctgctcaaagaatgttcgtggcatcagagagaaagatgagagctcaccaggtgctcaccttcctcctgctcttcgtgatcacctcggtggcctctgaaaacgccagcacatcccgaggctgtgggctggacctcctccctcagtacgtgtccctgtgcgacctggacgccatctggggcattgtggtggaggcggtggccggggcgggcgccctgatcacactgctcctgatgctcatcctcctggtgcggctgcccttcatcaaggagaaggagaagaagagccctgtgggcctccactttctgttcctcctggggaccctgggcctctttgggctgacgtttgccttcatcatccaggaggacgagaccatctgctctgtccgccgcttcctctggggcgtcctctttgcgctctgcttctcctgcctgctgagccaggcatggcgcgtgcggaggctggtgcggcatggcacgggccccgcgggctggcagctggtgggcctggcgctgtgcctgatgctggtgcaagtcatcatcgctgtggagtggctggtgctcaccgtgctgcgtgacacaaggccagcctgcgcctacgagcccatggactttgtgatggccctcatctacgacatggtactgcttgtggtcaccctggggctggccctcttcactctgtgcggcaagttcaagaggtggaagctgaacggggccttcctcctcatcacagccttcctctctgtgctcatctgggtggcctggatgaccatgtacctcttcggcaatgtcaagctgcagcagggggatgcctggaacgaccccaccttggccatcacgctggcggccagcggctgggtcttcgtcatcttccacgccatccctgagatccactgcacccttctgccagccctgcaggagaacacgcccaactacttcgacacgtcgcagcccaggatgcgggagacggccttcgaggaggacgtgcagctgccgcgggcctatatggagaacaaggccttctccatggatgaacacaatgcagctctccgaacagcaggatttcccaacggcagcttgggaaaaagacccagtggcagcttggggaaaagacccagcgctccgtttagaagcaacgtgtatcagccaactgagatggccgtcgtgctcaacggtgggaccatcccaactgctccgccaagtcacacaggaagacacctttggtgaaagactttaagttccagagaatcagaatttctcttaccgatttgcctccctggctgtgtctttcttgagggagaaatcggtaacagttgccgaaccaggccgcctcacagccaggaaatttggaaatcctagccaaggggatttcgtgtaaatgtgaacactgacgaactgaaaagctaacaccgactgcccgcccctcccctgccacacacacagacacgtaataccagaccaacctcaatccccgcaaactaaagcaaagctaattgcaaatagtattaggctcactggaaaatgtggctgggaagactgtttcatcctctgggggtagaacagaaccaaattcacagctggtgggccagactggtgttggttggaggtggggggctcccactcttatcacctctccccagcaagtgctggaccccaggtagcctcttggagatgaccgttgcgttgaggacaaatggggactttgccaccggcttgcctggtggtttgcacatttcaggggggtcaggagagttaaggaggttgtgggtgggattccaaggtgaggcccaactgaatcgtggggtgagctttatagccagtagaggtggagggaccctggcatgtgccaaagaagaggccctctgggtgatgaagtgaccatcacatttggaaagtgatcaaccactgttccttctatggggctcttgctctagtgtctatggtgagaacacaggccccgccccttcccttgtagagccatagaaatattctggcttggggcagcagtcccttcttcccttgatcatctcgccctgttcctacacttacgggtgtatctccaaatcctctcccaattttattcccttattcatttcaagagctccaatggggtctccagctgaaagcccctccgggaggcaggttggaaggcaggcaccacggcaggttttccgcgatgatgtcacctagcagggcttcaggggttcccactaggatgcagagatgacctctcgctgcctcacaagcagtgacacctcgggtcctttccgttgctatggtgaaaattcctggatggaatggatcacatgagggtttcttgttgcttttggagggtgtgggggatattttgttttggtttttctgcaggttccatgaaaacagcccttttccaagcccattgtttctgtcatggtttccatctgtcctgagcaagtcattcctttgttatttagcatttcgaacatctcggccattcaaagcccccatgttctctgcactgtttggccagcataacctctagcatcgattcaaagcagagttttaacctgacggcatggaatgtataaatgagggtgggtccttctgcagatactctaatcactacattgctttttctataaaactacccataagcctttaacctttaaagaaaaatgaaaaaggttagtgtttgggggccgggggaggactgaccgcttcataagccagtacgtctgagctgagtatgtttcaataaaccttttgatatttctcaa

SEQ ID NO: 136111 - DNA, 818 bp, Homo sapiens
  Payload ID: 6642
  Gene Symbol: GPRC5B
  Gene Name: G protein-coupled receptor, class C, group 5, member B
  ENST ID: ENST00000562469
  CDS Start-End: 374-818
tgcagcagcgcgggccgggccagggggcgcctcgcgcggcagcgactctggcaggcgctgcagtgaagctggacccgcaggcgggcgtgcgtggagcgggggccgcggccgcgccgcagagatgtgactcgggccgaaggccagctggagcgtcggcgctgcggggccgcgggggtcggactggagctgctttgcatattcatggatcacagagcttgtgttcttgcaaccctgtttactaacctatgaggattttttaatttgagagccctcaaatgggccagtggtctagtcagcattgggaaatgaagatgatgagatcctgtaactcggaaaagatatcagaggtgcctaccgccatctttagagaagaatgttcgtggcatcagagagaaagatgagagctcaccaggtgctcaccttcctcctgctcttcgtgatcacctcggtggcctctgaaaacgccagcacatcccgaggctgtgggctggacctcctccctcagtacgtgtccctgtgcgacctggacgccatctggggcattgtggtggaggcggtggccggggcgggcgccctgatcacactgctcctgatgctcatcctcctggtgcggctgcccttcatcaaggagaaggagaagaagagccctgtgggcctccactttctgttcctcctggggaccctgggcctctttgggctgacgtttgccttcatcatccaggaggacgagaccatctgctctgtccgccgcttcctctggggcgtcctctttgcgctctgcttctcctgcctgctgagccaggcatggcgcgtgcgga

SEQ ID NO: 136112 - DNA, 568 bp, Homo sapiens
  Payload ID: 6642
  Gene Symbol: GPRC5B
  Gene Name: G protein-coupled receptor, class C, group 5, member B
  ENST ID: ENST00000570142
  CDS Start-End: 310-568
agcgactctggcaggcgctgcagtgaagctggacccgcaggcgggcgtgcgtggagcgggggccgcggccgcgccgcagagatgtgactcgggccgaaggccagctggagcgtcggcgctgcggggccgcgggggtcggactggagctgctttgcatattcatggatcacagagcttgtgttcttgcaaccctgtttactaacctatgaggattttttaatttgagagccctcaaatgggccagtggtctagtcagcattgggaaatgaagatgatgagatcctgtaactcggaaaagatatcagaggaatgttcgtggcatcagagagaaagatgagagctcaccaggtgctcaccttcctcctgctcttcgtgatcacctcggtggcctctgaaaacgccagcacatcccgaggctgtgggctggacctcctccctcagtacgtgtccctgtgcgacctggacgccatctggggcattgtggtggaggcggtggccggggcgggcgccctgatcacactgctcctgatgctcatcctcctggtgcggctgcccttcatcaaggaga

SEQ ID NO: 136113 - DNA, 571 bp, Homo sapiens
  Payload ID: 6642
  Gene Symbol: GPRC5B
  Gene Name: G protein-coupled receptor, class C, group 5, member B
  ENST ID: ENST00000564449
  CDS Start-End: 495-571
gtgtttcgaggggccaaggaagcgggtgttggtcccagtgtgcgtaaacggacaacgacatctgggagttgggcagtgaggagagagaagagtgtgtccaggaggaacctgcctggaggaggcctagcggtgtgtgtgcgcctaggtgtataccggggcgttggtgacttcgagaggcaccgggcgggatcgatcctctctgcgtcctggacctggtgctggtgtgtttcggggaagttactgcttatgaaccccccttggagcgtggcctgggggcaggaaggcttccgcgctgggacccctgggtcgcgatacctccctcggactggagctgctttgcatattcatggatcacagagcttgtgttcttgcaaccctgtttactaacctatgaggattttttaatttgagagccctcaaatgggccagtggtctagtcagcattgggaaatgaagatgatgagatcctgtaactcggaaaagatatcagaggaatgttcgtggcatcagagagaaagatgagagctcaccaggtgctcaccttcctcctgctcttcgtgatcacctcggt

SEQ ID NO: 136114 - DNA, 568 bp, Homo sapiens
  Payload ID: 6642
  Gene Symbol: GPRC5B
  Gene Name: G protein-coupled receptor, class C, group 5, member B
  ENST ID: ENST00000568214
  CDS Start-End: 299-568
cacggtccccaaagatcaggggctgccactattcccagaaggaggtgttctgcatctccccttcctgcagcccccgggagaggggagcaggggtccgtcctatcccttttggtcttatgtggctgggatggttgcggcgacgggggtagagattggggggcgcaccgcggagggagaaaggaaatctcaccctgagaatctggagtgcagggaagggatgctgctcaaagtatttactaaacatcgtgccaggtgctgtgtgtcgagcttgagtctacagccatggttctcatccagaatgttcgtggcatcagagagaaagatgagagctcaccaggtgctcaccttcctcctgctcttcgtgatcacctcggtggcctctgaaaacgccagcacatcccgaggctgtgggctggacctcctccctcagtacgtgtccctgtgcgacctggacgccatctggggcattgtggtggaggcggtggccggggcgggcgccctgatcacactgctcctgatgctcatcctcctggtgcggctgcccttcatcaaggagaaggagaagaag

SEQ ID NO: 136115 - DNA, 1830 bp, Homo sapiens
  Payload ID: 6642
  Gene Symbol: GPRC5B
  Gene Name: G protein-coupled receptor, class C, group 5, member B
  Uniprot ID: Q9NZH0
  ENST ID: ENST00000569847
  CDS Start-End: 527-1738
aagcaggtcccacggccgcccagcggacacgcgtccgggctgtgccctgaccgtctgcggagcgcacggccagtggcccgggccgctgagtgtgtgagccctgaagggcagtggacatgtgcgtacgtgggtgatgtgtgcggtaggggtggtggcgatcctgcgtagggacccacgtgaggggtgcaccgactggacgtgtgtgtttcgaggggccaaggaagcgggtgttggtcccagtgtgcgtaaacggacaacgacatctgggagttgggcagtgaggagagagaagagtgtgtccaggaggaacctgcctggaggaggcctagcggtgtgtgtgcgcctaggtgtataccggggcgttggtgacttcgagaggcaccgggcgggatcgatcctctctgcgtcctggacctggtgctggtgtgtttcggggaagttactgcttatgaaccccccttggagcgtggcctgggggcaggaaggcttccgcgctgggacccctgggtcgcgatacctccctcgaatgttcgtggcatcagagagaaagatgagagctcaccaggtgctcaccttcctcctgctcttcgtgatcacctcggtggcctctgaaaacgccagcacatcccgaggctgtgggctggacctcctccctcagtacgtgtccctgtgcgacctggacgccatctggggcattgtggtggaggcggtggccggggcgggcgccctgatcacactgctcctgatgctcatcctcctggtgcggctgcccttcatcaaggagaaggagaagaagagccctgtgggcctccactttctgttcctcctggggaccctgggcctctttgggctgacgtttgccttcatcatccaggaggacgagaccatctgctctgtccgccgcttcctctggggcgtcctctttgcgctctgcttctcctgcctgctgagccaggcatggcgcgtgcggaggctggtgcggcatggcacgggccccgcgggctggcagctggtgggcctggcgctgtgcctgatgctggtgcaagtcatcatcgctgtggagtggctggtgctcaccgtgctgcgtgacacaaggccagcctgcgcctacgagcccatggactttgtgatggccctcatctacgacatggtactgcttgtggtcaccctggggctggccctcttcactctgtgcggcaagttcaagaggtggaagctgaacggggccttcctcctcatcacagccttcctctctgtgctcatctgggtggcctggatgaccatgtacctcttcggcaatgtcaagctgcagcagggggatgcctggaacgaccccaccttggccatcacgctggcggccagcggctgggtcttcgtcatcttccacgccatccctgagatccactgcacccttctgccagccctgcaggagaacacgcccaactacttcgacacgtcgcagcccaggatgcgggagacggccttcgaggaggacgtgcagctgccgcgggcctatatggagaacaaggccttctccatggatgaacacaatgcagctctccgaacagcaggatttcccaacggcagcttgggaaaaagacccagtggcagcttggggaaaagacccagcgctccgtttagaagcaacgtgtatcagccaactgagatggccgtcgtgctcaacggtgggaccatcccaactgctccgccaagtcacacaggaagacacctttggtgaaagactttaagttccagagaatcagaatttctcttaccgatttgcctccctggctgtgtctttcttgagggagaaatcggtaacagttgccg

SEQ ID NO: 136116 - DNA, 1273 bp, Homo sapiens
  Payload ID: 6643
  Gene Symbol: GPRC5C
  Gene Name: G protein-coupled receptor, class C, group 5, member C
  ENST ID: ENST00000342648
  CDS Start-End: 492-872
agagccaacgtgtcccggagcgcagaggcccagggggtcgcgctaaacactgtacctcggggaacaaaaccgtgaaggctaattaggacaagtcggagcagggaacggggacgccgggaggggagagcgcgctccgagttgggcagaacctggaacggtcacaggaaacccgggcgcggggtagtcgggccgagggggacctttgcccacggtccagagtggtctggactcggcccacgcgtgagaggagcgcttggtgacgatcccacgtacgcttggtgactggtggaggtcccagagaaggaccgtgcgtgcaaaaggcgaacctcggtgtgcggtgtgtccacgtgtgcaagctggggaggggagggggcgcagaaggcgtgacaaagacggactctgtcttgagtgtgcgcctcgctccggcccgctcccagcgaactgtgcctgaagtgaccaagtccagcccagagcaaagctaccagggggacatgtaccccacccggggcgtgggctatgagaccatcctgaaagagcagaagggtcagagcatgttcgtggagaacaaggccttttccatggatgagccggttgcagctaagaggccggtgtcaccatacagcgggtacaatgggcagctgctgaccagtgtgtaccagcccactgagatggccctgatgcacaaagttccgtccgaaggagcttacgacatcatcctcccacgggccaccgccaacagccaggtgatgggcagtgccaactcgaccctgcgggctgaagacatgtactcggcccagagccaccaggcggccacaccgccgaaagacggcaagaactctcaggtctttagaaacccctacgtgtgggactgagtcagcggtggcgaggagaggcgggcggatttggggagggccctgaggacctggccccgggcaagggactctccaggctcctcctccccctggcaggcccagcaacatgtgccccagatctggaagggcctccctctctgccagtgtttgggtgggtgtcatgggtgtccccacccactcctcagtgtttgtggagtcgaggagccaaccccagcctcctgccaggatcacctcggcggtcacactccagccaaatagtgttctcggggtggtggctgggcagcgcctatgtttctctggagattcctgcaacctcaagagacttcccaggcgctcaggcctggatcttgctcctctgtgaggaacaagggtgcctaataaatacatttctgctttattaa

SEQ ID NO: 136117 - DNA, 2988 bp, Homo sapiens
  Payload ID: 6643
  Gene Symbol: GPRC5C
  Gene Name: G protein-coupled receptor, class C, group 5, member C
  ENST ID: ENST00000392627
  CDS Start-End: 1127-2587
aaacactccgggccgcccgccccgccaccagctggctccgaccggcgcaccgctggcgatcccccaggcaattcggcgtcatgagaaccggcaccccgagactcggcgccctgccctccctccgcgtctccagggccctggccaggcccaacaacctctccctcctctgtgcgcctcagcccctacgggcctctggcgcgggctaactaggcctcgctgcgggcccccaggactgcgcaccccaccccccgcgaggccagcagccccgggggaaggcggccggaaaatctcttgtttatcgggctggataagtaccagcctggattcgcttcccaatttctgcggtccagcttcagcagattcctggggccggaggggaaagggtggcaacccacagatccaccccggaacagggagtggggggtggggctggtgggaacctgacctcctggaaaggacggactcggagtcagagccaacgtgtcccggagcgcagaggcccagggggtcgcgctaaacactgtacctcggggaacaaaaccgtgaaggctaattaggacaagtcggagcagggaacggggacgccgggaggggagagcgcgctccgagttgggcagaacctggaacggtcacaggaaacccgggcgcggggtagtcgggccgagggggacctttgcccacggtccagagtggtctggactcggcccacgcgtgagaggagcgcttggtgacgatcccacgtacgcttggtgactggtggaggtcccagagaaggaccgtgcgtgcaaaaggcgaacctcggtgtgcggtgtgtccacgtgtgcaagctggggaggggagggggcgcagaaggcgtgacaaagacggactctgtcttgagtgtgcgcctcgctccggcccgctcccagcgaactgtgcctgaagtgtgtctcacgggagggccaggacgaaggtgacaaaggctaggtgtcccccacggagacgcgccaaggtagccccgcgcgtgtccgtaggcgcgctctctggaagacgcggtggggggtgcgcagggctgcaccctcacaccaattgccccggcgaaggccgagcccagaaagtgagtgcgcgtgagtgtgcgcgcgcccgcatgcgggggcgtggcagtcaacagcaacaacccacacgccggcagggccagaaactcccatctccctcaccagccggaaagtacgagtcggctcagcctggagggacccaaccagagcctggcctgggagccaggatggccatccacaaagccttggtgatgtgcctgggactgcctctcttcctgttcccaggggcctgggcccagggccatgtcccacccggctgcagccaaggcctcaaccccctgtactacaacctgtgtgaccgctctggggcgtggggcatcgtcctggaggccgtggctggggcgggcattgtcaccacgtttgtgctcaccatcatcctggtggccagcctcccctttgtgcaggacaccaagaaacggagcctgctggggacccaggtattcttccttctggggaccctgggcctcttctgcctcgtgtttgcctgtgtggtgaagcccgacttctccacctgtgcctctcggcgcttcctctttggggttctgttcgccatctgcttctcttgtctggcggctcacgtctttgccctcaacttcctggcccggaagaaccacgggccccggggctgggtgatcttcactgtggctctgctgctgaccctggtagaggtcatcatcaatacagagtggctgatcatcaccctggttcggggcagtggcgagggcggccctcagggcaacagcagcgcaggctgggccgtggcctccccctgtgccatcgccaacatggactttgtcatggcactcatctacgtcatgctgctgctgctgggtgccttcctgggggcctggcccgccctgtgtggccgctacaagcgctggcgtaagcatggggtctttgtgctcctcaccacagccacctccgttgccatatgggtggtgtggatcgtcatgtatacttacggcaacaagcagcacaacagtcccacctgggatgaccccacgctggccatcgccctcgccgccaatgcctgggccttcgtcctcttctacgtcatccccgaggtctcccaggtgaccaagtccagcccagagcaaagctaccagggggacatgtaccccacccggggcgtgggctatgagaccatcctgaaagagcagaagggtcagagcatgttcgtggagaacaaggccttttccatggatgagccggttgcagctaagaggccggtgtcaccatacagcgggtacaatgggcagctgctgaccagtgtgtaccagcccactgagatggccctgatgcacaaagttccgtccgaaggagcttacgacatcatcctcccacgggccaccgccaacagccaggtgatgggcagtgccaactcgaccctgcgggctgaagacatgtactcggcccagagccaccaggcggccacaccgccgaaagacggcaagaactctcaggtctttagaaacccctacgtgtgggactgagtcagcggtggcgaggagaggcgggcggatttggggagggccctgaggacctggccccgggcaagggactctccaggctcctcctccccctggcaggcccagcaacatgtgccccagatctggaagggcctccctctctgccagtgtttgggtgggtgtcatgggtgtccccacccactcctcagtgtttgtggagtcgaggagccaaccccagcctcctgccaggatcacctcggcggtcacactccagccaaatagtgttctcggggtggtggctgggcagcgcctatgtttctctggagattcctgcaacctcaagagacttcccaggcgctcaggcctggatcttgctcctctgtgaggaacaagggtgcctaataaatacatttctgctttattaa

SEQ ID NO: 136118 - DNA, 1529 bp, Homo sapiens
  Payload ID: 6643
  Gene Symbol: GPRC5C
  Gene Name: G protein-coupled receptor, class C, group 5, member C
  ENST ID: ENST00000392628
  CDS Start-End: 1-1387
aaagtacgagtcggctcagcctggagggacccaaccagagcctggcctgggagccaggatggccatccacaaagccttggtgatgtgcctgggactgcctctcttcctgttcccaggggcctgggcccagggccatgtcccacccggctgcagccaaggcctcaaccccctgtactacaacctgtgtgaccgctctggggcgtggggcatcgtcctggaggccgtggctggggcgggcattgtcaccacgtttgtgctcaccatcatcctggtggccagcctcccctttgtgcaggacaccaagaaacggagcctgctggggacccaggtattcttccttctggggaccctgggcctcttctgcctcgtgtttgcctgtgtggtgaagcccgacttctccacctgtgcctctcggcgcttcctctttggggttctgttcgccatctgcttctcttgtctggcggctcacgtctttgccctcaacttcctggcccggaagaaccacgggccccggggctgggtgatcttcactgtggctctgctgctgaccctggtagaggtcatcatcaatacagagtggctgatcatcaccctggttcggggcagtggcgagggcggccctcagggcaacagcagcgcaggctgggccgtggcctccccctgtgccatcgccaacatggactttgtcatggcactcatctacgtcatgctgctgctgctgggtgccttcctgggggcctggcccgccctgtgtggccgctacaagcgctggcgtaagcatggggtctttgtgctcctcaccacagccacctccgttgccatatgggtggtgtggatcgtcatgtatacttacggcaacaagcagcacaacagtcccacctgggatgaccccacgctggccatcgccctcgccgccaatgcctgggccttcgtcctcttctacgtcatccccgaggtctcccaggtgaccaagtccagcccagagcaaagctaccagggggacatgtaccccacccggggcgtgggctatgagaccatcctgaaagagcagaagggtcagagcatgttcgtggagaacaaggccttttccatggatgagccggttgcagctaagaggccggtgtcaccatacagcgggtacaatgggcagctgctgaccagtgtgtaccagcccactgagatggccctgatgcacaaagttccgtccgaaggagcttacgacatcatcctcccacgggccaccgccaacagccaggtgatgggcagtgccaactcgaccctgcgggctgaagacatgtactcggcccagagccaccaggcggccacaccgccgaaagacggcaagaactctcaggctcagtccccacaaagtaaaacgagatggtagaagccctcttcccgggactgcacggcatcctgatcctcattcctctgtacccaggctggaccgggcccagcacctttcccatccttgtcattggagctgggaggggccggaggccaccaacctgaagcagtggaccgagtgg

SEQ ID NO: 136119 - DNA, 1419 bp, Homo sapiens
  Payload ID: 6643
  Gene Symbol: GPRC5C
  Gene Name:: G protein-coupled receptor, class C, group 5, member C
  Uniprot ID: Q9NQ84
  ENST ID: ENST00000392629
  CDS Start-End: 58-1419
ggggaacctccctgaagagtgccctggtcacagcacccttgaagacagccattggccatggggacccaaccagagcctggcctgggagccaggatggccatccacaaagccttggtgatgtgcctgggactgcctctcttcctgttcccaggggcctgggcccagggccatgtcccacccggctgcagccaaggcctcaaccccctgtactacaacctgtgtgaccgctctggggcgtggggcatcgtcctggaggccgtggctggggcgggcattgtcaccacgtttgtgctcaccatcatcctggtggccagcctcccctttgtgcaggacaccaagaaacggagcctgctggggacccaggtattcttccttctggggaccctgggcctcttctgcctcgtgtttgcctgtgtggtgaagcccgacttctccacctgtgcctctcggcgcttcctctttggggttctgttcgccatctgcttctcttgtctggcggctcacgtctttgccctcaacttcctggcccggaagaaccacgggccccggggctgggtgatcttcactgtggctctgctgctgaccctggtagaggtcatcatcaatacagagtggctgatcatcaccctggttcggggcagtggcgagggcggccctcagggcaacagcagcgcaggctgggccgtggcctccccctgtgccatcgccaacatggactttgtcatggcactcatctacgtcatgctgctgctgctgggtgccttcctgggggcctggcccgccctgtgtggccgctacaagcgctggcgtaagcatggggtctttgtgctcctcaccacagccacctccgttgccatatgggtggtgtggatcgtcatgtatacttacggcaacaagcagcacaacagtcccacctgggatgaccccacgctggccatcgccctcgccgccaatgcctgggccttcgtcctcttctacgtcatccccgaggtctcccaggtgaccaagtccagcccagagcaaagctaccagggggacatgtaccccacccggggcgtgggctatgagaccatcctgaaagagcagaagggtcagagcatgttcgtggagaacaaggccttttccatggatgagccggttgcagctaagaggccggtgtcaccatacagcgggtacaatgggcagctgctgaccagtgtgtaccagcccactgagatggccctgatgcacaaagttccgtccgaaggagcttacgacatcatcctcccacgggccaccgccaacagccaggtgatgggcagtgccaactcgaccctgcgggctgaagacatgtactcggcccagagccaccaggcggccacaccgccgaaagacggcaagaactctcaggtctttagaaacccctacgtgtgggactga

SEQ ID NO: 136120 - DNA, 1592 bp, Homo sapiens
  Payload ID: 6643
  Gene Symbol: GPRC5C
  Gene Name: G protein-coupled receptor, class C, group 5, member C
  ENST ID: ENST00000481232
  CDS Start-End: 512-964
agaacctggaacggtcacaggaaacccgggcgcggggtagtcgggccgagggggacctttgcccacggtccagagtggtctggactcggcccacgcgtgagaggagcgcttggtgacgatcccacgtacgcttggtgactggtggaggtcccagagaaggaccgtgcgtgcaaaaggcgaacctcggtgtgcggtgtgtccacgtgtgcaagctggggaggggagggggcgcagaaggcgtgacaaagacggactctgtcttgagtgtgcgcctcgctccggcccgctcccagcgaactgtgcctgaagtgtgtctcacgggagggccaggacgaaggtgacaaaggctaggtgtcccccacggagacgcgccaaggtagccccgcgcgtgtccgtaggcgcgctctctggaagacgcggtggggggtgcgcagggctgcaccctcacaccaattgccccggcgaaggccgagcccagaaagtgagtgcgcgtgagtgtgcgcgcgcccgcatgcgggggcgtggcagtcaacagcaacaacccacacgccggcagggccagaaactcccatctccctcaccagccggaaagtacgagtcggctcagcctggagggacccaaccagagcctggcctgggagccaggatggccatccacaaagccttggtgatgtgcctgggactgcctctcttcctgttcccaggggcctgggcccagggccatgtcccacccggctgcagccaaggcctcaaccccctgtactacaacctgtgtgaccgctctggggcgtggggcatcgtcctggaggccgtggctggggcgggcattgtcaccacgtttgtgctcaccatcatcctggtggccagcctcccctttgtgcaggacaccaagaaacggagcctgctggggacccagctaagaggccggtgtcaccatacagcgggtacaatgggcagctgctgaccagtgtgtaccagcccactgagatggccctgatgcacaaagttccgtccgaaggagcttacgacatcatcctcccacgggccaccgccaacagccaggtgatgggcagtgccaactcgaccctgcgggctgaagacatgtactcggcccagagccaccaggcggccacaccgccgaaagacggcaagaactctcaggtctttagaaacccctacgtgtgggactgagtcagcggtggcgaggagaggcgggcggatttggggagggccctgaggacctggccccgggcaagggactctccaggctcctcctccccctggcaggcccagcaacatgtgccccagatctggaagggcctccctctctgccagtgtttgggtgggtgtcatgggtgtccccacccactcctcagtgtttgtggagtcgaggagccaaccccagcctcctgccaggatcacctcggcggtcacactccagccaaatagtgttctcggggtggtggctgggcagcgcctatgtttctctggagattcctgcaacctcaagagacttcccaggcgctcaggcctggatcttgctcctctgtgaggaacaagggtgcctaataaatacatttctgctttattaa

SEQ ID NO: 136121 - DNA, 584 bp, Homo sapiens
  Payload ID: 6643
  Gene Symbol: GPRC5C
  Gene Name: G protein-coupled receptor, class C, group 5, member C
  ENST ID: ENST00000582473
  CDS Start-End: 124-584
agcctggaggtgagtcggggcggggagggccgggcaggctttgttcctgtgtaaacggagcgcacgtacctggagcgcggcgggcgcccgattagcgccctgaatggaggtgatgtaacggtgatgcaggctccagcccaccctcgccgaaagcaaggagccctgcctggggacaggcccgcgcgagagcgagcaacccagcgcgcctggctcagcctcggtcccagggagaggcaggccctgcgtcccggcccgggccccgccatcccagccaggaccgggcctggcccagcgccccgcgccgcgtccctcccacccccgcccgccccccgcctggggctggagttggccccaaacgctgcgctggagcggggccggcggcgagtcccagggacccaaccagagcctggcctgggagccaggatggccatccacaaagccttggtgatgtgcctgggactgcctctcttcctgttcccaggggcctgggcccagggccatgtcccacccggctgcagccaaggcctcaaccccctgtactacaacctgtgtgaccgctctggggcgtggggcatcgtcctgga

SEQ ID NO: 136122 - DNA, 1554 bp, Homo sapiens
  Payload ID: 6643
  Gene Symbol: GPRC5C
  Gene Name: G protein-coupled receptor, class C, group 5, member C
  ENST ID: ENST00000581590
  CDS Start-End: 1-1066
caacctgtgtgaccgctctggggcgtggggcatcgtcctggaggccgtggctggggcgggcattgtcaccacgtttgtgctcaccatcatcctggtggccagcctcccctttgtgcaggacaccaagaaacggagcctgctggggacccaggtattcttccttctggggaccctgggcctcttctgcctcgtgtttgcctgtgtggtgaagcccgacttctccacctgtgcctctcggcgcttcctctttggggttctgttcgccatctgcttctcttgtctggcggctcacgtctttgccctcaacttcctggcccggaagaaccacgggccccggggctgggtgatcttcactgtggctctgctgctgaccctggtagaggtcatcatcaatacagagtggctgatcatcaccctggttcggggcagtggcgagggcggccctcagggcaacagcagcgcaggctgggccgtggcctccccctgtgccatcgccaacatggactttgtcatggcactcatctacgtcatgctgctgctgctgggtgccttcctgggggcctggcccgccctgtgtggccgctacaagcgctggcgtaagcatggggtctttgtgctcctcaccacagccacctccgttgccatatgggtggtgtggatcgtcatgtatacttacggcaacaagcagcacaacagtcccacctgggatgaccccacgctggccatcgccctcgccgccaatgcctgggccttcgtcctcttctacgtcatccccgaggtctcccaggatgacgaccagagcagctctctggagaggtgccctgtagtcagtcccacagctctctggtgctacccccgtccccagcagcctgtgcctttgtcactggcatacttttccagagctaaattgggcgagcaatccctgcagagtaggattgcagctctgactgtggcccccgacctctctgtgttgcctgtcgaagtccatgaacagaatgttatttccctccagtggaagggaagcagggagctctgtggacctcacgctgcccttggtctagcttagcggccccaagatcccttagtgaatcaaggcgctgtgttgctttcctatgtgataatttcaaaggagtccccggcagggcctgatacccagaggctgcagtctccagtggacgtgggtgtgtgtatagcctgagtcctctgggggtctgcgcgtgaggctcagggagggatgggatcctaaaagatgcaggcctgcctgtattcaggagtacccactggccctgcttactcccgcccgggccaagtggagaagaagttagatgagttcttaggaggagagaggcagcttctttgaggtggtcgagtggcatcacaaacaagcgttgaatggaaaaagactagaagaggcagagcctgtcacaggttcaccatcatccagccaacactatgggaaatctcacacccaccactgtcaaaccgaggactttggacttaataactgctcagaattaaacgaccttaccttccatgggtgagggcttactgcca

SEQ ID NO: 136123 - DNA, 550 bp, Homo sapiens
  Payload ID: 6643
  Gene Symbol: GPRC5C
  Gene Name: G protein-coupled receptor, class C, group 5, member C
  ENST ID: ENST00000582444
  CDS Start-End: 115-550
ctgccggggacagctgggactggacaccacccagaagccagctggctggccctgccctgccctgctggaggcaccatctctgggacccaaccagagcctggcctgggagccaggatggccatccacaaagccttggtgatgtgcctgggactgcctctcttcctgttcccaggggcctgggcccagggccatgtcccacccggctgcagccaaggcctcaaccccctgtactacaacctgtgtgaccgctctggggcgtggggcatcgtcctggaggccgtggctggggcgggcattgtcaccacgtttgtgctcaccatcatcctggtggccagcctcccctttgtgcaggacaccaagaaacggagcctgctggggacccaggtattcttccttctggggaccctgggcctcttctgcctcgtgtttgcctgtgtggtgaagcccgacttctccacctgtgcctctcggcgcttcctctttggggttctgttcgccatctgcttctcttgtctggcggctcacgtctttgccctcaacttcctggccc

SEQ ID NO: 136124 - DNA, 1038 bp, Homo sapiens
  Payload ID: 6644
  Gene Symbol: GPRC5D
  Gene Name: G protein-coupled receptor, class C, group 5, member D
  Uniprot ID: Q9NZD1
  ENST ID: ENST00000228887
  CDS Start-End: 1-1038
atgtacaaggactgcatcgagtccactggagactattttcttctctgtgacgccgaggggccatggggcatcattctggagtccctggccatacttggcatcgtggtcacaattctgctactcttagcatttctcttcctcatgcgaaagatccaagactgcagccagtggaatgtcctccccacccagctcctcttcctcctgagtgtcctggggctcttcggactcgcttttgccttcatcatcgagctcaatcaacaaactgcccccgtacgctactttctctttggggttctctttgctctctgtttctcatgcctcttagctcatgcctccaatctagtgaagctggttcggggttgtgtctccttctcctggacgacaattctgtgcattgctattggttgcagtctgttgcaaatcattattgccactgagtatgtgactctcatcatgaccagaggtatgatgtttgtgaatatgacaccctgccagctcaatgtggactttgttgtactcctggtctatgtcctcttcctgatggccctcacattcttcgtctccaaagccaccttctgtggcccgtgtgagaactggaagcagcatggaaggctcatctttatcactgtgctcttctccatcatcatctgggtggtgtggatctccatgctcctgagaggcaacccgcagttccagcgacagccccagtgggacgacccggtcgtctgcattgctctggtcaccaacgcatgggttttcctgctgctgtacatcgtccctgagctctgcattctctacagatcgtgtagacaggagtgccctttacaaggcaatgcctgccccgtcacagcctaccaacacagcttccaagtggagaaccaggagctctccagagcccgagacagtgatggagctgaggaggatgtagcattaacttcatatggtactcccattcagccgcagactgttgatcccacacaagagtgtttcatcccacaggctaaactaagcccccagcaagatgcaggaggagtataa

SEQ ID NO: 136125 - DNA, 903 bp, Homo sapiens
  Payload ID: 6644
  Gene Symbol: GPRC5D
  Gene Name: G protein-coupled receptor, class C, group 5, member D
  Uniprot ID: Q9NZD1
  ENST ID: ENST00000396333
  CDS Start-End: 1-903
atgtacaaggactgcatcgagtccactggagactattttcttctctgtgacgccgaggggccatggggcatcattctggagtccctggccatacttggcatcgtggtcacaattctgctactcttagcatttctcttcctcatgcgaaagatccaagactgcagccagtggaatgtcctccccacccagctcctcttcctcctgagtgtcctggggctcttcggactcgcttttgccttcatcatcgagctcaatcaacaaactgcccccgtacgctactttctctttggggttctctttgctctctgtttctcatgcctcttagctcatgcctccaatctagtgaagctggttcggggttgtgtctccttctcctggacgacaattctgtgcattgctattggttgcagtctgttgcaaatcattattgccactgagtatgtgactctcatcatgaccagaggtatgatgtttgtgaatatgacaccctgccagctcaatgtggactttgttgtactcctggtctatgtcctcttcctgatggccctcacattcttcgtctccaaagccaccttctgtggcccgtgtgagaactggaagcagcatggaaggctcatctttatcactgtgctcttctccatcatcatctgggtggtgtggatctccatgctcctgagaggcaacccgcagttccagcgacagccccagtgggacgacccggtcgtctgcattgctctggtcaccaacgcatgggttttcctgctgctgtacatcgtccctgagctctgcattctctacagatcgtgtagacaggagtgccctttacaaggcaatgcctgccccgtcacagcctaccaacacagcttccaagtggagaaccaggagctctccagagactgttga

SEQ ID NO: 136126 - DNA, 448 bp, Homo sapiens
  Payload ID: 6644
  Gene Symbol: GPRC5D
  Gene Name: G protein-coupled receptor, class C, group 5, member D
  ENST ID: ENST00000541128
  CDS Start-End: 87-448
ccagcactacagcctaagcttccagagtggacacggagaagggcatcagaaaaccattctggtgaggtccacacccataagtcaccatgtacaaggactgcatcgagtccactggagactattttcttctctgtgacgccgaggggccatggggcatcattctggagtccctggccatacttggcatcgtggtcacaattctgctactcttagcatttctcttcctcatgcgaaagatccaagactgcagccagtggaatgtcctccccacccagctcctcttcctcctgagtgtcctggggctcttcggactcgcttttgccttcatcatcgagctcaatcaacaaactgcccccgtacgctactttctctttggggttctctttgctctctgtttctcatgcctcttagctcatgcctccaatctagtgaagctggttcggggttg

SEQ ID NO: 136127 - DNA, 2860 bp, Homo sapiens
  Payload ID: 6645
  Gene Symbol: GPRC6A
  Gene Name: G protein-coupled receptor, class C, group 6, member A
  Uniprot ID: Q5T6X5
  ENST ID: ENST00000310357
  CDS Start-End: 23-2803
actgagcaaatgagatagaaacatggcattcttaattatactaattacctgctttgtgattattcttgctacttcacagccttgccagacccctgatgactttgtggctgccacttctccgggacatatcataattggaggtttgtttgctattcatgaaaaaatgttgtcctcagaagactctcccagacgaccacaaatccaggagtgtgttggctttgaaatatcagtttttcttcaaactcttgccatgatacacagcattgagatgatcaacaattcaacactcttacctggagtcaaactggggtatgaaatctatgacacttgtacagaagtcacagtggcaatggcagccactctgaggtttctttctaaattcaactgctccagagaaactgtggagtttaagtgtgactattccagctacatgccaagagttaaggctgtcataggttctgggtactcagaaataactatggctgtctccaggatgttgaatttacagctcatgccacaggtgggttatgaatcaactgcagaaatcctgagtgacaaaattcgctttccttcatttttacggactgtgcccagtgacttccatcaaattaaagcaatggctcacctgattcagaaatctggttggaactggattggcatcataaccacagatgatgactatggacgattggctcttaacacttttataattcaggctgaagcaaataacgtgtgcatagccttcaaagaggttcttccagcctttctttcagataataccattgaagtcagaatcaatcggacactgaagaaaatcattttagaagcccaggttaatgtcattgtggtatttctgaggcaattccatgtttttgatctcttcaataaagccattgaaatgaatataaataagatgtggattgctagtgataattggtcaactgccaccaagattaccaccattcctaatgttaaaaagattggcaaagttgtagggtttgcctttagaagagggaatatatcctctttccattcctttcttcaaaatctgcacttgcttcccagtgacagtcacaaactcttacatgaatatgccatgcatttatctgcctgcgcatatgtcaaggacactgatttgagtcaatgcatattcaatcattctcaaaggactttggcctacaaggctaacaaggctatagaaaggaacttcgtcatgagaaatgacttcctctgggactatgctgagccaggactcattcatagtattcagcttgcagtgtttgcccttggttatgccattcgggatctgtgtcaagctcgtgactgtcagaaccccaacgcctttcaaccatgggagttacttggtgtgctaaaaaatgtgacattcactgatggatggaattcatttcattttgatgctcacggggatttaaatactggatatgatgttgtgctctggaaggagatcaatggacacatgactgtcactaagatggcagaatatgacctacagaatgatgtcttcatcatcccagatcaggaaacaaaaaatgagttcaggaatcttaagcaaattcaatctaaatgctccaaggaatgcagtcctgggcaaatgaagaaaactacaagaagtcaacacatctgttgctatgaatgtcagaactgtcctgaaaatcattacactaatcagacagatatgcctcactgccttttatgcaacaacaaaactcactgggcccctgttaggagcactatgtgctttgaaaaggaagtggaatatctcaactggaatgactccttggccatcctactcctgattctctccctactgggaatcatatttgttctggttgttggcataatatttacaagaaacctgaacacacctgttgtgaaatcatccgggggattaagagtctgctatgtgatccttctctgtcatttcctcaattttgccagcacgagctttttcattggagaaccacaagacttcacatgtaaaaccaggcagacaatgtttggagtgagctttactctttgcatctcctgcattttgacgaagtctctgaaaattttgctagccttcagctttgatcccaaattacagaaatttctgaagtgcctctatagaccgatccttattatcttcacttgcacgggcatccaggttgtcatttgcacactctggctaatctttgcagcacctactgtagaggtgaatgtctccttgcccagagtcatcatcctggagtgtgaggagggatccatacttgcatttggcaccatgctgggctacattgccatcctggccttcatttgcttcatatttgctttcaaaggcaaatatgagaattacaatgaagccaaattcattacatttggcatgctcatttacttcatagcttggatcacattcatccctatctatgctaccacatttggcaaatatgtaccagctgtggagattattgtcatattaatatctaactatggaatcctgtattgcacattcatccccaaatgctatgttattatttgtaagcaagagattaacacaaagtctgcctttctcaagatgatctacagttattcttcccatagtgtgagcagcattgccctgagtcctgcttcactggactccatgagcggcaatgtcacaatgaccaatcccagctctagtggcaagtctgcaacctggcagaaaagcaaagatcttcaggcacaagcatttgcacacatatgcagggaaaatgccacaagtgtatctaaaactttgcctcgaaaaagaatgtcaagtatatgaataagccttaggagatgccacattccagaataaaatgtttccagggtctttgcatct

SEQ ID NO: 136128 - DNA, 2622 bp, Homo sapiens
  Payload ID: 6645
  Gene Symbol: GPRC6A
  Gene Name: G protein-coupled receptor, class C, group 6, member A
  Uniprot ID: Q5T6X5
  ENST ID: ENST00000368549
  CDS Start-End: 25-2592
gaactgagcaaatgagatagaaacatggcattcttaattatactaattacctgctttgtgattattcttgctacttcacagccttgccagacccctgatgactttgtggctgccacttctccgggacatatcataattggaggtttgtttgctattcatgaaaaaatgttgtcctcagaagactctcccagacgaccacaaatccaggagtgtgttggctttgaaatatcagtttttcttcaaactcttgccatgatacacagcattgagatgatcaacaattcaacactcttacctggagtcaaactggggtatgaaatctatgacacttgtacagaagtcacagtggcaatggcagccactctgaggtttctttctaaattcaactgctccagagaaactgtggagtttaagtgtgactattccagctacatgccaagagttaaggctgtcataggttctgggtactcagaaataactatggctgtctccaggatgttgaatttacagctcatgccacaggtgggttatgaatcaactgcagaaatcctgagtgacaaaattcgctttccttcatttttacggactgtgcccagtgacttccatcaaattaaagcaatggctcacctgattcagaaatctggttggaactggattggcatcataaccacagatgatgactatggacgattggctcttaacacttttataattcaggctgaagcaaataacgtgtgcatagccttcaaagaggttcttccagcctttctttcagataataccattgaagtcagaatcaatcggacactgaagaaaatcattttagaagcccaggttaatgtcattgtggtatttctgaggcaattccatgtttttgatctcttcaataaagccattgaaatgaatataaataagatgtggattgctagtgataattggtcaactgccaccaagattaccaccattcctaatgttaaaaagattggcaaagttgtagggtttgcctttagaagagggaatatatcctctttccattcctttcttcaaaatctgcacttgcttcccagtgacagtcacaaactcttacatgaatatgccatgcatttatctgcctgcgcatatgtcaaggacactgatttgagtcaatgcatattcaatcattctcaaaggactttggcctacaaggctaacaaggctatagaaaggaacttcgtcatgagaaatgacttcctctgggactatgctgagccaggactcattcatagtattcagcttgcagtgtttgcccttggttatgccattcgggatctgtgtcaagctcgtgactgtcagaaccccaacgcctttcaaccatgggagcaaattcaatctaaatgctccaaggaatgcagtcctgggcaaatgaagaaaactacaagaagtcaacacatctgttgctatgaatgtcagaactgtcctgaaaatcattacactaatcagacagatatgcctcactgccttttatgcaacaacaaaactcactgggcccctgttaggagcactatgtgctttgaaaaggaagtggaatatctcaactggaatgactccttggccatcctactcctgattctctccctactgggaatcatatttgttctggttgttggcataatatttacaagaaacctgaacacacctgttgtgaaatcatccgggggattaagagtctgctatgtgatccttctctgtcatttcctcaattttgccagcacgagctttttcattggagaaccacaagacttcacatgtaaaaccaggcagacaatgtttggagtgagctttactctttgcatctcctgcattttgacgaagtctctgaaaattttgctagccttcagctttgatcccaaattacagaaatttctgaagtgcctctatagaccgatccttattatcttcacttgcacgggcatccaggttgtcatttgcacactctggctaatctttgcagcacctactgtagaggtgaatgtctccttgcccagagtcatcatcctggagtgtgaggagggatccatacttgcatttggcaccatgctgggctacattgccatcctggccttcatttgcttcatatttgctttcaaaggcaaatatgagaattacaatgaagccaaattcattacatttggcatgctcatttacttcatagcttggatcacattcatccctatctatgctaccacatttggcaaatatgtaccagctgtggagattattgtcatattaatatctaactatggaatcctgtattgcacattcatccccaaatgctatgttattatttgtaagcaagagattaacacaaagtctgcctttctcaagatgatctacagttattcttcccatagtgtgagcagcattgccctgagtcctgcttcactggactccatgagcggcaatgtcacaatgaccaatcccagctctagtggcaagtctgcaacctggcagaaaagcaaagatcttcaggcacaagcatttgcacacatatgcagggaaaatgccacaagtgtatctaaaactttgcctcgaaaaagaatgtcaagtatatgaataagccttaggagatgccacattccagaa

SEQ ID NO: 136129 - DNA, 2310 bp, Homo sapiens
  Payload ID: 6645
  Gene Symbol: GPRC6A
  Gene Name: G protein-coupled receptor, class C, group 6, member A
  Uniprot ID: Q5T6X5
  ENST ID: ENST00000530250
  CDS Start-End: 25-2280
gaactgagcaaatgagatagaaacatggcattcttaattatactaattacctgctttgtgattattcttgctacttcacagccttgccagacccctgatgactttgtggctgccacttctccgggacatatcataattggaggtttgtttgctattcatgaaaaaatgttgtcctcagaagactctcccagacgaccacaaatccaggagtgtgttggctttgaaatatcagtttttcttcaaactcttgccatgatacacagcattgagatgatcaacaattcaacactcttacctggagtcaaactggggtatgaaatctatgacacttgtacagaagtcacagtggcaatggcagccactctgaggtttctttctaaattcaactgctccagagaaactgtggagtttaagtgtgactattccagctacatgccaagagttaaggctgtcataggttctgggtactcagaaataactatggctgtctccaggatgttgaatttacagctcatgccacaggtgggttatgaatcaactgcagaaatcctgagtgacaaaattcgctttccttcatttttacggactgtgcccagtgacttccatcaaattaaagcaatggctcacctgattcagaaatctggttggaactggattggcatcataaccacagatgatgactatggacgattggctcttaacacttttataattcaggctgaagcaaataacgtgtgcatagccttcaaagaggttcttccagcctttctttcagataataccattgaagtcagaatcaatcggacactgaagaaaatcattttagaagcccagttacttggtgtgctaaaaaatgtgacattcactgatggatggaattcatttcattttgatgctcacggggatttaaatactggatatgatgttgtgctctggaaggagatcaatggacacatgactgtcactaagatggcagaatatgacctacagaatgatgtcttcatcatcccagatcaggaaacaaaaaatgagttcaggaatcttaagcaaattcaatctaaatgctccaaggaatgcagtcctgggcaaatgaagaaaactacaagaagtcaacacatctgttgctatgaatgtcagaactgtcctgaaaatcattacactaatcagacagatatgcctcactgccttttatgcaacaacaaaactcactgggcccctgttaggagcactatgtgctttgaaaaggaagtggaatatctcaactggaatgactccttggccatcctactcctgattctctccctactgggaatcatatttgttctggttgttggcataatatttacaagaaacctgaacacacctgttgtgaaatcatccgggggattaagagtctgctatgtgatccttctctgtcatttcctcaattttgccagcacgagctttttcattggagaaccacaagacttcacatgtaaaaccaggcagacaatgtttggagtgagctttactctttgcatctcctgcattttgacgaagtctctgaaaattttgctagccttcagctttgatcccaaattacagaaatttctgaagtgcctctatagaccgatccttattatcttcacttgcacgggcatccaggttgtcatttgcacactctggctaatctttgcagcacctactgtagaggtgaatgtctccttgcccagagtcatcatcctggagtgtgaggagggatccatacttgcatttggcaccatgctgggctacattgccatcctggccttcatttgcttcatatttgctttcaaaggcaaatatgagaattacaatgaagccaaattcattacatttggcatgctcatttacttcatagcttggatcacattcatccctatctatgctaccacatttggcaaatatgtaccagctgtggagattattgtcatattaatatctaactatggaatcctgtattgcacattcatccccaaatgctatgttattatttgtaagcaagagattaacacaaagtctgcctttctcaagatgatctacagttattcttcccatagtgtgagcagcattgccctgagtcctgcttcactggactccatgagcggcaatgtcacaatgaccaatcccagctctagtggcaagtctgcaacctggcagaaaagcaaagatcttcaggcacaagcatttgcacacatatgcagggaaaatgccacaagtgtatctaaaactttgcctcgaaaaagaatgtcaagtatatgaataagccttaggagatgccacattccagaa

SEQ ID NO: 136130 - DNA, 866 bp, Homo sapiens
  Payload ID: 6646
  Gene Symbol: G0S2
  Gene Name: G0/G1 switch 2
  Uniprot ID: P27469
  ENST ID: ENST00000367029
  CDS Start-End: 163-474
gcggagtctccaactgggagagctgcagctgccgagaggaggagaacgctgaggtcggtcggaccaacggacgcgctgaccgctgccaactgcagctcgcgctgcctcctgctcgcgccgtgccactaaggtcattcccgcctccgagagcccagagccgagatggaaacggtccaggagctgatccccctggccaaggagatgatggcccagaagcgcaaggggaagatggtgaagctgtacgtgctgggcagcgtgctggccctcttcggcgtggtgctcggcctgatggagactgtgtgcagccccttcacggccgccagacgtctgcgggaccaggaggcagccgtggcggagctgcaggccgccctggagcgacaggctctccagaagcaagccctgcaggagaaaggcaagcagcaggacacggtcctcggcggccgggccctgtccaaccggcagcacgcctcctaggaactgtgggagaccagcggagtgggagggagacgcagtagacagagacagaccgagagaggaatggagagacagagggggcgcgcgcacaggagcctgactccgctgggagagtgcaggagcacgtgctgttttttatttggacttaacttcagagaaaccgctgacatctagaactgacctaccacaagcatccaccaaaggagtttgggattgagttttgctgctgtgcagcactgcattgtcatgacatttccaacactgtgtgaattatctaaatgcgtctaccattttgcactagggaggaaggataaatgctttttatgttattattattaattattacaatgaccaccattttgcattttgaaataaaaaaactttttatacca

SEQ ID NO: 136131 - DNA, 7105 bp, Homo sapiens
  Payload ID: 6647
  Gene Symbol: GSPT1
  Gene Name: G1 to S phase transition 1
  Uniprot ID: P15170
  ENST ID: ENST00000434724
  CDS Start-End: 201-2114
gccgccgcctctgtcgtcgtcgcgagtgtggagtcgggactggagctgctgccgcggcgacgccggggatctttgtcgctagctcccggcccttctgccccgccgccttccctcagtcagcgttgcccactcctctccggccgggcgcccctgcctccatttcccgctctctgtccaccacacacacggcccccccgatcatggatccgggcagtggcggcggcggcggcggcggcggcggcggcgggagcagcagcggcagcagcagcagcgactcggcgcctgactgctgggaccaggcggacatggaagcccccgggccgggcccttgcggcggcggcggctccctggcggcggcggccgaggcccagcgggagaacctcagcgcggccttcagccggcaactcaacgtcaacgccaagcccttcgtgcccaacgtccacgccgccgagttcgtgccgtccttcctgcggggcccggcagcgccgccacccccagttggcggcgccgccaataaccacggagccggcagcggcgcgggaggccgtgcggcacctgtggaatcctctcaagaggaacagtcattgtgtgaaggttcaaattcagctgttagcatggaactttcagaacctattgtagaaaatggagagacagaaatgtctccagaagaatcatgggagcacaaagaagaaataagtgaagcagagccagggggtggttccttgggagatggaaggccgccagaggaaagtgcccatgaaatgatggaggaggaagaggaaatcccaaaacctaagtctgtggttgcaccgccaggtgctcctaagaaagagcatgtaaatgtagtattcattgggcacgtagatgctggcaagtcaaccattggaggacaaataatgtatttgactggaatggttgacaaaaggacgcttgaaaagtatgaaagagaagctaaagagaaaaacagagaaacttggtacttgtcttgggccttagacacaaatcaggaagaacgagacaagggtaaaacagtagaagtgggtcgtgcctattttgaaaccgaaaagaagcatttcacaattctagatgcccctggccacaagagttttgtcccaaatatgattggtggtgcctctcaagctgatttggctgtgctggtaatctcagccaggaaaggagagtttgaaactggatttgaaaaaggaggacagacaagagaacatgcaatgttggcaaagacagcaggtgtaaaacacctaattgtgctaattaataagatggatgatccaacagtaaattggagcaatgagagatatgaagaatgtaaggagaaactagtgccatttttgaaaaaagttggcttcaatcccaaaaaggacattcactttatgccctgctcaggacttactggagcaaatctcaaagagcagtcggatttctgtccttggtacattggattaccgtttattccatatctggataatttgccgaacttcaatagatcagttgatggaccaatcaggctgccaattgtggataagtacaaggatatgggcactgtggtcctgggaaagctggaatcaggatctatttgtaaaggccagcagcttgtgatgatgccaaacaagcacaacgtggaagttcttggaatactttccgatgatgtagagactgataccgtagccccaggtgaaaacctcaaaatcagactgaaaggaattgaagaagaggagattcttccagggtttatactttgtgatcctaataatctttgtcattctggacgcacatttgatgcccagatagtgattatagagcacaaatccatcatctgcccaggctataatgcggtgctgcatattcatacctgtattgaggaggtggaaataacagccttaatctgcttggtagacaaaaaatcaggagaaaaaagtaagacccgaccccgttttgtcaaacaagatcaagtatgcattgctcgcttaaggacagcaggaaccatctgccttgagacctttaaagacttccctcagatgggtcgtttcaccttaagagatgagggtaagaccattgcaattggaaaagttctgaaactggttccagagaaagactaagcattttcttgatgaccctgcacaatactgtgaggaaaattgactgcagaagcctacttcacaccgccttctcttattttctgcccattgataaacctctccccatattttgcaaagaggaaattcacagcaaaagtccacattatgtcagctttctcatattgagagctctgctatgccactgttgaatttttcccaagattcctgtccctagccctcacttcaaactctgcttccttggacagatttggcaatagctttgtaagtgatgtggacataattgcctacaataatgaaaacctacaggaatttttttatttttcattttccccttaggcatatttagtatttttcccccaggcagatcattctgagtgtgcgagtgtgtgtgcacatgttacaaaggcaactaccatgttaataaaatattcaatttgaaatccttttcggtatttgaattgcttttgaataatgttttttatctggatgtaacattgttgcattagctttttaactttcccaagtaattgaatacattttattacttggacttttataaactctttccctacccactataaatgagacattcacagcgttcaagtttgtattaaaggaaaggattagtttgaccccttcttttgatggttaatgcatacatgcagttaaatccctttatgcaaatgtgacactgctttactaggtcttttagttatttatttattttttttttttttgccaatttatattgtaacatgatttcttgaacacagtaagttgttttaaaataaaagaacagcatactgtagtttttataagtaaagcgtaatgaaattgtacccctagagaaaattccattaacttgttaaattagtggaattaacaacaaataaagcatgtttgagacctggcaaaaattcctctggtagtatttataaatagagctgcatgcctctagtatgaaaaccgtatcagttgcaagtgccacttctacaagttactcagtttactctttgtatcagtaactttaaaggttggatgatccttgctggttaaagctaaatctcaacctagcaactaaatgaaaatatttagaatcatcagaatctgaacagactaaaattatcagcgataagcagaatcaagcagggtataagttttatctcaattatttgaaattgactgagttttcttaagtgtaaagctgaaatttgctaaccatgtttttgatgaaccacagtgcagcattgtgtgggttttagattgaatgactctctgctataattatcatgactttgaaatttttcatgagaataaatgaggaatggaggcaatttgtgggtttatccaaagcccccttgatgttgagtgttgccattgatcaaagatagcctcttttagattgtgatttctctctaaataagatactttgtatatttaatgacaagtctcttccctataattttgctcctcagaaaagaaaagcctagacagactgtatttccagtcacagaacataaaacttaatctaatgggtgttttgttttgttttgagacagaggctcactctgtcacctaggctggagtgcagtggctcgatctcagctcactgcagcctccacctcccggattcaagcaatttcctgcctcagcctcttgagtagctgggattacaggagccctccacgaggcccagttaatttttgtatctttagtggagacgaggtttccccctattggtcaggctggtctcaaacttctgacctcaagtgatccactcgcctcagcctctcaaaagtgctgggattacaggcatgaggcgccgcacttggcctagtgttttcttaactgtgaaattcccattcatttcttgaatgaggctacatcttatggacagagcaaagttattgtcctacagattcttaaaactataattatggctattgcatgaaatttaaatagattttattatgtctgcaaatctctgggcttttatttttctggaaaatataggagctttaatcaaaacataatagttctttttgtaattccatgttaataaaaacaaatactagcaattgcttgaattttaatgaatatttaaaagttcaagagccacggaaatcacttccagagataagagttccctttctaaatagaacacatttttaaaaaataagttatgtttgctactaaaacatttacactgttagactattatgtgcatgttgccaagactcttaagtaacttggatatcaactgtgaagggcctacctctaaaaagtaacaggtcatacaaatacaaatgtaactgtaaaaattccactggattcttgcatatttgcaagattagattattcaaaagaaatttcagtgctaaaattaaccagcaacataagttctatgggctttgaaaattgttctcatctttttaaagttgatgcattttcaatcctgcttacacaggctgttcatttggataagtaaataaaatgtctaaggtgaacttggcattatgtggagatgttggaccgttatagagcaatacaaattcctatgctgtcattctgttttctgcaaatgcaaacgtgcttatatggtcaacagtgcaaaaatagggtagttggctgcatatttagggtattacctaagcatttgttctctaacgttgctctactagaatgatttttttcttgcatcttttcacattaatgatgttctttatataactttcatgcgattatttagttttttaaattaataaagtgaatttaagaaatattgaaataaacatctaagtaattgccattttaaacccttgtttcttactgtgggagagggggaaatacagcactcatttcttgtttttaatttgcagaagtaagtgaaaatctatgtaaaatcaaaccaaaagagttggactgagtgtgtattgtcttgagattaagtgacaaatagtaaagtgttactgagtaattaagcccatgtattttttttttgtgagttgaaaatctttgaaatatgtgataaccgaatgtcaaaagttcctaaactctaacagtgcaggttgttcactgtaacgaggtaactcatatttgctggttacataaactacaagtactgctctcacaatatgggactttgaactgtgatgtagttcaacagttgccggcatcctctcagctgatacgctgcgaatattttgggttagacttgcagccagatgcagttttgcaacccaagaaaaaagttgaacctatgatcaaaaactgctcccaagatgaacctggaaaaaaatcagctaagctcccttggcgatctgcaggaacactagtaatgactggaattactccgtgatctttgatgactattacacataacagcactctagcaccttttcttactggcatggacttcctcatggactgctacttcatggatgatagcttcattgctttgggtagggatttaaggtagtcaaggggaaaatacgcagttttattacaggtcttaacatcaggcaactttcaactttaaaaccctttgtgaaaaatgtggttatagcactatagctctgattttaggatggttaaatgttatattcattgttggcttaccttatcaaactgtgccattaatcctttcacagacataggtaaggaagagaacaaccagtggattcaggggacaattatctatctccaaataataggcttttatttcttgcagctaactttttcagtgattctagcagatgccatctagtacatccttgatcttgtttctttcgtgagagatctcgccatggcagcatcttgttaagtaagtgtaattgcacatgcacaaaagacttaactagctttacatttagcagtcagttggttagattaggtttcatagtaaatgaataggaatagaaagaataggaagtgtttttattttccagtagtaattccgtggattccatttgacccagtttactatcagttcagttcaggtagatttggttcaacttttggtggtttttggctctaggatattcttgactttaatatcctagaacttactgagtcttcccttcaataaatacacttctcacatacctctaatcctatgcttccttgaaacaataatgctagctgagttgtttactaaggattattataagggcctgaaggtgtgggagtggagattaattaaaacctttatgttctccaatataagggaaaagcaggttggtactacttctgattaggcagaaaacaccaggattccttaagtgatccttgaaatggttattgttttctgccttgtcacatttgccactgtgccctttaaaacgatgtggaaacctcaggtttgtggacagcacaggtggaatgacatcttgtgcttcctgaggctcccctctaccaggcacattagcttagtgcttcagatgtcagcccaagtccttgttacctccttttcctgctgcccagggaagagtgtgtgtgctggagctggagcgcttgcactcttcaggtgactattctcacctccatttcctccacatgcattaggtgaaactgaggtctaagcctcctgcaaggtctacattttaaggactcacacatcaggctctcagaaatgtacacaggtattagttctgtttgttctaaaggaaatgtgggtatctctcaggccaggacttagtgactagttttcgctagacagcaggttaatacctagatctcatttaaaaaaaaaaaaaaaaaacaggattaaagggaactgatcaggtttgttgagttttttagcctaattccaaagcatggaagagtgctctaggtaggaaagaaagctttttcttacgatttgtagctacctactgtgcctgacttggtgcctgtgtgaggattaagcccttagtctgctcttgcaattattcaaatgacaaattaaatttgcttttgtaataacaataaaagttgtcatcttcccttttgaa

SEQ ID NO: 136132 - DNA, 1603 bp, Homo sapiens
  Payload ID: 6647
  Gene Symbol: GSPT1
  Gene Name: G1 to S phase transition 1
  Uniprot ID: P15170
  ENST ID: ENST00000420576
  CDS Start-End: 104-1603
ggaaacgggggcggccagaacagagaactaccgaggcgaagcacctgtggaatcctctcaagaggaacagtcattgtgtgaaggttcaaattcagctgttagcatggaactttcagaacctattgtagaaaatggagagacagaaatgtctccagaagaatcatgggagcacaaagaagaaataagtgaagcagagccagggggtggttccttgggagatggaaggccgccagaggaaagtgcccatgaaatgatggaggaggaagaggaaatcccaaaacctaagtctgtggttgcaccgccaggtgctcctaagaaagagcatgtaaatgtagtattcattgggcacgtagatgctggcaagtcaaccattggaggacaaataatgtatttgactggaatggttgacaaaaggacgcttgaaaagtatgaaagagaagctaaagagaaaaacagagaaacttggtacttgtcttgggccttagacacaaatcaggaagaacgagacaagggtaaaacagtagaagtgggtcgtgcctattttgaaaccgaaaagaagcatttcacaattctagatgcccctggccacaagagttttgtcccaaatatgattggtggtgcctctcaagctgatttggctgtgctggtaatctcagccaggaaaggagagtttgaaactggatttgaaaaaggaggacagacaagagaacatgcaatgttggcaaagacagcaggtgtaaaacacctaattgtgctaattaataagatggatgatccaacagtaaattggagcaatgagagatatgaagaatgtaaggagaaactagtgccatttttgaaaaaagttggcttcaatcccaaaaaggacattcactttatgccctgctcaggacttactggagcaaatctcaaagagcagtcggatttctgtccttggtacattggattaccgtttattccatatctggataatttgccgaacttcaatagatcagttgatggaccaatcaggctgccaattgtggataagtacaaggatatgggcactgtggtcctgggaaagctggaatcaggatctatttgtaaaggccagcagcttgtgatgatgccaaacaagcacaacgtggaagttcttggaatactttccgatgatgtagagactgataccgtagccccaggtgaaaacctcaaaatcagactgaaaggaattgaagaagaggagattcttccagggtttatactttgtgatcctaataatctttgtcattctggacgcacatttgatgcccagatagtgattatagagcacaaatccatcatctgcccaggctataatgcggtgctgcatattcatacctgtattgaggaggtggaaataacagccttaatctgcttggtagacaaaaaatcaggagaaaaaagtaagacccgaccccgttttgtcaaacaagatcaagtatgcattgctcgcttaaggacagcaggaaccatctgccttgagacctttaaagacttccctcagatgggtcgtttcaccttaagagatgagggtaagaccattgcaattggaaaagttctgaaactggttccagagaaagactaa

SEQ ID NO: 136133 - DNA, 2509 bp, Homo sapiens
  Payload ID: 6647
  Gene Symbol: GSPT1
  Gene Name: G1 to S phase transition 1
  Uniprot ID: P15170
  ENST ID: ENST00000439887
  CDS Start-End: 159-2069
gagctgctgccgcggcgacgccggggatctttgtcgctagctcccggcccttctgccccgccgccttccctcagtcagcgttgcccactcctctccggccgggcgcccctgcctccatttcccgctctctgtccaccacacacacggcccccccgatcatggatccgggcagtggcggcggcggcggcggcggcggcggcggcgggagcagcagcggcagcagcagcagcgactcggcgcctgactgctgggaccaggcggacatggaagcccccgggccgggcccttgcggcggcggcggctccctggcggcggcggccgaggcccagcgggagaacctcagcgcggccttcagccggcaactcaacgtcaacgccaagcccttcgtgcccaacgtccacgccgccgagttcgtgccgtccttcctgcggggcccggcagcgccgccacccccagttggcggcgccgccaataaccacggagccggcagcggcgcgggaggccgtgcggcacctgtggaatcctctcaagaggaacagtcattgtgtgaaggttcaaattcagctgttagcatggaactttcagaacctattgaaaatggagagacagaaatgtctccagaagaatcatgggagcacaaagaagaaataagtgaagcagagccagggggtggttccttgggagatggaaggccgccagaggaaagtgcccatgaaatgatggaggaggaagaggaaatcccaaaacctaagtctgtggttgcaccgccaggtgctcctaagaaagagcatgtaaatgtagtattcattgggcacgtagatgctggcaagtcaaccattggaggacaaataatgtatttgactggaatggttgacaaaaggacgcttgaaaagtatgaaagagaagctaaagagaaaaacagagaaacttggtacttgtcttgggccttagacacaaatcaggaagaacgagacaagggtaaaacagtagaagtgggtcgtgcctattttgaaaccgaaaagaagcatttcacaattctagatgcccctggccacaagagttttgtcccaaatatgattggtggtgcctctcaagctgatttggctgtgctggtaatctcagccaggaaaggagagtttgaaactggatttgaaaaaggaggacagacaagagaacatgcaatgttggcaaagacagcaggtgtaaaacacctaattgtgctaattaataagatggatgatccaacagtaaattggagcaatgagagatatgaagaatgtaaggagaaactagtgccatttttgaaaaaagttggcttcaatcccaaaaaggacattcactttatgccctgctcaggacttactggagcaaatctcaaagagcagtcggatttctgtccttggtacattggattaccgtttattccatatctggataatttgccgaacttcaatagatcagttgatggaccaatcaggctgccaattgtggataagtacaaggatatgggcactgtggtcctgggaaagctggaatcaggatctatttgtaaaggccagcagcttgtgatgatgccaaacaagcacaacgtggaagttcttggaatactttccgatgatgtagagactgataccgtagccccaggtgaaaacctcaaaatcagactgaaaggaattgaagaagaggagattcttccagggtttatactttgtgatcctaataatctttgtcattctggacgcacatttgatgcccagatagtgattatagagcacaaatccatcatctgcccaggctataatgcggtgctgcatattcatacctgtattgaggaggtggaaataacagccttaatctgcttggtagacaaaaaatcaggagaaaaaagtaagacccgaccccgttttgtcaaacaagatcaagtatgcattgctcgcttaaggacagcaggaaccatctgccttgagacctttaaagacttccctcagatgggtcgtttcaccttaagagatgagggtaagaccattgcaattggaaaagttctgaaactggttccagagaaagactaagcattttcttgatgaccctgcacaatactgtgaggaaaattgactgcagaagcctacttcacaccgccttctcttattttctgcccattgataaacctctccccatattttgcaaagaggaaattcacagcaaaagtccacattatgtcagctttctcatattgagagctctgctatgccactgttgaatttttcccaagattcctgtccctagccctcacttcaaactctgcttccttggacagatttggcaatagctttgtaagtgatgtggacataattgcctacaataatgaaaacctacaggaatttttttatttttcattttccccttaggcatatttagtatttttcccccaggcagatcattctgagtgtgcgagtgtgtgtgcacatgttacaaaggcaactaccatgttaataaaatattcaatttgaaa

SEQ ID NO: 136134 - DNA, 1962 bp, Homo sapiens
  Payload ID: 6647
  Gene Symbol: GSPT1
  Gene Name: G1 to S phase transition 1
  Uniprot ID: P15170
  ENST ID: ENST00000563468
  CDS Start-End: 28-1527
tgtctaggttcaaattcagctgttagcatggaactttcagaacctattgtagaaaatggagagacagaaatgtctccagaagaatcatgggagcacaaagaagaaataagtgaagcagagccagggggtggttccttgggagatggaaggccgccagaggaaagtgcccatgaaatgatggaggaggaagaggaaatcccaaaacctaagtctgtggttgcaccgccaggtgctcctaagaaagagcatgtaaatgtagtattcattgggcacgtagatgctggcaagtcaaccattggaggacaaataatgtatttgactggaatggttgacaaaaggacgcttgaaaagtatgaaagagaagctaaagagaaaaacagagaaacttggtacttgtcttgggccttagacacaaatcaggaagaacgagacaagggtaaaacagtagaagtgggtcgtgcctattttgaaaccgaaaagaagcatttcacaattctagatgcccctggccacaagagttttgtcccaaatatgattggtggtgcctctcaagctgatttggctgtgctggtaatctcagccaggaaaggagagtttgaaactggatttgaaaaaggaggacagacaagagaacatgcaatgttggcaaagacagcaggtgtaaaacacctaattgtgctaattaataagatggatgatccaacagtaaattggagcaatgagagatatgaagaatgtaaggagaaactagtgccatttttgaaaaaagttggcttcaatcccaaaaaggacattcactttatgccctgctcaggacttactggagcaaatctcaaagagcagtcggatttctgtccttggtacattggattaccgtttattccatatctggataatttgccgaacttcaatagatcagttgatggaccaatcaggctgccaattgtggataagtacaaggatatgggcactgtggtcctgggaaagctggaatcaggatctatttgtaaaggccagcagcttgtgatgatgccaaacaagcacaacgtggaagttcttggaatactttccgatgatgtagagactgataccgtagccccaggtgaaaacctcaaaatcagactgaaaggaattgaagaagaggagattcttccagggtttatactttgtgatcctaataatctttgtcattctggacgcacatttgatgcccagatagtgattatagagcacaaatccatcatctgcccaggctataatgcggtgctgcatattcatacctgtattgaggaggtggaaataacagccttaatctgcttggtagacaaaaaatcaggagaaaaaagtaagacccgaccccgttttgtcaaacaagatcaagtatgcattgctcgcttaaggacagcaggaaccatctgccttgagacctttaaagacttccctcagatgggtcgtttcaccttaagagatgagggtaagaccattgcaattggaaaagttctgaaactggttccagagaaagactaagcattttcttgatgaccctgcacaatactgtgaggaaaattgactgcagaagcctacttcacaccgccttctcttattttctgcccattgataaacctctccccatattttgcaaagaggaaattcacagcaaaagtccacattatgtcagctttctcatattgagagctctgctatgccactgttgaatttttcccaagattcctgtccctagccctcacttcaaactctgcttccttggacagatttggcaatagctttgtaagtgatgtggacataattgcctacaataatgaaaacctacaggaatttttttatttttcattttccccttaggcatatttagtatttttcccccaggcagatcattctgagtgtgcgagtgtgtgtgcacatgttacaaaggcaactaccatgttaataaaatattcaatt

SEQ ID NO: 136135 - DNA, 466 bp, Homo sapiens
  Payload ID: 6647
  Gene Symbol: GSPT1
  Gene Name: G1 to S phase transition 1
  ENST ID: ENST00000562169
  CDS Start-End: 185-466
gcggggcggcccgcggcggtggccgggcggggagcggacagcgggcagcgcgcccaaagacccggacccgagtgccgcccctccgcgcccctgccctgctctggagtccgcagttacccacttgagatgggaaccgtatggaacggagtgggggccgcggcggatccctgccacgaggcgcagaatgaggacagatggagccaggagtcatttggcacctgtggaatcctctcaagaggaacagtcattgtgtgaaggttcaaattcagctgttagcatggaactttcagaacctattgaaaatggagagacagaaatgtctccagaagaatcatgggagcacaaagaagaaataagtgaagcagagccagggggtggttccttgggagatggaaggccgccagaggaaagtgcccatgaaatgatggaggaggaagaggaaatcccaaaacctaagtctgtggtt

SEQ ID NO: 136136 - DNA, 1864 bp, Homo sapiens
  Payload ID: 6647
  Gene Symbol: GSPT1
  Gene Name: G1 to S phase transition 1
  ENST ID: ENST00000565267
  CDS Start-End: 1-1427
gttcaaattcagctgttagcatggaactttcagaacctattgaaaatggagagacagaaatgtctccagaagaatcatgggagcacaaagaagaaataagtgaagcagagccagggggtggttccttgggagatggaaggccgccagaggaaagtgcccatgaaatgatggaggaggaagaggaaatcccaaaacctaagtctgtggttgcaccgccaggtgctcctaagaaagagcatgtaaatgtagtattcattgggcacgtagatgctggcaagtcaaccattggaggacaaataatgtatttgactggaatggttgacaaaaggacgcttgaaaagtatgaaagagaagctaaagagaaaaacagagaaacttggtacttgtcttgggccttagacacaaatcaggaagaacgagacaagggtaaaacagtagaagtgggtcgtgcctattttgaaaccgaaaagaagcatttcacaattctagatgcccctggccacaagagttttgtcccaaatatgattggtggtgcctctcaagctgatttggctgtgctggtaatctcagccaggaaaggagagtttgaaactggatttgaaaaaggaggacagacaagagaacatgcaatgttggcaaagacagcaggtgtaaaacacctaattgtgctaattaataagatggatgatccaacagtaaattggagcaatgagagatatgaagaatgtaaggagaaactagtgccatttttgaaaaaagttggcttcaatcccaaaaaggacattcactttatgccctgctcaggacttactggagcaaatctcaaagagcagtcggatttctgtccttggtacattggattaccgtttattccatatctggataatttgccgaacttcaatagatcagttgatggaccaatcaggctgccaattgtggataagtacaaggatatgggcactgtggtcctgggaaagctggaatcaggatctatttgtaaaggccagcagcttgtgatgatgccaaacaagcacaacgtggaagttcttggaatactttccgatgatgtagagactgataccgtagccccaggtgaaaacctcaaaatcagactgaaaggaattgaagaagaggagattcttccagggtttatactttgtgatcctaataatctttgtcattctggacgcacatttgatgcccaggccttaatctgcttggtagacaaaaaatcaggagaaaaaagtaagacccgaccccgttttgtcaaacaagatcaagtatgcattgctcgcttaaggacagcaggaaccatctgccttgagacctttaaagacttccctcagatgggtcgtttcaccttaagagatgagggtaagaccattgcaattggaaaagttctgaaactggttccagagaaagactaagcattttcttgatgaccctgcacaatactgtgaggaaaattgactgcagaagcctacttcacaccgccttctcttattttctgcccattgataaacctctccccatattttgcaaagaggaaattcacagcaaaagtccacattatgtcagctttctcatattgagagctctgctatgccactgttgaatttttcccaagattcctgtccctagccctcacttcaaactctgcttccttggacagatttggcaatagctttgtaagtgatgtggacataattgcctacaataatgaaaacctacaggaatttttttatttttcattttccccttaggcatatttagtatttttcccccaggcagatcattctgagtgtgcgagtgtgtgtgcacatgttacaaaggcaactaccatgttaataaaatattcaatttg

SEQ ID NO: 136137 - DNA, 790 bp, Homo sapiens
  Payload ID: 6647
  Gene Symbol: GSPT1
  Gene Name: G1 to S phase transition 1
  ENST ID: ENST00000568849
  CDS Start-End: 192-790
ggccttcgcggggcggcccgcggcggtggccgggcggggagcggacagcgggcagcgcgcccaaagacccggacccgagtgccgcccctccgcgcccctgccctgctctggagtccgcagttacccacttgagatgggaaccgtatggaacggagtgggggccgcggcggatccctgccacgaggcgcagaatgaggacagatggagccaggagtcatttggcacctgtggaatcctctcaagaggaacagtcattgtgtgaaggttcaaattcagctgttagcatggaactttcagaacctattgtagaaaatggagagacagaaatgtctccagaagaatcatgggagcacaaagaagaaataagtgaagcagagccagggggtggttccttgggagatggaaggccgccagaggaaagtgcccatgaaatgatggaggaggaagaggaaatcccaaaacctaagtctgtggttgcaccgccaggtgctcctaagaaagagcatgtaaatgtagtattcattgggcacgtagatgctggcaagtcaaccattggaggacaaataatgtatttgactggaatggttgacaaaaggacgcttgaaaagtatgaaagagaagctaaagagaaaaacagagaaacttggtacttgtcttgggccttagacacaaatcaggaagaacgagacaagggtaaaacagtagaagtgggtcgtgcctattttgaaaccgaaaagaagcatttcacaattctagatgcccctggccacaagagttttgtcccaaatat

SEQ ID NO: 136138 - DNA, 2802 bp, Homo sapiens
  Payload ID: 6648
  Gene Symbol: GSPT2
  Gene Name: G1 to S phase transition 2
  Uniprot ID: Q8IYD1
  ENST ID: ENST00000340438
  CDS Start-End: 197-2083
gttgagccgccatatctgctgctgccgccgcagttgcgaatgcagcatcggcgcttagctgcctccgcggtgcagctaaggttcgtgtcgctaccccttggcccttcgctcttgctgccttaaccccgccggcggagcccgctcttctggcctgttgagcccgctccctcactgccacacagcaagttccgagaccatggattcgggcagcagcagcagcgactcggcgcccgattgctgggaccaggtggacatggaatccccggggtcggccccgagcggggatggagtctcctctgcggtggccgaggcccagcgcgagcccctcagctcggctttcagccgtaagctcaacgtcaacgccaagcccttcgtgcctaacgtacacgccgcggagttcgtgccgtccttcctgcggggcccgactcagccgcccaccctcccggccggctccggcagcaacgatgaaacctgcaccggcgcgggataccctcaaggtaaaaggatgggacggggggcacctgtggaaccttcccgagaggaaccgttagtgtcgcttgaaggttccaattcagccgttaccatggaactttcagaacctgttgtagaaaatggagaggtggaaatggccctagaagaatcatgggagcacagtaaagaagtaagtgaagccgagcctgggggtggttcctcgggagattcagggcccccagaagaaagtggccaggaaatgatggaggaaaaagaggaaataagaaaatccaaatctgtgatcgtaccctcaggtgcacctaagaaagaacacgtaaatgtagtattcattggccatgtagacgctggcaagtcaaccatcggaggacagataatgtttttgactggaatggttgacaaaagaacactggagaaatatgaaagagaagctaaggaaaaaaacagagaaacctggtatttgtcctgggccttagatacaaatcaggaggaacgagacaagggtaaaacagtcgaagtgggtcgtgcctattttgaaacagaaaggaaacatttcacaattttagatgcccctggccacaagagttttgtcccaaatatgattggtggtgcttctcaagctgatttggctgtgctggtcatctctgccaggaaaggagagtttgaaactggatttgaaaaaggtggacagacaagagaacatgcgatgttggcaaaaacggcaggggtaaaacatttaatagtgcttattaataagatggatgatcccacagtaaattggagcatcgagagatatgaagaatgtaaagaaaaactggtgccctttttgaaaaaagtaggcttcagtccaaaaaaggacattcactttatgccctgctcaggactgaccggagcaaatattaaagagcagtcagatttctgcccttggtacactggattaccatttattccgtatttggataacttgccaaacttcaacagatcaattgatggaccaataagactgccaattgtggataagtacaaagatatgggcactgtggtcctgggaaagctggaatccgggtccatttttaaaggccagcagctcgtgatgatgccaaacaagcacaatgtagaagttcttggaatactttctgatgatactgaaactgattttgtagccccaggtgaaaacctcaaaatcagactgaagggaattgaagaagaagagattcttccaggattcatactttgtgatcctagtaacctctgccattctggacgcacgtttgatgttcagatagtgattattgagcacaaatccatcatctgcccaggttataatgcggtgctgcacattcatacttgtattgaggaagttgagataacagcgttaatctccttggtagacaaaaaatcaggagaaaaaagtaagacacgaccccgcttcgtgaaacaagatcaagtatgcattgctcgtttaaggacagcaggaaccatctgcctcgagacgttcaaagattttcctcagatgggtcgttttactttaagagatgagggtaagaccattgcaattggaaaagttctgaaattggtcccagagaaggactaagcaattttcttgatgcctctgcaagatactgtgaggagaattgacagcaaaagttcaccacctactcttatttactgcccattgattgacttttcttcatattttgcaaagagaaatttcacagcaaaaattcatgttttgtcagctttctcatgttgagatctgttatgtcactgatgaatttaccctcaagtttccttcctctgtaccactctgcttccttggacaatatcagtaatagctttgtaagtgatgtggacgtaattgcctacagtaatgaaaaattaatgtactttaatttttcattttcttttaggatatttagaccacccttgttccacgcaaaccagagtgtgtcagtgtttgtgtgtgtgttaaaatgataactaacatgtgaataaaatactccatttgaaactcttcggttatttgaaatgcttttgaataatgtttaaatgtcattatgtaatgctattcaattagctttattactttctcaaatagttgaatatgttctatcacttaaaaacttaaaaactcttcaccacttactgttttaagtgaggaatttacaaacaatgcataagtgtgtattaaaggaataattttaattttgagaaaaaaacgtatgttaaggctcttcccagtgggctttgttttctctgtccaagtccagtcaataaaggagctcttctgcttccccacttgtgatttgaaaa

SEQ ID NO: 136139 - DNA, 3112 bp, Homo sapiens
  Payload ID: 6649
  Gene Symbol: GTSE1
  Gene Name: G-2 and S-phase expressed 1
  Uniprot ID: Q9NYZ3
  ENST ID: ENST00000454366
  CDS Start-End: 213-2432
attcgctgcgctgaagcagtgcgcatgcgcactggacgcttcttaccagcgtcctgactacaatacccaggacgcacccagcccgccgcctctcggagcccttttcaaaccgaccaatcggcaacccgcgtctcccggcgccgcgtttaaatccgtgccggaggcgcgtcctgcatcgtctgccgctttggtgacttctgacagctctctccatggaaggaggcggcggccgcgatgagccttcagcctgccgggcaggggacgtgaacatggatgaccctaagaaggaagacattcttcttttggccgatgaaaaatttgacttcgatctttcattgtcttcttcgagtgcaaatgaagatgatgaagtcttcttcggaccctttggacataaagaaagatgtattgctgccagcttggaattaaataatccggttcccgaacagcctccgttgcccacatctgagagtccctttgcctggagccctctggccggggagaagttcgtggaggtgtacaaagaagctcacttactggctttacacattgagagcagcagccggaaccaggcagcccaagctgccaagcctgaagaccctcggagccagggcgtggaaagattcatacaggagtcaaaattaaaaataaacctctttgagaaagaaaaggaaatgaagaaaagccccacgtctcttaaaagggagacatactacctgtcagacagccccttgctggggccccctgtgggtgagcctcggctcttggcctcctccccggccctgcccagctctggtgcccaggcccgcctcacccgggcgccggggcctccgcactctgctcatgctttgcccagggaatcatgcactgctcatgctgcaagtcaggcagcgactcagaggaagcccgggaccaaattgctgctgcctcgagcggcctctgttagaggaagaagcatccctggggctgcggagaagcccaagaaagagattccagctagtccttccaggacaaaaatcccagctgagaaggaatcccaccgggatgttctccctgacaaacctgccccgggtgctgtcaatgtgccggccgccggaagccacttgggccagggcaagcgggcgatccctgttccaaacaagttggggctgaagaagaccctgttaaaagcacccggctctaccagcaatctcgcaaggaagtcctcctcggggcctgtttggagcggggcatccagtgcgtgcacatccccagcagtgggcaaagctaaatcaagtgaatttgcaagtattcctgcaaatagctcccggcctctgtcaaacatcagcaagtcaggcagaatgggacccgccatgctgcggccagctctgcctgcaggccctgtgggggcatcctcctggcaggccaagcgggtcgatgtttctgagctggcagcggagcagctcacggcacccccctcagcatcccccacccaaccccagactccggaaggtggcggccagtggctgaactccagttgcgcttggtcagaatcttctcaattgaataagactagaagtatcagacggcgagattcctgtctaaattccaagacaaaggttatgcctactcctacaaatcaatttaaaattcctaagttttctattggtgactccccggacagctcaacaccaaagctttcgcgggcacagcggccgcagtcgtgcacgtcagttggcagggtcactgtccacagcaccccggttagacgctcatctgggccagcaccacaaagcctgctgagcgcatggcgtgtgtcagccttgcccacacccgccagccggcgctgctctggccttccaccgatgacccccaaaacgatgcccagggccgtgggctctcccctgtgtgtgccagctcggagacgttcctctgagccccgcaagaactctgcaatgagaactgaaccaacaagggagagcaacagaaagacagattccaggctggtggatgtgtcccctgacaggggttctcctccttcccgtgtgcctcaggcacttaacttttctccagaggaaagcgattctactttctccaaaagtactgccacagaagtagctcgggaggaagccaagccgggtggagatgcagcccctagtgaggctcttcttgtagatatcaaactggaaccactcgcggtcactccagatgctgcaagccagcccctcattgaccttcctctcatcgacttctgcgataccccagaagcacacgtggctgtaggatctgaaagcaggcctctgatcgacctcatgacaaacactccagacatgaataaaaatgtggccaaaccttcaccggtggtgggacagctcatagacctgagctcccctctgatccagctgagccctgaggctgacaaggagaacgtggattccccactcctcaagttctaagccgaaccaaatcctttgccttgaaagaacagccctaaagtggttttcaaccctcagaaacaagctttaggctggtcgcagtggcttacacttgtaaccctagaacttgggaggctgaggtgggcggattacttgagcccaggagttcgggaccagcctgggaaatatagtgaaactcctgtccctacaaaaaatacaaaaattagccgggtgtggtagtgcatgcctgtagtcccagctacttgggaggctgaagtgggaggatggcctgagctcaaggagatgcaggctgcagtgggctgtgattgtgccactgcactccagcctgggcaccaatgtgagaacctgtcttggaaaaaaaaaaaaagaaacatgttttagtagaagttttatttgaaaaagaaaaataagcataaatatattcccagtgctggagagggtgggctgagggactggggccagcacggaccacccaaggcctctgcttcccgccgccaccctcctcgctgccattctctgggctggaatgtgaagcctcagtcactctaaatgaagaattttcttttgaatgttttgtatgtaaaatagcaagtggctatttttaaagttaagtttgtataaatagttagatattctagatttacattaaattgtaaaataaatggacttattgaagcata

SEQ ID NO: 136140 - DNA, 5804 bp, Homo sapiens
  Payload ID: 6650
  Gene Symbol: G2E3
  Gene Name: G2/M-phase specific E3 ubiquitin protein ligase
  Uniprot ID: Q7L622
  ENST ID: ENST00000206595
  CDS Start-End: 155-2275
gaccgctctttccgggtttgcgagcggaagtggacgaatttgaatcctgtgggccgttgaatgtggctgctcgcggtcggcgtgccccgacgtacagcgggccgggaaaagtggcactgaggctctggaacttctgcccagctctccttgtaaaatgaatgaaagtaaacctggtgactcacagaaccttgcttgtgttttctgtcgaaaacatgatgactgtcctaataaatacggagaaaagaaaactaaggagaaatggaatctcactgtacattactactgtttgttgatgtcaagtggaatttggcagagaggcaaagaagaagaaggagtttatggttttctaatagaagatatcaggaaggaagtgaatagagcttctaaactgaaatgctgtgtttgcaagaaaaatggtgcttcaattggatgtgttgcaccccgatgtaaacgaagttatcatttcccatgtggacttcagagagaatgtattttccagtttactggcaattttgcgtcattttgttgggaccatcgacctgttcaaataattacatctaataattatagagagtccttaccatgcaccatttgcttggaatttattgagcctattccaagttataacatattacgaagtccttgttgtaagaacgcttggtttcatagagactgtttacaggttcaagcaataaatgcgggagtgtttttctttaggtgtacaatatgcaataatagtgacatctttcagaaagagatgttgagaatgggaattcatattcctgaaaaagatgcttcctgggaattagaggaaaacgcttatcaagagcttctgcagcactatgagcgttgtgatgttcgaagatgtcgttgcaaagaagggcgagactataatgcacctgatagcaaatgggaaataaagcgctgtcagtgttgtggttccagtggcacacatttagcctgctcctcattacggtcatgggagcaaaattgggagtgtttggaatgtaggggtattatctacaattcaggagagttccaaaaagccaaaaaacatgtattacccaattctaataatgtggggattacagattgtttgttggaagagtcatcacctaaattacccagacagtcacctggatcccagagtaaagatctactgaggcaaggcagcaaatttagaagaaatgtatcaacactattaatagagttaggattccaaattaaaaaaaaaactaaaagattgtatatcaacaaagccaatatctggaatagtgccttagatgcattcagaaatcgaaactttaatccttcatatgcaattgaagtagcatatgttattgaaaatgataattttggaagtgagcatcctggatcaaagcaagaatttctgagtctcttaatgcaacatcttgagaactcatcattgtttgaagggtccttgtcaaagaacttgtctctaaattctcaagctctgaaagagaatctttactatgaagctggcaaaatgcttgccatttctttagttcacggtggtccttcacctggtttcttttctaaaaccttgtttaactgccttgtttatggaccagaaaatacccagccaattttagatgatgtttcagactttgatgtggcacagattataatcaggataaatactgcaacaactgtagctgacttaaagtcaataataaatgaatgctataactaccttgagttaattggatgtctcagacttataacgacattaagtgataaatatatgttagtaaaagacatacttggctaccatgtaattcagagagtccacacaccctttgaaagttttaagcagggtctgaaaacccttggtgttttggagaaaattcaggcttatccagaagcattttgtagcatcctgtgtcataaacctgagagtctttctgcaaaaatccttagtgagctttttacagtacacacattacctgatgtgaaagctttggggttttggaacagttacttacaggctgttgaagatggtaaatctacaacaacaatggaagacattcttatttttgcaactggttgcagttccattcctccagctggatttaaacccactccttcaattgagtgtctgcatgtggattttcctgttggaaacaagtgtaataactgtttagcaattcccatcaccaatacatataaagagtttcaagaaaatatggacttcaccataagaaacactctaagactagaaaaggaagaaagttctcattacattggacattaaaatgtttccttgaacaaagagaagcttctttaaaagctgctattgataactctcttttatttcactaaccttttcatcatcactttgaacaaactagttagcttcttgacctaataaaatttatgatatgaatataaaggaatattatagccacttaggctaaaaaaaggttttttttgttaaagcatactagtcaaaattggtgataatttctcattttcttgatatagatacttcataaacctcaatataaatactctcaaaatggttgtatggattttatttaggtatggtagcatggttaataaaagtaaaaactgttttactcacattttttgtaaattaggattacatatagaatgccacaatttctctaggtttattcaattttcaaattattcctcattttattttaaagcattaaatagaaaagctaattggttaaattttgttatataaatcagagtcatatattctgggatttgtgttactatgcatacttttctaggatgtcaccaaattagttgtttaaaatgtttttagattactgatttatattaagatgacccacactgcaattagattatgcctagtgggaagtattatataaaaagcagaattaagctgggcacatgtgcttgtaatctcagttataagggaggctgaggtgggagaatcgagatactcagccagcctggcaatgtagcaaagactccatctcaaaaaaaaaaacagaattgcacaaattttctggaatctatggacattccatgagcttaaacacttttgaggtggataacatttagttgaaaatacctaagaaagtgtgtcttctttaaagccttggctttaatcatgggaaattgttgttgttgttgttgttgtttgtatcctatgtttggtattctgtatgtctgatccataatcattttagatatttgaatgatctctgtggattggtaggtttggccatttgaccattatttattatcaagttggttgtatgctaaggtaagttgacgccatagcattatacagttatcttcattgctcttgaatgatatctgttatataagcaatgtataaataaagtaaaaaggatagaatgaaaaacccattctaatgtcaccactcagagataagtaccgtatttctgtgtatccttctataaactctttacttctgtttcctttattttttaactttaataatgctactaaaagacaatacctaaaagtaactgtactaacaaagtgctaacaatgtgaaaatatatagtcccatagtcatgtccccatatttatactcccacagaagaaaaaattggaaaacaaagtctgatgtccttaatctattaacatatttaaatgatataatggttcagttttccatgaaagtaaatcattatgggaagtaaaatgttttaaccatatttttcttaatacacaaagcaggtgtcagctgttgtattctcacccttcttaagaaaaatcattacattattgatattttttaagtaacagaatagatttgaaagagataatatatctcttaataccaaaggaaaactaaaacataattctagtgtacttttctttgttccctcatgtctttttcaatctgtacactaacatacctagcaaatttgttttactttaacttgaaatatttaagaacattaaacaagacatttctttggctttggttgaatttttttgtctcaccaatagtaattgaaagatcaattatcaaagagtttgaatagctaatataaaccccaaagtcaccatacagtttttattccaaatatgttgataaaaagatatttgtttctttatccaccttatttttattacagctaaaaaccaatacaaaccaataaaacctagttaaagctattttctggtttttagttgcaattaatttcccctagggtagaaattaaagctgattaagtcacacacacatactttgttggggtgggggtggcaggtggagaggcagtgtacttgggttagctacaattaaaaacagtatttcaattcctcatttgacttattttatatatagacagggccttagtgataagatggtgtaaataatttaggatattcatgttttaaagtgaagcataaatatttattttgcaaaatgttttctagtttgaaggatgttccattattaccatttttagattaatctgtatggtcaaggaatatcagagaaacctgtaggttatttattttctgcagtgtcattttgtcaaatggttggtattataattgttcttttcttattaattttataaccagtgcataattcttacattagattttaaaaaagaattatgctataaatctttataaatgtgtacatatatttcttaaatattgcaattgcctaaatgttgtatattttaaggctgttttctcttgctcttaatgttgaggaaaactataaattgatctataatgcatctactgttaatggttttggttagtttgatattcattgtttttaaacactttccaatatggaaactttaacaccttttatacaattctctactattcaagatattctttaaaatatctcaccagaaacttacaattttatactttgtaatttttagtttctgtaatttgaggaagtgactttttttgtttgggttaagtaaaaagcctttgattgattaccagcatgagaattcaccttggtttctattttatgcatttgtaaatttttcccctaattatatggaagctattggaacttttgtattcagtgctaaatactaagtcaaggggagtatattaggtaagttttttcagtgactgtgcctttagcattcagtcattataagaaaatgatcagaacaaaatcattacattataaacatgtaattcttttatatagtgattatcatgtactgcattgttactttaaaataagctattaaactagtttttatggttcaagtaatgcaatacaaagtttcatgcttcaagtaatgcaatacaaaacataacccatttaatgatgaattacttgaatgtatattatctgtggtttaggaaaatttggattgtcttgaagagactcagttttcaagttctgattttgaccattatctcttctaattcataaacatatcccagtacctacactatgccaggtattatgctaggtgatcgtttatatgtcagcctatttcccccccttttaaagactgccagattaaccaaaaagcgtgacatttataacaatgttttataaataaataaatgtgtttatgccactaaaggtaaactgcctatttaaactaagtaattttttgggatttaataagattaagattctgacgaaactgaaagatacaagattcctttactctccacatttgagagatcctataagcaagcagttagtgtctgacacccaggaacctatagaaatgagggaatctgtgttaaaactatgtatcctctaatgtaaaatagcttaccagaataaattatttaagccaaaa

SEQ ID NO: 136141 - DNA, 2334 bp, Homo sapiens
  Payload ID: 6650
  Gene Symbol: G2E3
  Gene Name: G2/M-phase specific E3 ubiquitin protein ligase
  ENST ID: ENST00000438909
  CDS Start-End: 217-2199
gaatttgaatcctgtgggccgttgaatgtggctgctcgcggtcggcgtgccccgacgtacagcgggccgggaaaagtggcactgaggctctggaacttctgcccagctctccttgcttgtgttttctgtcgaaaacatgatgactgtcctaataaatacggagaaaagaaaactaaggagaaatggaatctcactgtacattactactgtttgttgatgtcaagtggaatttggcagagaggcaaagaagaagaaggagtttatggttttctaatagaagatatcaggaaggaagtgaatagagcttctaaactgaaatgctgtgtttgcaagaaaaatggtgcttcaattggatgtgttgcaccccgatgtaaacgaagttatcatttcccatgtggacttcagagagaatgtattttccagtttactggcaattttgcgtcattttgttgggaccatcgacctgttcaaataattacatctaataattatagagagtccttaccatgcaccatttgcttggaatttattgagcctattccaagttataacatattacgaagtccttgttgtaagaacgcttggtttcatagagactgtttacaggttcaagcaataaatgcgggagtgtttttctttaggtgtacaatatgcaataatagtgacatctttcagaaagagatgttgagaatgggaattcatattcctgaaaaagatgcttcctgggaattagaggaaaacgcttatcaagagcttctgcagcactatgagcgttgtgatgttcgaagatgtcgttgcaaagaagggcgagactataatgcacctgatagcaaatgggaaataaagcgctgtcagtgttgtggttccagtggcacacatttagcctgctcctcattacggtcatgggagcaaaattgggagtgtttggaatgtaggggtattatctacaattcaggagagttccaaaaagccaaaaaacatgtattacccaattctaataatgtggggattacagattgtttgttggaagagtcatcacctaaattacccagacagtcacctggatcccagagtaaagatctactgaggcaaggcagcaaatttagaagaaatgtatcaacactattaatagagttaggattccaaattaaaaaaaaaactaaaagattgtatatcaacaaagccaatatctggaatagtgccttagatgcattcagaaatcgaaactttaatccttcatatgcaattgaagtagcatatgttattgaaaatgataattttggaagtgagcatcctggatcaaagcaagaatttctgagtctcttaatgcaacatcttgagaactcatcattgtttgaagggtccttgtcaaagaacttgtctctaaattctcaagctctgaaagagaatctttactatgaagctggcaaaatgcttgccatttctttagttcacggtggtccttcacctggtttcttttctaaaaccttgtttaactgccttgtttatggaccagaaaatacccagccaattttagatgatgtttcagactttgatgtggcacagattataatcaggataaatactgcaacaactgtagctgacttaaagtcaataataaatgaatgctataactaccttgagttaattggatgtctcagacttataacgacattaagtgataaatatatgttagtaaaagacatacttggctaccatgtaattcagagagtccacacaccctttgaaagttttaagcagggtctgaaaacccttggtgttttggagaaaattcaggcttatccagaagcattttgtagcatcctgtgtcataaacctgagagtctttctgcaaaaatccttagtgagctttttacagtacacacattacctgatgtgaaagctttggggttttggaacagttacttacaggctgttgaagatggtaaatctacaacaacaatggaagacattcttatttttgcaactggttgcagttccattcctccagctggatttaaacccactccttcaattgagtgtctgcatgtggattttcctgttggaaacaagtgtaataactgtttagcaattcccatcaccaatacatataaagagtttcaagaaaatatggacttcaccataagaaacactctaagactagaaaaggaagaaagttctcattacattggacattaaaatgtttccttgaacaaagagaagcttctttaaaagctgctattgataactctcttttatttcactaaccttttcatcatcactttgaacaaactagttagcttcttgacctaataaaatttatgatatgaatat

SEQ ID NO: 136142 - DNA, 640 bp, Homo sapiens
  Payload ID: 6650
  Gene Symbol: G2E3
  Gene Name: G2/M-phase specific E3 ubiquitin protein ligase
  ENST ID: ENST00000548934
  CDS Start-End: 1-304
atgtcgttgcaaagaagggcgagactataatgcacctgatagcaaatgggaaataaagcgctgtcagtgttgtggttccagtggcacacatttagcctgctcctcattacggtcatgggagcaaaattgggagtgtttggaatgtaggggtattatctacaattcaggagagttccaaaaagccaaaaaacatgtattacccaattctaataatgtggggattacagattgtttgttggaagagtcatcacctaaattacccagacagtcacctggatcccagagtaaagatctactgagataaatactgcaacaactgtagctgacttaaagtcaataataaatgaatgctataactaccttgagttaattggatgtctcagacttataacgacattaagtgataaatatatgttagtaaaagacatacttggctaccatgtaattcagagagtccacacaccctttgaaagttttaagcagggtctgaaaacccttggtgttttggagaaaattcaggcttatccagaagcattttgtagcatcctgtgtcataaacctgagagtctttctgcaaaaatccttagtgagctttttacagtacacacattacctgatgtgaaagctttggggttttgga

SEQ ID NO: 136143 - DNA, 623 bp, Homo sapiens
  Payload ID: 6650
  Gene Symbol: G2E3
  Gene Name: G2/M-phase specific E3 ubiquitin protein ligase
  ENST ID: ENST00000547532
  CDS Start-End: 96-623
gcactaagcacatctacaatcaaggagaggggcaggctttaccttttgaaggaagaagtatgaaagtgtatcactgactgatcaagtagagtaaaatgaatgaaagtaaacctggtgactcacagaaccttgcttgtgttttctgtcgaaaacatgatgactgtcctaataaatacggagaaaagaaaactaaggagaaatggaatctcactgtacattactactgtttgttgatgtcaagtggaatttggcagagaggcaaagaagaagaaggagtttatggttttctaatagaagatatcaggaaggaagtgaatagagcttctaaactgaaatgctgtgtttgcaagaaaaatggtgcttcaattggatgtgttgcaccccgatgtaaacgaagttatcatttcccatgtggacttcagagagaatgtattttccagtttactggcaattttgcgtcattttgttgggaccatcgacctgttcaaataattacatctaataattatagagagtccttaccatgcaccatttgcttggaatttattgagcctattccaagttataacatattacgaagtccttgttgtaagaacgcttggtttcatagagactgtttacag

SEQ ID NO: 136144 - DNA, 367 bp, Homo sapiens
  Payload ID: 6650
  Gene Symbol: G2E3
  Gene Name: G2/M-phase specific E3 ubiquitin protein ligase
  ENST ID: ENST00000552515
  CDS Start-End: 1-367
cgaagtccttgttgtaagaacgcttggtttcatagagactgtttacagcaaatgggaaataaagcgctgtcagtgttgtggttccagtggcacacatttagcctgctcctcattacggtcatgggagcaaaattgggagtgtttggaatgtaggggtattatctacaattcaggagagttccaaaaagccaaaaaacatgtattacccaattctaataatgtggggattacagattgtttgttggaagagtcatcacctaaattacccagacagtcacctggatcccagagtaaagatctactgaggcaaggcagcaaatttagaagaaatgtatcaacactattaatagagttaggattccaaatt

SEQ ID NO: 136145 - DNA, 565 bp, Homo sapiens
  Payload ID: 6650
  Gene Symbol: G2E3
  Gene Name: G2/M-phase specific E3 ubiquitin protein ligase
  ENST ID: ENST00000550944
  CDS Start-End: 204-565
gaatttgaatcctgtgggccgttgaatgtggctgctcgcggtcggcgtgccccgacgtacagcgggccgggaaaagtggcactgaggctctggaacttctgcccagctctccttgctaaaaaacattcccttcaatttaaaaaatgttcccgactcttaacaccccagttgagaactactgatcttagatgtattaaagtaaaatgaatgaaagtaaacctggtgactcacagaaccttgcttgtgttttctgtcgaaaacatgatgactgtcctaataaatacggagaaaagaaaactaaggagaaatggaatctcactgtacattactactgtttgttgatgtcaagtggaatttggcagagaggcaaagaagaagaaggagtttatggttttctaatagaagatatcaggaaggaagtgaatagagcttctaaactgaaatgctgtgtttgcaagaaaaatggtgcttcaattggatgtgttgcaccccgatgtaaacgaagttatcatttcccatgtggacttcagagagaatgtattttccagtttactggcaattttgc

SEQ ID NO: 136146 - DNA, 537 bp, Homo sapiens
  Payload ID: 6650
  Gene Symbol: G2E3
  Gene Name: G2/M-phase specific E3 ubiquitin protein ligase
  ENST ID: ENST00000554714
  CDS Start-End: 145-537
aatagccaatagttatcttttctgctcctctccctcctcccaccctcctgcgtcagctaaaaaacattcccttcaatttaaaaaatgttcccgactcttaacaccccagttgagaactactgatcttagatgtattaaagtaaaatgaatgaaagtaaacctggtgactcacagaaccttgcttgtgttttctgtcgaaaacatgatgactgtcctaataaatacggagaaaagaaaactaaggagaaatggaatctcactgtacattactactgtttgttgatgtcaagtggaatttggcagagaggcaaagaagaagaaggagtttatggttttctaatagaagatatcaggaaggaagtgaatagagcttctaaactgaaatgctgtgtttgcaagaaaaatggtgcttcaattggatgtgttgcaccccgatgtaaacgaagttatcatttcccatgtggacttcagagagaatgtattttccagtttactggcaattttgcgtcattttgttgggaccatcgacctgttcaa

SEQ ID NO: 136147 - DNA, 3796 bp, Homo sapiens
  Payload ID: 6650
  Gene Symbol: G2E3
  Gene Name: G2/M-phase specific E3 ubiquitin protein ligase
  ENST ID: ENST00000553504
  CDS Start-End: 1448-3658
agagagagaagcaggaccgtggggtgggagagggtgtcaggaggccggacgtcgcagccggggcctcgcagtgcttttggggacgtctggtgctggggcccggcctggagactaagggaattcggggcactgggggcgtttgctggaccagcgctctcgacggttgcgcacgccagccagctctcagtgttgaggattcggaggccctgccggtcccccgcgagtaaaccttgtttatacgcatcctccgtggctttttttaaacccgtagtttattatttccaccaattcggctcgaatgctgaaattttaacagtagttaaatctcactgtgaaggcgttgccacgtttaaacaaatctcttttaatgaaagatggaaggttggggcgggtttagaatgaaaagatgctctacgtggctccgcgttcctcctgagagagatacccgggcaaccttgattaactctggactgcagggaagtgacagtctttgaaatgcctgagtgggatttaaactgaaattcgagtgtcctttgtatttaaaacccggatatttttctttcacggttgacatttttcatgtaccgcaaaaatccgagactcctatttaaaccggctgtggtaacagcggtggtgattaactagggtcttagtttgcaaacaatagggataaggtttagttccaccgccctgccttttcgcctccctcattcattggccaactgggttattatggagtctttttggaagtaatccactaatgctttgagcatctgtttctttgggttttattgttttgggcttttttttttttaatttttaatgatgaactatctgaaatatggaactctgtctaacccagtagtaaagtcatgccttctggaatggtttaaaagtgtgccataaatgtaaactataaatgggaactttaaatgtgtacaagttttacatctttattaaaaatcgtcagttttgtgtagcttaatacgaaaagatattttaagttccttttaaggttttaacaccaggatattgtaccatttaaatgtataaatatatttttaaaagtaggacttcataataatcagaataaaaacattccttcatccagtgctggctattccagcacccccattcttcctgctattgaacttttaagtgttagccaggaagaatagacttaaatactcggtgtttaggatagttaaaatatgagcatttttcatatagtgtctttgtaacagagacattggctatacttctctaagcctttctgctcatttcatatgtgctgtcaacaaatggtaatttttaaaaattgatcgctatatcctaatctctttatttttttctacctgaattattttcattggatttttgctctttcttaaatcagtgagtttcagaatttattgtgtatacactaccttgaaggatttgttcaacaatgctgattcctgcacttcagatctcagattctgaatcagtaggtctggaggatggcattgaacagtctgcatatttaactgaaagtaaaatgaatgaaagtaaacctggtgactcacagaaccttgcttgtgttttctgtcgaaaacatgatgactgtcctaataaatacggagaaaagaaaactaaggagaaatggaatctcactgtacattactactgtttgttgatgtcaagtggaatttggcagagaggcaaagaagaagaaggagtttatggttttctaatagaagatatcaggaaggaagtgaatagagcttctaaactgaaatgctgtgtttgcaagaaaaatggtgcttcaattggatgtgttgcaccccgatgtaaacgaagttatcatttcccatgtggacttcagagagaatgtattttccagtttactggcaattttgcgtcattttgttgggaccatcgacctgttcaaataattacatctaataattatagagagtccttaccatgcaccatttgcttggaatttattgagcctattccaagttataacatattacgaagtccttgttgtaagaacgcttggtttcatagagactgtttacaggttcaagcaataaatgcgggagtgtttttctttaggtgtacaatatgcaataatagtgacatctttcagaaagagatgttgagaatgggaattcatattcctgaaaaagatgcttcctgggaattagaggaaaacgcttatcaagagcttctgcagcactatgagcgttgtgatgttcgaagatgtcgttgcaaagaagggcgagactataatgcacctgatagcaaatgggaaataaagcgctgtcagtgttgtggttccagtggcacacatttagcctgctcctcattacggtcatgggagcaaaattgggagtgtttggaatgtaggggtattatctacaattcaggagagttccaaaaagccaaaaaacatgtattacccaattctaataatgtggggattacagattgtttgttggaagagtcatcacctaaattacccagacagtcacctggatcccagagtaaagatctactgaggcaaggcagcaaatttagaagaaatgtatcaacactattaatagagttaggattccaaattaaaaaaaaaactaaaagattgtatatcaacaaagccaatatctggaatagtgccttagatgcattcagaaatcgaaactttaatccttcatatgcaattgaagtagcatatgttattgaaaatgataattttggaagtgagcatcctggatcaaagcaagaatttctgagtctcttaatgcaacatcttgagaactcatcattgtttgaagggtccttgtcaaagaacttgtctctaaattctcaagctctgaaagagaatctttactatgaagctggcaaaatgcttgccatttctttagttcacggtggtccttcacctggtttcttttctaaaaccttgtttaactgccttgtttatggaccagaaaatacccagccaattttagatgatgtttcagactttgatgtggcacagattataatcaggataaatactgcaacaactgtagctgacttaaagtcaataataaatgaatgctataactaccttgagttaattggatgtctcagacttataacgacattaagtgataaatatatgttagtaaaagacatacttggctaccatgtaattcagagagtccacacaccctttgaaagttttaagcagggtctgaaaacccttggtgttttggagaaaattcaggcttatccagaagcattttgtagcatcctgtgtcataaacctgagagtctttctgcaaaaatccttagtgagctttttacagtacacacattacctgatgtgaaagctttggggttttggaacagttacttacaggctgttgaagatggtaaatctacaacaacaatggaagacattcttatttttgcaactggttgcagttccattcctccagctggatttaaacccactccttcaattgagtgtctgcatgtggattttcctgttggaaacaagtgtaataactgtttagcaattcccatcaccaatacatataaagagtttcaagaaaatatggacttcaccataagaaacactctaagactagaaaaggaagaaagttctcattacattggacattaaaatgtttccttgaacaaagagaagcttctttaaaagctgctattgataactctcttttatttcactaaccttttcatcatcactttgaacaaactagttagcttcttgacctaataaaatttatgatatgaatataaa

SEQ ID NO: 136148 - DNA, 411 bp, Homo sapiens
  Payload ID: 6650
  Gene Symbol: G2E3
  Gene Name: G2/M-phase specific E3 ubiquitin protein ligase
  ENST ID: ENST00000555429
  CDS Start-End: 175-411
aagcacatctacaatcaaggagaggggcaggctttaccttttgaaggaagaagtatgaaagtgtatcactgactgatcaagtagagctaaaaaacattcccttcaatttaaaaaatgttcccgactcttaacaccccagttgagaactactgatcttagatgtattaaagtaaaatgaatgaaagtaaacctggtgactcacagaaccttgcttgtgttttctgtcgaaaacatgatgactgtcctaataaatacggagaaaagaaaactaaggagaaatggaatctcactgtacattactactgtttgttgatgtcaagtggaatttggcagagaggcaaagaagaagaaggagtttatggttttctaatagaagatatcaggaaggaagtgaatagagcttctaaactg

SEQ ID NO: 136149 - DNA, 5120 bp, Homo sapiens
  Payload ID: 6651
  Gene Symbol: GABPA
  Gene Name: GA binding protein transcription factor, alpha subunit 60kDa
  Uniprot ID: Q06546
  ENST ID: ENST00000354828
  CDS Start-End: 528-1892
gccccagccaggctgcgggcccgagacccccgggcctccctgccccccgcgccgccccgatttgccctcagagagggtatcgatcttatttctgggtctacggcaaactccaaggtctacaaacgtagaggtcagctgtgaccccgggccaggccgtgaaggtccccaggacacagagctgctctctcctcctagtaaaggtgagaggcagcccaggcctcgtgaaaaaacccagaactggagtcccaaaaggccacgctgatctagctaccctcccagtcaccttgcactcagtcccgagctgccaaagcctccgccgccaccacctccgctctacttccggccctggctccgcccccacacgcctacccgccatcgcaatgcattatgggccgccgtttcagtcggtcgacgctcaccggacaggaagcgtctcggagacagtctgcgaccggacgggtctaggtgagacagaagccaaacaggaggaggaagtggagggactgatcctttgaaatactccagccatgactaaaagagaagcagaggagctgatagaaattgagattgatggaacagagaaagcagagtgcacagaagaaagcattgtagaacaaacctacgcgccagctgaatgtgtaagccaggccatagacatcaatgaaccaataggcaatttaaagaaactgctagaaccaagactacagtgttctttggatgctcatgaaatttgtctgcaagatatccagctggatccagaacgaagtttatttgaccaaggagtaaaaacagatggaactgtacagcttagtgtacaggtaatttcttaccaaggaattgaaccaaagttaaacatccttgaaattgttaaacctgcggacactgttgaggttgttattgatccagatgcccaccatgctgaatcagaagcacatcttgttgaagaagctcaagtgataactcttgatggcacaaaacacatcacaaccatttcagatgaaacttcagaacaagtgacaagatgggctgctgcactggaaggctataggaaagaacaagaacgccttgggataccctatgatcccatacagtggtccacagaccaagtcctgcattgggtggtttgggtaatgaaggaattcagcatgaccgatatagacctcaccacactcaacatttcggggagagaattatgtagtctcaaccaagaagatttttttcagcgggttcctcggggagaaattctctggagtcatctggaacttctccgaaaatatgtattggcaagtcaagaacaacagatgaatgaaatagttacaattgatcaacctgtgcaaattattccagcatcagtgcaatctgctacacctactaccattaaagttataaatagtagtgcgaaagcagccaaagtacaaagagcgccgaggatttcaggagaagatagaagctcacctgggaacagaacaggaaacaatggccaaatccaactatggcagtttttgctagaacttcttactgataaggacgctcgagactgcatttcttgggttggtgatgaaggtgaatttaagctaaatcagcctgaactggttgcacagaaatggggacagcgtaaaaataagcctacgatgaactatgagaaactcagtcgtgcattaagatattattacgatggggacatgatttgtaaagttcaaggcaagagatttgtgtacaagtttgtctgtgacttgaagactcttattggatacagtgcagcggagttgaaccgtttggtcacagaatgtgaacagaagaaacttgcaaagatgcagctccatggaattgcccagccagtcacagcagtagctctggctactgcttctctgcaaacggaaaaggataattgagccccaggacattctgagactccaaagtctttcttaaaatgtttagagcaagtatagctcttacctttattactgaatttgaatcttcttttatttctaggctgtacagtctgatgcatgatttttttataaatatttcatactcttgtgaatttggatctttttactttgagcatatattttagaatatgtgtatgttaaaggatctccacaatgtctgcagtgtgaaggcaggttcattgtggaatagtttaacagtcaggaaggctaaactggtcagtattaatgtgtagccctaccaaaaatagccagtagtatctgaaaatgaaaaataaatgaagtatctctaggaaacagtctggcttaactatttttgaaaatataactgtttcccctctctgctgctttagatgttgctttacatagaaccagaaaatggaatttctcagctaaagcatgtgtgcctgtttcatctaatcaagcagagctaaaatgttcataccgaataaatttatattaataaattactaaactaagagtatcaggttatttatatatttgcaagcaaaggacagtaagaagttgactggcaaaagagcagtgctgaaggaggagatccaggtttaaatctggcttattaactcaagccaattttaaggattttctgtatagattactcatgtcagaccaagaatttaaattattttgagagaggcatttaattctaataaaccagctgttataaaaattataaaatgatctctgtttttcctgtcagagatttaaaaaactgaaaaggtatacctcaacccaaaaataaaggtttgttttggtttgttatggcttccttttttaaaaaattaccctgtagtgccagtttattatgcaaagcagcttatattcctttgtttctgataaaatgaagactttaaatcagtcagtagtactttacctttcaaggcattagtaaattacttgcaaatagttttaaaaggaaaatacgacctttgttataggcagtcttctctttaagacaatacttttccacttgttttccttttccatattatatatgtgtattcatatagctgtatacatattcagttgatcattttataaacatatgaaggcataaagatatacagaagaaaaattattaaacaactcattttaagattcaaattaactaattcctgcatatatgacattccttacataagcgaacactaaacaaaaatggctagaaatgtctttttctttcttttctctctttgttgtttaaggtattaagcacgaattattacatgagactggcagatagctattaatcctcttacagatttgagaaagttgattctcaaatatttatgcaccttctccttcattgttttctttaaatctgtcctcttaaaaagcttcttaagagctcagttaatgcttttgacttaactaggagaaaaaggcatgataatacaggcaagatggcattgttagcaattctggtagtggtttggaatgaatcctaagaggcagggatcttaaggacaaggaagagaagagagagagggagggatctttgatctctttctctggtaatcttaatgcataattttactaaaacatgttctcaattcattcatattattaagctcttcctgcagttgatatctgagcagagtaagatttgtatttccatttttacttttttgaaagagaatatatggacagattattagtacaatttgggcactgtggttttaagaatatctgagtaaaataacaatatgaaataataaacagaagctctaacgtcaggtaacaaatagacagcaagaaaggttttgcaccatcctcttacggcctagagagttgacaagttgcttgtagttttaaaaaaataataaagtatacccttctggtatatcatcaagagcttaagaatcttggctttcatatttaaaatgcttttggggagacatatattaaaattttagccaagatgatagacatgtctcaattatatatgtgtgtgtatgtttttaaagctaaaaacattacttttagatccctagaatgaaaatttttttctcatctatgcaattcccatatggtttttttttaaatcatattttattcattttctccctttagcaattttcattttatttctcataatttgaacagagacagttctcatacatgatcagatgctttttttttcttcttaccatcatttatgcatgacataggtaatgtgactaatttctccagttgattcaagaaactcattactttgcctcaaattatatgtaaaatatttgttttacttaggttacagttatcagaaaggtagtttttttcttctattaaaatataacattgtgaaagaaaataaaatttatgctattctttgctttgtttttataaatgaatttttcatagaatttacagtatattcaaaggaagaaagataaaattattggtcatcatttgtaccttagaagtacaagaatttaagtaaaagaaatgttcatttttgttttaaaatttgttttccatgtgaagtttttattgagccaactttcatacatatcttgctagcctaaagtctaaatatttgtgttggcatcagaaaaacaaatgaggcagaattgctatgtgtggttgatcttcagataaattgactgatcacagttatttttgtatcagtctatgttattaggaaaaattgtttagttgttttctcccctgattaatggtgatattcaagtatgatacaaaaagaattgtaccaccaaatatttttgtgaggtctgctgttttccatattcattttatgctactgcctttaagaaagaactagtgtatccttgaaatagcacaaaaatgttttaaaattcataattgcaaaacaaatctgtgactaacttaatgtcttcagatctaaagggtgtaaaaatattgatacttcaatatttcacttgctgccaggaaaaacaaaattctcaatcttttgtaaatgggaggaggacttttgcatacatttttactctttaaataacgacaacgacacttatactgtcataataacaattatgtatttctttgtggttttaattttttttgtaattttacataaaacagttattttctatttttacgcagataaatatttgtgcataaaatgtaaaaatagtaaaatgagaaaaataaaactattatacagta

SEQ ID NO: 136150 - DNA, 4814 bp, Homo sapiens
  Payload ID: 6651
  Gene Symbol: GABPA
  Gene Name: GA binding protein transcription factor, alpha subunit 60kDa
  Uniprot ID: Q06546
  ENST ID: ENST00000400075
  CDS Start-End: 222-1586
aggtgcctgggaggcgggaggggggttggggcttctcagcgccgattccgcgggaagggccctgggacctcacacttctagtcgcgggagctgcaggtcttacccggagagacgctgcacgtggagccctcgccgctgccgttctcagccggctctggagtgcgggcgggggcgacagggccgattccggagtgggactgatcctttgaaatactccagccatgactaaaagagaagcagaggagctgatagaaattgagattgatggaacagagaaagcagagtgcacagaagaaagcattgtagaacaaacctacgcgccagctgaatgtgtaagccaggccatagacatcaatgaaccaataggcaatttaaagaaactgctagaaccaagactacagtgttctttggatgctcatgaaatttgtctgcaagatatccagctggatccagaacgaagtttatttgaccaaggagtaaaaacagatggaactgtacagcttagtgtacaggtaatttcttaccaaggaattgaaccaaagttaaacatccttgaaattgttaaacctgcggacactgttgaggttgttattgatccagatgcccaccatgctgaatcagaagcacatcttgttgaagaagctcaagtgataactcttgatggcacaaaacacatcacaaccatttcagatgaaacttcagaacaagtgacaagatgggctgctgcactggaaggctataggaaagaacaagaacgccttgggataccctatgatcccatacagtggtccacagaccaagtcctgcattgggtggtttgggtaatgaaggaattcagcatgaccgatatagacctcaccacactcaacatttcggggagagaattatgtagtctcaaccaagaagatttttttcagcgggttcctcggggagaaattctctggagtcatctggaacttctccgaaaatatgtattggcaagtcaagaacaacagatgaatgaaatagttacaattgatcaacctgtgcaaattattccagcatcagtgcaatctgctacacctactaccattaaagttataaatagtagtgcgaaagcagccaaagtacaaagagcgccgaggatttcaggagaagatagaagctcacctgggaacagaacaggaaacaatggccaaatccaactatggcagtttttgctagaacttcttactgataaggacgctcgagactgcatttcttgggttggtgatgaaggtgaatttaagctaaatcagcctgaactggttgcacagaaatggggacagcgtaaaaataagcctacgatgaactatgagaaactcagtcgtgcattaagatattattacgatggggacatgatttgtaaagttcaaggcaagagatttgtgtacaagtttgtctgtgacttgaagactcttattggatacagtgcagcggagttgaaccgtttggtcacagaatgtgaacagaagaaacttgcaaagatgcagctccatggaattgcccagccagtcacagcagtagctctggctactgcttctctgcaaacggaaaaggataattgagccccaggacattctgagactccaaagtctttcttaaaatgtttagagcaagtatagctcttacctttattactgaatttgaatcttcttttatttctaggctgtacagtctgatgcatgatttttttataaatatttcatactcttgtgaatttggatctttttactttgagcatatattttagaatatgtgtatgttaaaggatctccacaatgtctgcagtgtgaaggcaggttcattgtggaatagtttaacagtcaggaaggctaaactggtcagtattaatgtgtagccctaccaaaaatagccagtagtatctgaaaatgaaaaataaatgaagtatctctaggaaacagtctggcttaactatttttgaaaatataactgtttcccctctctgctgctttagatgttgctttacatagaaccagaaaatggaatttctcagctaaagcatgtgtgcctgtttcatctaatcaagcagagctaaaatgttcataccgaataaatttatattaataaattactaaactaagagtatcaggttatttatatatttgcaagcaaaggacagtaagaagttgactggcaaaagagcagtgctgaaggaggagatccaggtttaaatctggcttattaactcaagccaattttaaggattttctgtatagattactcatgtcagaccaagaatttaaattattttgagagaggcatttaattctaataaaccagctgttataaaaattataaaatgatctctgtttttcctgtcagagatttaaaaaactgaaaaggtatacctcaacccaaaaataaaggtttgttttggtttgttatggcttccttttttaaaaaattaccctgtagtgccagtttattatgcaaagcagcttatattcctttgtttctgataaaatgaagactttaaatcagtcagtagtactttacctttcaaggcattagtaaattacttgcaaatagttttaaaaggaaaatacgacctttgttataggcagtcttctctttaagacaatacttttccacttgttttccttttccatattatatatgtgtattcatatagctgtatacatattcagttgatcattttataaacatatgaaggcataaagatatacagaagaaaaattattaaacaactcattttaagattcaaattaactaattcctgcatatatgacattccttacataagcgaacactaaacaaaaatggctagaaatgtctttttctttcttttctctctttgttgtttaaggtattaagcacgaattattacatgagactggcagatagctattaatcctcttacagatttgagaaagttgattctcaaatatttatgcaccttctccttcattgttttctttaaatctgtcctcttaaaaagcttcttaagagctcagttaatgcttttgacttaactaggagaaaaaggcatgataatacaggcaagatggcattgttagcaattctggtagtggtttggaatgaatcctaagaggcagggatcttaaggacaaggaagagaagagagagagggagggatctttgatctctttctctggtaatcttaatgcataattttactaaaacatgttctcaattcattcatattattaagctcttcctgcagttgatatctgagcagagtaagatttgtatttccatttttacttttttgaaagagaatatatggacagattattagtacaatttgggcactgtggttttaagaatatctgagtaaaataacaatatgaaataataaacagaagctctaacgtcaggtaacaaatagacagcaagaaaggttttgcaccatcctcttacggcctagagagttgacaagttgcttgtagttttaaaaaaataataaagtatacccttctggtatatcatcaagagcttaagaatcttggctttcatatttaaaatgcttttggggagacatatattaaaattttagccaagatgatagacatgtctcaattatatatgtgtgtgtatgtttttaaagctaaaaacattacttttagatccctagaatgaaaatttttttctcatctatgcaattcccatatggtttttttttaaatcatattttattcattttctccctttagcaattttcattttatttctcataatttgaacagagacagttctcatacatgatcagatgctttttttttcttcttaccatcatttatgcatgacataggtaatgtgactaatttctccagttgattcaagaaactcattactttgcctcaaattatatgtaaaatatttgttttacttaggttacagttatcagaaaggtagtttttttcttctattaaaatataacattgtgaaagaaaataaaatttatgctattctttgctttgtttttataaatgaatttttcatagaatttacagtatattcaaaggaagaaagataaaattattggtcatcatttgtaccttagaagtacaagaatttaagtaaaagaaatgttcatttttgttttaaaatttgttttccatgtgaagtttttattgagccaactttcatacatatcttgctagcctaaagtctaaatatttgtgttggcatcagaaaaacaaatgaggcagaattgctatgtgtggttgatcttcagataaattgactgatcacagttatttttgtatcagtctatgttattaggaaaaattgtttagttgttttctcccctgattaatggtgatattcaagtatgatacaaaaagaattgtaccaccaaatatttttgtgaggtctgctgttttccatattcattttatgctactgcctttaagaaagaactagtgtatccttgaaatagcacaaaaatgttttaaaattcataattgcaaaacaaatctgtgactaacttaatgtcttcagatctaaagggtgtaaaaatattgatacttcaatatttcacttgctgccaggaaaaacaaaattctcaatcttttgtaaatgggaggaggacttttgcatacatttttactctttaaataacgacaacgacacttatactgtcataataacaattatgtatttctttgtggttttaattttttttgtaattttacataaaacagttattttctatttttacgcagataaatatttgtgcataaaatgtaaaaatagtaaaatgagaaaaataaaactattatacagta

SEQ ID NO: 136151 - DNA, 2726 bp, Homo sapiens
  Payload ID: 6652
  Gene Symbol: GABPB1
  Gene Name: GA binding protein transcription factor, beta subunit 1
  Uniprot ID: Q06547
  ENST ID: ENST00000220429
  CDS Start-End: 170-1357
ggggattttgggcgccgaccagacgcggcattttcggaaaatagcgccctgtgcagctgaagcgctttgtgtgtagcggggccgcgtcagcccggccgggtacgaggcgcctcgggtccccgcaccacctcctgctgccttcccgtcgccgctcccgaagcttttccagatgtccctggtagatttgggaaagaagcttttagaagcggcacgagcaggtcaagatgatgaagttcgtattttgatggcaaatggagctccctttactacagactggctgggaacttctccacttcatctagcagcacagtatggtcattattccaccacagaggtactgctgcgagctggtgtgagcagagatgccagaaccaaagtggaccgaacaccattacatatggcagcttctgagggccatgccagcatagtagaggttttacttaagcatggtgctgatgtcaatgcaaaggacatgttaaagatgacagctctccattgggccacagaacacaatcatcaagaggtggtggaacttttaatcaaatatggtgctgatgtacacacgcaaagtaaattttgtaaaactgcatttgatatttcaatagacaatggaaatgaagatttagcagagatattacagattgctatgcagaaccaaatcaacacaaacccagagagtcctgacactgtgacaatacatgctgcaacaccacagtttatcattggacctggaggggtggtgaacctaacaggtctggtatcttcagaaaattcatccaaggcaacagatgaaacgggtgtatctgctgttcagtttggaaactcttctacatcagtattagctacattagctgccttagctgaagcatctgctccattgtccaattcttcagaaactccagtagtggccacagaagaagtagttactgcagaatctgtggatggtgccattcagcaagtagttagttcagggggtcagcaagtcatcacaatagttacagatggaattcagcttggaaatttgcactctattccaaccagtggaattggtcagcccatcattgtgaccatgccagatggacaacaagtattaacagtaccagcaacagacattgctgaagaaactgttataagtgaagaaccaccagctaagagacaatgtatcgaaataattgaaaaccgggtggaatctgcagaaatagaagagagagaagctcttcagaaacagctggatgaagcaaatcgagaagcacaaaaatatcgacagcagctcctaaagaaagaacaggaagcagaggcctacagacagaagttggaagctatgactcgtcttcagactaataaagaagctgtttaattgaaatgaacatgtagtttgattttacttttggtcaagaaagaatacaatcttgaactgtacacaacaaaggtacagccatgggaatacagaatgatagaagagactacagatggataattggacttaagccatgagctctgagttcttgtaacataaaactttactttagaagttgtgaaatgtatttaaaactgaattctgtaaatagtttttttttttttacagttccaaatgagttgataaagattgttgaagagatccaaaaccagaataagccactgtttttgtgaattctttttgattttagtacaaaccttaatttctcagaaacggaacagttttaagggtgatcgttgttggttaggccaaatgttgtgtaataattatggtggactgatgctggaattactcctgtaggtataaacctctgtatgaagagaagatttctcccaggaaatctttgtacagctttaagttgtgtcagattctctgaaaacattttttagaaagcaaaatttttatatttgttcaatttcagctatacccaagtagatttacatgtatatgaagcaaatatttttaaaaatttctgtttgtacatattctgcatgttttataatttcaaaatgcatcacttacataggtatttctcccacagaaatgatgaaagtgaccagaaaaaaacaaaaacaaaacccctttactctgtaggtcattgaaacgaagtaagctggcagctggttttattggaatgacagtgttctcggaaggagcagcctacaagataacttgaatttgccaattctgcaaaatctgtgcttttttgaaaatttaagagtggggacgtgaaactgtattctgtgccttccatcatgatttccacatgaaagcactttaaggcactgattttaagataatgtttttggaaaacccaatgcatatgggtttctgaaatattttatggacttatttctccccaggaaatgattcttacggaaaaaaattgcttttgtatgtagaacaggaactttttgtattacagtgatgcaatagacatgtctaatgtaacttctacttttccttttgaaagctcagtgtctgtgctatgacttgctctcatcacaatattgttgaattccacaatgtatggacattaaacactggcagactgttcactttttcttttttttttttggtaaaatattacttcaaacccctttttcttgctttatttttcagtgttttattgctttatgaactgtttaaccctgaaatccctctaggttatctatactgtataaaaaagcaattacccttaaaactgtactctggcctacttttctattttgcaattaaatatcttttt

SEQ ID NO: 136152 - DNA, 1633 bp, Homo sapiens
  Payload ID: 6652
  Gene Symbol: GABPB1
  Gene Name: GA binding protein transcription factor, beta subunit 1
  Uniprot ID: Q06547
  ENST ID: ENST00000359031
  CDS Start-End: 449-1495
gctttctttgtgtggctgaagcgctagaaatggcatattttctttcccttcgttaaaaaatcagaccctctttcccctctctccccgcgggaacacagctagggagtgggtaggagcaggatctgccgacgagggcagaggcggaaaatcctcgggcgatgagctgaagagggccgggtccgggagggatgctgggagcttgactcactcgcacaccatgtgtccctccgcgcgcagcacgggggacttttcggtggggattttgggcgccgaccagacgcggcattttcggaaaatagcgccctgtgcagctgaagcgctttgtgtgtagcggggccgcgtcagcccggccgggtacgaggcgcctcgggtccccgcaccacctcctgctgccttcccgtcgccgctcccgaagcttttccaggtcacagcatatttgtggaggaagatgtccctggtagatttgggaaagaagcttttagaagcggcacgagcaggtcaagatgatgaagttcgtattttgatggcaaatggagctccctttactacagactggctgggaacttctccacttcatctagcagcacagtatggtcattattccaccacagaggtactgctgcgagctggtgtgagcagagatgccagaaccaaagtggaccgaacaccattacatatggcagcttctgagggccatgccagcatagtagaggttttacttaagcatggtgctgatgtcaatgcaaaggacatgttaaagatgacagctctccattgggccacagaacacaatcatcaagaggtggtggaacttttaatcaaatatggtgctgatgtacacacgcaaagtaaattttgtaaaactgcatttgatatttcaatagacaatggaaatgaagatttagcagagatattacagattgctatgcagaaccaaatcaacacaaacccagagagtcctgacactgtgacaatacatgctgcaacaccacagtttatcattggacctggaggggtggtgaacctaacagatgaaacgggtgtatctgctgttcagtttggaaactcttctacatcagtattagctacattagctgccttagctgaagcatctgctccattgtccaattcttcagaaactccagtagtggccacagaagaagtagttactgcagaatctgtggatggtgccattcagcaagtagttagttcagggggtcagcaagtcatcacaatagttacagatggaattcagcttggaaatttgcactctattccaaccagtggaattggtcagcccatcattgtgaccatgccagatggacaacaagtattaacagtaccagcaacagacattgctgaagaaactgttataagtgaagaaccaccagctaagagacaatgtatcgaaataattgaaaaccgggtggaatctgcagaaatagaagtaaggagtcttttacccggtgtgctttgccgcagtcatccaaaataaattcaattttttttgtcttttatatttattactgacagtattgttttgatacagaatgaaagtgcgtagtattttcattttgtttatttttgccttatacatatagcaagccctcaataaataaatattgaatgaatg

SEQ ID NO: 136153 - DNA, 4816 bp, Homo sapiens
  Payload ID: 6652
  Gene Symbol: GABPB1
  Gene Name: GA binding protein transcription factor, beta subunit 1
  Uniprot ID: Q06547
  ENST ID: ENST00000380877
  CDS Start-End: 425-1576
gctttctttgtgtggctgaagcgctagaaatggcatattttctttcccttcgttaaaaaatcagaccctctttcccctctctccccgcgggaacacagctagggagtgggtaggagcaggatctgccgacgagggcagaggcggaaaatcctcgggcgatgagctgaagagggccgggtccgggagggatgctgggagcttgactcactcgcacaccatgtgtccctccgcgcgcagcacgggggacttttcggtggggattttgggcgccgaccagacgcggcattttcggaaaatagcgccctgtgcagctgaagcgctttgtgtgtagcggggccgcgtcagcccggccgggtacgaggcgcctcgggtccccgcaccacctcctgctgccttcccgtcgccgctcccgaagcttttccagatgtccctggtagatttgggaaagaagcttttagaagcggcacgagcaggtcaagatgatgaagttcgtattttgatggcaaatggagctccctttactacagactggctgggaacttctccacttcatctagcagcacagtatggtcattattccaccacagaggtactgctgcgagctggtgtgagcagagatgccagaaccaaagtggaccgaacaccattacatatggcagcttctgagggccatgccagcatagtagaggttttacttaagcatggtgctgatgtcaatgcaaaggacatgttaaagatgacagctctccattgggccacagaacacaatcatcaagaggtggtggaacttttaatcaaatatggtgctgatgtacacacgcaaagtaaattttgtaaaactgcatttgatatttcaatagacaatggaaatgaagatttagcagagatattacagattgctatgcagaaccaaatcaacacaaacccagagagtcctgacactgtgacaatacatgctgcaacaccacagtttatcattggacctggaggggtggtgaacctaacagatgaaacgggtgtatctgctgttcagtttggaaactcttctacatcagtattagctacattagctgccttagctgaagcatctgctccattgtccaattcttcagaaactccagtagtggccacagaagaagtagttactgcagaatctgtggatggtgccattcagcaagtagttagttcagggggtcagcaagtcatcacaatagttacagatggaattcagcttggaaatttgcactctattccaaccagtggaattggtcagcccatcattgtgaccatgccagatggacaacaagtattaacagtaccagcaacagacattgctgaagaaactgttataagtgaagaaccaccagctaagagacaatgtatcgaaataattgaaaaccgggtggaatctgcagaaatagaagagagagaagctcttcagaaacagctggatgaagcaaatcgagaagcacaaaaatatcgacagcagctcctaaagaaagaacaggaagcagaggcctacagacagaagttggaagctatgactcgtcttcagactaataaagaagctgtttaattgaaatgaacatgtagtttgattttacttttggtcaagaaagaatacaatcttgaactgtacacaacaaaggtacagccatgggaatacagaatgatagaagagactacagatggataattggacttaagccatgagctctgagttcttgtaacataaaactttactttagaagttgtgaaatgtatttaaaactgaattctgtaaatagtttttttttttttacagttccaaatgagttgataaagattgttgaagagatccaaaaccagaataagccactgtttttgtgaattctttttgattttagtacaaaccttaatttctcagaaacggaacagttttaagggtgatcgttgttggttaggccaaatgttgtgtaataattatggtggactgatgctggaattactcctgtaggtataaacctctgtatgaagagaagatttctcccaggaaatctttgtacagctttaagttgtgtcagattctctgaaaacattttttagaaagcaaaatttttatatttgttcaatttcagctatacccaagtagatttacatgtatatgaagcaaatatttttaaaaatttctgtttgtacatattctgcatgttttataatttcaaaatgcatcacttacataggtatttctcccacagaaatgatgaaagtgaccagaaaaaaacaaaaacaaaacccctttactctgtaggtcattgaaacgaagtaagctggcagctggttttattggaatgacagtgttctcggaaggagcagcctacaagataacttgaatttgccaattctgcaaaatctgtgcttttttgaaaatttaagagtggggacgtgaaactgtattctgtgccttccatcatgatttccacatgaaagcactttaaggcactgattttaagataatgtttttggaaaacccaatgcatatgggtttctgaaatattttatggacttatttctccccaggaaatgattcttacggaaaaaaattgcttttgtatgtagaacaggaactttttgtattacagtgatgcaatagacatgtctaatgtaacttctacttttccttttgaaagctcagtgtctgtgctatgacttgctctcatcacaatattgttgaattccacaatgtatggacattaaacactggcagactgttcactttttcttttttttttttggtaaaatattacttcaaacccctttttcttgctttatttttcagtgttttattgctttatgaactgtttaaccctgaaatccctctaggttatctatactgtataaaaaagcaattacccttaaaactgtactctggcctacttttctattttgcaattaaatatctttttcacatatgttcattgtagacttatgtttttatcacatcttattaacacattaaaaatgttatcctactgcatatttgagccaccatatgaaaatattttatactctccacaacatgactttaaaattcctgaggtaactcttgagaatttgttaactctttcactggaattaccagtatatttgttaatgtaataaaggggtctatggtctgtcagcctgatggttactattggaagcacttaaaaaagagtttagggcaaattgaagaactctgtaaggaagaggaaaaagatctttttcaattttccactaaatttgacatattttaagtgatccaaaaactagtttttaaaaatgccaggccatattttcaatagcatgaagtgactttttctgcagtcctgaaaagtcaatagagaatgttgtttctggttacttcggtacattaatttgtcatgttaggcagggtgctggtaccacagccaggtaccctgacatgtggtgctggagcagagaagggccagtgtcttcaccccagagggcaatcactgtagagttttgctttcagaccaggctggccctgaaaagactcaagacagtgttgggaacaagtttgtgaaagctaacttaatgtcgtctttgacttccagtctcctctcctgctggagactttacctggtgcaagaaataattttgattcctaataacaacagctggcatagatgggagaaaataattggtgcttaaaaggagtaagtctatgatagcatcaggtactcaggtatctgtggaggaagctcacctttttcagagtcattgttacataacataatttctcaatcatttacatctgatttactgttctgtaaaatcactacttagacaagaatttgtaattaaaacttaaaatgggtgtcttcttcccttcacttatttcatgctgttttcaggtgggctgtaaaagctttgcattctagtcattctcaatagtgctctgaacagaggatttaaagaactgacaaaaataaaagtatatgaaataaaagttttcagaaatccacataattgtttccactacatagtgatggatttgtagttagcagtcatctggttgccacatcactggttaattgtttccacatatgtgtgaacaaacacctggagcaacctttctcaaccagggttctgcaagacaagccatttagtgttatggtgtaatgaattattttctttcctgtgcacctagaatcgttcttgttacgtactatccagacactgagttcgttaggcatcttgactgcccaattactttattcagatttaacacttccctctgtatagtccctggacctctagaattataaattctagactgaatctgtgatgctttcagaaagcctcatctgagaagtagtatctgcagggactgtgcttctcaactaattttcatttattgttatttattttatttatatcttaattacttcacaaaaggacttgtgatgtcatttgttttcgttggcttttaggaattattttcttaacatcaatcttttgtgatatgaatggcagaagagttcttttactctgtcactggattgctctatttctttatggtggtggagggttgggaagacaattagagagaaaagaggataaatgggaaatctcatgtaatgaaagctacacagatggtccccaatttatgatgctttgatttatgattgtttgactttacaatgggtttatcagggtattaattgcattttacatttatgatatttttgacttaggatgggtttatcaggacataaccccattgcaagccagagagcatctgtacttgtttgtaataaaaagatctgcttac

SEQ ID NO: 136154 - DNA, 1401 bp, Homo sapiens
  Payload ID: 6652
  Gene Symbol: GABPB1
  Gene Name: GA binding protein transcription factor, beta subunit 1
  Uniprot ID: Q06547
  ENST ID: ENST00000396464
  CDS Start-End: 215-1261
gcacaccatgtgtccctccgcgcgcagcacgggggacttttcggtggggattttgggcgccgaccagacgcggcattttcggaaaatagcgccctgtgcagctgaagcgctttgtgtgtagcggggccgcgtcagcccggccgggtacgaggcgcctcgggtccccgcaccacctcctgctgccttcccgtcgccgctcccgaagcttttccagatgtccctggtagatttgggaaagaagcttttagaagcggcacgagcaggtcaagatgatgaagttcgtattttgatggcaaatggagctccctttactacagactggctgggaacttctccacttcatctagcagcacagtatggtcattattccaccacagaggtactgctgcgagctggtgtgagcagagatgccagaaccaaagtggaccgaacaccattacatatggcagcttctgagggccatgccagcatagtagaggttttacttaagcatggtgctgatgtcaatgcaaaggacatgttaaagatgacagctctccattgggccacagaacacaatcatcaagaggtggtggaacttttaatcaaatatggtgctgatgtacacacgcaaagtaaattttgtaaaactgcatttgatatttcaatagacaatggaaatgaagatttagcagagatattacagattgctatgcagaaccaaatcaacacaaacccagagagtcctgacactgtgacaatacatgctgcaacaccacagtttatcattggacctggaggggtggtgaacctaacagatgaaacgggtgtatctgctgttcagtttggaaactcttctacatcagtattagctacattagctgccttagctgaagcatctgctccattgtccaattcttcagaaactccagtagtggccacagaagaagtagttactgcagaatctgtggatggtgccattcagcaagtagttagttcagggggtcagcaagtcatcacaatagttacagatggaattcagcttggaaatttgcactctattccaaccagtggaattggtcagcccatcattgtgaccatgccagatggacaacaagtattaacagtaccagcaacagacattgctgaagaaactgttataagtgaagaaccaccagctaagagacaatgtatcgaaataattgaaaaccgggtggaatctgcagaaatagaagtaaggagtcttttacccggtgtgctttgccgcagtcatccaaaataaattcaattttttttgtcttttatatttattactgacagtattgttttgatacagaatgaaagtgcgtagtattttcattttgtttatttttgccttatacatatagcaagccctcaataaataaatattgaatgaatgaa

SEQ ID NO: 136155 - DNA, 1392 bp, Homo sapiens
  Payload ID: 6652
  Gene Symbol: GABPB1
  Gene Name: GA binding protein transcription factor, beta subunit 1
  Uniprot ID: Q06547
  ENST ID: ENST00000429662
  CDS Start-End: 170-1252
ggggattttgggcgccgaccagacgcggcattttcggaaaatagcgccctgtgcagctgaagcgctttgtgtgtagcggggccgcgtcagcccggccgggtacgaggcgcctcgggtccccgcaccacctcctgctgccttcccgtcgccgctcccgaagcttttccagatgtccctggtagatttgggaaagaagcttttagaagcggcacgagcaggtcaagatgatgaagttcgtattttgatggcaaatggagctccctttactacagactggctgggaacttctccacttcatctagcagcacagtatggtcattattccaccacagaggtactgctgcgagctggtgtgagcagagatgccagaaccaaagtggaccgaacaccattacatatggcagcttctgagggccatgccagcatagtagaggttttacttaagcatggtgctgatgtcaatgcaaaggacatgttaaagatgacagctctccattgggccacagaacacaatcatcaagaggtggtggaacttttaatcaaatatggtgctgatgtacacacgcaaagtaaattttgtaaaactgcatttgatatttcaatagacaatggaaatgaagatttagcagagatattacagattgctatgcagaaccaaatcaacacaaacccagagagtcctgacactgtgacaatacatgctgcaacaccacagtttatcattggacctggaggggtggtgaacctaacaggtctggtatcttcagaaaattcatccaaggcaacagatgaaacgggtgtatctgctgttcagtttggaaactcttctacatcagtattagctacattagctgccttagctgaagcatctgctccattgtccaattcttcagaaactccagtagtggccacagaagaagtagttactgcagaatctgtggatggtgccattcagcaagtagttagttcagggggtcagcaagtcatcacaatagttacagatggaattcagcttggaaatttgcactctattccaaccagtggaattggtcagcccatcattgtgaccatgccagatggacaacaagtattaacagtaccagcaacagacattgctgaagaaactgttataagtgaagaaccaccagctaagagacaatgtatcgaaataattgaaaaccgggtggaatctgcagaaatagaagtaaggagtcttttacccggtgtgctttgccgcagtcatccaaaataaattcaattttttttgtcttttatatttattactgacagtattgttttgatacagaatgaaagtgcgtagtattttcattttgtttatttttgccttatacatatagcaagccctcaataaataaatattgaatgaatgaa

SEQ ID NO: 136156 - DNA, 1450 bp, Homo sapiens
  Payload ID: 6652
  Gene Symbol: GABPB1
  Gene Name: GA binding protein transcription factor, beta subunit 1
  ENST ID: ENST00000543881
  CDS Start-End: 261-1220
attttcggaaaatagcgccctgtgcagctgaagcgctttgtgtgtagcggggccgcgtcagcccggccgggtacgaggcgcctcgggtccccgcaccacctcctgctgccttcccgtcgccgctcccgaagcttttccagctgggaacttctccacttcatctagcagcacagtatggtcattattccaccacagaggtactgctgcgagctggtgtgagcagagatgccagaaccaaagtggaccgaacaccattacatatggcagcttctgagggccatgccagcatagtagaggttttacttaagcatggtgctgatgtcaatgcaaaggacatgttaaagatgacagctctccattgggccacagaacacaatcatcaagaggtggtggaacttttaatcaaatatggtgctgatgtacacacgcaaagtaaattttgtaaaactgcatttgatatttcaatagacaatggaaatgaagatttagcagagatattacagattgctatgcagaaccaaatcaacacaaacccagagagtcctgacactgtgacaatacatgctgcaacaccacagtttatcattggacctggaggggtggtgaacctaacaggtctggtatcttcagaaaattcatccaaggcaacagatgaaacgggtgtatctgctgttcagtttggaaactcttctacatcagtattagctacattagctgccttagctgaagcatctgctccattgtccaattcttcagaaactccagtagtggccacagaagaagtagttactgcagaatctgtggatggtgccattcagcaagtagttagttcagggggtcagcaagtcatcacaatagttacagatggaattcagcttggaaatttgcactctattccaaccagtggaattggtcagcccatcattgtgaccatgccagatggacaacaagtattaacagtaccagcaacagacattgctgaagaaactgttataagtgaagaaccaccagctaagagacaatgtatcgaaataattgaaaaccgggtggaatctgcagaaatagaagagagagaagctcttcagaaacagctggatgaagcaaatcgagaagcacaaaaatatcgacagcagctcctaaagaaagaacaggaagcagaggcctacagacagaagttggaagctatgactcgtcttcagactaataaagaagctgtttaattgaaatgaacatgtagtttgattttacttttggtcaagaaagaatacaatcttgaactgtacacaacaaaggtacagccatgggaatacagaatgatagaagagactacagatggataattggacttaagccatgagctctgagttcttgtaacataaaactttactttagaagttgtgaaatgtatttaaaactgaattctgtaaatagtttttttttttttacagtt

SEQ ID NO: 136157 - DNA, 1412 bp, Homo sapiens
  Payload ID: 6652
  Gene Symbol: GABPB1
  Gene Name: GA binding protein transcription factor, beta subunit 1
  ENST ID: ENST00000560825
  CDS Start-End: 243-1286
actcgcacaccatgtgtccctccgcgcgcagcacgggggacttttcggtggggattttgggcgccgaccagacgcggcattttcggaaaatagcgccctgtgcagctgaagcgctttgtgtgtagcggggccgcgtcagcccggccgggtacgaggcgcctcgggtccccgcaccacctcctgctgccttcccgtcgccgctcccgaagcttttccaggtcacagcatatttgtggaggaagatgtccctggtagatttgggaaagaagcttttagaagcggcacgagcaggtcaagatgatgaagttcgtattttgatggcaaatggagctccctttactacagactggctgggaacttctccacttcatctagcagcacagtatggtcattattccaccacagaggtactgctgcgagctggtgtgagcagagatgccagaaccaaagtggaccgaacaccattacatatggcagcttctgagggccatgccagcatagtagaggttttacttaagcatggtgctgatgtcaatgcaaaggacatgttaaagatgacagctctccattgggccacagaacacaatcatcaagaggtggtggaacttttaatcaaatatggtgctgatgtacacacgcaaagtaaattttgtaaaactgcatttgatatttcaatagacaatggaaatgaagatttagcagagatattacagattgctatgcagaaccaaatcaacacaaacccagagagtcctgacactgtgacaatacatgctgcaacaccacagtttatcattggacctggaggggtggtgaacctaacagatgaaacgggtgtatctgctgttcagtttggaaactcttctacatcagtattagctacattagctgccttagctgaagcatctgctccattgtccaattcttcagaaactccagtggccacagaagaagtagttactgcagaatctgtggatggtgccattcagcaagtagttagttcagggggtcagcaagtcatcacaatagttacagatggaattcagcttggaaatttgcactctattccaaccagtggaattggtcagcccatcattgtgaccatgccagatggacaacaagtattaacagtaccagcaacagacattgctgaagaaactgttataagtgaagaaccaccagctaagagacaatgtatcgaaataattgaaaaccgggtggaatctgcagaaatagaagtaaggagtcttttacccggtgtgctttgccgcagtcatccaaaataaattcaattttttttgtcttttatatttattactgacagtattgttttgatacagaatgaaagtgcgtagtattttcattttgtttatttttgccttatacatatagcaagccctcaataaataaat

SEQ ID NO: 136158 - DNA, 406 bp, Homo sapiens
  Payload ID: 6652
  Gene Symbol: GABPB1
  Gene Name: GA binding protein transcription factor, beta subunit 1
  ENST ID: ENST00000558335
  CDS Start-End: 138-406
aggaggggatgtgtatgagaacttctgagaagaaaggatcagaatgtatgcattctttttttgagcagaatattgatggttcatttttgtgacttacaagaaccagcagtttattggcttcattttgtaggaagcagatgtccctggtagatttgggaaagaagcttttagaagcggcacgagcaggtcaagatgatgaagttcgtattttgatggcaaatggagctccctttactacagactggctgggaacttctccacttcatctagcagcacagtatggtcattattccaccacagaggtactgctgcgagctggtgtgagcagagatgccagaaccaaagtggaccgaacaccattacatatggcagcttctgagggccatgccagcatagtagaggtttt

SEQ ID NO: 136159 - DNA, 867 bp, Homo sapiens
  Payload ID: 6652
  Gene Symbol: GABPB1
  Gene Name: GA binding protein transcription factor, beta subunit 1
  ENST ID: ENST00000561010
  CDS Start-End: 1-610
aatacatgctgcaacaccacagtttatcattggacctggaggggtggtgaacctaacaggtctggtatcttcagaaaattcatccaaggcaacagatgaaacgggtgtatctgctgttcagtttggaaactcttctacatcagtattagctacattagctgccttagctgaagcatctgctccattgtccaattcttcagaaactccagtagtggccacagaagaagtagttactgcagaatctgtggatggtgccattcagcaagtagttagttcagggggtcagcaagtcatcacaatagttacagatggaattcagcttggaaatttgcactctattccaaccagtggaattggtcagcccatcattgtgaccatgccagatggacaacaagtattaacagtaccagcaacagacattgctgaagaaactgttataagtgaagaaccaccagctaagagacaatgtatcgaaataattgaaaaccgggtggaatctgcagaaatagaaagagggtgtcttgctatgttgcccaggctggtcttggactcctggcctcaagtgatcctcccacctcagcctcctgaagagttgagattactggcataagtcaccatatccaggagagagaagctcttcagaaacagctggatgaagcaaatcgagaagcacaaaaatatcgacagcagctcctaaagaaagaacaggaagcagaggcctacagacagaagttggaagctatgactcgtcttcagactaataaagaagctgtttaattgaaatgaacatgtagtttgattttacttttggtcaagaaagaatacaatcttgaactgtacacaacaaaggtacagccatgggaatac

SEQ ID NO: 136160 - DNA, 730 bp, Homo sapiens
  Payload ID: 6652
  Gene Symbol: GABPB1
  Gene Name: GA binding protein transcription factor, beta subunit 1
  ENST ID: ENST00000558970
  CDS Start-End: 463-730
atgtgtccctccgcgcgcagcacgggggacttttcggtggggattttgggcgccgaccagacgcggcattttcggaaaatagcgccctgtgcagctgaagcgctttgtgtgtagcggggccgcgtcagcccggccgggtacgaggcgcctcgggtccccgcaccacctcctgctgccttcccgtcgccgctcccgaagcttttccaggattattccctcctttgctggacctctagtatccatggcacttgcccattaaatgctagcagagcatcctcaccttcagtctccaaaatgcctctataaacatacaaagggccctgaagggggcagtgctgctaccaatgagaaccactgatttccaagaatccatctacattaatctaccatatggcggccgggcgcggtggctcacgcctgtaatcccagcactatgggaggccgaggcgggcagatcacgagatgtccctggtagatttgggaaagaagcttttagaagcggcacgagcaggtcaagatgatgaagttcgtattttgatggcaaatggagctccctttactacagactggctgggaacttctccacttcatctagcagcacagtatggtcattattccaccacagaggtactgctgcgagctggtgtgagcagagatgccagaaccaaagtggaccgaacaccattacatatggcagcttctgagggccatgccagcatagtagaggttt

SEQ ID NO: 136161 - DNA, 1680 bp, Homo sapiens
  Payload ID: 6653
  Gene Symbol: GABPB2
  Gene Name: GA binding protein transcription factor, beta subunit 2
  ENST ID: ENST00000368916
  CDS Start-End: 33-1265
ctacctgaaaacttttgttcctatgcataaagatgtctttggtggacttgggaaagaggttgctagaagcagcaagaaaaggccaagatgatgaagtgagaacgttgatggcaaatggcgccccattcaccacagactggcttggaacatcacccctccaccttgcagctcaatatggtcattattccacagcagaagtactccttcgagcaggtgttagcagggatgcccggactaaagtagacaggacccccttgcacatggctgcagccgatggacatgcgcacatcgtggaactgcttgttcggaatggtgcagatgtgaatgccaaggacatgctgaagatgacagctttgcattgggccacagagcgccaccatcgagatgtcgtagagttacttatcaaatatggagctgatgtccatgctttcagcaaatttgataaatcagcctttgacatagctctggagaaaaacaatgctgagattttggtcatcctccaggaagcaatgcagaatcaggtgaatgttaatccagagagagccaaccctgtgactgaccctgtgagtatggctgctccattcatcttcacgtcgggtgaggttgttaacctcgcaagccttatttcttcaaccaacaccaaaacaacctcagccaatacagaggaaattatagaaggaaattccgttgactcatcaatccagcaagtaatggggagtggaggccagagggtcatcaccatagtgactgatggagtccctctgggtaatatccaaacttcaatccctactggaggcattggccagccatttattgtaactgtgcaagatggacagcaagttctaactgtacctgctggtaaggttgcagaggagactgtaattaaagaggaagaagaagagaagttgccactaacaaagaaaccaaggataggagagaagacaaacagtgtggaggaaagcaaggaaggcaatgaaagagagctactacagcaacaactccaggaggccaatcgaagagcccaggaataccgacaccagctcctaaagaaagagcaggaagcagaacagtaccgtcttaagctggaggccatagcccgacagcagcccaatggagttgatttcaccatggttgaagaggtggctgaggtagatgctgtagtagtcacagagggggagttggaagagagagagacaaaagtgactgggtcagcagggaccacagagcctcacactagagtttccatggcaactgtttcatcttaatatgcaagggccacaatttgcactgtgttcatattaatcctcttttaaaaaaggaaatatacagaagacaaacattgtataaaaactaagagtgtctttaagaagaaaactatagcagggtacaatgcttgggctcaggaagtttctctgtgcaactagaaaattcaaagccatatttagggaacattttttctgaggggccaaaagaataaaggaccaaatttcttagctcatatcattgctttaaacatagaagtaaaagaatactgcatgttgtgggttgattttttttttttaaataactgactttctcacaaaagattttaagataacatttctaatatatatgcaccaatatatatgcctttaataattataccatcaagtgacctgaaaatgccccttagatttatga

SEQ ID NO: 136162 - DNA, 8964 bp, Homo sapiens
  Payload ID: 6653
  Gene Symbol: GABPB2
  Gene Name: GA binding protein transcription factor, beta subunit 2
  Uniprot ID: Q8TAK5
  ENST ID: ENST00000368918
  CDS Start-End: 332-1678
gcacttttccacctcagaagtgcctcagcagaaaggcgatgaacctcgggggtgcatcatctttctgttagaatgggagcatgagttttctgatcattttcccttcacagattcctccgccagaaatcttactcgcggcgccttcatttccgggtccgccattttgttgcctctgtttctccacgagggggggttaaaggcccccaaaacatgcacacatgaaaagggcaaaaagtaaccgtccttgacagggagtcttaactagagaaggaaacgggactaaactggcgggctccgtggaagcgtggccggcagcgtcccggacgaggagatgtctttggtggacttgggaaagaggttgctagaagcagcaagaaaaggccaagatgatgaagtgagaacgttgatggcaaatggcgccccattcaccacagactggcttggaacatcacccctccaccttgcagctcaatatggtcattattccacagcagaagtactccttcgagcaggtgttagcagggatgcccggactaaagtagacaggacccccttgcacatggctgcagccgatggacatgcgcacatcgtggaactgcttgttcggaatggtgcagatgtgaatgccaaggacatgctgaagatgacagctttgcattgggccacagagcgccaccatcgagatgtcgtagagttacttatcaaatatggagctgatgtccatgctttcagcaaatttgataaatcagcctttgacatagctctggagaaaaacaatgctgagattttggtcatcctccaggaagcaatgcagaatcaggtgaatgttaatccagagagagccaaccctgtgactgaccctgtgagtatggctgctccattcatcttcacgtcgggtgaggttgttaacctcgcaagccttatttcttcaaccaacaccaaaacaacctcaggtgacccccatgcctcaacagtacagttttcaaattctaccacctcagtgctggctacccttgcagctcttgctgaggcatcagtccccctctccaactcacacagagccacagccaatacagaggaaattatagaaggaaattccgttgactcatcaatccagcaagtaatggggagtggaggccagagggtcatcaccatagtgactgatggagtccctctgggtaatatccaaacttcaatccctactggaggcattggccagccatttattgtaactgtgcaagatggacagcaagttctaactgtacctgctggtaaggttgcagaggagactgtaattaaagaggaagaagaagagaagttgccactaacaaagaaaccaaggataggagagaagacaaacagtgtggaggaaagcaaggaaggcaatgaaagagagctactacagcaacaactccaggaggccaatcgaagagcccaggaataccgacaccagctcctaaagaaagagcaggaagcagaacagtaccgtcttaagctggaggccatagcccgacagcagcccaatggagttgatttcaccatggttgaagaggtggctgaggtagatgctgtagtagtcacagagggggagttggaagagagagagacaaaagtgactgggtcagcagggaccacagagcctcacactagagtttccatggcaactgtttcatcttaatatgcaagggccacaatttgcactgtgttcatattaatcctcttttaaaaaaggaaatatacagaagacaaacattgtataaaaactaagagtgtctttaagaagaaaactatagcagggtacaatgcttgggctcaggaagtttctctgtgcaactagaaaattcaaagccatatttagggaacattttttctgaggggccaaaagaataaaggaccaaatttcttagctcatatcattgctttaaacatagaagtaaaagaatactgcatgttgtgggttgattttttttttttaaataactgactttctcacaaaagattttaagataacatttctaatatatatgcaccaatatatatgcctttaataattataccatcaagtgacctgaaaatgccccttagatttatgatgcgtatctgttggaaaaaccaattggaagggaagttagacaagctttggggaagagaaaaggaatatagtccatttccaaaggagcaggaactcccaaccttaagttaatttcactgaagagaattttccctttttttttttttttttgagacacggtctgactctgtcacccaggctagagtacagtggtgcaatcttggctcactgcaacctccgcctccagggcgcagcctcctgagtagctgggaggacaggcatatgccaccacatcactgagaagaaatttttgattgtctgacagatacttatccattatgtgtctatagttcagatgcttgtgtaagaaactgaaataagctgcgtgtggtggctcacacctgtaatcccaacactttgggacgttgaaatgggagaattgcttgagtccaggagtttgagatgcgcctgggcaacatagaaacctgtgtctacaaaaaatttaaaaattagccaagtatggtgacaggcacctatggttccagctactcaggaggctgaggtgggaggatcgcttgtgccttggaggtcaaaactgcagtgagccatggttgcaccactgctctccaggcttgagtgacagagcaagactgtatctcaaaggaaaaaggaaactaggccaggcgtggtggctcacgcctgtaatcccaacactttgggaggccgaggcgggcggatcacgaggtcagatcaagaacatcctggctaacacggtgaaactccatctctactaaaaatacaaaaaattggccgggcgcagcggctcacgcctgtaatcccagcactttcggaggcagaggcaggcggatcacaaggtcaagagattaagatcatcctggccaacatggtgacaccccgtctctactaaaaatacaaaaattacccaggcatagtggcacacgcctgtagtcccagttacttgggaggctgaggcaggagaattgcttgaacctgggaggtggaggttgcagtgagccaagatcgtgccactgcactccagcctggcgacacagtgagactctgtctcaaaaaaacaaaacaaacaaacaaaaatacaaaaaattagccgggcgtggtggcacctgcctgtaatcccagctacttgggaggctgaggcaggagaatcgcttgaacccgggaggcggaggttgcagtgagctgagatcgcaccattacactccagcctgggcaacagagccagactctgtctcaaaaaaaaaaaaaaaggaaattgaaatagagtttttaaaaactgaactggaaagccgaggcgagcggatcacctgaggccaggagttccagaccagcctgaccaacatggagaaaccctgtctctactaaaaatacaaaattagggccagacccggcagctcatgcctgtaatcccagcactttgggaggctgaggtgggtggatcatgaggtcaggagttcaagaccagcctggccgagatggtgaaaccctactaaaaatacaaaaattcacctggcgaggtggcaggcacctggaatcccagctactcgggaggctgaggcggtagaatcacttgaacccaggtgacagaggttgcagtgatccaagatcatgccactgcactccagcctgggcgatagagtgagactctgtctcaaacaaacaaaacaaaacaaaattagctgggtgtggtggcacatgcctgtaatcccagctactcaggaggctgaggcaggagaatcgcttgaacccgggaggcggcagttgcaatgagccgagatggcaccattgcactccaacctgggcaacaagagtgaaactcaattaaaaaaaaaatagaaaagaaagaaaacttgtttatgtgggaggagtatatataaaaccaaaatccaggctgtgtttccacagtgctgggaagtggccagaaaaaggcttataggggctatgaaactctggtcttgacatataaactttgctctgactggatttcataaaattacagtgaggagggtagtctcttgtcagaaaaacttgtttccaaacatttatgtaatgtcaagctcagtctctcttttttttttttttttttttgagacggagtcttgctcttgttgcccaggctggagtgcaatggtgtgatctcaactcaccgcaacttccacctcccggtttcaagctattctcctgcctcagcctcccgagtagctgggattacaggcacgcgccaccacgcccggctaattttgtatattcagtagagacagggtttctctatgttggtcaggctggtctggaactcctggcctcaggtgatccacccgccttggcctcccaaaatgctgagattacaggcgtgagccaccccgcgcacagcctagactctaattttataaaactttgttgaattttctaagtgtcatttaggacatattgtgcttttctgtggagcttatatcttatcctcttatgtgcaacaaaaagggggtcggaggtaaatgctgatgatgttgtttagttttatttccttttgatctggcatgagtaaattgctctgtttccttaagcttgggtctgttacagagctttgtgccttatagggtgctcagtgtgtgttgacaaagggaataagaactgtcagtgccataaagaaccaaagattctggctactttgtcttcttcctttctctcccactatgcctacacttcctctgcccagacacttttggaaagtgtttaactgctgggttttctttttctttttctttttttttttgagacggagtttcactcttgttgcccaggctggagtgcaatggcgtgatcttggctcaccgcaacctctacctcctgggttcaagtgattctcctgcctcagcctcccgagtagctgggactacaggcatgcgccacaatgcctggctaattttgtatttttagtagagatggggtttctccatgttagtcgggctggtcttgaactcctgacctcaggtgatccacctgtctcgacctcccaaagtgctgggattataggcgtgagccactgcgcctgaccacctacctgctgggttttctttgtatgtcagcatggagtttttcccaaagaaagggaatatggatggagagagagaggttatgaacaggttatgttacagaggttattgcctttgaaactgggccctcatcattctagacttgcttgctttgttataaattagaagaaaccagagggagatgtgccaagtaaacattcgaatgactgtttagaatatggttttcttaattagcagtcatggggaaaacatgcatttttaatttggaaaaaacctgacagttaacatggttctgtttaccttgattagtgaagtaatttgctgcagtgttacagaggagcagaatcacttgggtctcaaaatagactgaaaatttaactccccaaaccaaatttaacaaacagaattggttattagagatttataggcaaaaatatcagtttggaaattaaccttggctactggccaccttagctaggttttctccacagatctgttttctccacagatctgagtacttaacacttcccagatgattggagaatattctgggctgttggggatgacaggaaaatgtgagggggagtagcctaggtaagggtgatgatgaaattgttctatctgctgtcaaataatcttttcctgtttgcaatgtttttattttttctgagtccctttgggaaccaggtgctaacaagaagctgttatgtgtgggatttcggagccttactttaacgatagaggaaccaagtatcattttagatatcttttatttatgttctcggtgcatatgttgactttaatccctcttcccccacacctcgcccattaaggggaaggaggttaactctgcagatgatattcaggcccaaccagctcactctctggggtggctactgactaaaggcagagaatgtccatccaacatgcccttctgactatacagtcaccacttttttgggggaattctttagcagatcttattgttctttctgcagaagctatcattcctacctccccaacccccaaaatctctaatacaggccaagtcattttttatgatgggtctctgagatagggcagtttgttagaggagaggctagggtagagagggagagaatggaggtatctgaaaataagtaagaaaaaggcattgatttttatttactcggaacggtcctcttggcatcccagataagggaaataggatttgatctccaattgtattgccatggagagaatggcaggtgaggatgctttgaagtagttagaaattaaatattgaatacattaatggcaataccatttcatgactttgcatatctttctggattagtcatggaagttggggaaatattgcttagatcttctgggttagaggattccaactgtttattggcaaggttggattattaagaatcaaatagcagacaaaaatggctgggcacggtggctcacgcctgtaatcccagcactttgagaggctgaggtgggtagatcacttgaggtgaggagttcgagaccagcctggccgacatggcaaaaccctgtctctaccaaaatacaaaaattagttgggcatgatggcatacgcctgtagtcccagctactctggaggctgaaacaggagaattgcttgaacccaaaaggtggagtttacagtgagctgagattgtgccactgcactccagcctgggcaatagagcgagactctgtctcaaaaaaaaaaaaaaaagaaggaaagaaagaaaaaacagacaaatggatcagaattggtgcttgagcaagagaaacttcgagcttaggatggttgtctactttaaaataaagctgctggccgggcacagtggctcacgcctgtaacctcagcactttgggaggccaaggcaggtggatcacgaggtcaggagattgagaccatcctggctaacacagtgaaaccctggccctactaaaaatacaaaaaattagccgggcgtggtggtgggtgcctgtagtcccagctactcgggaggctgaggcaggagaatgacgtgaacccaggaggcagagcttgcagtgagctgagatcgccccactgcaacagatcgcctgggcaacagaatgagactcggtctcaaaaaataaaataaaataaaataaaataaaataagtaaagctgctggccagacatggtggctcacgcctgtaatcccagcactttgggaggccgagatgggaggatcacttgaggccaggccagcgtggtgaaactcagtctctactaaaaatacaaaaattagccgggggtggtggcgcatcatcatactggtgagaaaaaaaaaaaaaaaaaagaggccgggcgcggtggctcacaaaaaaaaaaaaaagaaagaaaaaggaaaaaaagaaatatcagtttgagaaatgatttttttttcttttttcttttctttttttttttttaaacagagtctctctctgtcacccaggctggagcgcagtggcatgatcttggctcattgcaacctctgtctcccgggttcaagcgattcttctgcctcagcctctgaagtagctgggattacaggcacgcgctaatttttgtatttttagtacagacgggatttcaccatattggccaggctggtctcgaactcctgacctcgtgatccaccctccttggcctcccaaagtgctgggattacaggtgtgagccaccacgcccagcctctttttttttttttttttctcaccagtatgatgatgaccattttaagaaagcttgtgtggctctctcctatcattacagacctccagagctggaaaatttgatgcatttactgaactcttcctgaaagtttaatatggagtgggaatcagtttttgtcctaatttattagagaaggcttcctcttctctactccttgtgcaaacccatctctggatagctagaaaaggaacttcagaatggactatatgtgatgaccacctgtatgcactctaggctcttatctgtctctattttatgtggtgactatatctcagaagtactaccccttctgagtagtactattatttcctatgccaattttttttaagtctctgatgctgccctttttaaatttttgtcttattttttagcctctttagtattagggggtgaggtgacattcctagactctacagtagcagtttggcatgttagtgacaggaaattgtgattccctatctccccctcctcctaccttttctgcttttgtgattccattgttcctatctcattgaggctttcccaggcattcgaatttagttagtaggtcatttctaatctctgggccttgtcttttctctctccgttcccctccttccctaccacatattttttgtttattctgaggtggtttgtttctgaaagttaatctaggtcaccttctatatcctgtgctttctagttggctttagacatcttgttctagcaacaatgatggtagcagctctctccctgaccttgccccatgtgctgtccttctgtcaaggccatttgtgtgtgtactgcggcaggtgtgtgtgtggggggatgcgcccagactgttctcacaatgtcctcagtttttcaggttgtctgacagctttatgtacagcgtatttttagaaaaacttaaatatacttctttatttagggttttattctgatgagcaagtttgtgtgtatatgtgtgtatgagcatttgtatgtatatatacttatacagatctatattatatatacagtttttgtactatcatttaaaataaaaatgtttctcaataaaatgtcaaagccga

SEQ ID NO: 136163 - DNA, 1634 bp, Homo sapiens
  Payload ID: 6654
  Gene Symbol: GABARAP
  Gene Name: GABA(A) receptor-associated protein
  Uniprot ID: O95166
  ENST ID: ENST00000302386
  CDS Start-End: 441-794
gttgttaacgaaaggaacttggagaaccaagtctcgtatgatgattaccatcttttactcctcttcagccccagcttccttgaggggacggttggggaataggtttagagtaattttcgatgagcaaaagccaaccgtctttgctacgtcgcctgcgtagcccacaaattgattccaaagcgattacgctaatggcgtgagggggccggtcagttggtggtgctacgctagcagcgttagcgccgctgaggtagtggcgtatcttagcggggggggcagtccccgatagtcgggggcggggttggtgaatagggaagtggcgcaaattcgtggatcgctccgctgaatccgcccgcgcgtcgccgccgtcgtcgccgccccccgtcccggcccccctgggttccctcagcccagccctgtccagcccggttcccgggaggatgaagttcgtgtacaaagaagagcatccgttcgagaagcgccgctctgagggcgagaagatccgaaagaaatacccggaccgggtgccggtgatagtagaaaaggctcccaaagctcggataggagacctggacaaaaagaaatacctggtgccttctgatctcacagttggtcagttctacttcttgatccggaagcgaattcatctccgagctgaggatgccttgtttttctttgtcaacaatgtcattccacccaccagtgccacaatgggtcagctgtaccaggaacaccatgaagaagacttctttctctacattgcctacagtgacgaaagtgtctacggtctgtgaagctgctgcccctgagctggaggggggtctcattctacaaagagagaggtggcccccctttcttgacctcctcctccttcaagctcaaacaccacctcccttattcaggaccggcacttcttaatgtttgtggctttctctccagcctctcttaggaggggtaatggtggagttggcatcttgtaactctcctttctcctttcttcccctttctctgcccgcctttcccatcctgctgtagacttcttgattgtcagtctgtgtcacatccagtgattgttttggtttctgttccctttctgactgcccaaggggctcagaaccccagcaatcccttcctttcactaccttcttttttgggggtagttggaagggactgaaattgtggggggaaggtaggaggcacatcaataaagaggaaaccaccaagctgaactgaattttgccttgtgttgctcccctcgtcccgctgattttaagtctttccaaggtgtcagtgggtttcagtggtggggaaagaagagtactgggtacaagctggagggatagaagtatattttggtttattctgttcatgttgggcttttccctgtctgcaaaaagagggtgcttttgttgtgatggaatggaatactgaggattatttcttgaaactttagttttataacacgcatgtgaaactaaatgttaaaaatgctcatgtaaaaaaaaatttttttttactgtgggttcctgtggagaaagttccgaagtacctgctttaggtgaacatccacatttgctagaacattctaactaagatattttcatgtgtgcaagctagtaaaacggctgttctca

SEQ ID NO: 136164 - DNA, 476 bp, Homo sapiens
  Payload ID: 6654
  Gene Symbol: GABARAP
  Gene Name: GABA(A) receptor-associated protein
  ENST ID: ENST00000573928
  CDS Start-End: 118-414
aaattcgtggatcgctccgctgaatccgcccgcgcgtcgccgccgtcgtcgccgccccccgtcccggcccccctgggttccctcagcccagccctgtccagcccggttcccgggaggatgaagttcgtgtacaaagaagagcatccgttcgagaagcgccgctctgagggcgagaagatccgaaagaaatacccggaccgggtgccggtgatagtagaaaaggctcccaaagctcggataggagacctggacaaaaagaaatacctggtgccttctgatctcacagttggtcagttctacttcttgatccggaagcgaattcatctccgagctgaggatgccttgtttttctttgtcaacaatgtcattccacccaccagtgccacaatgggtcagctgtaccaggtatggtgactgggaagtggtggaggctttggagaggaatcttggaagagcgtgaggggaagaaagtgttg

SEQ ID NO: 136165 - DNA, 837 bp, Homo sapiens
  Payload ID: 6654
  Gene Symbol: GABARAP
  Gene Name: GABA(A) receptor-associated protein
  ENST ID: ENST00000571253
  CDS Start-End: 754-837
gaccgggtgccggtgaggacagtagccagggccgagggcgcgggacgcttacgctgacgccacagcctggccttggatcgggacaggcagcgcagggatcaggctgctggctgtggtggggttggcagcgagcctgaaactgctgtccttgggacccaggatgaaaggagtggggtagtggtggatgtggggttgagagggatgtggacaggagagagaaaccttagcatttgaggccttagagagtttgacagcctgagcttcaaatggtcatccccccagctagctaaggttgcgagattgaatcactagtcgacccaaacaagtcacctccgtctgattaagatagttgtttatggtgacgccctattgggggatggatcctggatatttaaatgagctccagtcagtgaggtcaggatctctgggactcagtgctgcaccgcgtgtacaaagacaaagagatgaatctggggtagatttaggtgctaggaatattgtttcttgagttcttgacaggtgcagcttcggggctgcattccttctgtctcctaattttcatctctttatcaggtgatagtagaaaaggctcccaaagctcggataggagacctggacaaaaagaaatacctggtgccttctgatctcacagttggtcagttctacttcttgatccggaagcgaattcatctccgagctgaggatgccttgtttttctttgtcaacaatgtcattccacccaccagtgccacaatgggtcagctgtaccaggaacaccatgaagaagacttctttctctacattgcctacagtgacgaaagtgtctacggtctgtga

SEQ ID NO: 136166 - DNA, 583 bp, Homo sapiens
  Payload ID: 6654
  Gene Symbol: GABARAP
  Gene Name: GABA(A) receptor-associated protein
  ENST ID: ENST00000570856
  CDS Start-End: 29-139
agccctgtccagcccggttcccgggaggatgaagttcgtgtacaaagaagagcatccgttcgagaagcgccgctctgagggcgagaagatccgaaagaaatacccggaccgggtgccgttggtcagttctacttcttgatccggaagcgaattcatctccgagctgaggatgccttgtttttctttgtcaacaatgtcattccacccaccagtgccacaatgggtcagctgtaccaggaacaccatgaagaagacttctttctctacattgcctacagtgacgaaagtgtctacggtctgtgaagctgctgcccctgagctggaggggggtctcattctacaaagagagaggtggcccccctttcttgacctcctcctccttcaagctcaaacaccacctcccttattcaggaccggcacttcttaatgtttgtggctttctctccagcctctcttaggaggggtaatggtggagttggcatcttgtaactctcctttctcctttcttcccctttctctgcccgcctttcccatcctgctgtagacttcttgattgtcagtctgtgtcacatccagtgattgt

SEQ ID NO: 136167 - DNA, 762 bp, Homo sapiens
  Payload ID: 6654
  Gene Symbol: GABARAP
  Gene Name: GABA(A) receptor-associated protein
  ENST ID: ENST00000577035
  CDS Start-End: 233-316
agtgctgcaccgcgtgtacaaagacaaagagatgaatctggggtagatttaggtgatagtagaaaaggctcccaaagctcggataggagacctggacaaaaagaaatacctggtgccttctgatctcacagttggtcagttctacttcttgatccggaagcgaattcatctccgagctgaggatgccttgtttttctttgtcaacaatgtcattccacccaccagtgccacaatgggtcagctgtaccaggaacaccatgaagaagacttctttctctacattgcctacagtgacgaaagtgtctacggtctgtgaagctgctgcccctgagctggaggggggtctcattctacaaagagagaggtggcccccctttcttgacctcctcctccttcaagctcaaacaccacctcccttattcaggaccggcacttcttaatgtttgtggctttctctccagcctctcttaggaggggtaatggtggagttggcatcttgtaactctcctttctcctttcttcccctttctctgcccgcctttcccatcctgctgtagacttcttgattgtcagtctgtgtcacatccagtgattgttttggtttctgttccctttctgactgcccaaggggctcagaaccccagcaatcccttcctttcactaccttcttttttgggggtagttggaagggactgaaattgtggggggaaggtaggaggcacatcaataaagaggaaaccaccaagctgaactgaattttgc

SEQ ID NO: 136168 - DNA, 568 bp, Homo sapiens
  Payload ID: 6654
  Gene Symbol: GABARAP
  Gene Name: GABA(A) receptor-associated protein
  ENST ID: ENST00000571129
  CDS Start-End: 259-342
gatcaggctgctggctgtggtggggttggcagcgagcctgaaactgctgtccttgggacccaggatgaaaggagtggggtgatagtagaaaaggctcccaaagctcggataggagacctggacaaaaagaaatacctggtgccttctgatctcacagttggtcagttctacttcttgatccggaagcgaattcatctccgagctgaggatgccttgtttttctttgtcaacaatgtcattccacccaccagtgccacaatgggtcagctgtaccaggaacaccatgaagaagacttctttctctacattgcctacagtgacgaaagtgtctacggtctgtgaagctgctgcccctgagctggaggggggtctcattctacaaagagagaggtggcccccctttcttgacctcctcctccttcaagctcaaacaccacctcccttattcaggaccggcacttcttaatgtttgtggctttctctccagcctctcttaggaggggtaatggtggagttggcatcttgtaactctcctttctcctttcttcccctttctctgcccgccttt

SEQ ID NO: 136169 - DNA, 1957 bp, Homo sapiens
  Payload ID: 6655
  Gene Symbol: GABARAPL1
  Gene Name: GABA(A) receptor-associated protein like 1
  Uniprot ID: Q9H0R8
  ENST ID: ENST00000266458
  CDS Start-End: 326-679
ctgggcgcctggcgcatggggggcggggcggggctcgcggggtgacgtcacagcccgacgcgccacccagctgtttttgtgctcccagctctagcgaaaagccgccggtatttctccatctggctctcctctacctccaggcaggctcacccgagatccccgccccgaaccccccctgcacactcggcccagcgctgttgcccccggagcggacgtttctgcagctattctgagcacaccttgacgtcggctgagggagcgggacagggtcagcggcgaaggaggcaggccccgcgcggggatctcggaagccctgcggtgcatcatgaagttccagtacaaggaggaccatccctttgagtatcggaaaaaggaaggagaaaagatccggaagaaatatccggacagggtccccgtgattgtagagaaggctccaaaagccagggtgcctgatctggacaagaggaagtacctagtgccctctgaccttactgttggccagttctacttcttaatccggaagagaatccacctgagacctgaggacgccttattcttctttgtcaacaacaccatccctcccaccagtgctaccatgggccaactgtatgaggacaatcatgaggaagactattttctgtatgtggcctacagtgatgagagtgtctatgggaaatgagtggttggaagcccagcagatgggagcacctggacttgggggtaggggaggggtgtgtgtgcgcgacatggggaaagagggtggctcccaccgcaaggagacagaaggtgaagacatctagaaacattacaccacacacaccgtcatcacattttcacatgctcaattgatattttttgctgcttcctcggcccagggagaaagcatgtcaggacagagctgttggattggctttgatagaggaatggggatgatgtaagtttacagtattcctggggtttaattgttgtgcagtttcatagatgggtcaggaggtggacaagttggggccagagatgatggcagtccagcagcaactccctgtgctcccttctctttgggcagagattctatttttgacatttgcacaagacaggtagggaaaggggacttgtggtagtggaccatacctggggaccaaaagagacccactgtaattgatgcattgtggcccctgatcttccctgtctcacacttcttttctcccatcccggttgcaatctcactcagacatcacagtaccaccccaggggtggcagtagacaacaacccagaaatttagacagggatctcttacctttggaaaataggggttaggcatgaaggtggttgtgattaagaagatggttttgttattaaatagcattaaactggaattgacaagagtgttgagcatccctgtctaacctgctctttctctttggtgccccttatctcaccccttccttggaatttaataagtctcaggcatttccaattgtagactaaaaccactcttagcatctcctctagtattttccatgtatcaggacagaggtgtcttatgtagggagggggcaagtatgaagtaaggtaattatatactactctcattcaggattcttgctcccatgctgctgtcccttcaggctcacatgcacaggaatgctacatgatggccagctgcttccctccttggttatcatccactgcagctgctagttagaaaggtttggagggatgacttttagtaaatcatggggattttattgatttattttcacttttgggattttgtggggtgggagtggggagcaggaattgcactcagacatgacatttcaattcatctctgctaatgaaaagggttctttctcttgggggaaatgtgtgtgtcagttctgtcagctgcaagttcttgtataatgaagtcaatgccatcaggccaaggaaataaaataattgcttaccttaaaaatc

SEQ ID NO: 136170 - DNA, 855 bp, Homo sapiens
  Payload ID: 6655
  Gene Symbol: GABARAPL1
  Gene Name: GABA(A) receptor-associated protein like 1
  Uniprot ID: Q9H0R8
  ENST ID: ENST00000421801
  CDS Start-End: 295-735
ggctcgcggggtgacgtcacagcccgacgcgccacccagctgtttttgtgctcccagctctagcgaaaagccgccggtatttctccatctggctctcctctacctccaggcaggctcacccgagatccccgccccgaaccccccctgcacactcggcccagcgctgttgcccccggagcggacgtttctgcagctattctgagcacaccttgacgtcggctgagggagcgggacagggtcagcggcgaaggaggcaggccccgcgcggggatctcggaagccctgcggtgcatcatgaagttccagtacaaggaggaccatccctttgagtatcggaaaaaggaaggagaaaagatccggaagaaatatccggacagggtccccgtgattgtagagaaggctccaaaagccagggtgcctgatctggacaagaggaagtacctagtgccctctgaccttactgttggccagttctacttcttaatccggaagagaatccacctgagacctgaggacgccttattcttctttgtcaacaacaccatccctcccaccagtgctaccatgggccaactgtatgaggtaatggttctggttgcacaatactggatgccgtccagtgcagtctggcatcctctagcccttgttctagatgcgttgataacacatctgagaagtggggcagaaggtgttatttatccggatcctcttacatatggcagtgtaaggctctgagagattagatacctcttgttttttagggattagccactctactagatttaatccttctgaaatcttgtctgactatagtcttgtctgactatagtgttttaatgctggactgtttattga

SEQ ID NO: 136171 - DNA, 582 bp, Homo sapiens
  Payload ID: 6655
  Gene Symbol: GABARAPL1
  Gene Name: GABA(A) receptor-associated protein like 1
  ENST ID: ENST00000545290
  CDS Start-End: 552-582
gcaaacccagtcgatttctgccttggctggttctcctttaatgaagttgactttggctctcatatcattggtcttgggacgaaaaggttcagaagctattcagtaattttcttgcattacagggggttaggggagcacaagacagtcctggcctggaaaacaaggtcacgttctctgcccaacagccctcttgcctcatcgttctaggctccggggcttgtgtggggacagccagcctcctcgtgttgatttctgatcacctggtacctggtcgcgataaggcaggactgagacgttttttctccgttttggacaccggcttaagtagttaaaactaccgcaggcagtgagtaggaacagaaaagtattaggtgattgtagagaaggctccaaaagccagggtgcctgatctggacaagaggaagtacctagtgccctctgaccttactgttggccagttctacttcttaatccggaagagaatccacctgagacctgaggacgccttattcttctttgtcaacaacaccatccctcccaccagtgctaccatgggccaactgtatgaggacaatcatgagg

SEQ ID NO: 136172 - DNA, 1423 bp, Homo sapiens
  Payload ID: 6655
  Gene Symbol: GABARAPL1
  Gene Name: GABA(A) receptor-associated protein like 1
  ENST ID: ENST00000542722
  CDS Start-End: 483-614
ttggccaaagggatcccaggaggcctggccctcttttctcctgaggctggatcccaaccagcaggaaaaggctggattttcgccttttgtatttgttttggggcccaaccaagaaaaacagtggagggggaataaaacatgtttaaatcttttttttgtcttaaaaccatctttaatttcacagtcacaaaataaaacataactcgaatgttttgatgtttgcagtgacatcgattgtgaaaaagctctagcgaaaagccgccggtatttctccatctggctctcctctacctccaggcaggctcacccgagatccccgccccgaaccccccctgcacactcggcccagcgctgttgcccccggagcggacgtttctgcagctattctgagcacaccttgacgtcggctgagggagcgggacagggtcagcggcgaaggaggcaggccccgcgcggggatctcggaagccctgcggtgcatcatgaagttccagtacaaggaggaccatccctttgagtatcggaaaaaggaaggagaaaagatccggaagaaatatccggacagggtccccgctccggggcttgtgtggggacagccagcctcctcgtgttgatttctgatcacctggtacctggtcgcgataaggcaggactgagacgttttttctccgttttggacaccggcttaagtagttaaaactaccgcaggcagtgagtaggaacagaaaagtattaggtatctttcagcatccgggcgttttccccattaccccctcccccgcccacttgcctggtgtttctctaatgcaggctgcgcagccgaattggagggcagaatatggcttaagtggtagggggaccagcagctgttggattttggaaatggaggagcggagattttaaaattgtgctctttatcttcaggtgattgtagagaaggctccaaaagccagggtgcctgatctggacaagaggaagtacctagtgccctctgaccttactgttggccagttctacttcttaatccggaagagaatccacctgagacctgaggacgccttattcttctttgtcaacaacaccatccctcccaccagtgctaccatgggccaactgtatgaggacaatcatgaggaagactattttctgtatgtggcctacagtgatgagagtgtctatgggaaatgagtggttggaagcccagcagatgggagcacctggacttgggggtaggggaggggtgtgtgtgcgcgacatggggaaagagggtggctcccaccgcaaggagacagaaggtgaagacatctagaaacattacaccacacacaccgtcatcacattttcacatgctcaattgatattttttgctgcttcctcggcccagggagaaagcatgtcaggacagagctgttggattggcttt

SEQ ID NO: 136173 - DNA, 531 bp, Homo sapiens
  Payload ID: 6655
  Gene Symbol: GABARAPL1
  Gene Name: GABA(A) receptor-associated protein like 1
  ENST ID: ENST00000544284
  CDS Start-End: 350-433
acagcccgacgcgccacccagctgtttttgtgctcccagctctagcgaaaagccgccggtatttctccatctggctctcctctacctccagtacaaggaggaccatccctttgagtatcggaaaaaggaaggagaaaagatccggaagaaatatccggacagggtccccgtgattgtagagaaggctccaaaagccagggtgcctgatctggacaagaggaagtacctagtgccctctgaccttactgttggccagttctacttcttaatccggaagagaatccacctgagacctgaggacgccttattcttctttgtcaacaacaccatccctcccaccagtgctaccatgggccaactgtatgaggacaatcatgaggaagactattttctgtatgtggcctacagtgatgagagtgtctatgggaaatgagtggttggaagcccagcagatgggagcacctggacttgggggtaggggaggggtgtgtgtgcgcgacatggggaaagagggtggctcccaccgcaagg

SEQ ID NO: 136174 - DNA, 559 bp, Homo sapiens
  Payload ID: 6655
  Gene Symbol: GABARAPL1
  Gene Name: GABA(A) receptor-associated protein like 1
  ENST ID: ENST00000545047
  CDS Start-End: 254-364
gtttttgtgctcccagctctagcgaaaagccgccggtatttctccatctggctctcctctacctccaggcaggctcacccgagatccccgccccgaaccccccctgcacactcggcccagcgctgttgcccccggagcggacgtttctgcagctattctgagcacaccttgacgtcggctgagggagcgggacagggtcagcggcgaaggaggcaggccccgcgcggggatctcggaagccctgcggtgcatcatgaagttccagtacaaggaggaccatccctttgagtatcggaaaaaggaaggagaaaagatccggaagaaatatccggacagggtccccttggccagttctacttcttaatccggaagagaatccacctgagacctgaggacgccttattcttctttgtcaacaacaccatccctcccaccagtgctaccatgggccaactgtatgaggtaatggttctggttgcacaatactggatgccgtccagtgcagtctggcatcctctagcccttgttctagatgcgttgataacacatctgagaagtg

SEQ ID NO: 136175 - DNA, 760 bp, Homo sapiens
  Payload ID: 6655
  Gene Symbol: GABARAPL1
  Gene Name: GABA(A) receptor-associated protein like 1
  ENST ID: ENST00000539408
  CDS Start-End: 482-613
ggggcagcggaacgcgcagagggcacggtgcaagcacgggacagctctgcattggccaaagggatcccaggaggcctggccctcttttctcctgaggctggatcccaaccagcaggaaaaggctggattttcgccttttgtatttgttttggggcccaaccaagaaaaacagtggagggggaataaaacatgtttaaatcttttttttgtcttaaaaccatctttaatttcacagtcacaaaataaaacataactcgaatgttttgatgtttgcagtgacatcgattgtgaaaaaggcaggctcacccgagatccccgccccgaaccccccctgcacactcggcccagcgctgttgcccccggagcggacgtttctgcagctattctgagcacaccttgacgtcggctgagggagcgggacagggtcagcggcgaaggaggcaggccccgcgcggggatctcggaagccctgcggtgcatcatgaagttccagtacaaggaggaccatccctttgagtatcggaaaaaggaaggagaaaagatccggaagaaatatccggacagggtccccgctccggggcttgtgtggggacagccagcctcctcgtgttgatttctgatcacctggtacctggtcgcgataaggcaggactgagacgttttttctccgttttggacaccggcttaagtagttaaaactaccgcaggcagctgcgcagccgaattggagggcagaatatggcttaagtggtagggggac

SEQ ID NO: 136176 - DNA, 2321 bp, Homo sapiens
  Payload ID: 6655
  Gene Symbol: GABARAPL1
  Gene Name: GABA(A) receptor-associated protein like 1
  ENST ID: ENST00000540424
  CDS Start-End: 234-365
agcgaaaagccgccggtatttctccatctggctctcctctacctccaggcaggctcacccgagatccccgccccgaaccccccctgcacactcggcccagcgctgttgcccccggagcggacgtttctgcagctattctgagcacaccttgacgtcggctgagggagcgggacagggtcagcggcgaaggaggcaggccccgcgcggggatctcggaagccctgcggtgcatcatgaagttccagtacaaggaggaccatccctttgagtatcggaaaaaggaaggagaaaagatccggaagaaatatccggacagggtccccgctccggggcttgtgtggggacagccagcctcctcgtgttgatttctgatcacctggtacctggtcgcgataaggcaggactgagacgttttttctccgttttggacaccggcttaagtagttaaaactaccgcaggcagtgagtaggaacagaaaagtattaggtatctttcagcatccgggcgttttccccattaccccctcccccgcccacttgcctggtgtttctctaatgcaggctgcgcagccgaattggagggcagaatatggcttaagtggtagggggaccagcagctgttggattttggaaatggaggagcggagattttaaaattgtgctctttatcttcagatggagtattcaaagcacaaagaaatgcagtaacttcctaaaggtttcacattgctgatctgtggttgagctggaattccaaccctgtctgaaggactgtggagctctcgggtgattgtagagaaggctccaaaagccagggtgcctgatctggacaagaggaagtacctagtgccctctgaccttactgttggccagttctacttcttaatccggaagagaatccacctgagacctgaggacgccttattcttctttgtcaacaacaccatccctcccaccagtgctaccatgggccaactgtatgaggacaatcatgaggaagactattttctgtatgtggcctacagtgatgagagtgtctatgggaaatgagtggttggaagcccagcagatgggagcacctggacttgggggtaggggaggggtgtgtgtgcgcgacatggggaaagagggtggctcccaccgcaaggagacagaaggtgaagacatctagaaacattacaccacacacaccgtcatcacattttcacatgctcaattgatattttttgctgcttcctcggcccagggagaaagcatgtcaggacagagctgttggattggctttgatagaggaatggggatgatgtaagtttacagtattcctggggtttaattgttgtgcagtttcatagatgggtcaggaggtggacaagttggggccagagatgatggcagtccagcagcaactccctgtgctcccttctctttgggcagagattctatttttgacatttgcacaagacaggtagggaaaggggacttgtggtagtggaccatacctggggaccaaaagagacccactgtaattgatgcattgtggcccctgatcttccctgtctcacacttcttttctcccatcccggttgcaatctcactcagacatcacagtaccaccccaggggtggcagtagacaacaacccagaaatttagacagggatctcttacctttggaaaataggggttaggcatgaaggtggttgtgattaagaagatggttttgttattaaatagcattaaactggaattgacaagagtgttgagcatccctgtctaacctgctctttctctttggtgccccttatctcaccccttccttggaatttaataagtctcaggcatttccaattgtagactaaaaccactcttagcatctcctctagtattttccatgtatcaggacagaggtgtcttatgtagggagggggcaagtatgaagtaaggtaattatatactactctcattcaggattcttgctcccatgctgctgtcccttcaggctcacatgcacaggaatgctacatgatggccagctgcttccctccttggttatcatccactgcagctgctagttagaaaggtttggagggatgacttttagtaaatcatggggattttattgatttattttcacttttgggattttgtggggtgggagtggggagcaggaattgcactcagacatgacatttcaattcatctctgctaatgaaaagggttctttctcttgggggaaatgtgtgtgtcagttctgtcagctgcaagttcttgtataatgaagtcaatgccatcaggccaaggaaataaaataattgcttacctt

SEQ ID NO: 136177 - DNA, 572 bp, Homo sapiens
  Payload ID: 6655
  Gene Symbol: GABARAPL1
  Gene Name: GABA(A) receptor-associated protein like 1
  ENST ID: ENST00000537201
  CDS Start-End: 209-340
atctggctctcctctacctccaggcaggctcacccgagatccccgccccgaaccccccctgcacactcggcccagcgctgttgcccccggagcggacgtttctgcagctattctgagcacaccttgacgtcggctgagggagcgggacagggtcagcggcgaaggaggcaggccccgcgcggggatctcggaagccctgcggtgcatcatgaagttccagtacaaggaggaccatccctttgagtatcggaaaaaggaaggagaaaagatccggaagaaatatccggacagggtccccgctccggggcttgtgtggggacagccagcctcctcgtgttgatttctgatcacctggtacctggtcgcgataaggcaggactgagacgttttttctccgttttggacaccggcttaagtagttaaaactaccgcaggcagctgcgcagccgaattggagggcagaatatggcttaagtggtagggggaccagcagctgttggattttggaaatggaggagcggagattttaaaattgtgctctttatcttcagatggagtattcaaagcacaaa

SEQ ID NO: 136178 - DNA, 553 bp, Homo sapiens
  Payload ID: 6655
  Gene Symbol: GABARAPL1
  Gene Name: GABA(A) receptor-associated protein like 1
  ENST ID: ENST00000545859
  CDS Start-End: 343-553
gtatttgttttggggcccaaccaagaaaaacagtggagggggaataaaacatgtttaaatcttttttttgtcttaaaaccatctttaatttcacagtcacaaaataaaacataactcgaatgttttgatgtttgcagtgacatcgattgtgaaaaaggcaggctcacccgagatccccgccccgaaccccccctgcacactcggcccagcgctgttgcccccggagcggacgtttctgcagctattctgagcacaccttgacgtcggctgagggagcgggacagggtcagcggcgaaggaggcaggccccgcgcggggatctcggaagccctgcggtgcatcatgaagttccagtacaaggaggaccatccctttgagtatcggaaaaaggaaggagaaaagatccggaagaaatatccggacagggtccccgtgattgtagagaaggctccaaaagccagggtgcctgatctggacaagaggaagtacctagtgccctctgaccttactgttggccagttctacttcttaatccggaagagaatccacctga

SEQ ID NO: 136179 - DNA, 571 bp, Homo sapiens
  Payload ID: 6655
  Gene Symbol: GABARAPL1
  Gene Name: GABA(A) receptor-associated protein like 1
  Uniprot ID: Q9H0R8
  ENST ID: ENST00000545887
  CDS Start-End: 101-454
ctctcctctacctccaggcaggctcacccgagatccccgccccgaaccccccctgcacactcggccccgcgcggggatctcggaagccctgcggtgcatcatgaagttccagtacaaggaggaccatccctttgagtatcggaaaaaggaaggagaaaagatccggaagaaatatccggacagggtccccgtgattgtagagaaggctccaaaagccagggtgcctgatctggacaagaggaagtacctagtgccctctgaccttactgttggccagttctacttcttaatccggaagagaatccacctgagacctgaggacgccttattcttctttgtcaacaacaccatccctcccaccagtgctaccatgggccaactgtatgaggacaatcatgaggaagactattttctgtatgtggcctacagtgatgagagtgtctatgggaaatgagtggttggaagcccagcagatgggagcacctggacttgggggtaggggaggggtgtgtgtgcgcgacatggggaaagagggtggctcccaccgcaaggagacagaaggtgaagacat

SEQ ID NO: 136180 - DNA, 1700 bp, Homo sapiens
  Payload ID: 6655
  Gene Symbol: GABARAPL1
  Gene Name: GABA(A) receptor-associated protein like 1
  ENST ID: ENST00000539170
  CDS Start-End: 359-442
gacggcgttttgggggccgagccgccgtcttcagtgactcagcaacccacacacggtctcagcagctgagaccgtgtgtgggttgcggtgcacaaaatagggcccctgtgggcgagactggttagatcggggccatggattggctgcctttaagaacgcagggacattgtgctgtgcggtgattgtagagaaggctccaaaagccagggtgcctgatctggacaagaggaagtacctagtgccctctgaccttactgttggccagttctacttcttaatccggaagagaatccacctgagacctgaggacgccttattcttctttgtcaacaacaccatccctcccaccagtgctaccatgggccaactgtatgaggacaatcatgaggaagactattttctgtatgtggcctacagtgatgagagtgtctatgggaaatgagtggttggaagcccagcagatgggagcacctggacttgggggtaggggaggggtgtgtgtgcgcgacatggggaaagagggtggctcccaccgcaaggagacagaaggtgaagacatctagaaacattacaccacacacaccgtcatcacattttcacatgctcaattgatattttttgctgcttcctcggcccagggagaaagcatgtcaggacagagctgttggattggctttgatagaggaatggggatgatgtaagtttacagtattcctggggtttaattgttgtgcagtttcatagatgggtcaggaggtggacaagttggggccagagatgatggcagtccagcagcaactccctgtgctcccttctctttgggcagagattctatttttgacatttgcacaagacaggtagggaaaggggacttgtggtagtggaccatacctggggaccaaaagagacccactgtaattgatgcattgtggcccctgatcttccctgtctcacacttcttttctcccatcccggttgcaatctcactcagacatcacagtaccaccccaggggtggcagtagacaacaacccagaaatttagacagggatctcttacctttggaaaataggggttaggcatgaaggtggttgtgattaagaagatggttttgttattaaatagcattaaactggaattgacaagagtgttgagcatccctgtctaacctgctctttctctttggtgccccttatctcaccccttccttggaatttaataagtctcaggcatttccaattgtagactaaaaccactcttagcatctcctctagtattttccatgtatcaggacagaggtgtcttatgtagggagggggcaagtatgaagtaaggtaattatatactactctcattcaggattcttgctcccatgctgctgtcccttcaggctcacatgcacaggaatgctacatgatggccagctgcttccctccttggttatcatccactgcagctgctagttagaaaggtttggagggatgacttttagtaaatcatggggattttattgatttattttcacttttgggattttgtggggtgggagtggggagcaggaattgcactcagacatgacatttcaattcatctctgctaatgaaaagggttctttctcttgggggaaatgtgtgtgtcagttctgtcagctgcaagttcttgtataatgaagtcaatgccatcaggccaaggaaataaaat

SEQ ID NO: 136181 - DNA, 792 bp, Homo sapiens
  Payload ID: 6655
  Gene Symbol: GABARAPL1
  Gene Name: GABA(A) receptor-associated protein like 1
  ENST ID: ENST00000535576
  CDS Start-End: 709-792
gacggcgttttgggggccgagccgccgtcttcagtgactcagcaacccacacacggtctcagcagctgagaccgtgtgtgggttgcggtgcacaaaatagggcccctgtgggcgagactggttagatcggggccatggattggctgcctttaagaacgcagggacattgtgctgtgcggtgaggtttgcgcaaacccagtcgatttctgccttggctggttctcctttaatgaagttgactttggctctcatatcattggtcttgggacgaaaaggctccggggcttgtgtggggacagccagcctcctcgtgttgatttctgatcacctggtacctggtcgcgataaggcaggactgagacgttttttctccgttttggacaccggcttaagtagttaaaactaccgcaggcagctgcgcagccgaattggagggcagaatatggcttaagtggtagggggaccagcagctgttggattttggaaatggaggagcggagattttaaaattgtgctctttatcttcaggtgattgtagagaaggctccaaaagccagggtgcctgatctggacaagaggaagtacctagtgccctctgaccttactgttggccagttctacttcttaatccggaagagaatccacctgagacctgaggacgccttattcttctttgtcaacaacaccatccctcccaccagtgctaccatgggccaactgtatgaggacaatcatgaggaagactattttctgtatgtggcctacagtgatgagagtgtctatgggaaatga

SEQ ID NO: 136182 - DNA, 3214 bp, Homo sapiens
  Payload ID: 6655
  Gene Symbol: GABARAPL1
  Gene Name: GABA(A) receptor-associated protein like 1
  ENST ID: ENST00000541960
  CDS Start-End: 25-336
atctcggaagccctgcggtgcatcatgaagttccagtacaaggaggaccatccctttgagtatcggaaaaaggaaggagaaaagatccggaagaaatatccggacagggtccccgtgagtgtagaggagcggaggggatgggaggggaagggcccgcgggggcgggggcgggtagtcgagatggcttccctggggcgcccaggcggctctggagaagggaggttccgagaattacttaatcctgaacgcccttcagtgccagagccaatggacgtccagactgtagagcttttaaaaccccgtatgcctgggccccgaaccccacttcagggctgacggcgttttgggggccgagccgccgtcttcagtgactcagcaacccacacacggtctcagcagctgagaccgtgtgtgggttgcggtgcacaaaatagggcccctgtgggcgagactggttagatcggggccatggattggctgcctttaagaacgcagggacattgtgctgtgcggtgaggtttgcgcaaacccagtcgatttctgccttggctggttctcctttaatgaagttgactttggctctcatatcattggtcttgggacgaaaaggttcagaagctattcagtaattttcttgcattacagggggttaggggagcacaagacagtcctggcctggaaaacaaggtcacgttctctgcccaacagccctcttgcctcatcgttctaggctccggggcttgtgtggggacagccagcctcctcgtgttgatttctgatcacctggtacctggtcgcgataaggcaggactgagacgttttttctccgttttggacaccggcttaagtagttaaaactaccgcaggcagtgagtaggaacagaaaagtattaggtatctttcagcatccgggcgttttccccattaccccctcccccgcccacttgcctggtgtttctctaatgcaggctgcgcagccgaattggagggcagaatatggcttaagtggtagggggaccagcagctgttggattttggaaatggaggagcggagattttaaaattgtgctctttatcttcaggtaggaacattagtattacgtgtcacataatggtaaaataattgctgttatctgatgtcttttcttgactcacagccactctgggtttcttctctaatccttacctaacgttcgtggttttatagctaccagaagccaccagggccttagcccagcagtagaaacctcttgtaacccttttcctttaaaaagaaaaaaaagtcattagggctcttcattccccaggaattacaaaaaggttttcagcttatagaggggtgagctaatcccttactcgggaaaggatcctttacaaattactttcctggtttctggaccttggatacctgaaaattttgcccagttctggtgataccaatcttttgagcaatgatatttaaaaaatacaatcaagttttattgatagtttaccctagcggtattataagtactcagtctgtaatcattgacttacttccttacacgattacccgttctacagatggagtattcaaagcacaaagaaatgcagtaacttcctaaaggtttcacattgctgatctgtggttgagctggaattccaaccctgtctgaaggactgtggagctctcgggtgattgtagagaaggctccaaaagccagggtgcctgatctggacaagaggaagtacctagtgccctctgaccttactgttggccagttctacttcttaatccggaagagaatccacctgagacctgaggacgccttattcttctttgtcaacaacaccatccctcccaccagtgctaccatgggccaactgtatgaggacaatcatgaggaagactattttctgtatgtggcctacagtgatgagagtgtctatgggaaatgagtggttggaagcccagcagatgggagcacctggacttgggggtaggggaggggtgtgtgtgcgcgacatggggaaagagggtggctcccaccgcaaggagacagaaggtgaagacatctagaaacattacaccacacacaccgtcatcacattttcacatgctcaattgatattttttgctgcttcctcggcccagggagaaagcatgtcaggacagagctgttggattggctttgatagaggaatggggatgatgtaagtttacagtattcctggggtttaattgttgtgcagtttcatagatgggtcaggaggtggacaagttggggccagagatgatggcagtccagcagcaactccctgtgctcccttctctttgggcagagattctatttttgacatttgcacaagacaggtagggaaaggggacttgtggtagtggaccatacctggggaccaaaagagacccactgtaattgatgcattgtggcccctgatcttccctgtctcacacttcttttctcccatcccggttgcaatctcactcagacatcacagtaccaccccaggggtggcagtagacaacaacccagaaatttagacagggatctcttacctttggaaaataggggttaggcatgaaggtggttgtgattaagaagatggttttgttattaaatagcattaaactggaattgacaagagtgttgagcatccctgtctaacctgctctttctctttggtgccccttatctcaccccttccttggaatttaataagtctcaggcatttccaattgtagactaaaaccactcttagcatctcctctagtattttccatgtatcaggacagaggtgtcttatgtagggagggggcaagtatgaagtaaggtaattatatactactctcattcaggattcttgctcccatgctgctgtcccttcaggctcacatgcacaggaatgctacatgatggccagctgcttccctccttggttatcatccactgcagctgctagttagaaaggtttggagggatgacttttagtaaatcatggggattttattgatttattttcacttttgggattttgtggggtgggagtggggagcaggaattgcactcagacatgacatttcaattcatctctgctaatgaaaagggttctttctcttgggggaaatgtgtgtgtcagttctgtcagctgcaagttcttgtataatgaagtcaatgccatcaggccaaggaaataaaataattgcttaccttaaaaa

SEQ ID NO: 136183 - DNA, 653 bp, Homo sapiens
  Payload ID: 6655
  Gene Symbol: GABARAPL1
  Gene Name: GABA(A) receptor-associated protein like 1
  Uniprot ID: Q9H0R8
  ENST ID: ENST00000543602
  CDS Start-End: 146-586
gtgctcccagctctagcgaaaagccgccggtatttctccatctggctctcctctacctccaggcaggctcacccgagatccccgccccgaaccccccctgcacactcggccccgcgcggggatctcggaagccctgcggtgcatcatgaagttccagtacaaggaggaccatccctttgagtatcggaaaaaggaaggagaaaagatccggaagaaatatccggacagggtccccgtgattgtagagaaggctccaaaagccagggtgcctgatctggacaagaggaagtacctagtgccctctgaccttactgttggccagttctacttcttaatccggaagagaatccacctgagacctgaggacgccttattcttctttgtcaacaacaccatccctcccaccagtgctaccatgggccaactgtatgaggtaatggttctggttgcacaatactggatgccgtccagtgcagtctggcatcctctagcccttgttctagatgcgttgataacacatctgagaagtggggcagaaggtgttatttatccggatcctcttacatatggcagtgtaaggctctgagagattagatacctcttgttttttagggattagccactctactagatttaatccttctgaaatcttg

SEQ ID NO: 136184 - DNA, 584 bp, Homo sapiens
  Payload ID: 6655
  Gene Symbol: GABARAPL1
  Gene Name: GABA(A) receptor-associated protein like 1
  ENST ID: ENST00000541453
  CDS Start-End: 254-364
gtttttgtgctcccagctctagcgaaaagccgccggtatttctccatctggctctcctctacctccaggcaggctcacccgagatccccgccccgaaccccccctgcacactcggcccagcgctgttgcccccggagcggacgtttctgcagctattctgagcacaccttgacgtcggctgagggagcgggacagggtcagcggcgaaggaggcaggccccgcgcggggatctcggaagccctgcggtgcatcatgaagttccagtacaaggaggaccatccctttgagtatcggaaaaaggaaggagaaaagatccggaagaaatatccggacagggtccccttggccagttctacttcttaatccggaagagaatccacctgagacctgaggacgccttattcttctttgtcaacaacaccatccctcccaccagtgctaccatgggccaactgtatgaggacaatcatgaggaagactattttctgtatgtggcctacagtgatgagagtgtctatgggaaatgagtggttggaagcccagcagatgggagcacctggacttgggggtaggggaggggtgt

SEQ ID NO: 136185 - DNA, 2294 bp, Homo sapiens
  Payload ID: 6655
  Gene Symbol: GABARAPL1
  Gene Name: GABA(A) receptor-associated protein like 1
  ENST ID: ENST00000546017
  CDS Start-End: 940-1023
acttcagggctgacggcgttttgggggccgagccgccgtcttcagtgactcagcaacccacacacggtctcagcagctgagaccgtgtgtgggttgcggtgcacaaaatagggcccctgtgggcgagactggttagatcggggccatggattggctgcctttaagaacgcagggacattgtgctgtgcggtgaggtttgcgcaaacccagtcgatttctgccttggctggttctcctttaatgaagttgactttggctctcatatcattggtcttgggacgaaaaggttcagaagctattcagtaattttcttgcattacagggggttaggggagcacaagacagtcctggcctggaaaacaaggtcacgttctctgcccaacagccctcttgcctcatcgttctaggctccggggcttgtgtggggacagccagcctcctcgtgttgatttctgatcacctggtacctggtcgcgataaggcaggactgagacgttttttctccgttttggacaccggcttaagtagttaaaactaccgcaggcagtgagtaggaacagaaaagtattaggtatctttcagcatccgggcgttttccccattaccccctcccccgcccacttgcctggtgtttctctaatgcaggctgcgcagccgaattggagggcagaatatggcttaagtggtagggggaccagcagctgttggattttggaaatggaggagcggagattttaaaattgtgctctttatcttcaggtgattgtagagaaggctccaaaagccagggtgcctgatctggacaagaggaagtacctagtgccctctgaccttactgttggccagttctacttcttaatccggaagagaatccacctgagacctgaggacgccttattcttctttgtcaacaacaccatccctcccaccagtgctaccatgggccaactgtatgaggacaatcatgaggaagactattttctgtatgtggcctacagtgatgagagtgtctatgggaaatgagtggttggaagcccagcagatgggagcacctggacttgggggtaggggaggggtgtgtgtgcgcgacatggggaaagagggtggctcccaccgcaaggagacagaaggtgaagacatctagaaacattacaccacacacaccgtcatcacattttcacatgctcaattgatattttttgctgcttcctcggcccagggagaaagcatgtcaggacagagctgttggattggctttgatagaggaatggggatgatgtaagtttacagtattcctggggtttaattgttgtgcagtttcatagatgggtcaggaggtggacaagttggggccagagatgatggcagtccagcagcaactccctgtgctcccttctctttgggcagagattctatttttgacatttgcacaagacaggtagggaaaggggacttgtggtagtggaccatacctggggaccaaaagagacccactgtaattgatgcattgtggcccctgatcttccctgtctcacacttcttttctcccatcccggttgcaatctcactcagacatcacagtaccaccccaggggtggcagtagacaacaacccagaaatttagacagggatctcttacctttggaaaataggggttaggcatgaaggtggttgtgattaagaagatggttttgttattaaatagcattaaactggaattgacaagagtgttgagcatccctgtctaacctgctctttctctttggtgccccttatctcaccccttccttggaatttaataagtctcaggcatttccaattgtagactaaaaccactcttagcatctcctctagtattttccatgtatcaggacagaggtgtcttatgtagggagggggcaagtatgaagtaaggtaattatatactactctcattcaggattcttgctcccatgctgctgtcccttcaggctcacatgcacaggaatgctacatgatggccagctgcttccctccttggttatcatccactgcagctgctagttagaaaggtttggagggatgacttttagtaaatcatggggattttattgatttattttcacttttgggattttgtggggtgggagtggggagcaggaattgcactcagacatgacatttcaattcatctctgctaatgaaaagggttctttctcttgggggaaatgtgtgtgtcagttctgtcagctgcaagttcttgtataatgaagtcaatgccatcaggccaaggaaataaaataattgcttacctt

SEQ ID NO: 136186 - DNA, 379 bp, Homo sapiens
  Payload ID: 6655
  Gene Symbol: GABARAPL1
  Gene Name: GABA(A) receptor-associated protein like 1
  ENST ID: ENST00000629504
  CDS Start-End: 248-379
gtgctcccagctctagcgaaaagccgccggtatttctccatctggctctcctctacctccaggcaggctcacccgagatccccgccccgaaccccccctgcacactcggcccagcgctgttgcccccggagcggacgtttctgcagctattctgagcacaccttgacgtcggctgagggagcgggacagggtcagcggcgaaggaggcaggccccgcgcggggatctcggaagccctgcggtgcatcatgaagttccagtacaaggaggaccatccctttgagtatcggaaaaaggaaggagaaaagatccggaagaaatatccggacagggtccccgctccggggcttgtgtggggacagccagcctcctcgtgttga

SEQ ID NO: 136187 - DNA, 1002 bp, Homo sapiens
  Payload ID: 6656
  Gene Symbol: GABARAPL2
  Gene Name: GABA(A) receptor-associated protein like 2
  Uniprot ID: P60520
  ENST ID: ENST00000037243
  CDS Start-End: 137-490
cgacagccggaagtcccgcctgccgtgtagtcgccgccgtcgctgccgctgccgctgccgccgtcgttgttgttgtgctcggtgcgctgagctccgcggctccgcgagccggttccgtccccttcccgccgccgccatgaagtggatgttcaaggaggaccactcgctggaacacagatgcgtggagtccgcgaagattcgagcgaaatatcccgacagggttccggtgattgtggaaaaggtctcaggctctcagattgttgacattgacaaacggaagtacttggttccatctgatatcactgtggctcagttcatgtggatcatcaggaaaaggatccagcttccttctgaaaaggcgatcttcctgtttgtggataagacagtcccacagtccagcctaactatgggacagctttacgagaaggaaaaagatgaagatggattcttatatgtggcctacagcggagagaacacttttggcttctgagggccattgctgggctaggtgcaccgtaactgcttgtgtatcttgtaaatagccagccattttcagttattataccagaacctcttcacatagacctattagtgcatttgtaactggatttatttcttaatatattggaaggttttgtttccttagactagtaaattatcatacagagttttattttgagtttttctttttgtgcattgtcctcatgcctgtattctccaggaaacttgtccttctggaaatcatattgaatgatatttctatatcgaagtgaggtaggtgcggtattaaagtgaaagggaaggtgatgcatttattctgggttatgcttgaagtgttagatggctaagtattaaaattatccaaattaaatccttagcagtcagaacacttgcttcactagaatatgccaactgccaatcatgttggactgagctaatttgttcctctttctgaaactattaaggtaaataattaacaataaaaattctcttataaaggca

SEQ ID NO: 136188 - DNA, 646 bp, Homo sapiens
  Payload ID: 6656
  Gene Symbol: GABARAPL2
  Gene Name: GABA(A) receptor-associated protein like 2
  ENST ID: ENST00000568455
  CDS Start-End: 312-485
ggccgagtggagcggggcggatgccctgctgcgggctggagtcgcccatgccctggtgcctcgggcagcggccccctgaccccatgtcaccctccgcgggccttgctgggagctagtaggggacaggaccgcggccccggggacgccggaaccagggcctgggttaacacagatgcgtggagtccgcgaagattcgagcgaaatatcccgacagggttccggtgattgtggaaaaggtctcaggctctcagattgttgacattgacaaacggaagtacttggttccatctgatatcactgtggctcagttcatgtggatcatcaggaaaaggatccagcttccttctgaaaaggcgatcttcctgtttgtggataagacagtcccacagtccagcctaactatgggacagctttacgagaaggaaaaagatgaagatggattcttatatgtggcctacagcggagagaacacttttggcttctgagggccattgctgggctaggtgcaccgtaactgcttgtgtatcttgtaaatagccagccattttcagttattataccagaacctcttcacatagacctattagtgcatttgtaactggatttatttcttaatatattggaaggttttgtttccttagactag

SEQ ID NO: 136189 - DNA, 571 bp, Homo sapiens
  Payload ID: 6656
  Gene Symbol: GABARAPL2
  Gene Name: GABA(A) receptor-associated protein like 2
  ENST ID: ENST00000565057
  CDS Start-End: 113-379
gtgtagtcgccgccgtcgctgccgctgccgctgccgccgtcgttgttgttgtgctcggtgcgctgagctccgcggctccgcgagccggttccgtccccttcccgccgccgccatgaagtggatgttcaaggaggaccactcgctggaacacagatgcgtggagtccgcgaagattcgagcgaaatatcccgacagggttccggtgattgtggaaaaggtctcaggctctcagattgttgacattgacaaacggaagtacttggttccatctgatatcactgtggctcagttcatgtggatcatcaggaaaaggatccagcttccttctgaaaaggcgatcttcctgtttgtggataagacagtcccacagtccaggtgagaggtgtttactagatgggccctctggtattagacatctggttggctgcttacggaactccaaaactttggaagtctgaaaactcttaggggtcctgactagaaatctggattttatgctccctgacatcaggggctccaggaaaataatggctgcaatacataagagtgcattttggattcagaaaataga

SEQ ID NO: 136190 - DNA, 791 bp, Homo sapiens
  Payload ID: 6656
  Gene Symbol: GABARAPL2
  Gene Name: GABA(A) receptor-associated protein like 2
  ENST ID: ENST00000563744
  CDS Start-End: 99-227
gtcgctgccgctgccgctgccgccgtcgttgttgttgtgctcggtgcgctgagctccgcggctccgcgagccggttccgtccccttcccgccgccgccatgaagtggatgttcaaggaggaccactcgctggaacacagatgcgtggagtccgcgaagattcgagcgaaatatcccgacagggttccgcctaactatgggacagctttacgagaaggaaaaagatgaagatggattcttatatgtggcctacagcggagagaacacttttggcttctgagggccattgctgggctaggtgcaccgtaactgcttgtgtatcttgtaaatagccagccattttcagttattataccagaacctcttcacatagacctattagtgcatttgtaactggatttatttcttaatatattggaaggttttgtttccttagactagtaaattatcatacagagttttattttgagtttttctttttgtgcattgtcctcatgcctgtattctccaggaaacttgtccttctggaaatcatattgaatgatatttctatatcgaagtgaggtaggtgcggtattaaagtgaaagggaaggtgatgcatttattctgggttatgcttgaagtgttagatggctaagtattaaaattatccaaattaaatccttagcagtcagaacacttgcttcactagaatatgccaactgccaatcatgttggactgagctaatttgttcctctttctgaaactattaaggtaaataattaacaataaaaattctcttataaaggca

SEQ ID NO: 136191 - DNA, 1445 bp, Homo sapiens
  Payload ID: 6657
  Gene Symbol: GALK1
  Gene Name: galactokinase 1
  Uniprot ID: P51570
  ENST ID: ENST00000225614
  CDS Start-End: 101-1279
gctggcgggaatgtgcgcacccccgcgcggggccccgcccgagcatcccgcgccgacggggctgtgccggagcagctgtgcagagctgcaggcgcgcgtcatggctgctttgagacagccccaggtcgcggagctgctggccgaggcccggcgagccttccgggaggagttcggggccgagcccgagctggccgtgtcagcgccgggccgcgtcaacctcatcggggaacacacggactacaaccagggcctggtgctgcctatggctctggagctcatgacggtgctggtgggcagcccccgcaaggatgggctggtgtctctcctcaccacctctgagggtgccgatgagccccagcggctgcagtttccactgcccacagcccagcgctcgctggagcctgggactcctcggtgggccaactatgtcaagggagtgattcagtactacccagctgcccccctccctggcttcagtgcagtggtggtcagctcagtgcccctggggggtggcctgtccagctcagcatccttggaagtggccacgtacaccttcctccagcagctctgtccagactcgggcacaatagctgcccgcgcccaggtgtgtcagcaggccgagcacagcttcgcagggatgccctgtggcatcatggaccagttcatctcacttatgggacagaaaggccacgcgctgctcattgactgcaggtccttggagaccagcctggtgccactctcggaccccaagctggccgtgctcatcaccaactctaatgtccgccactccctggcctccagcgagtaccctgtgcggcggcgccaatgtgaagaagtggcccgggcgctgggcaaggaaagcctccgggaggtacaactggaagagctagaggctgccagggacctggtgagcaaagagggcttccggcgggcccggcacgtggtgggggagattcggcgcacggcccaggcagcggccgccctgagacgtggcgactacagagcctttggccgcctcatggtggagagccaccgctcactcagagacgactatgaggtgagctgcccagagctggaccagctggtggaggctgcgcttgctgtgcctggggtttatggcagccgcatgacgggcggtggcttcggtggctgcacggtgacactgctggaggcctccgctgctccccacgccatgcggcacatccaggagcactacggcgggactgccaccttctacctctctcaagcagccgatggagccaaggtgctgtgcttgtgaggcacccccaggacagcacacgacggagtctggctctgtcaccctgtctggagtgcggtaacacgatctcggttcactgcaacctgcgccttctgggttcaagtgattctcctgcctcagcctcctgactagctgggactacaggcatgagccaccatgcctgtct

SEQ ID NO: 136192 - DNA, 717 bp, Homo sapiens
  Payload ID: 6657
  Gene Symbol: GALK1
  Gene Name: galactokinase 1
  ENST ID: ENST00000592997
  CDS Start-End: 1-555
gggatgccctgtggcatcatggaccagttcatctcacttatgggacagaaaggccacgcgctgctcattgactgcagcgagtaccctgtgcggcggcgccaatgtgaagaagtggcccgggcgctgggcaaggaaagcctccgggaggtacaactggaagagctagaggctgccagggacctggtgagcaaagagggcttccggcgggcccggcacgtggtgggggagattcggcgcacggcccaggcagcggccgccctgagacgtggcgactacagagcctttggccgcctcatggtggagagccaccgctcactcagagacgactatgaggtgagctgcccagagctggaccagctggtggaggctgcgcttgctgtgcctggggtttatggcagccgcatgacgggcggtggcttcggtggctgcacggtgacactgctggaggcctccgctgctccccacgccatgcggcacatccaggagcactacggcgggactgccaccttctacctctctcaagcagccgatggagccaaggtgctgtgcttgtgaggcacccccaggacagcacacggtgagggtgcggggcctgcaggccagtcccacggctctgtgcccggtgccatcttccatatccgggtgctcaataaacttgtgcctccaatgtggtacctgcctcctctagaggtgggtgtatgcttgggtgtcagagaa

SEQ ID NO: 136193 - DNA, 1866 bp, Homo sapiens
  Payload ID: 6657
  Gene Symbol: GALK1
  Gene Name: galactokinase 1
  Uniprot ID: P51570
  ENST ID: ENST00000588479
  CDS Start-End: 576-1754
ggcgtgagccactgcgcccggcccaaacttgtctgtctttatctctacttacagtgagtgtcaggtcaccctcttggagaccggtgatcagaggctgatgacctctcacagctgctggccctggggacctaggggatccctttgggaatcccaggtcaaccgggtgccagctccattgctctggctgtgtgggtggtggtgggtggtgaggcacatagaaagtcaccagcgccagggaagggcagctcagaaatcctggtcatgccaagtgccactcagggctattctcactctagtgagtgctcattggttcttcccgaagtccagagggaaggacaccatcgggggcgctgtatcccacccggcaccattagcccctgccacccaccacccagcagctggattcccacgggagttgcgggtgggggcggaaccggctgaggtctgggggcggggcgtccgggcgcggggcggggctggcgggaatgtgcgcacccccgcgcggggccccgcccgagcatcccgcgccgacggggctgtgccggagcagctgtgcagagctgcaggcgcgcgtcatggctgctttgagacagccccaggtcgcggagctgctggccgaggcccggcgagccttccgggaggagttcggggccgagcccgagctggccgtgtcagcgccgggccgcgtcaacctcatcggggaacacacggactacaaccagggcctggtgctgcctatggctctggagctcatgacggtgctggtgggcagcccccgcaaggatgggctggtgtctctcctcaccacctctgagggtgccgatgagccccagcggctgcagtttccactgcccacagcccagcgctcgctggagcctgggactcctcggtgggccaactatgtcaagggagtgattcagtactacccagctgcccccctccctggcttcagtgcagtggtggtcagctcagtgcccctggggggtggcctgtccagctcagcatccttggaagtggccacgtacaccttcctccagcagctctgtccagactcgggcacaatagctgcccgcgcccaggtgtgtcagcaggccgagcacagcttcgcagggatgccctgtggcatcatggaccagttcatctcacttatgggacagaaaggccacgcgctgctcattgactgcaggtccttggagaccagcctggtgccactctcggaccccaagctggccgtgctcatcaccaactctaatgtccgccactccctggcctccagcgagtaccctgtgcggcggcgccaatgtgaagaagtggcccgggcgctgggcaaggaaagcctccgggaggtacaactggaagagctagaggctgccagggacctggtgagcaaagagggcttccggcgggcccggcacgtggtgggggagattcggcgcacggcccaggcagcggccgccctgagacgtggcgactacagagcctttggccgcctcatggtggagagccaccgctcactcagagacgactatgaggtgagctgcccagagctggaccagctggtggaggctgcgcttgctgtgcctggggtttatggcagccgcatgacgggcggtggcttcggtggctgcacggtgacactgctggaggcctccgctgctccccacgccatgcggcacatccaggagcactacggcgggactgccaccttctacctctctcaagcagccgatggagccaaggtgctgtgcttgtgaggcacccccaggacagcacacggtgagggtgcggggcctgcaggccagtcccacggctctgtgcccggtgccatcttccatatccgggtgctcaataaacttgtgcctccaa

SEQ ID NO: 136194 - DNA, 1180 bp, Homo sapiens
  Payload ID: 6657
  Gene Symbol: GALK1
  Gene Name: galactokinase 1
  ENST ID: ENST00000586244
  CDS Start-End: 57-419
atcccgcgccgacggggctgtgccggagcagctgtgcagagctgcaggcgcgcgtcatggctgctttgagacagccccaggtcgcggagctgctggccgaggcccggcgagccttccgggaggagttcggggccgagcccgagctggccgtgtcagcgccgggccgcgtcaacctcatcggggaacacacggactacaaccagggcctggtgctgcctatggctctggagctcatgacggtgctggtgggcagcccccgcaaggatgggctggtgtctctcctcaccacctctgagggtgccgatgagccccagcggctgcagtttccactgcccacagcccagcgctcgctggagcctgggactcctcggtgggccaactatgtcaagggagtgattcagtactacccagagccctaaaccaggaggacaattagaagtgtcccagcaacctcagagggtgggaaaatggagggcagtgggtcccttggcccagcagctgcccccctccctggcttcagtgcagtggtggtcagctcagtgcccctggggggtggcctgtccagctcagcatccttggaagtggccacgtacaccttcctccagcagctctgtccaggtaccagctaggccccagccctgacccagccctccttccctgaggtctccaggtggtcccagcttctactatgccttatggagggggtggcagggactctccctggagtgtcattgaagccactgctgcttccaccagccctagcctccccacctcaccctgtactgcagactcgggcacaatagctgcccgcgcccaggtgtgtcagcaggccgagcacagcttcgcagggatgccctgtggcatcatggaccagttcatctcacttatgggacagaaaggccacgcgctgctcattgactgcaggttgggctcgctcccctcgtcccctcccgccctgcactcagcagctcctgggtgggagtgtgcccactgcctggcgcagcaagcacacgcttggcctcgtcatctcccccattgtaactccaccccaggtccttggagaccagcctggtgccactctcggaccccaagctggccgtgctcatcaccaactctaatgtccgccactccctggcctccagcgagtaccctgtgcggcggcgccaatgtgaagaagtgg

SEQ ID NO: 136195 - DNA, 667 bp, Homo sapiens
  Payload ID: 6657
  Gene Symbol: GALK1
  Gene Name: galactokinase 1
  ENST ID: ENST00000587707
  CDS Start-End: 1-276
gatgagccccagcggctgcagtttccactgcccacagcccagcgctcgctggagcctgggactcctcggtgggccaactatgtcaagggagtgattcagtactacccagctgcccccctccctggcttcagtgcagtggtggtcagctcagtgcccctggggggtggcctgtccagctcagcatccttggaagtggccacgtacaccttcctccagcagctctgtccagccctagcctccccacctcaccctgtactgcagactcgggcacaatagctgcccgcgcccaggtgtgtcagcaggccgagcacagcttcgcagggatgccctgtggcatcatggaccagttcatctcacttatgggacagaaaggccacgcgctgctcattgactgcaggtccttggagaccagcctggtgccactctcggaccccaagctggccgtgctcatcaccaactctaatgtccgccactccctggcctccagcgagtaccctgtgcggcggcgccaatgtgaagaagtggcccgggcgctgggcaaggaaagcctccgggaggtacaactggaagagctagaggctgccagggacctggtgagcaaagagggcttccggcgggcccggcacgtggtgggggagattcggcgcacggcccaggcagcggccgc

SEQ ID NO: 136196 - DNA, 5299 bp, Homo sapiens
  Payload ID: 6658
  Gene Symbol: GALK2
  Gene Name: galactokinase 2
  Uniprot ID: Q01415
  ENST ID: ENST00000327171
  CDS Start-End: 233-1576
gtttcctccgaagtggttggtgccttagcaactaaagctggcaactgggacatcgtccggtgctgcaggtctcagccgaagggcgtcggaaactgcgctcgcatcgagcagtttccagcctcctgggtaaaggagcagtctcctcccttgcttgggactctggacgcatctcattccggtgaaagtaagggacagcttaggaccagaagcctttcgcggagaaaaggctgacatgcccgtcctatatgacaggttactgaagctaaaggagatgtttaactccaagtttggatctattcccaagttttatgttcgagcaccaggaagagtcaacataataggagagcatatagattattgtggatattctgttcttcctatggctgtagaacaagatgtgctaatagctgtagaacctgtgaaaacgtacgctctccaactggccaatacaaatcccttgtatccggacttcagtactagtgctaataacatccagattgataaaaccaagcctttgtggcacaactatttcttatgtggacttaaaggaattcaggaacactttggtcttagtaacctgactggaatgaactgcctggtagatggaaatatcccaccaagttctggcctctccagctccagtgctttggtctgttgtgctggcttggtgacgctcacagtgctgggaaggaatctatccaaggtggaacttgcagaaatctgtgccaagagtgagcgttacattggcactgaaggaggaggcatggaccagtctatatcatttcttgcagaagaaggaactgccaagttgatagaatttagtcctctgagggcaaccgatgtaaaactcccaagtggagcagtgtttgtgattgccaacagttgtgtggagatgaataaggcagcaacttcccatttcaatatcagggtgatggagtgtcggctggctgcgaagctcctggctaaatacaaaagcttgcaatgggacaaagtactgaggctggaggaggtgcaggctaaactagggattagtctagaagaaatgctgttggtcacagaagatgcccttcatcctgaaccctataaccctgaggagatctgcaggtgtctgggaattagcctggaggaactccgaacccaaatcctgagtccaaacactcaagatgtgctcatcttcaaactctatcagcgggcaaagcatgtgtacagcgaggctgcgcgagtgctccagtttaagaagatatgtgaagaagcacctgaaaacatggtccagctgctgggagagttgatgaaccagagccacatgagctgccgggacatgtatgagtgcagctgccccgagctggatcagctggtggacatctgtcggaagtttggggctcaagggtcacgacttactggagcaggatggggaggctgcacagtatcaatggtacctgcggacaagctgcccagctttctagcaaatgtgcacaaagcttattaccagaggagtgatggaagcttagcaccggagaagcaaagtttgtttgctaccaaacctggaggtggggctttggttttgcttgaggcctgaaaaaatgtaaaaagtctgagagaaactacttagggcacttaggaattggcaggactttctgtgccacagtaaattaatcttccttctgttttgtattatgatgaacggttgctattatatcaagatatattttcaaagaaatggttgaaagctctctatgcttcataatgattctttttccatcttaaaatatggttttactattaagagccaagatcatgcttggacagatcttttaagaataacttactgagatttattgatttgaagattttaaagatgaatggtaaaacacactcttaatactgattacatggattggacttgaattaaatatattgttacaattaaactgataccactgaattgtatgcattattcttgaatagagttcatttctggtttctcttagtattcttcttcctcaaagttgtagttgtctgttgatgatggtgatgatgatgatgatgacgatagtgatgccacacattctctctcaatttcagcttcggaacgctatgaaaataatacatgattaaagtttcacagatcttcttggacattgtataattgaatttgaatgtgagatttctccagttatcaagagactaaggatttttttttttttttgacaaaaggaggatacaggaagaaaattcagactcatttgaatatttgtaaaccatgtaatatataaataaccactttcaattcttttggccctgagctatctccattacttaatagaaaaacttagataaaaaacactttaagactcttctattcacattgaaataaagaattatctagatgataattcagataattcagtttgttcatagaattactttcttatcactctttttctactactttttctcaaatacctctctaatccaagaggcacttccaagaaattccacacattccttatatcccttttttgcttgtctagcaaagcttgtttgtatatatgcaccccattgtaaagcaggtatgcaggtatgtgggtgaaagtgactatgaaaagacttaatgaattctgggatttgtaatggtattgatgggtatctctgtatgtatatcaagagtgggcagaaatgtttggctggtgatggcaaatgactggctttctcttgtggatggactataggaagcactttctgaattatgtaatgatttggaccaaaaagtattttgctgaaatactcaggtaattgagatagcaatggttttatggcatgaattatccaaaaaaatatcagaattacttattattctgtgatttcattagctcattaatgtttaactcacagattgggcatcaccatctagaatttcagtttaagggaggcctgcgcaaagctagttttatttcttaaaggataacagtcatacatagaatactaggaaagccaatattctatttaaaaataaacttctgatgcattttcattcttagcagaaaggtaaatgcttgagaaagcttgagtcaaatttgttaaaagaattttgagttctataaatccaaaaatctgaaacctgaatttatttaaatttataatcctttattttttaataccgtgccattttccacaaaggatttgtggttggtatataattctttaaagatacctggatcagtgtaaaaaaaaaaaaaaaaaggcacctgtcattgttttgctgttccatttacaattttcaccaggtgatttcttcttcacaaaaggtgagtaaaaatttccaatgtgcactcttctttgggggacacacatggtcattctaagcgagggatctattctatatttgttttgatttctctcgataaaaagaactatgtttcagtcttactatcactgtgtggtatctagatattatgagagatgctaaacttacctggaagggatagggccggggccattagaaaaaagatcatgcagtaaatggactttgagcatggccctaaaagatgagtagagtttaaaagctgtggagtgcacactgcagatgagcaaagcctatgggtataggcaaacatggtgtgtgtaggaggctcagtgagagtgaaggctttgctttggtatgtagtgaagaataagattgactacactggctggagctagcttttgaagagtcaaatccaggcagcatttagatcaggggttatagcccagcagcccatgggccacatctggtctgcagatgtatatagtttggcccacagaatgactaaaaacttgggctccaaatcaggagattgtacaagcagtatcagatattctggattactcagaatctggattactgagtggtggaatatctgatactacttgtccaacatttctacagggcatcaatgaactagggctgagatagtagctgccttgttagatgaggcatggctatccagtgcgctacagtttccacaactgcttgtataatagtttccctgacactcaaatcatttaccacttaccagctgaggtcacttgccctttatcaggacacttgcactgttgttttcctattctaattaggtatttctctgtgcccatgtccctatcaatagtagggaagatagaccaaaaaaaaaaaaaaagagagaaagaatgaatatttttgtgtgtggatgtaaaaaatagtccttagctgggagtggtggcatgtgcctgctgtcccagctactcaggaggctgaggcaggaggatcacttgagctgaggacttcaaagctacagtgagccatgactgcagcactgcactccagcctgggagacaggtgacagagtgagaccctgtttcaacaacaacaacaaaaatgaatagtcctgtttgcttattatactgtcctgtttgtatattatacaacacccaggtgtttcactctttctatcacttttctgccccatgtaggaatttgatttgatccatttttgacattatactagcagccaatgggattgctctagatttttgaatggaagccttgacatgctgaaagtaaaaggctctcctctatccctgacctccaattgtccagcattcagacatattgtacactagtctctacatgttcttgtctgttgggagagaagaagcccttcagacttaacaagaatgcccataagtaaagagaagcaaaagagaagatgacaaggaaaatcagaaagatggaacaggctcctttcttttctttctttctcatacttgagtcctgtttagaaccttatcatattctgccttgataattgagggcagggaccattcatctaacacagctgttggtacccaatatgattttgttgaattattaatgaaaaacttacaattttaaacatcagtgattattagtttgtaattctaactgcatttggagcttttcagttacataaactgttcctggtcagaagctggaaatggggaatgtgaacatgagttgtcactaaatatgtaaaacagattttcttacatgtgcatgtagatgattaagtaacaagaatgtatcctctcctgccactgtaatttgggtgtgccaccatacattgcttatgaaatattgtccagtctatataaaagaagctagagagagaattctcaattattttcagaaagaaaacctaccagtttatgtaggaacttctcaaagtcctgtttcacttcatgaggtttcttggtagcctttgcttggagtctaatcatggaataaagaaaatcagtaaccaaa

SEQ ID NO: 136197 - DNA, 1834 bp, Homo sapiens
  Payload ID: 6658
  Gene Symbol: GALK2
  Gene Name: galactokinase 2
  ENST ID: ENST00000396509
  CDS Start-End: 175-1479
agggcgggagctgtttatctcccggaagaaaacggctcctgtcacagaagtctcgtgattgctctgggagctttgcttagacacttgaaactacaggagaaagaaggatctagcgaaatatggctacagagagccctgctacgcgtcgggtccaggttactgaagctaaaggagatgtttaactccaagtttggatctattcccaagttttatgttcgagcaccaggaagagtcaacataataggagagcatatagattattgtggatattctgttcttcctatggctgtagaacaagatgtgctaatagctgtagaacctgtgaaaacgtacgctctccaactggccaatacaaatcccttgtatccggacttcagtactagtgctaataacatccagattgataaaaccaagcctttgtggcacaactatttcttatgtggacttaaaggaattcaggaacactttggtcttagtaacctgactggaatgaactgcctggtagatggaaatatcccaccaagttctggcctctccagctccagtgctttggtctgttgtgctggcttggtgacgctcacagtgctgggaaggaatctatccaaggtggaacttgcagaaatctgtgccaagagtgagcgttacattggcactgaaggaggaggcatggaccagtctatatcatttcttgcagaagaaggaactgccaagttgatagaatttagtcctctgagggcaaccgatgtaaaactcccaagtggagcagtgtttgtgattgccaacagttgtgtggagatgaataaggcagcaacttcccatttcaatatcagggtgatggagtgtcggctggctgcgaagctcctggctaaatacaaaagcttgcaatgggacaaagtactgaggctggaggaggtgcaggctaaactagggattagtctagaagaaatgctgttggtcacagaagatgcccttcatcctgaaccctataaccctgaggagatctgcaggtgtctgggaattagcctggaggaactccgaacccaaatcctgagtccaaacactcaagatgtgctcatcttcaaactctatcagcgggcaaagcatgtgtacagcgaggctgcgcgagtgctccagtttaagaagatatgtgaagaagcacctgaaaacatggtccagctgctgggagagttgatgaaccagagccacatgagctgccgggacatgtatgagtgcagctgccccgagctggatcagctggtggacatctgtcggaagtttggggctcaagggtcacgacttactggagcaggatggggaggctgcacagtatcaatggtacctgcggacaagctgcccagctttctagcaaatgtgcacaaagcttattaccagaggagtgatggaagcttagcaccggagaagcaaagtttgtttgctaccaaacctggaggtggggctttggttttgcttgaggcctgaaaaaatgtaaaaagtctgagagaaactacttagggcacttaggaattggcaggactttctgtgccacagtaaattaatcttccttctgttttgtattatgatgaacggttgctattatatcaagatatattttcaaagaaatggttgaaagctctctatgcttcataatgattctttttccatcttaaaatatggttttactattaagagccaagatcatgcttggacagatcttttaagaataacttactgagatttattgatttgaagattttaaagatgaatggtaaaacacactcttaatactgattacatggattggacttgaattaaatatattgttacaattaaactg

SEQ ID NO: 136198 - DNA, 1950 bp, Homo sapiens
  Payload ID: 6658
  Gene Symbol: GALK2
  Gene Name: galactokinase 2
  ENST ID: ENST00000544523
  CDS Start-End: 244-1548
agacacttgaaactacaggagaaagaaggatctagcgaaatatggctacagagagccctgctacgcgtcgggtccaggtggcagaacatcctagatggagtctcgctctgtcacctgtgctggaggctagagtgcaagtggcacgatcttggctcactgcaacctccgcctcctgggttgaagtgattctcctgcctccgcctccggagtagctgggattacaggttactgaagctaaaggagatgtttaactccaagtttggatctattcccaagttttatgttcgagcaccaggaagagtcaacataataggagagcatatagattattgtggatattctgttcttcctatggctgtagaacaagatgtgctaatagctgtagaacctgtgaaaacgtacgctctccaactggccaatacaaatcccttgtatccggacttcagtactagtgctaataacatccagattgataaaaccaagcctttgtggcacaactatttcttatgtggacttaaaggaattcaggaacactttggtcttagtaacctgactggaatgaactgcctggtagatggaaatatcccaccaagttctggcctctccagctccagtgctttggtctgttgtgctggcttggtgacgctcacagtgctgggaaggaatctatccaaggtggaacttgcagaaatctgtgccaagagtgagcgttacattggcactgaaggaggaggcatggaccagtctatatcatttcttgcagaagaaggaactgccaagttgatagaatttagtcctctgagggcaaccgatgtaaaactcccaagtggagcagtgtttgtgattgccaacagttgtgtggagatgaataaggcagcaacttcccatttcaatatcagggtgatggagtgtcggctggctgcgaagctcctggctaaatacaaaagcttgcaatgggacaaagtactgaggctggaggaggtgcaggctaaactagggattagtctagaagaaatgctgttggtcacagaagatgcccttcatcctgaaccctataaccctgaggagatctgcaggtgtctgggaattagcctggaggaactccgaacccaaatcctgagtccaaacactcaagatgtgctcatcttcaaactctatcagcgggcaaagcatgtgtacagcgaggctgcgcgagtgctccagtttaagaagatatgtgaagaagcacctgaaaacatggtccagctgctgggagagttgatgaaccagagccacatgagctgccgggacatgtatgagtgcagctgccccgagctggatcagctggtggacatctgtcggaagtttggggctcaagggtcacgacttactggagcaggatggggaggctgcacagtatcaatggtacctgcggacaagctgcccagctttctagcaaatgtgcacaaagcttattaccagaggagtgatggaagcttagcaccggagaagcaaagtttgtttgctaccaaacctggaggtggggctttggttttgcttgaggcctgaaaaaatgtaaaaagtctgagagaaactacttagggcacttaggaattggcaggactttctgtgccacagtaaattaatcttccttctgttttgtattatgatgaacggttgctattatatcaagatatattttcaaagaaatggttgaaagctctctatgcttcataatgattctttttccatcttaaaatatggttttactattaagagccaagatcatgcttggacagatcttttaagaataacttactgagatttattgatttgaagattttaaagatgaatggtaaaacacactcttaatactgattacatggattggacttgaattaaatatattgttacaattaaactgataccactgaattgtatgcattattcttgaatagagttcatttctgg

SEQ ID NO: 136199 - DNA, 722 bp, Homo sapiens
  Payload ID: 6658
  Gene Symbol: GALK2
  Gene Name: galactokinase 2
  ENST ID: ENST00000560138
  CDS Start-End: 96-722
gacacttgaaactacaggagaaagaaggatctagcgaaatatggctacagagagccctgctacgcgtcgggtccaggttactgaagctaaaggagatgtttaactccaagtttggatctattcccaagttttatgttcgagcaccaggaagagtcaacataataggagagcatatagattattgtggatattctgttcttcctatggctgtagaacaagatgtgctaatagctgtagaacctgtgaaaacgtacgctctccaactggccaatacaaatcccttgtatccggacttcagtactagtgctaataacatccagattgataaaaccaagcctttgtggcacaactatttcttatgtggacttaaaggaattcaggaacactttggtcttagtaacctgactggaatgaactgcctggtagatggaaatatcccaccaagttctggcctctccagctccagtgctttggtctgttgtgctggcttggtgacgctcacagtgctgggaaggaatctatccaaggccaagttgatagaatttagtcctctgagggcaaccgatgtaaaactcccaagtggagcagtgtttgtgattgccaacagttgtgtggagatgaataaggcagcaacttcccatttcaatatcagggtgatggagtgtcggctggctgcgaaggtgcaggctaaactagggattagtctagaagaaatgctgttg

SEQ ID NO: 136200 - DNA, 620 bp, Homo sapiens
  Payload ID: 6658
  Gene Symbol: GALK2
  Gene Name: galactokinase 2
  ENST ID: ENST00000560528
  CDS Start-End: 1-332
gtgaagaagcacctgaaaacatggtccagctgctgggagagttgatgaaccagagccacatgagctgccgggacatgtatgagtgcagctgccccgagctggatcagctggtggacatctgtcggaagtttggggctcaagggtcacgacttactggagcaggatggggaggctgcacagtatcaatggtacctgcggacaagctgcccagctttctagcaaatgtgcacaaagcttattaccagaggagtgatggaagcttagcaccggagaagcaaagtttgtttgctaccaaacctggagcttcggaacgctatgaaaataatacatgattaaagtttcacagatcttcttggacattgtataattgaatttgaatgtgagatttctccagttatcaagagactaaggatttttttttttttttgacaaaaggaggatacaggaagaaaattcagactcatttgaatatttgtaaaccatgtaatatataaataaccactttcaattcttttggccctgagctatctccattacttaatagaaaaacttagataaaaaacactttaagactcttctattcacattgaaataaagaattatctagatgataattcaga

SEQ ID NO: 136201 - DNA, 641 bp, Homo sapiens
  Payload ID: 6658
  Gene Symbol: GALK2
  Gene Name: galactokinase 2
  ENST ID: ENST00000558956
  CDS Start-End: 162-395
tttatctcccggaagaaaacggctcctgtcacagaagtctcgtgattgctctgggagctttgcttagacacttgaaactacaggagaaagaaggatctagcgaaatatggctacagagagccctgctacgcgtcgggtccaggttactgaagctaaaggagatgtttaactccaagtttggatctattcccaagttttatgttcgagcaccaggaagagtcaacataataggagagcatatagattattgtggatattctgttcttcctatggctgtagaacaagatgtgctaatagctgtagaacctgtgaaaacgtacgctctccaactggccaatacaaatcccttgtatccgtcttccgggctgcagggctccctcaggcagaggctatgacctgcagataggccacaccattcttggactggtcctgtagagcagggttccccaatccctgttactgcttcatggcctgttcagaagtgggccacacagcaggagggacttcagtactagtgctaataacatccagattgataaaaccaagcctttgtggcacaactatttcttatgtggacttaaaggaattcaggaacactttggtcttagtaacctgactggaatgaactgcctggtagatgg

SEQ ID NO: 136202 - DNA, 2043 bp, Homo sapiens
  Payload ID: 6658
  Gene Symbol: GALK2
  Gene Name: galactokinase 2
  Uniprot ID: Q01415
  ENST ID: ENST00000560031
  CDS Start-End: 308-1684
tagtcagcttcgcacgtgctctgcgcaggggctcctgcgaggccctagtccctccctgggagctaagagcaggacggaggctgtacctgactgctgcttggagggaaccctggctgagtccagggaggaggagccagaggaggggccgattggaagcagccacctcagcgaagctgcaggatttccgcagggcgggagctgtttatctcccggaagaaaacggctcctgtcacagaagtctcgtgattgctctgggagctttgcttagacacttgaaactacaggagaaagaaggatctagcgaaatatggctacagagagccctgctacgcgtcgggtccaggtggcagaacatcctaggttactgaagctaaaggagatgtttaactccaagtttggatctattcccaagttttatgttcgagcaccaggaagagtcaacataataggagagcatatagattattgtggatattctgttcttcctatggctgtagaacaagatgtgctaatagctgtagaacctgtgaaaacgtacgctctccaactggccaatacaaatcccttgtatccggacttcagtactagtgctaataacatccagattgataaaaccaagcctttgtggcacaactatttcttatgtggacttaaaggaattcaggaacactttggtcttagtaacctgactggaatgaactgcctggtagatggaaatatcccaccaagttctggcctctccagctccagtgctttggtctgttgtgctggcttggtgacgctcacagtgctgggaaggaatctatccaaggtggaacttgcagaaatctgtgccaagagtgagcgttacattggcactgaaggaggaggcatggaccagtctatatcatttcttgcagaagaaggaactgccaagttgatagaatttagtcctctgagggcaaccgatgtaaaactcccaagtggagcagtgtttgtgattgccaacagttgtgtggagatgaataaggcagcaacttcccatttcaatatcagggtgatggagtgtcggctggctgcgaagctcctggctaaatacaaaagcttgcaatgggacaaagtactgaggctggaggaggtgcaggctaaactagggattagtctagaagaaatgctgttggtcacagaagatgcccttcatcctgaaccctataaccctgaggagatctgcaggtgtctgggaattagcctggaggaactccgaacccaaatcctgagtccaaacactcaagatgtgctcatcttcaaactctatcagcgggcaaagcatgtgtacagcgaggctgcgcgagtgctccagtttaagaagatatgtgaagaagcacctgaaaacatggtccagctgctgggagagttgatgaaccagagccacatgagctgccgggacatgtatgagtgcagctgccccgagctggatcagctggtggacatctgtcggaagtttggggctcaagggtcacgacttactggagcaggatggggaggctgcacagtatcaatggtacctgcggacaagctgcccagctttctagcaaatgtgcacaaagcttattaccagaggagtgatggaagcttagcaccggagaagcaaagtttgtttgctaccaaacctggaggtggggctttggttttgcttgaggcctgaaaaaatgtaaaaagtctgagagaaactacttagggcacttaggaattggcaggactttctgtgccacagtaaattaatcttccttctgttttgtattatgatgaacggttgctattatatcaagatatattttcaaagaaatggttgaaagctctctatgcttcataatgattctttttccatcttaaaatatggttttactattaagagccaagatcatgcttggacagatcttttaagaataacttactgagatttattgatttgaagattttaaagatgaatggtaaaacacactcttaatactgattacatggattggacttgaattaaatatattgttacaattaaactgatac

SEQ ID NO: 136203 - DNA, 1768 bp, Homo sapiens
  Payload ID: 6658
  Gene Symbol: GALK2
  Gene Name: galactokinase 2
  ENST ID: ENST00000559454
  CDS Start-End: 120-1424
cggggagcaagtggaacccttgggattctataaggacacgtggctgggcttgcaaaaaagatcacgccgcaaacacattctaccttgactactacgaagggttactgaagctaaaggagatgtttaactccaagtttggatctattcccaagttttatgttcgagcaccaggaagagtcaacataataggagagcatatagattattgtggatattctgttcttcctatggctgtagaacaagatgtgctaatagctgtagaacctgtgaaaacgtacgctctccaactggccaatacaaatcccttgtatccggacttcagtactagtgctaataacatccagattgataaaaccaagcctttgtggcacaactatttcttatgtggacttaaaggaattcaggaacactttggtcttagtaacctgactggaatgaactgcctggtagatggaaatatcccaccaagttctggcctctccagctccagtgctttggtctgttgtgctggcttggtgacgctcacagtgctgggaaggaatctatccaaggtggaacttgcagaaatctgtgccaagagtgagcgttacattggcactgaaggaggaggcatggaccagtctatatcatttcttgcagaagaaggaactgccaagttgatagaatttagtcctctgagggcaaccgatgtaaaactcccaagtggagcagtgtttgtgattgccaacagttgtgtggagatgaataaggcagcaacttcccatttcaatatcagggtgatggagtgtcggctggctgcgaagctcctggctaaatacaaaagcttgcaatgggacaaagtactgaggctggaggaggtgcaggctaaactagggattagtctagaagaaatgctgttggtcacagaagatgcccttcatcctgaaccctataaccctgaggagatctgcaggtgtctgggaattagcctggaggaactccgaacccaaatcctgagtccaaacactcaagatgtgctcatcttcaaactctatcagcgggcaaagcatgtgtacagcgaggctgcgcgagtgctccagtttaagaagatatgtgaagaagcacctgaaaacatggtccagctgctgggagagttgatgaaccagagccacatgagctgccgggacatgtatgagtgcagctgccccgagctggatcagctggtggacatctgtcggaagtttggggctcaagggtcacgacttactggagcaggatggggaggctgcacagtatcaatggtacctgcggacaagctgcccagctttctagcaaatgtgcacaaagcttattaccagaggagtgatggaagcttagcaccggagaagcaaagtttgtttgctaccaaacctggaggtggggctttggttttgcttgaggcctgaaaaaatgtaaaaagtctgagagaaactacttagggcacttaggaattggcaggactttctgtgccacagtaaattaatcttccttctgttttgtattatgatgaacggttgctattatatcaagatatattttcaaagaaatggttgaaagctctctatgcttcataatgattctttttccatcttaaaatatggttttactattaagagccaagatcatgcttggacagatcttttaagaataacttactgagatttattgatttgaagattttaaagatgaatggtaaaacacactcttaatactgattacatggattggacttgaattaaatatattgtta

SEQ ID NO: 136204 - DNA, 991 bp, Homo sapiens
  Payload ID: 6658
  Gene Symbol: GALK2
  Gene Name: galactokinase 2
  ENST ID: ENST00000559883
  CDS Start-End: 342-467
cttctttccgccttccagtccctcttagaggagctgtttcctgccggaactaattatctcgacttgtagctgattcgctacgactccaaaagagactgcaccaccccccgtttcctccgaagtggttggtgccttagcaactaaagctggcaactgggacatcgtccggtgctgcaggtctcagccgaagggcgtcggaaactgcgctcgcatcgagcagtttccagcctcctgggtaaaggagcagtctcctcccttgcttgggactctggacgcatctcattccggtgaaagtaagggacagcttaggaccagaagcctttcgcggagaaaaggctgacatgcccgtcctatatgacagtctagagtgcagtggcatgatctcggctcactacaacctccgcctcctgggttcaagcgattctcctgcctcagcctccctagaagctggaattacaggttactgaagctaaaggagatgtttaactccaagtttggatctattcccaagttttatgttcgagcaccaggaagagtcaacataataggagagcatatagattattgtggatattctgttcttcctatggctgtagaacaagatgtgctaatagctgtagaacctgtgaaaacgtacgctctccaactggccaatacaaatcccttgtatccggacttcagtactagtgctaataacatccagattgataaaaccaagcctttgtggcacaactatttcttatgtggacttaaaggaattcaggaacactttggtcttagtaacctgactggaatgaactgcctggtagatggaaatatcccaccaagttctggcctctccagctccagtgctttggtctgttgtgctggcttggtgacgctcacagtgctgggaaggaatctatccaaggtggaacttgcagaaatctgtgccaagagtgagcgttacattggcactgaaggaggaggcatggaccagtctatatcattt

SEQ ID NO: 136205 - DNA, 550 bp, Homo sapiens
  Payload ID: 6658
  Gene Symbol: GALK2
  Gene Name: galactokinase 2
  ENST ID: ENST00000561074
  CDS Start-End: 204-341
aactaaagctggcaactgggacatcgtccggtgctgcaggtctcagccgaagggcgtcggaaactgcgctcgcatcgagcagtttccagcctcctgggtaaaggagcagtctcctcccttgcttgggactctggacgcatctcattccggtgaaagtaagggacagcttaggaccagaagcctttcgcggagaaaaggctgacatgcccgtcctatatgacagatggagtctcgctctgtcacctgtgctggaggctagagtgcaagtggcacgatcttggctcactgcaacctccgcctcctgggttgaagtgattctcctgcctccgcctccggagtagctgggattacaggttactgaagctaaaggagatgtttaactccaagtttggatctattcccaagttttatgttcgagcaccaggaagagtcaacataataggagagcatatagattattgtggatattctgttcttcctatggctgtagaacaagatgtgctaatagctgtagaacctgtgaaaacgtacgctctccaactggccaata

SEQ ID NO: 136206 - DNA, 805 bp, Homo sapiens
  Payload ID: 6658
  Gene Symbol: GALK2
  Gene Name: galactokinase 2
  ENST ID: ENST00000558399
  CDS Start-End: 1-472
gctggctgcgaagctcctggctaaatacaaaagcttgcaatgggacaaagtactgaggctggaggaggtgcaggctaaactagggattagtctagaagaaatgctgttggtcacagaagatgcccttcatcctgaaccctataaccctgaggagatctgcaggtgtctgggaattagcctggaggaactccgaacccaaatcctgagtccaaacactcaagatgtgctcatcttcaaactctatcagcgggcaaagcatgtgtacagcgaggctgcgcgagtgctccagtttaagaagatatgtgaagaagcacctgaaaacatggtccagctgctgggagagttgatgaaccagagccacatgagctgccgggacatgtatgagtgcagctgccccgagctggatcagctggtggacatctgtcggtgctttggaaataccagccagctcatgcatcttaagataatataaaatcaatggactctgacctccaaaattgaagagaacacgattaaactctggaccagtactactatagtgcgactgtaagaggaagaaaataatcaagacaacgattacttttgtgtttctaaaaaactgtgaataaaatataacttcatatttagcataaagttaccatttgatatattaaaataaaggaaattctacaaagcatcttcttaattagaggaatttaccaaagtatgagtctataagtacatgcagtaaggctcttctactcttttgagttatcatcagacttgcatataggcaatagacattattcagtcttaagaacagaaa

SEQ ID NO: 136207 - DNA, 655 bp, Homo sapiens
  Payload ID: 6658
  Gene Symbol: GALK2
  Gene Name: galactokinase 2
  ENST ID: ENST00000559580
  CDS Start-End: 1-489
tgcaggtgtctgggaattagcctggaggaactccgaacccaaatcctgagtccaaacactcaagatgtgctcatcttcaaactctatcagcgggcaaagcatgtgtacagcgaggctgcgcgagtgctccagtttaagaagatatgtgaagaagcacctgaaaacatggtccagctgctgggagagttgatgaaccagagccacatgagctgccgggacatgtatgagtgcagctgccccgagctggatcagctggtggacatctgtcggaagtttggggctcaagggtcacgacttactggagcaggatggggaggctgcacagtatcaatggtacctgcggacaagctgcccagctttctagcaaatgtgcacaaagcttattaccagaggagtgatggaagcttagcaccggagaagcaaagtttgtttgctaccaaacctggaggtgctttggaaataccagccagctcatgcatcttaagataatataaaatcaatggactctgacctccaaaattgaagagaacacgattaaactctggaccagtactactatagtgcgactgtaagaggaagaaaataatcaagacaacgattacttttgtgtttctaaaaaactgtgaataaaatataacttcatatttagcataaa

SEQ ID NO: 136208 - DNA, 794 bp, Homo sapiens
  Payload ID: 6658
  Gene Symbol: GALK2
  Gene Name: galactokinase 2
  ENST ID: ENST00000559963
  CDS Start-End: 239-388
ccccccgtttcctccgaagtggttggtgccttagcaactaaagctggcaactgggacatcgtccggtgctgcaggtctcagccgaagggcgtcggaaactgcgctcgcatcgagcagtttccagcctcctgggtaaaggagcagtctcctcccttgcttgggactctggacgcatctcattccggtgaaagtaagggacagcttaggaccagaagcctttcgcggagaaaaggctgacatgcccgtcctatatgacagatggagtcttgctttgttgcccagtctagagtgcagtggcatgatctcggctcactacaacctccgcctcctgggttcaagcgattctcctgcctcagcctccctagaagctggaattacaggttactgaagctaaaggagatgtttaactccaagtttggatctattcccaagttttatgttcgagcaccaggaagagtcaacataataggagagcatatagattattgtggatattctgttcttcctatggctgtagaacaagatgtgctaatagctgtagaacctgtgaaaacgtacgctctccaactggccaatacaaatcccttgtatccggacttcagtactagtgctaataacatccagattgataaaaccaagcctttgtggcacaactatttcttatgtggacttaaaggaattcaggaacactttggtcttagtaacctgactggaatgaactgcctggtagatggaaatatcccaccaagttctggcctctccagctccagtgctttggtctgttgtgctggctt

SEQ ID NO: 136209 - DNA, 895 bp, Homo sapiens
  Payload ID: 6658
  Gene Symbol: GALK2
  Gene Name: galactokinase 2
  ENST ID: ENST00000559423
  CDS Start-End: 67-300
tctagcgaaatatggctacagagagccctgctacgcgtcgggtccaggttactgaagctaaaggagatgtttaactccaagtttggatctattcccaagttttatgttcgagcaccaggaagagtcaacataataggagagcatatagattattgtggatattctgttcttcctatggctgtagaacaagatgtgctaatagctgtagaacctgtgaaaacgtacgctctccaactggccaatacaaatcccttgtatccgtcttccgggctgcagggctccctcaggcagaggctatgacctgcagataggccacaccattcttggactggtcctgtagagcagggttccccaatccctgttactgcttcatggcctgttcagaagtgggccacacagcaggagggacttcagtactagtgctaataacatccagattgataaaaccaagcctttgtggcacaactatttcttatgtggacttaaaggaattcaggaacactttggtcttagtaacctgactggaatgaactgcctggtagatggaaatatcccaccaagttctggcctctccagctccagtgctttggtctgttgtgctggcttggtgacgctcacagtgctgggaaggaatctatccaaggtggaacttgcagaaatctgtgccaagagtgagcgttacattggcactgaaggaggaggcatggaccagtctatatcatttcttgcagaagaaggaactgccaagttgatagaatttagtcctctgagggcaaccgatgtaaaactcccaagtggagcagtgtttgtgattgccaacagttgtgtggagatgaataaggcagcaacttcccatttcaatatcagggtgatggagtgtcggctggctgcgaag

SEQ ID NO: 136210 - DNA, 861 bp, Homo sapiens
  Payload ID: 6658
  Gene Symbol: GALK2
  Gene Name: galactokinase 2
  ENST ID: ENST00000559208
  CDS Start-End: 100-405
cccggaagaaaacggctcctgtcacagaagtctcgtgattgctctgggagctttgcttagacacttgaaactacaggagaaagaaggatctagcgaaatatggctacagagagccctgctacgcgtcgggtccaggtggcagaacatcctaggttactgaagctaaaggagatgtttaactccaagtttggatctattcccaagttttatgttcgagcaccaggaagagtcaacataataggagagcatatagattattgtggatattctgttcttcctatggctgtagaacaagatgtgctaatagctgtagaacctgtgaaaacgtacgctctccaactggccaatacaaatcccttgtatccgtcttccgggctgcagggctccctcaggcagaggctatgacctgcagataggccacaccattcttggactggtcctgtagagcagggttccccaatccctgttactgcttcatggcctgttcagaagtgggccacacagcaggagggacttcagtactagtgctaataacatccagattgataaaaccaagcctttgtggcacaactatttcttatgtggacttaaaggaattcaggaacactttggtcttagtaacctgactggaatgaactgcctggtagatggaaatatcccaccaagttctggcctctccagctccagtgctttggtctgttgtgctggcttggtgacgctcacagtgctgggaaggaatctatccaaggtggaacttgcagaaatctgtgccaagagtgagcgttacattggcactgaaggaggaggcatggaccagtctatatcatttcttgcagaagaaggaactgccaagttgataga

SEQ ID NO: 136211 - DNA, 813 bp, Homo sapiens
  Payload ID: 6658
  Gene Symbol: GALK2
  Gene Name: galactokinase 2
  ENST ID: ENST00000558775
  CDS Start-End: 223-372
aagtggttggtgccttagcaactaaagctggcaactgggacatcgtccggtgctgcaggtctcagccgaagggcgtcggaaactgcgctcgcatcgagcagtttccagcctcctgggtaaaggagcagtctcctcccttgcttgggactctggacgcatctcattccggtgaaagtaagggacagcttaggaccagaagcctttcgcggagaaaaggctgacatgcccgtcctatatgacagatggagtcttgctttgttgcccagtctagagtgcagtggcatgatctcggctcactacaacctccgcctcctgggttcaagcgattctcctgcctcagcctccctagaagctggaattacaggttactgaagctaaaggagatgtttaactccaagtttggatctattcccaagttttatgttcgagcaccaggaagagtcaacataatagctttctcttttttctaggagagcatatagattattgtggatattctgttcttcctatggctgtagaacaagatgtgctaatagctgtagaacctgtgaaaacgtacgctctccaactggccaatacaaatcccttgtatccggacttcagtactagtgctaataacatccagattgataaaaccaagcctttgtggcacaactatttcttatgtggacttaaaggaattcaggaacactttggtcttagtaacctgactggaatgaactgcctggtagatggaaatatcccaccaagttctggcctctccagctccagtgctttggtctgttgtgctggcttggtgacgctcacagtgct

SEQ ID NO: 136212 - DNA, 2053 bp, Homo sapiens
  Payload ID: 6658
  Gene Symbol: GALK2
  Gene Name: galactokinase 2
  ENST ID: ENST00000560119
  CDS Start-End: 119-319
gattgctctgggagctttgcttagacacttgaaactacaggagaaagaaggatctagcgaaatatggctacagagagccctgctacgcgtcgggtccaggttactgaagctaaaggagatgtttaactccaagtttggatctattcccaagttttatgttcgagcaccaggaagagtcaacataataggagagcatatagattattgtggatattctgttcttcctatggctgtagaacaagatgtgctaatagctgtagaacctgtgaaaacgtacgctctccaactggccaatacaaatcccttgtatccgaaataaaaagggtcagttggaggtagtttagtcactaaggccactgcaacttcctctcttaactcttagcagctggagatgttttgctgtagacacacagtttgaacataaaagggacttcagtactagtgctaataacatccagattgataaaaccaagcctttgtggcacaactatttcttatgtggacttaaaggaattcaggaacactttggtcttagtaacctgactggaatgaactgcctggtagatggaaatatcccaccaagttctggcctctccagctccagtgctttggtctgttgtgctggcttggtgacgctcacagtgctgggaaggaatctatccaaggtggaacttgcagaaatctgtgccaagagtgagcgttacattggcactgaaggaggaggcatggaccagtctatatcatttcttgcagaagaaggaactgccaagttgatagaatttagtcctctgagggcaaccgatgtaaaactcccaagtggagcagtgtttgtgattgccaacagttgtgtggagatgaataaggcagcaacttcccatttcaatatcagggtgatggagtgtcggctggctgcgaagctcctggctaaatacaaaagcttgcaatgggacaaagtactgaggctggaggaggtgcaggctaaactagggattagtctagaagaaatgctgttggtcacagaagatgcccttcatcctgaaccctataaccctgaggagatctgcaggtgtctgggaattagcctggaggaactccgaacccaaatcctgagtccaaacactcaagatgacggagtcgtgctctatcgcccaggctggagtgcaacggcgtgatctcagctcactgcaacctctgcctcccaggttcaagcaattctcccacttcagtctctcaaatagctgggattacatgcacccaccatcatcatgcccagtgctcatcttcaaactctatcagcgggcaaagcatgtgtacagcgaggctgcgcgagtgctccagtttaagaagatatgtgaagaagcacctgaaaacatggtccagctgctgggagagttgatgaaccagagccacatgagctgccgggacatgtatgagtgcagctgccccgagctggatcagctggtggacatctgtcggaagtttggggctcaagggtcacgacttactggagcaggatggggaggctgcacagtatcaatggtacctgcggacaagctgcccagctttctagcaaatgtgcacaaagcttattaccagaggagtgatggaagcttagcaccggagaagcaaagtttgtttgctaccaaacctggaggtggggctttggttttgcttgaggcctgaaaaaatgtaaaaagtctgagagaaactacttagggcacttaggaattggcaggactttctgtgccacagtaaattaatcttccttctgttttgtattatgatgaacggttgctattatatcaagatatattttcaaagaaatggttgaaagctctctatgcttcataatgattctttttccatcttaaaatatggttttactattaagagccaagatcatgcttggacagatcttttaagaataacttactgagatttattgatttgaagattttaaagatgaatggtaaaacacactcttaatactgattacatggattggacttgaattaaatatattgttacaattaaactgataccactgaattgt

SEQ ID NO: 136213 - DNA, 784 bp, Homo sapiens
  Payload ID: 6658
  Gene Symbol: GALK2
  Gene Name: galactokinase 2
  ENST ID: ENST00000560654
  CDS Start-End: 390-784
tccgaagtggttggtgccttagcaactaaagctggcaactgggacatcgtccggtgctgcaggtctcagccgaagggcgtcggaaactgcgctcgcatcgagcagtttccagcctcctgggtaaaggagcagtctcctcccttgcttgggactctggacgcatctcattccggtgaaagtaagggacagcttaggaccagaagcctttcgcggagaaaaggctgacatgcccgtcctatatgacagagacaagatcttgctctgtcacccaggctggagtgcagtggcaccatcatagcttactgcagcctcgaactccttggtttaagtgaccttcccatctcagcctcctcagtggctaggacttcaggttactgaagctaaaggagatgtttaactccaagtttggatctattcccaagttttatgttcgagcaccaggaagagtcaacataataggagagcatatagattattgtggatattctgttcttcctatggctgtagaacaagatgtgctaatagctgtagaacctgtgaaaacgtacgctctccaactggccaatacaaatcccttgtatccggacttcagtactagtgctaataacatccagattgataaaaccaagcctttgtggcacaactatttcttatgtggacttaaaggaattcaggaacactttggtcttagtaacctgactggaatgaactgcctggtagatggaaatatcccaccaagttctggcctctccagctccagtgctttggtctgttgtgctggctt

SEQ ID NO: 136214 - DNA, 567 bp, Homo sapiens
  Payload ID: 6658
  Gene Symbol: GALK2
  Gene Name: galactokinase 2
  ENST ID: ENST00000558145
  CDS Start-End: 327-567
gattgctctgggagctttgcttagacacttgaaactacaggagaaagaaggatctagcgaaatatggctacagagagccctgctacgcgtcgggtccaggtggcagaacatcctagcctcatcagcatctgttagtttttgacacattttggtaacagccattctgactagtgtaagatggagtctcgctctgtcacctgtgctggaggctagagtgcaagtggcacgatcttggctcactgcaacctccgcctcctgggttgaagtgattctcctgcctccgcctccggagtagctgggattacaggttactgaagctaaaggagatgtttaactccaagtttggatctattcccaagttttatgttcgagcaccaggaagagtcaacataataggagagcatatagattattgtggatattctgttcttcctatggctgtagaacaagatgtgctaatagctgtagaacctgtgaaaacgtacgctctccaactggccaatacaaatcccttgtatccggacttcagtactagtgctaataacatccagattgataaaaccaagc

SEQ ID NO: 136215 - DNA, 2363 bp, Homo sapiens
  Payload ID: 6659
  Gene Symbol: GALNS
  Gene Name: galactosamine (N-acetyl)-6-sulfatase
  Uniprot ID: P34059
  ENST ID: ENST00000268695
  CDS Start-End: 90-1658
aggccccgccccgcagcccagccggaagggccggcggacgctcgctaggtcggctcgctggccggggctccgcggctcccgtggttgccatggcggcggttgtcgcggcgacgaggtggtggcagctgttgctggtgctcagcgccgcggggatgggggcctcgggcgccccgcagccccccaacatcctgctcctgctcatggacgacatgggatggggtgacctcggggtgtatggagagccctccagagagaccccgaatttggaccggatggctgcagaagggctgcttttcccaaacttctattctgccaaccctctgtgctcgccatcgagggcggcactgctcacaggacggctacccatccgcaatggcttctacaccaccaacgcccatgccagaaacgcctacacaccgcaggagattgtgggcggcatcccagactcggagcagctcctgccggagcttctgaagaaggccggctacgtcagcaagattgtcggcaagtggcatctgggtcacaggccccagttccaccccctgaagcacggatttgatgagtggtttggatcccccaactgccactttggaccttatgacaacaaggccaggcccaacatccctgtgtacagggactgggagatggttggcagatattatgaagaatttcctattaatctgaagacgggggaagccaacctcacccagatctacctgcaggaagccctggacttcattaagagacaggcacggcaccacccctttttcctctactgggctgtcgacgccacgcacgcacccgtctatgcctccaaacccttcttgggcaccagtcagcgagggcggtatggagacgccgtccgggagattgatgacagcattgggaagatactggagctcctccaagacctgcacgtcgcggacaacaccttcgtcttcttcacgtcggacaacggcgctgccctcatttccgcccccgaacaaggtggcagcaacggcccctttctgtgtgggaagcagaccacgtttgaaggagggatgagggagcctgccctcgcatggtggccagggcacgtcactgcaggccaggtgagccaccagctgggcagcatcatggacctcttcaccaccagcctggcccttgcgggcctgacgccgcccagcgacagggccattgatggcctcaacctcctccccaccctcctgcagggccggctgatggacaggcctatcttctattaccgtggcgacacgctgatggcggccaccctcgggcagcacaaggctcacttctggacctggaccaactcctgggagaacttcagacagggcattgatttctgccctgggcagaacgtttcaggggtcacaactcacaatctggaagaccacacgaagctgcccctgatcttccacctgggacgggacccaggggagaggttccccctcagctttgccagcgccgagtaccaggaggccctcagcaggatcacctcggtcgtccagcagcaccaggaggccttggtccccgcgcagccccagctcaacgtgtgcaactgggcggtcatgaactgggcacctccgggctgtgaaaagttagggaagtgtctgacacctccagaatccattcccaagaagtgcctctggtcccactagcacctgcgcagactcaggccaggcctagaatctccggttggccctgcaagtgcctggaggaaggatggctctggcctcggtcctcccccaaccctgcccaagccagacagacagcacctgcagacgcagggggactgcacaattccacctgcccaggacctgaccctggcgtgtgcttggccctcctcctcgcccacggcgcctcagatttcaggaccctcctcctcgcccacggcgcctcagacctcaggaccctgccgtctcacgcctttgtgaaccccaaatatctgagaccagtctcagtttattttgccaaggttaaggatgcacctgtgacagcctcaggaggtcctgacaacaggtgcctgaggtggctggggatacagtttgcctttatacatcttagggagacacaagatcagtatgtgtatggcgtacattggttcagtcagccttccactgaatacacgattgagtctggcccagtgaatccgcatttttatgtaaacagtaagggaacggggcaatcatataagcgtttgtctcaggggagccccagagggatgacttccagttccgtctgtcctttgtccacaaggaatttccctggacgctaattatgagggaggcgtgtagcttcttatcattgtaactatgttatttagaaataaaacgggaggcaggtttgcctaattcccagcttga

SEQ ID NO: 136216 - DNA, 1953 bp, Homo sapiens
  Payload ID: 6659
  Gene Symbol: GALNS
  Gene Name: galactosamine (N-acetyl)-6-sulfatase
  ENST ID: ENST00000567525
  CDS Start-End: 1-210
agcgccgcggggatgggggcctcgggcgccccgcagccccccaacatcctgctcctgctcatggacgaccgagggcggcactgctcacaggacggctacccatccgcaatggcttctacaccaccaacgcccatgccagaaacgcctacacaccgcaggagattgtgggcggcatcccagactcggagcagctcctgccggagcttctgaagaaggccggctacgtcagcaagattgtcggcaagtgatattatgaagaatttcctattaatctgaagacgggggaagccaacctcacccagatctacctgcaggaagccctggacttcattaagagacaggcacggcaccacccctttttcctctactgggctgtcgacgccacgcacgcacccgtctatgcctccaaacccttcttgggcaccagtcagcgagggcggtatggagacgccgtccgggagattgatgacagcattgggaagatactggagctcctccaagacctgcacgtcgcggacaacaccttcgtcttcttcacgtcggacaacggcgctgccctcatttccgcccccgaacaaggtggcagcaacggcccctttctgtgtgggaagcagaccacgtttgaaggagggatgagggagcctgccctcgcatggtggccagggcacgtcactgcaggccaggtgagccaccagctgggcagcatcatggacctcttcaccaccagcctggcccttgcgggcctgacgccgcccagcgacagggccattgatggcctcaacctcctccccaccctcctgcagggccggctgatggacaggcctatcttctattaccgtggcgacacgctgatggcggccaccctcgggcagcacaaggctcacttctggacctggaccaactcctgggagaacttcagacagggcattgatttctgccctgggcagaacgtttcaggggtcacaactcacaatctggaagaccacacgaagctgcccctgatcttccacctgggacgggacccaggggagaggttccccctcagctttgccagcgccgagtaccaggaggccctcagcaggatcacctcggtcgtccagcagcaccaggaggccttggtccccgcgcagccccagctcaacgtgtgcaactgggcggtcatgaactgggcacctccgggctgtgaaaagttagggaagtgtctgacacctccagaatccattcccaagaagtgcctctggtcccactagcacctgcgcagactcaggccaggcctagaatctccggttggccctgcaagtgcctggaggaaggatggctctggcctcggtcctcccccaaccctgcccaagccagacagacagcacctgcagacgcagggggactgcacaattccacctgcccaggacctgaccctggcgtgtgcttggccctcctcctcgcccacggcgcctcagatttcaggaccctcctcctcgcccacggcgcctcagacctcaggaccctgccgtctcacgcctttgtgaaccccaaatatctgagaccagtctcagtttattttgccaaggttaaggatgcacctgtgacagcctcaggaggtcctgacaacaggtgcctgaggtggctggggatacagtttgcctttatacatcttagggagacacaagatcagtatgtgtatggcgtacattggttcagtcagccttccactgaatacacgattgagtctggcccagtgaatccgcatttttatgtaaacagtaagggaacggggcaatcatataagcgtttgtctcaggggagccccagagggatgacttccagttccgtctgtcctttgtccacaaggaatttccctggacgctaattatgagggaggcgtgtagcttcttatcattgtaactatgttatttagaaataaaacgggaggcaggtttgcctaattcccagctt

SEQ ID NO: 136217 - DNA, 703 bp, Homo sapiens
  Payload ID: 6659
  Gene Symbol: GALNS
  Gene Name: galactosamine (N-acetyl)-6-sulfatase
  ENST ID: ENST00000568311
  CDS Start-End: 94-444
gtccaggccccgccccgcagcccagccggaagggccggcggacgctcgctaggtcggctcgctggccggggctccgcggctcccgtggttgccatggcggcggttgtcgcggcgacgaggtggtggcagctgttgctggtgctcagcgccgcggggatgggggcctcgggcgccccgcagccccccaacatcctgctcctgctcatggacgacgaatcactcccgccacctcgggccgccgggtccccccgctgggctccagtcttacctgacggctgtctctgtcctctggagaatgctgagcgaagtgactgctttccagagcacgctctccagcgcccaggggtccgtgtcctgacagcagtagccgggcctttctctgcactgagtggcatctccctcctaaagatactttgcttcagaatttcatcctttcacttttgaagttcctctgggccagtgtagatactttgtttcagaatttcttcttttcattgtgtaactccttctgggccagcatagcttcgctggatgagctgggctctgcaggtgaagcctccctgttaagtttctgcttttcctgactttctcagaggacagaggggtgaggcggggcagctcatgaataattttttatgttgaagacttgtcgaaataatattttggttatgttgggttaaataaaatataaagttagtctgta

SEQ ID NO: 136218 - DNA, 609 bp, Homo sapiens
  Payload ID: 6659
  Gene Symbol: GALNS
  Gene Name: galactosamine (N-acetyl)-6-sulfatase
  ENST ID: ENST00000562831
  CDS Start-End: 98-609
cgtgcggggagggggaggcccctcggggagtggccgcggggtccaggcgtggggtctcggcggtcaccgatcaccacacgcgctgccactgtgctgcatgaccgggacagcgtcctccctggcagcgagggcggcactgctcacaggacggctacccatccgcaatggcttctacaccaccaacgcccatgccagaaacgcctacacaccgcaggagattgtgggcggcatcccagactcggagcagctcctgccggagcttctgaagaaggccggctacgtcagcaagattgtcggcaagtggcatctgggtcacaggccccagttccaccccctgaagcacggatttgatgagtggtttggatcccccaactgccactttggaccttatgacaacaaggccaggcccaacatccctgtgtacagggactgggagatggttggcagatattatgaagaatttcctattaatctgaagacgggggaagccaacctcacccagatctacctgcaggaagccctggacttcattaagagacaggcacggcaccacccctttttcctctactgggctgtcgacgccacgcacgcacccgtctatgcctccaa

SEQ ID NO: 136219 - DNA, 723 bp, Homo sapiens
  Payload ID: 6659
  Gene Symbol: GALNS
  Gene Name: galactosamine (N-acetyl)-6-sulfatase
  ENST ID: ENST00000569433
  CDS Start-End: 55-291
ggacgctcgctaggtcggctcgctggccggggctccgcggctcccgtggttgccatggcggcggttgtcgcggcgacgaggtggtggcagctgttgctggtgctcagcgccgcggggatgggggcctcgggcgccccgcagccccccaacatcctgctcctgctcatggacgacgaatcactcccgccacctcgggccgccgggtccccccgctgggctccagtcttacctgacggctgtctctgtcctctggagaatgctgagcgaaggtcaggtgtccctaaggtctgaagaactgaaaggctggaatgtctcctggtgggcaagtgcggggtcaggggtcacagccagcctggaggcctccttccctaactccttgtgggagccacctggagactcaggaatgagcctgcctggggcatgggtcaccgtgcaggaccccagacacacctgggttgaaaccctactgtctccaagcttgggggtcacttccattcttgaacctcagctgccacacctggggggttacacctgtcccgccgtgctcacgttgtgtgtgaggactgggacgacaccgagtaccagacagttttgggccgtcggtgtcgctcagcccctgtgtgctggctccgaccagcagagaccctgacaggtgccttcagacccacctgtgctgaccagtgggggccacgggccacacccaagggctgggcagtcgtggct

SEQ ID NO: 136220 - DNA, 1804 bp, Homo sapiens
  Payload ID: 6659
  Gene Symbol: GALNS
  Gene Name: galactosamine (N-acetyl)-6-sulfatase
  ENST ID: ENST00000568613
  CDS Start-End: 1-156
agcgccgcggggatgggggcctcgggcgccccgcagccccccaacatcctgctcctgctcatggacgacatgcacgtgtttagaggccagctcctgcgagcatgcagatgctggtgtcaggctgggaggaggcagacggacacattccccacctgaagaccaagcagaagtggaggcgaaagacagcgtgggctgaccgtggagcggccccatcgtgcacgcacgcaggcgatgctgagatgggatggggtgacctcggggtgtatggagagccctccagagagaccccgaatttggaccggatggctgcagaagggctgcttttcccaaacttctattctgccaaccctctgtgctcgccatcgagggcggcactgctcacaggacggctacccatccgcaatggcttctacaccaccaacgcccatgccagaaacgcctacacaccgcaggagattgtgggcggcatcccagactcggagcagctcctgccggagcttctgaagaaggccggctacgtcagcaagattgtcggcaagtggcatctgggtcacaggccccagttccaccccctgaagcacggatttgatgagtggtttggatcccccaactgccactttggaccttatgacaacaaggccaggcccaacatccctgtgtacagggactgggagatggttggcagatattatgaagaatttcctattaatctgaagacgggggaagccaacctcacccagatctacctgcaggaagccctggacttcattaagagacaggcacggcaccacccctttttcctctactgggctgtcgacgccacgcacgcacccgtctatgcctccaaacccttcttgggcaccagtcagcgagggcggtatggagacgccgtccgggagattgatgacagcattgggaagatactggagctcctccaagacctgcacgtcgcggacaacaccttcgtcttcttcacgtcggacaacggcgctgccctcatttccgcccccgaacaaggtggcagcaacggcccctttctgtgtgggaagcagaccacgtttgaaggagggatgagggagcctgccctcgcatggtggccagggcacgtcactgcaggccaggtgagccaccagctgggcagcatcatggacctcttcaccaccagcctggcccttgcgggcctgacgccgcccagcgacagggccattgatggcctcaacctcctccccaccctcctgcagggccggctgatggacaggcctatcttctattaccgtggcgacacgctgatggcggccaccctcgggcagcacaaggctcacttctggacctggaccaactcctgggagaacttcagacagggcattgatttctgccctgggcagaacgtttcaggggtcacaactcacaatctggaagaccacacgaagctgcccctgatcttccacctgggacgggacccaggggagaggttccccctcagctttgccagcgccgagtaccaggaggccctcagcaggatcacctcggtcgtccagcagcaccaggaggccttggtccccgcgcagccccagctcaacgtgtgcaactgggcggtcatgaactgggcacctccgggctgtgaaaagttagggaagtgtctgacacctccagaatccattcccaagaagtgcctctggtcccactagcacctgcgcagactcaggccaggcctagaatctccggttggccctgcaagtgcctggaggaaggatggctctggcctcggtcctcccccaaccctgcccaagccagacagacagca

SEQ ID NO: 136221 - DNA, 2484 bp, Homo sapiens
  Payload ID: 6660
  Gene Symbol: GALM
  Gene Name: galactose mutarotase (aldose 1-epimerase)
  Uniprot ID: Q96C23
  ENST ID: ENST00000272252
  CDS Start-End: 253-1281
gacgagccaaggaaaaaaagtacaagtgtggctgcaaagtttgcccctcttgttaccctcaggcaaatgattgatttagaaaggccccaggggctattttttgcaggaacggtcactccctaaatccaggcagggaaagggaggagtctgagccgagtcacgccccttctcctgtaaacttgggtcgcctctagcttagcgagcgctggagtttgaagagcgggcagtggctgcacacgccaaactttccctatggcttcggtgaccagggccgtgtttggagagctgccctcgggaggagggacagtggagaagttccagctgcagtcagacctcttgagagtggacatcatctcctggggctgcacgatcacagccctagaggtcaaagacaggcaggggagagcctcggacgtggtgcttggcttcgccgagttggaaggatacctccaaaagcagccatactttggagcagttattgggagggtggccaaccgaatcgccaaaggaaccttcaaggtggatgggaaggagtatcacctggccattaacaaggaacccaacagtctgcatggaggagtcagagggtttgataaagtgctctggacccctcgggtgctgtcaaatggcgtccagttctcgcgcatcagtccagatggtgaagaaggctaccccggagagttaaaagtctgggtgacatacaccctggatggcggagagctcatagtcaactacagagcacaagccagtcaggccacaccagtcaacctgaccaaccattcttacttcaacctggcaggccaggcttccccaaatataaatgaccatgaagtcaccatagaagcggatacttatttgcctgtggatgaaaccctgattcctacaggagaagttgccccagtgcaaggcactgcattcgacctgagaaagccagtggagcttggaaaacacctgcaggacttccatctcaatggttttgaccacaatttctgtctgaagggatctaaagaaaagcatttttgtgcaagggtgcatcatgctgcaagcgggcgggtactagaagtatacaccacccagcccggggtccagttttacacgggcaacttcctggatggcacattaaagggcaagaatggagctgtctatcccaagcactccggtttctgcctggagactcagaactggcctgatgcagtcaatcagccccgcttccctcctgtgctgctgaggcctggtgaggagtatgaccacaccacctggttcaagttttctgtggcttaaggaagtgtgaagatatgatccagtccagggctaggctcagccacctgtctcctgtccagaaaaaaggtgaagattaagaagctttcagaatgattctatggattaaaatcatacaaatggtggctgttctgagaatcagtctgggtattgatttccttttccagtgactggctccaggccatgtctaatgaccagctcgattccctgtgcagttcagagggcaagtgaacccaaccaacaatgtcgtcatctaagccctgaccctagccagggactcccatgctgctgttggctccatctctccacactgcctctttcttttcaactttttgcccttcctttctttaaagctattctcacattgcttttatttcctcctccttcacctccaaccactgtcagcagcactctggagttttcaaatgtcacattagcctcaccctgcatgctaggagatggacctgtctctatacagcagtagatgattgataagtgaggaaactgaggcttacagaggttgaagaccaacaagctaataaataaaaagttgaggccgggcacggtggctcacgcctgtaatcccagcactttggaaggccgaggcaggcggatcacgaggtcaggagatcgagaccatcctggctaacacggtgaaaccccgtctctacataaaaaattagctgggtgtggtagcacgcacctgtagtcccagctacttgggaggctgaagcaggagaatcgcttgaacctgggaggtggaggttgcagtgagccgagatcatgccactgcactgggcaacagagcaaaactcgatctcaaaaaaaaaaaaaaaaaaaaggaaaaaaaagcagctctctctctcgggagagggaggggacttccgagaggaaaaggcctgcaagagcctttgggttaactgagaaagcacagcccggccaacgcttgggaagaaagacaggcaagcactggaaacaggagctattagggtgaggagagagccttgcctttcacagcacagtgaggatgacattgcaccagggacagagattgtatgtgacaaggctggggctccttctttcctagacaatcaaagtatcagtgatgggttttggttggtgattttgaaaaaaaaaaaaaaaagtatgttatactagtgtatgctgtactgaattgaaataaaaccaaaatctgcatcttcagaa

SEQ ID NO: 136222 - DNA, 1023 bp, Homo sapiens
  Payload ID: 6660
  Gene Symbol: GALM
  Gene Name: galactose mutarotase (aldose 1-epimerase)
  ENST ID: ENST00000410063
  CDS Start-End: 46-630
ggagtttgaagagcgggcagtggctgcacacgccaaactttccctatggcttcggtgaccagggccgtgtttggagagctgccctcgggaggagggacagtggagaagttccagctgcagtcagacctcttgagagtggacatcatctcctggggctgcacgatcacagccctagaggtcaaagacaggcaggggagagcctcggacgtggtgcttggcttcgccgagttggaaggagaagttgccccagtgcaaggcactgcattcgacctgagaaagccagtggagcttggaaaacacctgcaggacttccatctcaatggttttgaccacaatttctgtctgaagggatctaaagaaaagcatttttgtgcaagggtgcatcatgctgcaagcgggcgggtactagaagtatacaccacccagcccggggtccagttttacacgggcaacttcctggatggcacattaaagggcaagaatggagctgtctatcccaagcactccggtttctgcctggagactcagaactggcctgatgcagtcaatcagccccgcttccctcctgtgctgctgaggcctggtgaggagtatgaccacaccacctggttcaagttttctgtggcttaaggaagtgtgaagatatgatccagtccagggctaggctcagccacctgtctcctgtccagaaaaaaggtgaagattaagaagctttcagaatgattctatggattaaaatcatacaaatggtggctgttctgagaatcagtctgggtattgatttccttttccagtgactggctccaggccatgtctaatgaccagctcgattccctgtgcagttcagagggcaagtgaacccaaccaacaatgtcgtcatctaagccctgaccctagccagggactcccatgctgctgttggctccatctctccacactgcctctttcttttcaactttttgcccttcctttctttaaagctattctcacattgcttttatttcctcctccttcacctccaac

SEQ ID NO: 136223 - DNA, 724 bp, Homo sapiens
  Payload ID: 6660
  Gene Symbol: GALM
  Gene Name: galactose mutarotase (aldose 1-epimerase)
  ENST ID: ENST00000434934
  CDS Start-End: 1-657
cgggtgctgtcaaatggcgtccagttctcgcgcatcagtccagatggtgaagaaggctaccccggagagttaaaagtctgggtgacatacaccctggatggcggagagctcatagtcaactacagagcacaagccagtcaggccacaccagtcaacctgaccaaccattcttacttcaacctggcaggccaggcttccccaaatataaatgaccatgaagtcaccatagaagcggatacttatttgcctgtggatgaaaccctgattcctacaggagaagttgccccagtgcaaggcactgcattcgacctgagaaagccagtggagcttggaaaacacctgcaggacttccatctcaatggttttgaccacaatttctgtctgaagggatctaaagaaaagcatttttgtgcaagggtgcatcatgctgcaagcgggcgggtactagaagtatacaccacccagcccggggtccagttttacacgggcaacttcctggatggcacattaaagggcaagaatggagctgtctatcccaagcactccggtttctgcctggagactcagaactggcctgatgcagtcaatcagtttcctttccagcatgggatcatttggagacagagaaacctagaggacaatagcagaatcctttgattcacatgtgagtgctgctacttccttattatagtagaataaaccaggccaatcttccaataactaa

SEQ ID NO: 136224 - DNA, 834 bp, Homo sapiens
  Payload ID: 6660
  Gene Symbol: GALM
  Gene Name: galactose mutarotase (aldose 1-epimerase)
  ENST ID: ENST00000444351
  CDS Start-End: 1-585
ctcttgagagtggacatcatctcctggggctgcacgatcacagccctagaggtcaaagacaggcaggggagagcctcggacgtggtgcttggcttcgccgagttggaaggatacctccaaaagcagccatactttggagcagttattgggagggtggccaaccgaatcgccaaaggaaccttcaaggtggatgggaaggagtatcacctggccattaacaaggaacccaacagtctgcatggaggagtcagagggtttgataaagtgctctggacccctcgggtgctgtcaaatggcgtccagttctcgcgcatcagtccagatggtgaagaaggctaccccggagagttaaaagtctgggtgacatacaccctggatggcggagagctcatagtcaactacagagcacaagccagtcaggccacaccagtcaacctgaccaaccattcttacttcaacctggcaggccaggcttccccaaatataaatgaccatgaagtcaccatagaagcggatacttatttgcctgtggatgaaaccctgattcctacaggtggcaccaacagaaggtttctgcaaggctgagagctccttttacccatggaccaggagcaaagtttgcaggagaagttgccccagtgcaaggcactgcattcgacctgagaaagccagtggagcttggaaaacacctgcaggacttccatctcaatggttttgaccacaatttctgtctgaagggatctaaagaaaagcatttttgtgcaagggtgcatcatgctgcaagcgggcgggtactagaagtatacaccacccagcccggggtccagttttaca

SEQ ID NO: 136225 - DNA, 1768 bp, Homo sapiens
  Payload ID: 6661
  Gene Symbol: GALT
  Gene Name: galactose-1-phosphate uridylyltransferase
  Uniprot ID: P07902
  ENST ID: ENST00000378842
  CDS Start-End: 43-1182
gcacggccctgcagattttccagcggatcccccggtggcctcatgtcgcgcagtggaaccgatcctcagcaacgccagcaggcgtcagaggcggacgccgcagcagcaaccttccgggcaaacgaccatcagcatatccgctacaacccgctgcaggatgagtgggtgctggtgtcagctcaccgcatgaagcggccctggcagggtcaagtggagccccagcttctgaagacagtgccccgccatgaccctctcaaccctctgtgtcctggggccatccgagccaacggagaggtgaatccccagtacgatagcaccttcctgtttgacaacgacttcccagctctgcagcctgatgcccccagtccaggacccagtgatcatccccttttccaagcaaagtctgctcgaggagtctgtaaggtcatgtgcttccacccctggtcggatgtaacgctgccactcatgtcggtccctgagatccgggctgttgttgatgcatgggcctcagtcacagaggagctgggtgcccagtacccttgggtgcagatctttgaaaacaaaggtgccatgatgggctgttctaacccccacccccactgccaggtatgggccagcagtttcctgccagatattgcccagcgtgaggagcgatctcagcaggcctataagagtcagcatggagagcccctgctaatggagtacagccgccaggagctactcaggaaggaacgtctggtcctaaccagtgagcactggttagtactggtccccttctgggcaacatggccctaccagacactgctgctgccccgtcggcatgtgcggcggctacctgagctgacccctgctgagcgtgatgatctagcctccatcatgaagaagctcttgaccaagtatgacaacctctttgagacgtcctttccctactccatgggctggcatggggctcccacaggatcagaggctggggccaactggaaccattggcagctgcacgctcattactaccctccgctcctgcgctctgccactgtccggaaattcatggttggctacgaaatgcttgctcaggctcagagggacctcacccctgagcaggctgcagagagactaagggcacttcctgaggttcattaccacctggggcagaaggacagggagacagcaaccatcgcctgaccacgccgaccacagggccttgaatccttttttgttttcaacagtcttgctgaattaagcagaaagggccttgaatcctggcctggaatttgggcagatatagcattaataaaactgtgcatctcaaacttttatcacatactctaatatcagaggagtgtgaaccttcagagatctagggttaaaagctaaaggcatagctccagctacaacttttctttgtctacagatgtgtaaaatcttgatgcaaaaatctaccccaaatttctgaacaaaattaatattcagtattatatctagcctatagattctcttactcttggtgtaatgacagcattcccagtttaggaaactgttttaaaatcttgtgtcttggttgtggctgaggctttgggaaggccagagccccctttgccaccacccctagggtgtcagctccaagcctgggcctgagggtttgatggggagcgggtgagctggatcctgatcccagtggtcagtggccagatcctgggctgctggccagaaccctggctttgtgagtggctgcagcttggctctgctccagcccacaggggctaaaggg

SEQ ID NO: 136226 - DNA, 1280 bp, Homo sapiens
  Payload ID: 6661
  Gene Symbol: GALT
  Gene Name: galactose-1-phosphate uridylyltransferase
  Uniprot ID: P07902
  ENST ID: ENST00000450095
  CDS Start-End: 319-1131
acgtgctggcggctggccaatcatcgggggcggcgcggggaggggtggtgtggacggagaaagtgaaaggtgaggcacggccctgcagattttccagcggatcccccggtggcctcatgtcgcgcagtggaaccgatcctcagcaacgccagcaggcgtcagaggcggacgccgcagcagcaaccttccgggcaaacgaccatcagcatatccgctacaacccgctgcaggatgagtgggtgctggtgtcagctcaccgcatgaagcggccctggcagggtcaagtggagccccagcttctgaagacagtgccccgccatgaccctctcaaccctctgtgtcctggggccatccgagccaacggagagtaaggtcatgtgcttccacccctggtcggatgtaacgctgccactcatgtcggtccctgagatccgggctgttgttgatgcatgggcctcagtcacagaggagctgggtgcccagtacccttgggtgcagatctttgaaaacaaaggtgccatgatgggctgttctaacccccacccccactgccaggtatgggccagcagtttcctgccagatattgcccagcgtgaggagcgatctcagcaggcctataagagtcagcatggagagcccctgctaatggagtacagccgccaggagctactcaggaaggaacgtctggtcctaaccagtgagcactggttagtactggtccccttctgggcaacatggccctaccagacactgctgctgccccgtcggcatgtgcggcggctacctgagctgacccctgctgagcgtgatgatctagcctccatcatgaagaagctcttgaccaagtatgacaacctctttgagacgtcctttccctactccatgggctggcatggggctcccacaggatcagaggctggggccaactggaaccattggcagctgcacgctcattactaccctccgctcctgcgctctgccactgtccggaaattcatggttggctacgaaatgcttgctcaggctcagagggacctcacccctgagcaggctgcagagagactaagggcacttcctgaggttcattaccacctggggcagaaggacagggagacagcaaccatcgcctgaccacgccgaccacagggccttgaatccttttttgttttcaacagtcttgctgaattaagcagaaagggccttgaatcctggcctggaatttgggcagatatagcattaataaaactgtgcatctcaaacttttatcacatactctaata

SEQ ID NO: 136227 - DNA, 838 bp, Homo sapiens
  Payload ID: 6661
  Gene Symbol: GALT
  Gene Name: galactose-1-phosphate uridylyltransferase
  ENST ID: ENST00000473506
  CDS Start-End: 68-430
gtggacggagaaagtgaaaggtgaggcacggccctgcagattttccagcggatcccccggtggcctcatgtcgcgcagtggaaccgatcctcagcaacgccagcaggcgtcagaggcggacgccgcagcagcaaccttccgggcaaacgaccatcagcatatccgctacaacccgctgcaggatgagtgggtgctggtgtcagctcaccgcatgaagcggccctggcagggtcaagtggagccccagcttctgaagacagtgccccgccatgaccctctcaaccctctgtgtcctggggccatccgagccaacggagagctctgcagcctgatgcccccagtccaggacccagtgatcatccccttttccaagcaaagtctgctcgaggagtctgtaaggtcatgtgcttccacccctggtcggatgtaacgctgccactcatgtcggtccctgagatccgggctgttgttgatgcatgggcctcagtcacagaggagctgggtgcccagtacccttgggtgcagatctttgaaaacaaaggtgccatgatgggctgttctaacccccacccccactgccaggtatgggccagcagtttcctgccagatattgcccagcgtgaggagcgatctcagcaggcctataagagtcagcatggagagcccctgctaatggagtacagccgccaggagctactcaggaaggaacgtctggtcctaaccagtgagcactggttagtactggtccccttctgggcaacatggccctaccagacactgctgctgccccgtcggcatgtgcggcggctacctgagctgacccctgctgagcgtgatg

SEQ ID NO: 136228 - DNA, 890 bp, Homo sapiens
  Payload ID: 6661
  Gene Symbol: GALT
  Gene Name: galactose-1-phosphate uridylyltransferase
  ENST ID: ENST00000554085
  CDS Start-End: 29-301
attttccagcggatcccccggtggcctcatgtcgcgcagtggaaccgatcctcagcaacgccagcaggcgtcagaggcggacgccgcagcagcaaccttccgggcaaacgaccatcagcatatccgctacaacccgctgcaggatgagtgggtgctggtgtcagctcaccgcatgaagcggccctggcagggtcaagtggagccccagcttctgaagacagtgccccgccatgaccctctcaaccctctgtgtcctggggccatccgagccaacggagagcctatccttgtcggtaggtgaatccccagtacgatagcaccttcctgtttgacaacgacttcccagctctgcagcctgatgcccccagtccaggacccagtgatcatccccttttccaagcaaagtctgctcgaggagtctgtaaggtcatgtgcttccacccctggtcggatgtaacgctgccactcatgtcggtccctgagatccgggctgttgttgatgcatgggcctcagtcacagaggagctgggtgcccagtacccttgggtgcagatctttgaaaacaaaggtgccatgatgggctgttctaacccccacccccactgccaggtatgggccagcagtttcctgccagatattgcccagcgtgaggagcgatctcagcaggcctataagagtcagcatggagagcccctgctaatggagtacagccgccaggagctactcaggaaggaacgtctggtcctaaccagtgagcactggttagtactggtccccttctgggcaacatggccctaccagacactgctgctgccccgtcggcatgtgcggcggctacctgagctgacccctgctgagcgtgatgatctagcctccatcatgaagaagct

SEQ ID NO: 136229 - DNA, 578 bp, Homo sapiens
  Payload ID: 6661
  Gene Symbol: GALT
  Gene Name: galactose-1-phosphate uridylyltransferase
  ENST ID: ENST00000554897
  CDS Start-End: 31-285
agattttccagcggatcccccggtggcctcatgtcgcgcagtggaaccgatcctcagcaacgccagcaggcgtcagaggcggacgccgcagcagcaaccttccgggcaaacgaccatcagcatatccgctacaacccgctgcaggatgagtgggtgctggtgtcagctcaccgcatgaagcggccctggcagggtcaagtggagccccagcttctgaagacagtgccccgccatgaccctctcaaccctctgtgtcctggggccatccgagccaacggagagtaaggtcatgtgcttccacccctggtcggatgtaacgctgccactcatgtcggtccctgagatccgggctgttgttgatgcatgggcctcagtcacagaggagctgggtgcccagtacccttgggtgcagggtgtggtcaggagggagttgacttggtgtcttttggctaacagagctccgtatccctatctgatagatctttgaaaacaaaggtgccatgatgggctgttctaacccccacccccactgccaggtatgggccagcagtttcctgccagatattgcccagcgtgag

SEQ ID NO: 136230 - DNA, 1164 bp, Homo sapiens
  Payload ID: 6661
  Gene Symbol: GALT
  Gene Name: galactose-1-phosphate uridylyltransferase
  ENST ID: ENST00000554550
  CDS Start-End: 70-324
gtgtggacggagaaagtgaaaggtgaggcacggccctgcagattttccagcggatcccccggtggcctcatgtcgcgcagtggaaccgatcctcagcaacgccagcaggcgtcagaggcggacgccgcagcagcaaccttccgggcaaacgaccatcagcatatccgctacaacccgctgcaggatgagtgggtgctggtgtcagctcaccgcatgaagcggccctggcagggtcaagtggagccccagcttctgaagacagtgccccgccatgaccctctcaaccctctgtgtcctggggccatccgagccaacggagagtaaggtcatgtgcttccacccctggtcggatgtaacgctgccactcatgtcggtccctgagatccgggctgttgttgatgcatgggcctcagtcacagaggagctgggtgcccagtacccttgggtgcagatctttgaaaacaaaggtgccatgatgggctgttctaacccccacccccactgccaggtatgggccagcagtttcctgccagatattgcccagcgtgaggagcgatctcagcaggcctataagagtcagcatggagagcccctgctaatggagtacagccgccaggagctactcaggaaggaacgtctggtcctaaccagtgagcactggttagtactggtccccttctgggcaacatggccctaccagacactgctgctgccccgtcggcatgtgcggcggctacctgagctgacccctgctgagcgtgatgatctagcctccatcatgaagaagctcttgaccaagtatgacaacctctttgagacgtcctttccctactccatgggctggcatggggctcccacaggatcagaggctggggccaactggaaccattggcagctgcacgctcattactaccctccgctcctgcgctctgccactgtccggaaattcatggttggctacgaaatgcttgctcaggctcagagggacctcacccctgagcaggctgcagagagactaagggcacttcctgaggttcattaccacctggggcagaaggacagggagacagcaaccatcgcctgaccacgccgaccacagggccttgaatccttttttgttttcaacagtcttgctgaattaagcagaaagggccttgaatcctg

SEQ ID NO: 136231 - DNA, 807 bp, Homo sapiens
  Payload ID: 6661
  Gene Symbol: GALT
  Gene Name: galactose-1-phosphate uridylyltransferase
  ENST ID: ENST00000556244
  CDS Start-End: 1-178
tgagtgggtgctggtgtcagctcaccgcatgaagcggccctggcagggtcaagtggagccccagcttctgaagacagtgccccgccatgaccctctcaaccctctgtgtcctggggccatccgagccaacggagagggtgggccttccctactcccttgtagcctgtccagtctttgaagcccaccaggtaactggtggtatggggcagtgagtgcttctagcctatccttgtcggtaggtgaatccccagtacgatagcaccttcctgtttgacaacgacttcccagctctgcagcctgatgcccccagtccaggacccagtgatcatccccttttccaagcaaagtctgctcgaggagtctgtaaggtcatgtgcttccacccctggtcggatgtaacgctgccactcatgtcggtccctgagatccgggctgttgttgatgcatgggcctcagtcacagaggagctgggtgcccagtacccttgggtgcagatctttgaaaacaaaggtgccatgatgggctgttctaacccccacccccactgccaggtatgggccagcagtttcctgccagatattgcccagcgtgaggagcgatctcagcaggcctataagagtcagcatggagagcccctgctaatggagtacagccgccaggagctactcaggaaggaacgtctggtcctaaccagtgagcactggttagtactggtccccttctgggcaacatggccctaccagacactgctgctgccccgtcggcatgtgcggcggctacctgagctgacccctgctgagcgtgatg

SEQ ID NO: 136232 - DNA, 1782 bp, Homo sapiens
  Payload ID: 6662
  Gene Symbol: GAL3ST1
  Gene Name: galactose-3-O-sulfotransferase 1
  Uniprot ID: Q99999
  ENST ID: ENST00000338911
  CDS Start-End: 195-1466
ctggggctgtctctttccaggtggttgtcagtctatctctccagtgcctctctgtccctgtctggaccctgctggggggccacagagcaggcaaaggcagggctcaactgccaggcctgggcagccttgggggctccctggggccagcttcctgacacttgccctactctgtgctgcccctgcaggtgtctgagatgctgccaccgcagaagaagccctgggagtccatggctaaggggctggtgctgggcgcgctcttcactagtttcctgctgctggtgtactcctatgccgtgcccccgctgcatgccggcctggcctccacgaccccggaggccgcagcgtcctgctctccacctgcactcgagccagaggcagtgatccgggccaacggctcggcgggggagtgccagccgcggcgcaacatcgtgttcttgaagacgcacaagacggccagcagcaccctgctcaacatcctgttccgcttcggccagaagcaccggctcaagttcgccttccctaacggccgcaatgacttcgactacccgaccttcttcgcccgcagcctggtgcaggactatcggcccggggcctgcttcaacatcatctgcaaccacatgcgcttccactacgacgaggtgcgcggcctggtgccgaccaacgccatcttcatcacggtgctccgcgaccccgcccgcttgttcgagtcctccttccactacttcgggccggtggtgcccctcacgtggaagctctcggccggcgacaagctgaccgagttcctgcaagacccggatcgctactacgaccccaacggcttcaatgcccactacctccgaaacctgctcttcttcgacctgggctatgacaacagcctggaccccagcagcccgcaggtgcaggagcacatcctggaggtggagcgtcgcttccacctggtgctccttcaagagtacttcgacgagtcgctggtgctgctgaaggacctgctgtgctgggagctggaggacgtgctctacttcaagctcaacgcccgccgcgactcgcccgtgccgcggctctcgggggagctgtatgggcgcgccaccgcctggaacatgctggactcccacctctaccgccacttcaacgccagcttctggcgcaaggtggaggccttcgggcgggagcgcatggcccgcgaggtggccgccctgcgccatgccaacgagcgcatgcggaccatctgcatcgacgggggccacgccgtggacgccgccgccatccaggacgaggccatgcagccctggcagccgctgggcaccaagtccatcctgggctacaacctcaagaagagcatcgggcagcggcacgcgcagctctgccggcgcatgctcacgcccgagatccagtacctgatggacctcggcgccaacctgtgggtcaccaagctctggaagttcattcgcgatttcctgcggtggtgacgtcccaccgcccagcggcttgcctgcctgctcgctccctgcagaggggctgagcaggacgccgctggtgctggccgcccccagccccctcctggtgccacctcagaccccggggtgagggggggctccctggggggaggcagccagccaagactgggcccatgaacacagagagggcctaaccgagatcagtatttaactaattataccagtttttattaaacccctttccctccccgataaagaatgttctatttctgcctccccttaaaggggagacctcagaagtaaaggaatttgatgttgtgtttttgtt

SEQ ID NO: 136233 - DNA, 1712 bp, Homo sapiens
  Payload ID: 6662
  Gene Symbol: GAL3ST1
  Gene Name: galactose-3-O-sulfotransferase 1
  Uniprot ID: Q99999
  ENST ID: ENST00000402369
  CDS Start-End: 123-1394
aggcctggtggagcggggggcccggccgggtgcgccccgccgcccagtgagcgcccgggcggcgcggcccgggccgagccagccacgctgaggcggaggaggacggggacaaggtgtctgagatgctgccaccgcagaagaagccctgggagtccatggctaaggggctggtgctgggcgcgctcttcactagtttcctgctgctggtgtactcctatgccgtgcccccgctgcatgccggcctggcctccacgaccccggaggccgcagcgtcctgctctccacctgcactcgagccagaggcagtgatccgggccaacggctcggcgggggagtgccagccgcggcgcaacatcgtgttcttgaagacgcacaagacggccagcagcaccctgctcaacatcctgttccgcttcggccagaagcaccggctcaagttcgccttccctaacggccgcaatgacttcgactacccgaccttcttcgcccgcagcctggtgcaggactatcggcccggggcctgcttcaacatcatctgcaaccacatgcgcttccactacgacgaggtgcgcggcctggtgccgaccaacgccatcttcatcacggtgctccgcgaccccgcccgcttgttcgagtcctccttccactacttcgggccggtggtgcccctcacgtggaagctctcggccggcgacaagctgaccgagttcctgcaagacccggatcgctactacgaccccaacggcttcaatgcccactacctccgaaacctgctcttcttcgacctgggctatgacaacagcctggaccccagcagcccgcaggtgcaggagcacatcctggaggtggagcgtcgcttccacctggtgctccttcaagagtacttcgacgagtcgctggtgctgctgaaggacctgctgtgctgggagctggaggacgtgctctacttcaagctcaacgcccgccgcgactcgcccgtgccgcggctctcgggggagctgtatgggcgcgccaccgcctggaacatgctggactcccacctctaccgccacttcaacgccagcttctggcgcaaggtggaggccttcgggcgggagcgcatggcccgcgaggtggccgccctgcgccatgccaacgagcgcatgcggaccatctgcatcgacgggggccacgccgtggacgccgccgccatccaggacgaggccatgcagccctggcagccgctgggcaccaagtccatcctgggctacaacctcaagaagagcatcgggcagcggcacgcgcagctctgccggcgcatgctcacgcccgagatccagtacctgatggacctcggcgccaacctgtgggtcaccaagctctggaagttcattcgcgatttcctgcggtggtgacgtcccaccgcccagcggcttgcctgcctgctcgctccctgcagaggggctgagcaggacgccgctggtgctggccgcccccagccccctcctggtgccacctcagaccccggggtgagggggggctccctggggggaggcagccagccaagactgggcccatgaacacagagagggcctaaccgagatcagtatttaactaattataccagtttttattaaacccctttccctccccgataaagaatgttctatttctgcctccccttaaaggggagacctcagaagtaaaggaatttgatgttgtgtttttgttaa

SEQ ID NO: 136234 - DNA, 1791 bp, Homo sapiens
  Payload ID: 6662
  Gene Symbol: GAL3ST1
  Gene Name: galactose-3-O-sulfotransferase 1
  Uniprot ID: Q99999
  ENST ID: ENST00000401975
  CDS Start-End: 204-1475
ggcagcctgggagttggacgtggctcaggcagtgggtagaaaggggcagccagccacagcccgagggtctcactgtgtcatccagagctggagtgcagcggcacagtcatggctcactggaactcaggctcaagcaatcctcccgcctcagccttccaagtaactaggactacaggcatgtgccaccacgcctggtgtctgagatgctgccaccgcagaagaagccctgggagtccatggctaaggggctggtgctgggcgcgctcttcactagtttcctgctgctggtgtactcctatgccgtgcccccgctgcatgccggcctggcctccacgaccccggaggccgcagcgtcctgctctccacctgcactcgagccagaggcagtgatccgggccaacggctcggcgggggagtgccagccgcggcgcaacatcgtgttcttgaagacgcacaagacggccagcagcaccctgctcaacatcctgttccgcttcggccagaagcaccggctcaagttcgccttccctaacggccgcaatgacttcgactacccgaccttcttcgcccgcagcctggtgcaggactatcggcccggggcctgcttcaacatcatctgcaaccacatgcgcttccactacgacgaggtgcgcggcctggtgccgaccaacgccatcttcatcacggtgctccgcgaccccgcccgcttgttcgagtcctccttccactacttcgggccggtggtgcccctcacgtggaagctctcggccggcgacaagctgaccgagttcctgcaagacccggatcgctactacgaccccaacggcttcaatgcccactacctccgaaacctgctcttcttcgacctgggctatgacaacagcctggaccccagcagcccgcaggtgcaggagcacatcctggaggtggagcgtcgcttccacctggtgctccttcaagagtacttcgacgagtcgctggtgctgctgaaggacctgctgtgctgggagctggaggacgtgctctacttcaagctcaacgcccgccgcgactcgcccgtgccgcggctctcgggggagctgtatgggcgcgccaccgcctggaacatgctggactcccacctctaccgccacttcaacgccagcttctggcgcaaggtggaggccttcgggcgggagcgcatggcccgcgaggtggccgccctgcgccatgccaacgagcgcatgcggaccatctgcatcgacgggggccacgccgtggacgccgccgccatccaggacgaggccatgcagccctggcagccgctgggcaccaagtccatcctgggctacaacctcaagaagagcatcgggcagcggcacgcgcagctctgccggcgcatgctcacgcccgagatccagtacctgatggacctcggcgccaacctgtgggtcaccaagctctggaagttcattcgcgatttcctgcggtggtgacgtcccaccgcccagcggcttgcctgcctgctcgctccctgcagaggggctgagcaggacgccgctggtgctggccgcccccagccccctcctggtgccacctcagaccccggggtgagggggggctccctggggggaggcagccagccaagactgggcccatgaacacagagagggcctaaccgagatcagtatttaactaattataccagtttttattaaacccctttccctccccgataaagaatgttctatttctgcctccccttaaaggggagacctcagaagtaaaggaatttgatgttgtgtttttgtt

SEQ ID NO: 136235 - DNA, 1819 bp, Homo sapiens
  Payload ID: 6662
  Gene Symbol: GAL3ST1
  Gene Name: galactose-3-O-sulfotransferase 1
  Uniprot ID: Q99999
  ENST ID: ENST00000406361
  CDS Start-End: 242-1513
gcatggaccaggcctggtggagcggggggcccggccgggtgcgccccgccgcccagtgagcgcccgggcggcgcggcccgggccgagccagccacgctgaggcggaggaggacggggacaagggtctcactgtgtcatccagagctggagtgcagcggcacagtcatggctcactggaactcaggctcaagcaatcctcccgcctcagccttccaagtaactaggactacaggtgtctgagatgctgccaccgcagaagaagccctgggagtccatggctaaggggctggtgctgggcgcgctcttcactagtttcctgctgctggtgtactcctatgccgtgcccccgctgcatgccggcctggcctccacgaccccggaggccgcagcgtcctgctctccacctgcactcgagccagaggcagtgatccgggccaacggctcggcgggggagtgccagccgcggcgcaacatcgtgttcttgaagacgcacaagacggccagcagcaccctgctcaacatcctgttccgcttcggccagaagcaccggctcaagttcgccttccctaacggccgcaatgacttcgactacccgaccttcttcgcccgcagcctggtgcaggactatcggcccggggcctgcttcaacatcatctgcaaccacatgcgcttccactacgacgaggtgcgcggcctggtgccgaccaacgccatcttcatcacggtgctccgcgaccccgcccgcttgttcgagtcctccttccactacttcgggccggtggtgcccctcacgtggaagctctcggccggcgacaagctgaccgagttcctgcaagacccggatcgctactacgaccccaacggcttcaatgcccactacctccgaaacctgctcttcttcgacctgggctatgacaacagcctggaccccagcagcccgcaggtgcaggagcacatcctggaggtggagcgtcgcttccacctggtgctccttcaagagtacttcgacgagtcgctggtgctgctgaaggacctgctgtgctgggagctggaggacgtgctctacttcaagctcaacgcccgccgcgactcgcccgtgccgcggctctcgggggagctgtatgggcgcgccaccgcctggaacatgctggactcccacctctaccgccacttcaacgccagcttctggcgcaaggtggaggccttcgggcgggagcgcatggcccgcgaggtggccgccctgcgccatgccaacgagcgcatgcggaccatctgcatcgacgggggccacgccgtggacgccgccgccatccaggacgaggccatgcagccctggcagccgctgggcaccaagtccatcctgggctacaacctcaagaagagcatcgggcagcggcacgcgcagctctgccggcgcatgctcacgcccgagatccagtacctgatggacctcggcgccaacctgtgggtcaccaagctctggaagttcattcgcgatttcctgcggtggtgacgtcccaccgcccagcggcttgcctgcctgctcgctccctgcagaggggctgagcaggacgccgctggtgctggccgcccccagccccctcctggtgccacctcagaccccggggtgagggggggctccctggggggaggcagccagccaagactgggcccatgaacacagagagggcctaaccgagatcagtatttaactaattataccagtttttattaaacccctttccctccccgataaagaatgttctatttctgcctccccttaaaggggagacctcagaagtaaaggaatttgatgttg

SEQ ID NO: 136236 - DNA, 1908 bp, Homo sapiens
  Payload ID: 6662
  Gene Symbol: GAL3ST1
  Gene Name: galactose-3-O-sulfotransferase 1
  Uniprot ID: Q99999
  ENST ID: ENST00000402321
  CDS Start-End: 319-1590
gaatctttctgtgcccttggatgaaagagctgcttgcttgttggggtccaaagagaggtgaggactggccagagctgtccagtggaggcagaaggcctgggcaacacctgcagggtactggggtgtgccacctgctatccccaggaagcaaactcatgaatattcacaccactggagtgggagggagccagccagcttgctgctgggtgtcattggagcattcctgtctcccagtgatcgcagaggcagcctgggagttggacgtggctcaggcagtgggtagaaaggggcagccagccacagcccgaggtgtctgagatgctgccaccgcagaagaagccctgggagtccatggctaaggggctggtgctgggcgcgctcttcactagtttcctgctgctggtgtactcctatgccgtgcccccgctgcatgccggcctggcctccacgaccccggaggccgcagcgtcctgctctccacctgcactcgagccagaggcagtgatccgggccaacggctcggcgggggagtgccagccgcggcgcaacatcgtgttcttgaagacgcacaagacggccagcagcaccctgctcaacatcctgttccgcttcggccagaagcaccggctcaagttcgccttccctaacggccgcaatgacttcgactacccgaccttcttcgcccgcagcctggtgcaggactatcggcccggggcctgcttcaacatcatctgcaaccacatgcgcttccactacgacgaggtgcgcggcctggtgccgaccaacgccatcttcatcacggtgctccgcgaccccgcccgcttgttcgagtcctccttccactacttcgggccggtggtgcccctcacgtggaagctctcggccggcgacaagctgaccgagttcctgcaagacccggatcgctactacgaccccaacggcttcaatgcccactacctccgaaacctgctcttcttcgacctgggctatgacaacagcctggaccccagcagcccgcaggtgcaggagcacatcctggaggtggagcgtcgcttccacctggtgctccttcaagagtacttcgacgagtcgctggtgctgctgaaggacctgctgtgctgggagctggaggacgtgctctacttcaagctcaacgcccgccgcgactcgcccgtgccgcggctctcgggggagctgtatgggcgcgccaccgcctggaacatgctggactcccacctctaccgccacttcaacgccagcttctggcgcaaggtggaggccttcgggcgggagcgcatggcccgcgaggtggccgccctgcgccatgccaacgagcgcatgcggaccatctgcatcgacgggggccacgccgtggacgccgccgccatccaggacgaggccatgcagccctggcagccgctgggcaccaagtccatcctgggctacaacctcaagaagagcatcgggcagcggcacgcgcagctctgccggcgcatgctcacgcccgagatccagtacctgatggacctcggcgccaacctgtgggtcaccaagctctggaagttcattcgcgatttcctgcggtggtgacgtcccaccgcccagcggcttgcctgcctgctcgctccctgcagaggggctgagcaggacgccgctggtgctggccgcccccagccccctcctggtgccacctcagaccccggggtgagggggggctccctggggggaggcagccagccaagactgggcccatgaacacagagagggcctaaccgagatcagtatttaactaattataccagtttttattaaacccctttccctccccgataaagaatgttctatttctgcctccccttaaaggggagacctcagaagtaaaggaatttgatgttgtgtttttgttaa

SEQ ID NO: 136237 - DNA, 1635 bp, Homo sapiens
  Payload ID: 6662
  Gene Symbol: GAL3ST1
  Gene Name: galactose-3-O-sulfotransferase 1
  Uniprot ID: Q99999
  ENST ID: ENST00000406955
  CDS Start-End: 46-1317
actattgcagcctccctgattccagaaggtaccttggtgtctgagatgctgccaccgcagaagaagccctgggagtccatggctaaggggctggtgctgggcgcgctcttcactagtttcctgctgctggtgtactcctatgccgtgcccccgctgcatgccggcctggcctccacgaccccggaggccgcagcgtcctgctctccacctgcactcgagccagaggcagtgatccgggccaacggctcggcgggggagtgccagccgcggcgcaacatcgtgttcttgaagacgcacaagacggccagcagcaccctgctcaacatcctgttccgcttcggccagaagcaccggctcaagttcgccttccctaacggccgcaatgacttcgactacccgaccttcttcgcccgcagcctggtgcaggactatcggcccggggcctgcttcaacatcatctgcaaccacatgcgcttccactacgacgaggtgcgcggcctggtgccgaccaacgccatcttcatcacggtgctccgcgaccccgcccgcttgttcgagtcctccttccactacttcgggccggtggtgcccctcacgtggaagctctcggccggcgacaagctgaccgagttcctgcaagacccggatcgctactacgaccccaacggcttcaatgcccactacctccgaaacctgctcttcttcgacctgggctatgacaacagcctggaccccagcagcccgcaggtgcaggagcacatcctggaggtggagcgtcgcttccacctggtgctccttcaagagtacttcgacgagtcgctggtgctgctgaaggacctgctgtgctgggagctggaggacgtgctctacttcaagctcaacgcccgccgcgactcgcccgtgccgcggctctcgggggagctgtatgggcgcgccaccgcctggaacatgctggactcccacctctaccgccacttcaacgccagcttctggcgcaaggtggaggccttcgggcgggagcgcatggcccgcgaggtggccgccctgcgccatgccaacgagcgcatgcggaccatctgcatcgacgggggccacgccgtggacgccgccgccatccaggacgaggccatgcagccctggcagccgctgggcaccaagtccatcctgggctacaacctcaagaagagcatcgggcagcggcacgcgcagctctgccggcgcatgctcacgcccgagatccagtacctgatggacctcggcgccaacctgtgggtcaccaagctctggaagttcattcgcgatttcctgcggtggtgacgtcccaccgcccagcggcttgcctgcctgctcgctccctgcagaggggctgagcaggacgccgctggtgctggccgcccccagccccctcctggtgccacctcagaccccggggtgagggggggctccctggggggaggcagccagccaagactgggcccatgaacacagagagggcctaaccgagatcagtatttaactaattataccagtttttattaaacccctttccctccccgataaagaatgttctatttctgcctccccttaaaggggagacctcagaagtaaaggaatttgatgttgtgtttttgttaa

SEQ ID NO: 136238 - DNA, 553 bp, Homo sapiens
  Payload ID: 6662
  Gene Symbol: GAL3ST1
  Gene Name: galactose-3-O-sulfotransferase 1
  ENST ID: ENST00000428682
  CDS Start-End: 246-553
agtgatcgcagaggcagcctgggagttggacgtggctcaggcagtgggtagaaaggggcagccagccacagcccgaggatgctaaataaacctgcgctttgactgagacctgtcacgtgaggtcagggtctcactgtgtcatccagagctggagtgcagcggcacagtcatggctcactggaactcaggctcaagcaatcctcccgcctcagccttccaagtaactaggactacaggtgtctgagatgctgccaccgcagaagaagccctgggagtccatggctaaggggctggtgctgggcgcgctcttcactagtttcctgctgctggtgtactcctatgccgtgcccccgctgcatgccggcctggcctccacgaccccggaggccgcagcgtcctgctctccacctgcactcgagccagaggcagtgatccgggccaacggctcggcgggggagtgccagccgcggcgcaacatcgtgttcttgaagacgcacaagacggccagcagcaccctgctcaacatcctgttccgcttcggccagaagcaccg

SEQ ID NO: 136239 - DNA, 575 bp, Homo sapiens
  Payload ID: 6662
  Gene Symbol: GAL3ST1
  Gene Name: galactose-3-O-sulfotransferase 1
  ENST ID: ENST00000448604
  CDS Start-End: 361-575
gatgcacaaatggaattctgggcccggctgcaggctcctgaagggctccttgcttcactttgactggccttagagcctgttctgggctctctgcaggcgtctgcggttgctgtgtccttggcccaaggatacctggaatctttctgtgcccttggatgaaagagctgcttgcttgttggggtccaaagagaggatgctaaataaacctgcgctttgactgagacctgtcacgtgaggtcagggtctcactgtgtcatccagagctggagtgcagcggcacagtcatggctcactggaactcaggctcaagcaatcctcccgcctcagccttccaagtaactaggactacaggtgtctgagatgctgccaccgcagaagaagccctgggagtccatggctaaggggctggtgctgggcgcgctcttcactagtttcctgctgctggtgtactcctatgccgtgcccccgctgcatgccggcctggcctccacgaccccggaggccgcagcgtcctgctctccacctgcactcgagccagaggcagtgatccgggccaacggctcggcgggggagtg

SEQ ID NO: 136240 - DNA, 894 bp, Homo sapiens
  Payload ID: 6662
  Gene Symbol: GAL3ST1
  Gene Name: galactose-3-O-sulfotransferase 1
  ENST ID: ENST00000441967
  CDS Start-End: 58-894
cctagagagaaggcgactctggtctgccttgtggcagtttaagctctggtgtctgagatgctgccaccgcagaagaagccctgggagtccatggctaaggggctggtgctgggcgcgctcttcactagtttcctgctgctggtgtactcctatgccgtgcccccgctgcatgccggcctggcctccacgaccccggaggccgcagcgtcctgctctccacctgcactcgagccagaggcagtgatccgggccaacggctcggcgggggagtgccagccgcggcgcaacatcgtgttcttgaagacgcacaagacggccagcagcaccctgctcaacatcctgttccgcttcggccagaagcaccggctcaagttcgccttccctaacggccgcaatgacttcgactacccgaccttcttcgcccgcagcctggtgcaggactatcggcccggggcctgcttcaacatcatctgcaaccacatgcgcttccactacgacgaggtgcgcggcctggtgccgaccaacgccatcttcatcacggtgctccgcgaccccgcccgcttgttcgagtcctccttccactacttcgggccggtggtgcccctcacgtggaagctctcggccggcgacaagctgaccgagttcctgcaagacccggatcgctactacgaccccaacggcttcaatgcccactacctccgaaacctgctcttcttcgacctgggctatgacaacagcctggaccccagcagcccgcaggtgcaggagcacatcctggaggtggagcgtcgcttccacctggtgctccttcaagagtacttcgacgagtcgctggtgctgctgaaggacctgctgtgctgggagctggaggacgtgctctacttcaagctcaac

SEQ ID NO: 136241 - DNA, 582 bp, Homo sapiens
  Payload ID: 6662
  Gene Symbol: GAL3ST1
  Gene Name: galactose-3-O-sulfotransferase 1
  ENST ID: ENST00000416358
  CDS Start-End: 72-582
acaaatggaattctgggcccggctgcaggctcctgaagggctccttgcttcactttgactgggtgtctgagatgctgccaccgcagaagaagccctgggagtccatggctaaggggctggtgctgggcgcgctcttcactagtttcctgctgctggtgtactcctatgccgtgcccccgctgcatgccggcctggcctccacgaccccggaggccgcagcgtcctgctctccacctgcactcgagccagaggcagtgatccgggccaacggctcggcgggggagtgccagccgcggcgcaacatcgtgttcttgaagacgcacaagacggccagcagcaccctgctcaacatcctgttccgcttcggccagaagcaccggctcaagttcgccttccctaacggccgcaatgacttcgactacccgaccttcttcgcccgcagcctggtgcaggactatcggcccggggcctgcttcaacatcatctgcaaccacatgcgcttccactacgacgaggtgcgcggcctggtgccgaccaacgccatcttcatcacggtgctccgcgaccccgcccgcttgttcg

SEQ ID NO: 136242 - DNA, 656 bp, Homo sapiens
  Payload ID: 6662
  Gene Symbol: GAL3ST1
  Gene Name: galactose-3-O-sulfotransferase 1
  ENST ID: ENST00000423299
  CDS Start-End: 210-656
attcctgtctcccagtgatcgcagaggcagcctgggagttggacgtggctcaggcagtgggtagaaaggggcagccagccacagcccgagggtctcactgtgtcatccagagctggagtgcagcggcacagtcatggctcactggaactcaggctcaagcaatcctcccgcctcagccttccaagtaactaggactacaggtgtctgagatgctgccaccgcagaagaagccctgggagtccatggctaaggggctggtgctgggcgcgctcttcactagtttcctgctgctggtgtactcctatgccgtgcccccgctgcatgccggcctggcctccacgaccccggaggccgcagcgtcctgctctccacctgcactcgagccagaggcagtgatccgggccaacggctcggcgggggagtgccagccgcggcgcaacatcgtgttcttgaagacgcacaagacggccagcagcaccctgctcaacatcctgttccgcttcggccagaagcaccggctcaagttcgccttccctaacggccgcaatgacttcgactacccgaccttcttcgcccgcagcctggtgcaggactatcggcccggggcctgcttcaacatcatctgcaaccacatgcgcttccactacgacgaggtg

SEQ ID NO: 136243 - DNA, 572 bp, Homo sapiens
  Payload ID: 6662
  Gene Symbol: GAL3ST1
  Gene Name: galactose-3-O-sulfotransferase 1
  ENST ID: ENST00000411821
  CDS Start-End: 318-572
gatgcacaaatggaattctgggcccggctgcaggctcctgaagggctccttgcttcactttgactgggtgaggaatatggatgagcccttttaggggctccacacgactccaaacagggcagagcaggatggaacacaggtgcccatgggggtcatcaggctggggactgctggaatctccagccttagagcctgttctgggctctctgcaggcgtctgcggttgctgtgtccttggcccaaggatacctggaatctttctgtgcccttggatgaaagagctgcttgcttgttggggtccaaagagaggtgtctgagatgctgccaccgcagaagaagccctgggagtccatggctaaggggctggtgctgggcgcgctcttcactagtttcctgctgctggtgtactcctatgccgtgcccccgctgcatgccggcctggcctccacgaccccggaggccgcagcgtcctgctctccacctgcactcgagccagaggcagtgatccgggccaacggctcggcgggggagtgccagccgcggcgcaacatcgtgttcttgaagacgcacaag

SEQ ID NO: 136244 - DNA, 851 bp, Homo sapiens
  Payload ID: 6662
  Gene Symbol: GAL3ST1
  Gene Name: galactose-3-O-sulfotransferase 1
  ENST ID: ENST00000431313
  CDS Start-End: 56-851
cccgggccgagccagccacgctgaggcggaggaggacggggacaaggtgtctgagatgctgccaccgcagaagaagccctgggagtccatggctaaggggctggtgctgggcgcgctcttcactagtttcctgctgctggtgtactcctatgccgtgcccccgctgcatgccggcctggcctccaccaggaccccggaggccgcagcgtcctgctctccacctgcactcgagccagaggcagtgatccgggccaacggctcggcgggggagtgccagccgcggcgcaacatcgtgttcttgaagacgcacaagacggccagcagcaccctgctcaacatcctgttccgcttcggccagaagcaccggctcaagttcgccttccctaacggccgcaatgacttcgactacccgaccttcttcgcccgcagcctggtgcaggactatcggcccggggcctgcttcaacatcatctgcaaccacatgcgcttccactacgacgaggtgcgcggcctggtgccgaccaacgccatcttcatcacggtgctccgcgaccccgcccgcttgttcgagtcctccttccactacttcgggccggtggtgcccctcacgtggaagctctcggccggcgacaagctgaccgagttcctgcaagacccggatcgctactacgaccccaacggcttcaatgcccactacctccgaaacctgctcttcttcgacctgggctatgacaacagcctggaccccagcagcccgcaggtgcaggagcacatcctggaggtggagcgtcgcttccacctggtgctccttcaagagtacttcgacgagtcgctggtgctgctgaaggacc

SEQ ID NO: 136245 - DNA, 533 bp, Homo sapiens
  Payload ID: 6662
  Gene Symbol: GAL3ST1
  Gene Name: galactose-3-O-sulfotransferase 1
  ENST ID: ENST00000427899
  CDS Start-End: 43-533
attgcagcctccctgattccagaaggtaccttggtgtctgagatgctgccaccgcagaagaagccctgggagtccatggctaaggggctggtgctgggcgcgctcttcactagtttcctgctgctggtgtactcctatgccgtgcccccgctgcatgccggcctggcctccaccaggaccccggaggccgcagcgtcctgctctccacctgcactcgagccagaggcagtgatccgggccaacggctcggcgggggagtgccagccgcggcgcaacatcgtgttcttgaagacgcacaagacggccagcagcaccctgctcaacatcctgttccgcttcggccagaagcaccggctcaagttcgccttccctaacggccgcaatgacttcgactacccgaccttcttcgcccgcagcctggtgcaggactatcggcccggggcctgcttcaacatcatctgcaaccacatgcgcttccactacgacgaggtgcgcggcctggtgccgaccaacgccatcttcatcacggtgct

SEQ ID NO: 136246 - DNA, 639 bp, Homo sapiens
  Payload ID: 6662
  Gene Symbol: GAL3ST1
  Gene Name: galactose-3-O-sulfotransferase 1
  ENST ID: ENST00000453479
  CDS Start-End: 339-639
tcagccagcttaaaaattaaaaggagtggaaagtttggggccctggttctctacccggttcattttaatttttaaattttaaccttctccctgccccattccccaacctctctttgagttgcttcacccaccgtctctgcaaccctggggctgtctctttccaggtggttgtcagtctatctctccagtgcctctctgtccctgtctggaccctgctggggggccacagagcaggcaaaggcagggctcaactgccaggcctgggcagccttgggggctccctggggccagcttcctgacacttgccctactctgtgctgcccctgcaggtgtctgagatgctgccaccgcagaagaagccctgggagtccatggctaaggggctggtgctgggcgcgctcttcactagtttcctgctgctggtgtactcctatgccgtgcccccgctgcatgccggcctggcctccacgaccccggaggccgcagcgtcctgctctccacctgcactcgagccagaggcagtgatccgggccaacggctcggcgggggagtgccagccgcggcgcaacatcgtgttcttgaagacgcacaagacggccagcagcaccctgctcaacatcctgttccgcttcggccaga

SEQ ID NO: 136247 - DNA, 567 bp, Homo sapiens
  Payload ID: 6662
  Gene Symbol: GAL3ST1
  Gene Name: galactose-3-O-sulfotransferase 1
  ENST ID: ENST00000445645
  CDS Start-End: 341-567
ggaattctgggcccggctgcaggctcctgaagggctccttgcttcactttgactgggtgaggaatatggatgagcccttttaggggctccacacgactccaaacagggcagagcaggatggaacacaggtgcccatgggggtcatcaggctggggactgctggaatctccaggatgctaaataaacctgcgctttgactgagacctgtcacgtgaggtcagggtctcactgtgtcatccagagctggagtgcagcggcacagtcatggctcactggaactcaggctcaagcaatcctcccgcctcagccttccaagtaactaggactacaggtgtctgagatgctgccaccgcagaagaagccctgggagtccatggctaaggggctggtgctgggcgcgctcttcactagtttcctgctgctggtgtactcctatgccgtgcccccgctgcatgccggcctggcctccacgaccccggaggccgcagcgtcctgctctccacctgcactcgagccagaggcagtgatccgggccaacggctcggcgggggagtgccagccgcggcg

SEQ ID NO: 136248 - DNA, 639 bp, Homo sapiens
  Payload ID: 6662
  Gene Symbol: GAL3ST1
  Gene Name: galactose-3-O-sulfotransferase 1
  ENST ID: ENST00000423371
  CDS Start-End: 302-639
atgcacaaatggaattctgggcccggctgcaggctcctgaagggctccttgcttcactttgactgggtgaggaatatggatgagcccttttaggggctccacacgactccaaacagggcagagcaggatggaacacaggtgcccatgggggtcatcaggctggggactgctggaatctccagggtctcactgtgtcatccagagctggagtgcagcggcacagtcatggctcactggaactcaggctcaagcaatcctcccgcctcagccttccaagtaactaggactacaggtgtctgagatgctgccaccgcagaagaagccctgggagtccatggctaaggggctggtgctgggcgcgctcttcactagtttcctgctgctggtgtactcctatgccgtgcccccgctgcatgccggcctggcctccaccaggaccccggaggccgcagcgtcctgctctccacctgcactcgagccagaggcagtgatccgggccaacggctcggcgggggagtgccagccgcggcgcaacatcgtgttcttgaagacgcacaagacggccagcagcaccctgctcaacatcctgttccgcttcggccagaagcaccggctcaagttcgccttccctaacggccg

SEQ ID NO: 136249 - DNA, 755 bp, Homo sapiens
  Payload ID: 6662
  Gene Symbol: GAL3ST1
  Gene Name: galactose-3-O-sulfotransferase 1
  ENST ID: ENST00000437282
  CDS Start-End: 158-755
gattccagaaggtaccttgggtctcactgtgtcatccagagctggagtgcagcggcacagtcatggctcactggaactcaggctcaagcaatcctcccgcctcagccttccaagtaactaggactacaggcatgtgccaccacgcctggtgtctgagatgctgccaccgcagaagaagccctgggagtccatggctaaggggctggtgctgggcgcgctcttcactagtttcctgctgctggtgtactcctatgccgtgcccccgctgcatgccggcctggcctccacgaccccggaggccgcagcgtcctgctctccacctgcactcgagccagaggcagtgatccgggccaacggctcggcgggggagtgccagccgcggcgcaacatcgtgttcttgaagacgcacaagacggccagcagcaccctgctcaacatcctgttccgcttcggccagaagcaccggctcaagttcgccttccctaacggccgcaatgacttcgactacccgaccttcttcgcccgcagcctggtgcaggactatcggcccggggcctgcttcaacatcatctgcaaccacatgcgcttccactacgacgaggtgcgcggcctggtgccgaccaacgccatcttcatcacggtgctccgcgaccccgcccgcttgttcgagtcctccttccactacttcgggccggtggtgcccctcacgtggaagctctcggccggcgacaagctgaccgagttcctgcaagacc

SEQ ID NO: 136250 - DNA, 882 bp, Homo sapiens
  Payload ID: 6662
  Gene Symbol: GAL3ST1
  Gene Name: galactose-3-O-sulfotransferase 1
  ENST ID: ENST00000452827
  CDS Start-End: 156-882
actattgcagcctccctgattccagaaggtaccttgggtctcactgtgtcatccagagctggagtgcagcggcacagtcatggctcactggaactcaggctcaagcaatcctcccgcctcagccttccaagtaactaggactacaggtgtctgagatgctgccaccgcagaagaagccctgggagtccatggctaaggggctggtgctgggcgcgctcttcactagtttcctgctgctggtgtactcctatgccgtgcccccgctgcatgccggcctggcctccacgaccccggaggccgcagcgtcctgctctccacctgcactcgagccagaggcagtgatccgggccaacggctcggcgggggagtgccagccgcggcgcaacatcgtgttcttgaagacgcacaagacggccagcagcaccctgctcaacatcctgttccgcttcggccagaagcaccggctcaagttcgccttccctaacggccgcaatgacttcgactacccgaccttcttcgcccgcagcctggtgcaggactatcggcccggggcctgcttcaacatcatctgcaaccacatgcgcttccactacgacgaggtgcgcggcctggtgccgaccaacgccatcttcatcacggtgctccgcgaccccgcccgcttgttcgagtcctccttccactacttcgggccggtggtgcccctcacgtggaagctctcggccggcgacaagctgaccgagttcctgcaagacccggatcgctactacgaccccaacggcttcaatgcccactacctccgaaacctgctcttcttcgacctgggctatgacaacagcctggaccccagcagcccgcaggtgcaggagcacatcctggaggtgg

SEQ ID NO: 136251 - DNA, 584 bp, Homo sapiens
  Payload ID: 6662
  Gene Symbol: GAL3ST1
  Gene Name: galactose-3-O-sulfotransferase 1
  ENST ID: ENST00000443136
  CDS Start-End: 154-584
gaagggctccttgcttcactttgactgggtgaggaatatggatgagcccttttaggggctccacacgactccaaacagggcagagcaggatggaacacaggtgcccatgggggtcatcaggctggggactgctggaatctccaggtgtctgagatgctgccaccgcagaagaagccctgggagtccatggctaaggggctggtgctgggcgcgctcttcactagtttcctgctgctggtgtactcctatgccgtgcccccgctgcatgccggcctggcctccacgaccccggaggccgcagcgtcctgctctccacctgcactcgagccagaggcagtgatccgggccaacggctcggcgggggagtgccagccgcggcgcaacatcgtgttcttgaagacgcacaagacggccagcagcaccctgctcaacatcctgttccgcttcggccagaagcaccggctcaagttcgccttccctaacggccgcaatgacttcgactacccgaccttcttcgcccgcagcctggtgcaggactatcggcccggggcctgcttcaacatcatctgcaaccacatgcgctt

SEQ ID NO: 136252 - DNA, 567 bp, Homo sapiens
  Payload ID: 6662
  Gene Symbol: GAL3ST1
  Gene Name: galactose-3-O-sulfotransferase 1
  ENST ID: ENST00000447224
  CDS Start-End: 281-567
gattccagaaggtaccttgaaaagttctccagagaatggctaggggcgcctccagctttctcattttacagatgaaaaactgagactccatgagggttcttggcttgtctgaaatcacagtgctggattgaaacacaggcttgagggtcccagagcctgagggtctcactgtgtcatccagagctggagtgcagcggcacagtcatggctcactggaactcaggctcaagcaatcctcccgcctcagccttccaagtaactaggactacaggtgtctgagatgctgccaccgcagaagaagccctgggagtccatggctaaggggctggtgctgggcgcgctcttcactagtttcctgctgctggtgtactcctatgccgtgcccccgctgcatgccggcctggcctccacgaccccggaggccgcagcgtcctgctctccacctgcactcgagccagaggcagtgatccgggccaacggctcggcgggggagtgccagccgcggcgcaacatcgtgttcttgaagacgcacaagacggccagcagcaccctgctcaacatcctgtt

SEQ ID NO: 136253 - DNA, 563 bp, Homo sapiens
  Payload ID: 6662
  Gene Symbol: GAL3ST1
  Gene Name: galactose-3-O-sulfotransferase 1
  ENST ID: ENST00000426220
  CDS Start-End: 268-563
tcctgaagggctccttgcttcactttgactgggtgaggaatatggatgagcccttttaggggctccacacgactccaaacagggcagagcaggatggaacacaggtgcccatgggggtcatcaggctggggactgctggaatctccagggtctcactgtgtcatccagagctggagtgcagcggcacagtcatggctcactggaactcaggctcaagcaatcctcccgcctcagccttccaagtaactaggactacaggtgtctgagatgctgccaccgcagaagaagccctgggagtccatggctaaggggctggtgctgggcgcgctcttcactagtttcctgctgctggtgtactcctatgccgtgcccccgctgcatgccggcctggcctccacgaccccggaggccgcagcgtcctgctctccacctgcactcgagccagaggcagtgatccgggccaacggctcggcgggggagtgccagccgcggcgcaacatcgtgttcttgaagacgcacaagacggccagcagcaccctgctcaacatcctgttccgcttcgg

SEQ ID NO: 136254 - DNA, 1370 bp, Homo sapiens
  Payload ID: 6663
  Gene Symbol: GAL3ST2
  Gene Name: galactose-3-O-sulfotransferase 2
  Uniprot ID: Q9H3Q3
  ENST ID: ENST00000192314
  CDS Start-End: 132-1328
tcacctgccccacagccgcaccctgcctgtgcctgcaccctggggagcccagagccggcaggggccgaggcggtgggacctcgggggagctcaagcctcgactgtcccctcgctggaggccagaggccaagatgatgtccatgctgggcggcttgcagagatacttccgggtcatcctcctcctcctcctggccctgactctgctcctgctggccggattcctgcactcggacttagagctggacacacccctgtttgggggccaggctgaggggccgccggtcaccaacatcatgttcctgaagacgcacaagacggccagcagcacggtgctcaacatcctctaccgcttcgccgagacccacaacctgtccgtggcgctgcccgccggctcacgcgtccacctgggctacccctggctcttcctggcgcgctacgtggaaggcgtggggtcgcagcagcgcttcaacatcatgtgcaaccacctgaggttcaacctgcctcaggtgcagaaagtcatgcccaacgacaccttctacttctccatcctgaggaaccccgtgttccagctggagtcctccttcatctactacaaaacctacgcccccgccttccggggcgccccgagcctggacgcgttcctggcctcgccgcggacgttctacaacgacagccgccacctcaggaacgtctacgccaagaacaacatgtggttcgacttcggcttcgaccccaacgcgcagtgcgaggagggctacgtgcgcgcgcgcatcgccgaggtggagcggcgcttccggctggtgctcatcgccgagcacctggacgagtccctggtgctgctgcggcgccggctgcgctgggcgctggacgacgtggtggccttcaggctcaactcccgcagcgcgcgctccgtggcccgcctgtcgcccgagacccgggagcgcgcgcggagctggtgcgcgctggactggcgcctgtacgagcatttcaaccgcaccctctgggcgcagctgcgcgccgagctggggccgcggcggctgcgcggggaggtggagcggctgcgcgcccggaggcgcgaactcgcgagcctgtgcctgcaggacggcggcgcgctcaagaaccacacgcagatcagagacccgcgcctgcgcccctaccagtccggcaaggccgacatcctgggttacaacctccggccgggcctggacaaccagacgctgggcgtgtgccagaggcttgtgatgcctgagctccagtacatggcccgcctgtacgccctgcagttcccggagaagcccctcaagaacatcccgttcctgggggcgtagaggggccgggccggggacgaggcctcctgcggacaccagctc

SEQ ID NO: 136255 - DNA, 1210 bp, Homo sapiens
  Payload ID: 6663
  Gene Symbol: GAL3ST2
  Gene Name: galactose-3-O-sulfotransferase 2
  ENST ID: ENST00000610560
  CDS Start-End: 1-1168
atacttccgggtcatcctcctcctcctcctggccctgactctgctcctgctggccggattcctgcactcggacttagagctggacacacccctgtttgggggccaggctgaggggccgccggtcaccaacatcatgttcctgaagacgcacaagacggccagcagcacggtgctcaacatcctctaccgcttcgccgagacccacaacctgtccgtggcgctgcccgccggctcacgcgtccacctgggctacccctggctcttcctggcgcgctacgtggaaggcgtggggtcgcagcagcgcttcaacatcatgtgcaaccacctgaggttcaacctgcctcaggtgcagaaagtcatgcccaacgacaccttctacttctccatcctgaggaaccccgtgttccagctggagtcctccttcatctactacaaaacctacgcccccgccttccggggcgccccgagcctggacgcgttcctggcctcgccgcggacgttctacaacgacagccgccacctcaggaacgtctacgccaagaacaacatgtggttcgacttcggcttcgaccccaacgcgcagtgcgaggagggctacgtgcgcgcgcgcatcgccgaggtggagcggcgcttccggctggtgctcatcgccgagcacctggacgagtccctggtgctgctgcggcgccggctgcgctgggcgctggacgacgtggtggccttcaggctcaactcccgcagcgcgcgctccgtggcccgcctgtcgcccgagacccgggagcgcgcgcggagctggtgcgcgctggactggcgcctgtacgagcatttcaaccgcaccctctgggcgcagctgcgcgccgagctggggccgcggcggctgcgcggggaggtggagcggctgcgcgcccggaggcgcgaactcgcgagcctgtgcctgcaggacggcggcgcgctcaagaaccacacgcagatcagagacccgcgcctgcgcccctaccagtccggcaaggccgacatcctgggttacaacctccggccgggcctggacaaccagacgctgggcgtgtgccagaggcttgtgatgcctgagctccagtacatggcccgcctgtacgccctgcagttcccggagaagcccctcaagaacatcccgttcctgggggcgtagaggggccgggccggggacgaggcctcctgcggacaccagctc

SEQ ID NO: 136256 - DNA, 1170 bp, Homo sapiens
  Payload ID: 6663
  Gene Symbol: GAL3ST2
  Gene Name: galactose-3-O-sulfotransferase 2
  ENST ID: ENST00000632847
  CDS Start-End: 1-1170
agatacttccgggtcatcctcctcctcctcctggccctgactctgctcctgctggccggattcctgcactcggacttagagctggacacacccctgtttgggggccaggctgaggggccgccggtcaccaacatcatgttcctgaagacgcacaagacggccagcagcacggtgctcaacatcctctaccgcttcgccgagacccacaacctgtccgtggcgctgcccgccggctcacgcgtccacctgggctacccctggctcttcctggcgcgctacgtggaaggcgtggggtcgcagcagcgcttcaacatcatgtgcaaccacctgaggttcaacctgcctcaggtgcagaaagtcatgcccaacgacaccttctacttctccatcctgaggaaccccgtgttccagctggagtcctccttcatctactacaaaacctacgcccccgccttccggggcgccccgagcctggacgcgttcctggcctcgccgcggacgttctacaacgacagccgccacctcaggaacgtctacgccaagaacaacatgtggttcgacttcggcttcgaccccaacgcgcagtgcgaggagggctacgtgcgcgcgcgcatcgccgaggtggagcggcgcttccggctggtgctcatcgccgagcacctggacgagtccctggtgctgctgcggcgccggctgcgctgggcgctggacgacgtggtggccttcaggctcaactcccgcagcgcgcgctccgtggcccgcctgtcgcccgagacccgggagcgcgcgcggagctggtgcgcgctggactggcgcctgtacgagcatttcaaccgcaccctctgggcgcagctgcgcgccgagctggggccgcggcggctgcgcggggaggtggagcggctgcgcgcccggaggcgcgaactcgcgagcctgtgcctgcaggacggcggcgcgctcaagaaccacacgcagatcagagacccgcgcctgcgcccctaccagtccggcaaggccgacatcctgggttacaacctccggccgggcctggacaaccagacgctgggcgtgtgccagaggcttgtgatgcctgagctccagtacatggcccgcctgtacgccctgcagttcccggagaagcccctcaagaacatcccgttcctgggggcgtag

SEQ ID NO: 136257 - DNA, 2133 bp, Homo sapiens
  Payload ID: 6664
  Gene Symbol: GAL3ST3
  Gene Name: galactose-3-O-sulfotransferase 3
  Uniprot ID: Q96A11
  ENST ID: ENST00000312006
  CDS Start-End: 283-1578
ctagcggacgctgccacctgatcccatccaggcgctgagaggcaagccaccggcactcggcgcgcagggccccgggcaccctcggaccccgtgcggatttcgagacaagggtccagagatagcggcggccgcccccaacccgggccagaggcagagcccaggcgtgcggtgcttctcgggaacactggccctgctaccagagccgcaggatcccccatgagtgcctgtgaagggagtcctggatagtgaggccctggctggtccaggggtgggtactccgccatgccacccatcctccagcgcctgcagcaggccaccaagatgatgagccgccggaaaatcctgctgctggtgctagggtgcagcaccgtaagccttctcatccaccagggggcgcagctcagctggtaccccaagctgttccccttgagctgccctcctctgcggaactcgccgccgcgccccaagcacatgactgtggccttcctgaagactcacaagacggcaggcacgacggtgcagaacatcctgtttcgctttgccgagcgccacaacctgacggtggccctgccgcacccgagctgcgagcaccagttctgctacccccgcaacttctcggcgcacttcgtgcacccggccacgcggccgccgcacgtgctggccagccacctgcgcttcgaccgtgcggagctggagcgcctcatgccgcccagcaccgtctatgtcaccatcctgcgcgagccggccgccatgttcgagtcgctcttcagctactacaaccagtactgcccggccttccggcgcgtacccaacgcctcgctcgaggccttcctgcgcgcgcccgaggcatactaccgcgctggcgagcacttcgccatgttcgcacacaacacgctggcctacgacctgggcggcgacaatgagcgcagcccgcgcgacgacgccgcctacctggcgggcctcatccgccaggtggaggaggttttctcgctcgtcatgatcgccgagtacttcgacgagtcgctagtgctgctgcggcgcctactggcctgggacctggacgacgtgctctacgccaagctcaacgcgcgcgccgccagctcgcgcctggccgccatccccgcggcgctggcgcgggcggcgcgcacctggaacgccctggacgccggcctctacgaccacttcaacgccaccttctggcgccacgtggcgcgcgcgggccgcgcgtgcgtggagcgcgaggcgcgcgagctgcgcgaggcccgccagcgcctactgcggcgctgcttcggggacgagccactgctgcggcctgccgcgcagatccgcaccaagcagctgcagccgtggcagcccagccgcaaggtggacattatgggctatgacctgcccggcggcggcgccggcccggccaccgaggcctgcctcaagctggccatgcccgaggtccagtactcgaactacctgttgcgcaagcagaagcgccggggcggtgcgcgggctcggcccgagcccgtcctggacaatcccccgcctcggcccatccgagtgctgcctcgcggccctcaaggtccctgagctccgcaggcctccaggagtatgggtcctgccctgccctcccaggagtccagccaggggctgcctccatgtcctgcccccatgagagccctttcttttcaaggggcttgagtccctcgctgaactttggggtacgcctccctatctgagcccccgctcccgatcgtgggctgaaccttgccttcgggcacggcgctgataggctggatccagcgctgggccaccctctccttcccagctggttggtgattttgacaagaggcctgagggctgtccagaactgctcaccctgcctttttctgggggctgagcccccacaacctgtcttttccaagtggataagcccaggccccatggagagaggctcagccctagggaaaggctgctcttgctctccctcccagggcttgaggctccctatacttttctgtcttccaggttctaccctccccacagacctaagctgctcccagtctcccagaaccaagagttcttgggttgggatttttgtttggttggtttttcttttttttaataaaacatctttaaaatgtg

SEQ ID NO: 136258 - DNA, 1599 bp, Homo sapiens
  Payload ID: 6664
  Gene Symbol: GAL3ST3
  Gene Name: galactose-3-O-sulfotransferase 3
  Uniprot ID: Q96A11
  ENST ID: ENST00000527878
  CDS Start-End: 161-1456
atcccatctcctctgcccactgcaaacccgtctgccttcttctgccaggcttctcgggaacactggccctgctaccagagccgcaggatcccccatgagtgcctgtgaagggagtcctggatagtgaggccctggctggtccaggggtgggtactccgccatgccacccatcctccagcgcctgcagcaggccaccaagatgatgagccgccggaaaatcctgctgctggtgctagggtgcagcaccgtaagccttctcatccaccagggggcgcagctcagctggtaccccaagctgttccccttgagctgccctcctctgcggaactcgccgccgcgccccaagcacatgactgtggccttcctgaagactcacaagacggcaggcacgacggtgcagaacatcctgtttcgctttgccgagcgccacaacctgacggtggccctgccgcacccgagctgcgagcaccagttctgctacccccgcaacttctcggcgcacttcgtgcacccggccacgcggccgccgcacgtgctggccagccacctgcgcttcgaccgtgcggagctggagcgcctcatgccgcccagcaccgtctatgtcaccatcctgcgcgagccggccgccatgttcgagtcgctcttcagctactacaaccagtactgcccggccttccggcgcgtacccaacgcctcgctcgaggccttcctgcgcgcgcccgaggcatactaccgcgctggcgagcacttcgccatgttcgcacacaacacgctggcctacgacctgggcggcgacaatgagcgcagcccgcgcgacgacgccgcctacctggcgggcctcatccgccaggtggaggaggttttctcgctcgtcatgatcgccgagtacttcgacgagtcgctagtgctgctgcggcgcctactggcctgggacctggacgacgtgctctacgccaagctcaacgcgcgcgccgccagctcgcgcctggccgccatccccgcggcgctggcgcgggcggcgcgcacctggaacgccctggacgccggcctctacgaccacttcaacgccaccttctggcgccacgtggcgcgcgcgggccgcgcgtgcgtggagcgcgaggcgcgcgagctgcgcgaggcccgccagcgcctactgcggcgctgcttcggggacgagccactgctgcggcctgccgcgcagatccgcaccaagcagctgcagccgtggcagcccagccgcaaggtggacattatgggctatgacctgcccggcggcggcgccggcccggccaccgaggcctgcctcaagctggccatgcccgaggtccagtactcgaactacctgttgcgcaagcagaagcgccggggcggtgcgcgggctcggcccgagcccgtcctggacaatcccccgcctcggcccatccgagtgctgcctcgcggccctcaaggtccctgagctccgcaggcctccaggagtatgggtcctgccctgccctcccaggagtccagccaggggctgcctccatgtcctgcccccatgagagccctttcttttcaaggggcttgagtccctcgctgaactttggggtacgcctccct

SEQ ID NO: 136259 - DNA, 2537 bp, Homo sapiens
  Payload ID: 6665
  Gene Symbol: GAL3ST4
  Gene Name: galactose-3-O-sulfotransferase 4
  Uniprot ID: Q96RP7
  ENST ID: ENST00000360039
  CDS Start-End: 394-1854
gaggggaagatgcagcgagggagagacctagaaccgcgatcaaagctgcagcagctgctggggctggcggcacaaagggaggagggaggagcctgggcgctgagaaagttcttggggaaagttgagctgagccaagagtcgggcggtggctgggatgggcgggagggcccggcccgatttcccttgctgctccccttgtggcctgacgctgacagaggcaaaaatctgctaactcagggggcagactcaaccaagactgtgagcaggcctggggaatgaccccccgatctccaaccagtgccttccgcagctgcacggctgtctccagctgtctctgcccctcttcctggccctggctccatctctctgtcacctcacccttccctgtgccacatgggccctctctctcctgccaggacgctgcggctctggggacctcggagcctgggggtggctctgggagtcttcatgaccattggctttgcactccagctcttgggagggcccttccagaggaggctacctgggctacagctccgacagccctcggccccatccctacgaccagcccttccgtcctgcccaccccggcagcgactggtgttcctgaagacacataaatccgggagcagctctgtgctgagcctgcttcaccgctatggggaccagcacgggctgcgcttcgccctccctgcccgctaccagtttggctacccaaagctcttccaggcctctagggtaaaaggctaccgcccacagggtggaggcacccagctccccttccacatcctctgtcaccacatgaggttcaacctgaaagaggtacttcaggtcatgccttctgacagcttctttttttccattgtccgagacccagcggctctggctcgctctgccttctcctactataaatccacctcatcagccttccgcaagtcaccatctttggctgccttcctggccaatcctcgaggcttctacaggcctggggcccgtggggaccactacgctcgcaacttactatggtttgactttggcctgccctttcccccagagaagagggccaagagagggaatattcatccccccagagaccccaaccccccacagctgcaggtcttgccttctggtgctggccctcgagcccaaaccctcaatcccaatgccctcatccatcctgtttccactgttactgatcatcgcagccagatatcaagccctgcctctttcgatttggggtcttcatccttcatccagtggggtctggcatggctggactctgtctttgacctggtcatggtggctgagtacttcgatgagtcattggttctgctggcagatgccctgtgctggggtctagatgacgtggtgggcttcatgcacaatgcccaggctggacataagcagggcctcagcactgtcagcaacagtggactgactgcggaggaccggcagctgactgcacgggcccgagcctggaacaacctggactgggctctctatgtccacttcaaccgcagtctctgggcacggatagagaaatacggccagggccggctgcagacagctgtggccgagctccgggctcgccgagaggccctagcgaaacattgtctggtagggggtgaggcttctgaccccaaatacatcactgatcgccggttccgccccttccagtttgggtcagctaaggttttgggctatatacttcggagtggattgagcccccaagaccaagaggaatgtgagcgcctagctacccctgagctccagtacaaggacaagctggatgccaagcagttcccccctaccgtctcactgcccctcaagacttcaaggccactctccccataaacatcagactacagatttaggtggaagagcagccatgtttgaagggcacatgtgatgagtggggggcagcaagatgccatttctgcatctcccagaagggatgagtctttgtcccgatgcaagccccctcttcgctgggctcccagcagtgcttccctcctccaccctccactcattttgttctttccccccaactttttttttttttgaaacggagtcttgctctgtcccccaggctggagtgcagtggcatgatctcggctcactgcaacctctgcctcccaggttcaagcgattctcctgcctcagcctccagagtagctaggattacagatacgtgccaccatacccggctaatttttatatttttagagacagggattcaacatgttggttaggctggtcttgaactcctcacctcaggtgatccacatgactctgcctcccaaagtgctgccattacaggcgtgagccactaggcctgacctccccttcccctttcctgccccaaggcagatccacatcaccgaagctccctagaggggcaaaagatggagtgagccacaggaagtttggggcgtggtgagttggaatgatacgtccatttctctatgaaatatttgctactagactgttcatttctctctgacatgtttgttgaatgaataaataatttgaaactt

SEQ ID NO: 136260 - DNA, 1695 bp, Homo sapiens
  Payload ID: 6665
  Gene Symbol: GAL3ST4
  Gene Name: galactose-3-O-sulfotransferase 4
  ENST ID: ENST00000423751
  CDS Start-End: 257-919
gtcgggcggtggctgggatgggcgggagggcccggcccgatttcccttgctgctccccttgtggcctgacgctgacagaggcaaaaatctgctaactcagggggcagactcaaccaagactgtgagcaggcctggggaatgaccccccgatctccaaccagtgccttccgcagctgcacggctgtctccagctgtctctgcccctcttcctggccctggctccatctctctgtcacctcacccttccctgtgccacatgggccctctctctcctgccaggacgctgcggctctggggacctcggagcctgggggtggctctgggagtcttcatgaccattggctttgcactccagctcttgggagggcccttccagaggaggtacttcaggtcatgccttctgacagcttctttttttccattgtccgagacccagcggctctggctcgctctgccttctcctactataaatccacctcatcagccttccgcaagtcaccatctttggctgccttcctggccaatcctcgaggcttctacaggcctggggcccgtggggaccactacgctcgcaacttactatggtttgactttggcctgccctttcccccagagaagagggccaagagagggaatattcatccccccagagaccccaaccccccacagctgcaggtcttgccttctggtgctggccctcgagcccaaaccctcaatcccaatgccctcatccatcctgtttccactgttactgatcatcgcagccagatatcaagccctgcctctttcgatttggggtcttcatccttcatccagtggggtctggcatggctggactctgtctttgacctggtcatggtggctgagtacttcgatgagtcattggttctgctggcagatgccctgtgctggggtctagatgacgtggtgggcttcatgcacaatgcccaggctggacataagcagggcctcagcactgtcagcaacagtggactgactgcggaggaccggcagctgactgcacgggcccgagcctggaacaacctggactgggctctctatgtccacttcaaccgcagtctctgggcacggatagagaaatacggccagggccggctgcagacagctgtggccgagctccgggctcgccgagaggccctagcgaaacattgtctggtagggggtgaggcttctgaccccaaatacatcactgatcgccggttccgccccttccagtttgggtcagctaaggttttgggctatatacttcggagtggattgagcccccaagaccaagaggaatgtgagcgcctagctacccctgagctccagtacaaggacaagctggatgccaagcagttcccccctaccgtctcactgcccctcaagacttcaaggccactctccccataaacatcagactacagatttaggtggaagagcagccatgtttgaagggcacatgtgatgagtggggggcagcaagatgccatttctgcatctcccagaagggatgagtctttgtcccgatgcaagccccctcttcgctgggctcccagcagtgcttccctcctccaccctccactcattttgttctttccccccaactttttttttttttgaaacggagtcttgctctgtcccccaggctggagtgcagtggcatgatctcggctcactgcaacctctgcctcc

SEQ ID NO: 136261 - DNA, 2334 bp, Homo sapiens
  Payload ID: 6665
  Gene Symbol: GAL3ST4
  Gene Name: galactose-3-O-sulfotransferase 4
  Uniprot ID: Q96RP7
  ENST ID: ENST00000413800
  CDS Start-End: 190-1650
gacgctgacagaggcaaaaatctgctaactcagggggcagactcaaccaagactgtgagcaggcctggggaatgaccccccgatctccaaccagtgccttccgcagctgcacggctgtctccagctgtctctgcccctcttcctggccctggctccatctctctgtcacctcacccttccctgtgccacatgggccctctctctcctgccaggacgctgcggctctggggacctcggagcctgggggtggctctgggagtcttcatgaccattggctttgcactccagctcttgggagggcccttccagaggaggctacctgggctacagctccgacagccctcggccccatccctacgaccagcccttccgtcctgcccaccccggcagcgactggtgttcctgaagacacataaatccgggagcagctctgtgctgagcctgcttcaccgctatggggaccagcacgggctgcgcttcgccctccctgcccgctaccagtttggctacccaaagctcttccaggcctctagggtaaaaggctaccgcccacagggtggaggcacccagctccccttccacatcctctgtcaccacatgaggttcaacctgaaagaggtacttcaggtcatgccttctgacagcttctttttttccattgtccgagacccagcggctctggctcgctctgccttctcctactataaatccacctcatcagccttccgcaagtcaccatctttggctgccttcctggccaatcctcgaggcttctacaggcctggggcccgtggggaccactacgctcgcaacttactatggtttgactttggcctgccctttcccccagagaagagggccaagagagggaatattcatccccccagagaccccaaccccccacagctgcaggtcttgccttctggtgctggccctcgagcccaaaccctcaatcccaatgccctcatccatcctgtttccactgttactgatcatcgcagccagatatcaagccctgcctctttcgatttggggtcttcatccttcatccagtggggtctggcatggctggactctgtctttgacctggtcatggtggctgagtacttcgatgagtcattggttctgctggcagatgccctgtgctggggtctagatgacgtggtgggcttcatgcacaatgcccaggctggacataagcagggcctcagcactgtcagcaacagtggactgactgcggaggaccggcagctgactgcacgggcccgagcctggaacaacctggactgggctctctatgtccacttcaaccgcagtctctgggcacggatagagaaatacggccagggccggctgcagacagctgtggccgagctccgggctcgccgagaggccctagcgaaacattgtctggtagggggtgaggcttctgaccccaaatacatcactgatcgccggttccgccccttccagtttgggtcagctaaggttttgggctatatacttcggagtggattgagcccccaagaccaagaggaatgtgagcgcctagctacccctgagctccagtacaaggacaagctggatgccaagcagttcccccctaccgtctcactgcccctcaagacttcaaggccactctccccataaacatcagactacagatttaggtggaagagcagccatgtttgaagggcacatgtgatgagtggggggcagcaagatgccatttctgcatctcccagaagggatgagtctttgtcccgatgcaagccccctcttcgctgggctcccagcagtgcttccctcctccaccctccactcattttgttctttccccccaactttttttttttttgaaacggagtcttgctctgtcccccaggctggagtgcagtggcatgatctcggctcactgcaacctctgcctcccaggttcaagcgattctcctgcctcagcctccagagtagctaggattacagatacgtgccaccatacccggctaatttttatatttttagagacagggattcaacatgttggttaggctggtcttgaactcctcacctcaggtgatccacatgactctgcctcccaaagtgctgccattacaggcgtgagccactaggcctgacctccccttcccctttcctgccccaaggcagatccacatcaccgaagctccctagaggggcaaaagatggagtgagccacaggaagtttggggcgtggtgagttggaatgatacgtccatttctctatgaaatatttgctactagactgttcatttctctctgacatgtttgttgaatgaataaataatttgaaacttc

SEQ ID NO: 136262 - DNA, 1404 bp, Homo sapiens
  Payload ID: 6665
  Gene Symbol: GAL3ST4
  Gene Name: galactose-3-O-sulfotransferase 4
  ENST ID: ENST00000411994
  CDS Start-End: 136-798
gtgagcaggcctggggaatgaccccccgatctccaaccagtgccttccgcagctgcacggctgtctccagctgtctctgcccctcttcctggccctggctccatctctctgtcacctcacccttccctgtgccacatgggccctctctctcctgccaggacgctgcggctctggggacctcggagcctgggggtggctctgggagtcttcatgaccattggctttgcactccagctcttgggagggcccttccagaggaggtacttcaggtcatgccttctgacagcttctttttttccattgtccgagacccagcggctctggctcgctctgccttctcctactataaatccacctcatcagccttccgcaagtcaccatctttggctgccttcctggccaatcctcgaggcttctacaggcctggggcccgtggggaccactacgctcgcaacttactatggtttgactttggcctgccctttcccccagagaagagggccaagagagggaatattcatccccccagagaccccaaccccccacagctgcaggtcttgccttctggtgctggccctcgagcccaaaccctcaatcccaatgccctcatccatcctgtttccactgttactgatcatcgcagccagatatcaagccctgcctctttcgatttggggtcttcatccttcatccagtggggtctggcatggctggactctgtctttgacctggtcatggtggctgagtacttcgatgagtcattggttctgctggcagatgccctgtgctggggtctagatgacgtggtgggcttcatgcacaatgcccaggctggacataagcagggcctcagcactgtcagcaacagtggactgactgcggaggaccggcagctgactgcacgggcccgagcctggaacaacctggactgggctctctatgtccacttcaaccgcagtctctgggcacggatagagaaatacggccagggccggctgcagacagctgtggccgagctccgggctcgccgagaggccctagcgaaacattgtctggtagggggtgaggcttctgaccccaaatacatcactgatcgccggttccgccccttccagtttgggtcagctaaggttttgggctatatacttcggagtggattgagcccccaagaccaagaggaatgtgagcgcctagctacccctgagctccagtacaaggacaagctggatgccaagcagttcccccctaccgtctcactgcccctcaagacttcaaggccactctccccataaacatcagactacagatttaggtggaagagcagccatgtttgaagggcacatgtgatgagtggggggcagcaagatgccatttctgcatctcccagaagggatgagtctttgt

SEQ ID NO: 136263 - DNA, 735 bp, Homo sapiens
  Payload ID: 6665
  Gene Symbol: GAL3ST4
  Gene Name: galactose-3-O-sulfotransferase 4
  ENST ID: ENST00000482469
  CDS Start-End: 338-735
gtctctctgtccctctgtctctctctctctgtttctctgtgtgtgtgtgtgtgtgtgtgtgtgtctctctctctttctgtctccctctccagccccaccctttcagtctcctccgggtgcactgataaggttggaaagtggaatggtggacgctgacagaggcaaaaatctgctaactcagggggcagactcaaccaagactgtgagcaggcctggggaatgaccccccgatctccaaccagtgccttccgcagctgcacggctgtctccagctgtctctgcccctcttcctggccctggctccatctctctgtcacctcacccttccctgtgccacatgggccctctctctcctgccaggacgctgcggctctggggacctcggagcctgggggtggctctgggagtcttcatgaccattggctttgcactccagctcttgggagggcccttccagaggaggctacctgggctacagctccgacagccctcggccccatccctacgaccagcccttccgtcctgcccaccccggcagcgactggtgttcctgaagacacataaatccgggagcagctctgtgctgagcctgcttcaccgctatggggaccagcacgggctgcgcttcgccctccctgcccgctaccagtttggctacccaaagctcttccaggcctctagggtaaaaggctaccgcccacagggtggaggcacccagctccccttccacatcct

SEQ ID NO: 136264 - DNA, 579 bp, Homo sapiens
  Payload ID: 6665
  Gene Symbol: GAL3ST4
  Gene Name: galactose-3-O-sulfotransferase 4
  ENST ID: ENST00000498000
  CDS Start-End: 224-579
gattaggaagctcgggcttcagaaggaactctgcaacgctgacagaggcaaaaatctgctaactcagggggcagactcaaccaagactgtgagcaggcctggggaatgaccccccgatctccaaccagtgccttccgcagctgcacggctgtctccagctgtctctgcccctcttcctggccctggctccatctctctgtcacctcacccttccctgtgccacatgggccctctctctcctgccaggacgctgcggctctggggacctcggagcctgggggtggctctgggagtcttcatgaccattggctttgcactccagctcttgggagggcccttccagaggaggtacttcaggtcatgccttctgacagcttctttttttccattgtccgagacccagcggctctggctcgctctgccttctcctactataaatccacctcatcagccttccgcaagtcaccatctttggctgccttcctggccaatcctcgaggcttctacaggcctggggcccgtggggaccactacgctcgcaacttactatggtttgactttggcctgccctttccccca

SEQ ID NO: 136265 - DNA, 548 bp, Homo sapiens
  Payload ID: 6665
  Gene Symbol: GAL3ST4
  Gene Name: galactose-3-O-sulfotransferase 4
  ENST ID: ENST00000460995
  CDS Start-End: 217-548
aagctcgggcttcagaaggaactctgcaacgctgacagaggcaaaaatctgctaactcagggggcagactcaaccaagactgtgagcaggcctggggaatgaccccccgatctccaaccagtgccttccgcagctgcacggctgtctccagctgtctctgcccctcttcctggccctggctccatctctctgtcacctcacccttccctgtgccacatgggccctctctctcctgccaggacgctgcggctctggggacctcggagcctgggggtggctctgggagtcttcatgaccattggctttgcactccagctcttgggagggcccttccagaggaggctacctgggctacagctccgacagccctcggccccatccctacgaccagcccttccgtcctgcccaccccggcagcgactggtgttcctgaagacacataaatccgggagcagctctgtgctgagcctgcttcaccgctatggggaccagcacgggctgcgcttcgccctccctgcccgctaccagtttggctacccaaagctctt

SEQ ID NO: 136266 - DNA, 1318 bp, Homo sapiens
  Payload ID: 6666
  Gene Symbol: GLA
  Gene Name: galactosidase, alpha
  Uniprot ID: P06280
  ENST ID: ENST00000218516
  CDS Start-End: 23-1312
atgctgtccggtcaccgtgacaatgcagctgaggaacccagaactacatctgggctgcgcgcttgcgcttcgcttcctggccctcgtttcctgggacatccctggggctagagcactggacaatggattggcaaggacgcctaccatgggctggctgcactgggagcgcttcatgtgcaaccttgactgccaggaagagccagattcctgcatcagtgagaagctcttcatggagatggcagagctcatggtctcagaaggctggaaggatgcaggttatgagtacctctgcattgatgactgttggatggctccccaaagagattcagaaggcagacttcaggcagaccctcagcgctttcctcatgggattcgccagctagctaattatgttcacagcaaaggactgaagctagggatttatgcagatgttggaaataaaacctgcgcaggcttccctgggagttttggatactacgacattgatgcccagacctttgctgactggggagtagatctgctaaaatttgatggttgttactgtgacagtttggaaaatttggcagatggttataagcacatgtccttggccctgaataggactggcagaagcattgtgtactcctgtgagtggcctctttatatgtggccctttcaaaagcccaattatacagaaatccgacagtactgcaatcactggcgaaattttgctgacattgatgattcctggaaaagtataaagagtatcttggactggacatcttttaaccaggagagaattgttgatgttgctggaccagggggttggaatgacccagatatgttagtgattggcaactttggcctcagctggaatcagcaagtaactcagatggccctctgggctatcatggctgctcctttattcatgtctaatgacctccgacacatcagccctcaagccaaagctctccttcaggataaggacgtaattgccatcaatcaggaccccttgggcaagcaagggtaccagcttagacagggagacaactttgaagtgtgggaacgacctctctcaggcttagcctgggctgtagctatgataaaccggcaggagattggtggacctcgctcttataccatcgcagttgcttccctgggtaaaggagtggcctgtaatcctgcctgcttcatcacacagctcctccctgtgaaaaggaagctagggttctatgaatggacttcaaggttaagaagtcacataaatcccacaggcactgttttgcttcagctagaaaatacaatgcagatgtcattaaaagacttactttaaaatgtt

SEQ ID NO: 136267 - DNA, 1358 bp, Homo sapiens
  Payload ID: 6666
  Gene Symbol: GLA
  Gene Name: galactosidase, alpha
  ENST ID: ENST00000493905
  CDS Start-End: 6-674
tgacaatgcagctgaggaacccagaactacatctgggctgcgcgcttgcgcttcgcttcctggccctcgtttcctgggacatccctggggctagagcactggacaatggattggcaaggacgcctaccatgggctggctgcactgggagcgcttcatgtgcaaccttgactgccaggaagagccagattcctgcatcagtgagaagctcttcatggagatggcagagctcatggtctcagaaggctggaaggatgcaggttatgagtacctctgcattgatgactgttggatggctccccaaagagattcagaaggcagacttcaggcagaccctcagcgctttcctcatgggattcgccagctagctaattatgttcacagcaaaggactgaagctagggatttatgcagatgttggaaataaaacctgcgcaggcttccctgggagttttggatactacgacattgatgcccagacctttgctgactggggagtagatctgctaaaatttgatggttgttactgtgacagtttggaaaatttggcagatggttataagcacatgtccttggccctgaataggactggcagaagcattgtgtactcctgtgagtggcctctttatatgtggccctttcaaaagagctccacactatttggaagtatttgttgacttgttaccatgtctccccactagagtcccaattatacagaaatccgacagtactgcaatcactggcgaaattttgctgacattgatgattcctggaaaagtataaagagtatcttggactggacatcttttaaccaggagagaattgttgatgttgctggaccagggggttggaatgacccagatatgttagtgattggcaactttggcctcagctggaatcagcaagtaactcagatggccctctgggctatcatggctgctcctttattcatgtctaatgacctccgacacatcagccctcaagccaaagctctccttcaggataaggacgtaattgccatcaatcaggaccccttgggcaagcaagggtaccagcttagacagggagacaactttgaagtgtgggaacgacctctctcaggcttagcctgggctgtagctatgataaaccggcaggagattggtggacctcgctcttataccatcgcagttgcttccctgggtaaaggagtggcctgtaatcctgcctgcttcatcacacagctcctccctgtgaaaaggaagctagggttctatgaatggacttcaaggttaagaagtcacataaatcccacaggcactgttttgcttcagctagaaaatacaatgcagatgtcattaaaagacttactttaaaatgtt

SEQ ID NO: 136268 - DNA, 2018 bp, Homo sapiens
  Payload ID: 6667
  Gene Symbol: GLB1
  Gene Name: galactosidase, beta 1
  ENST ID: ENST00000307377
  CDS Start-End: 62-1702
agtcaagtgacgcgaagcggccggcctgggcgccgactgcagagccgggaggctggtggtcatgccggggttcctggttcgcatcctccctctgttgctggttctgctgcttctgggccctacgcgcggcttgcgcaatgccacccagaggatgtttgaaattgactatagccgggactccttcctcaaggatggccagccatttcgctacatctcaggaagcattcactactcccgtgtgccccgcttctactggaaggaccggctgctgaagatgaagatggctgggctgaacgccatccagacattacctggcagctgtggacaagtggttgggagtccttctgcccaagatgaagcctctcctctatcagaatggagggccagttataacagtgcaggcagcaacatcacagatgctttcctaagccagaggaagtgtgagcccaaaggacccttgatcaattctgaattctatactggctggctagatcactggggccaacctcactccacaatcaagaccgaagcagtggcttcctccctctatgatatacttgcccgtggggcgagtgtgaacttgtacatgtttataggtgggaccaattttgcctattggaatggggccaactcaccctatgcagcacagcccaccagctacgactatgatgccccactgagtgaggctggggacctcactgagaagtattttgctctgcgaaacatcatccagaagtttgaaaaagtaccagaaggtcctatccctccatctacaccaaagtttgcatatggaaaggtcactttggaaaagttaaagacagtgggagcagctctggacattctgtgtccctctgggcccatcaaaagcctttatcccttgacatttatccaggtgaaacagcattatgggtttgtgctgtaccggacaacacttcctcaagattgcagcaacccagcacctctctcttcacccctcaatggagtccacgatcgagcatatgttgctgtggatgggatcccccagggagtccttgagcgaaacaatgtgatcactctgaacataacagggaaagctggagccactctggaccttctggtagagaacatgggacgtgtgaactatggtgcatatatcaacgattttaagggtttggtttctaacctgactctcagttccaatatcctcacggactggacgatctttccactggacactgaggatgcagtgtgcagccacctggggggctggggacaccgtgacagtggccaccatgatgaagcctgggcccacaactcatccaactacacgctcccggccttttatatggggaacttctccattcccagtgggatcccagacttgccccaggacacctttatccagtttcctggatggaccaagggccaggtctggattaatggctttaaccttggccgctattggccagcccggggccctcagttgaccttgtttgtgccccagcacatcctgatgacctcggccccaaacaccatcaccgtgctggaactggagtgggcaccctgcagcagtgatgatccagaactatgtgctgtgacgttcgtggacaggccagttattggctcatctgtgacctacgatcatccctccaaacctgttgaaaaaagactcatgcccccacccccgcaaaaaaacaaagattcatggctggaccatgtatgatgatgaaagcctgtgtctttgagggattctaccctgaacatacctcacagatcctccctgtcatgccacatttcactgattggaatgtggaaatggaaaaggaatttaggatgtgcattttcacctgaggtttccctgcatccctgcagtgccaaagccccaccttcagggaccacctggaatgtgtgaggggctgacagcacagtaacgtgcatacatatctgcagggctggaatggaagctttaaaggtggtagtgatttttattttggaagaatcatgttacctttttgttaaataaaatttgtactcaaatg

SEQ ID NO: 136269 - DNA, 2616 bp, Homo sapiens
  Payload ID: 6667
  Gene Symbol: GLB1
  Gene Name: galactosidase, beta 1
  Uniprot ID: P16278
  ENST ID: ENST00000307363
  CDS Start-End: 146-2179
cacagcggggcggggcgcggggctgagcaggcgcgagggctggctgctgggccgacgaggggcggtgccaggccgtgggtccttagtcaagtgacgcgaagcggccggcctgggcgccgactgcagagccgggaggctggtggtcatgccggggttcctggttcgcatcctccctctgttgctggttctgctgcttctgggccctacgcgcggcttgcgcaatgccacccagaggatgtttgaaattgactatagccgggactccttcctcaaggatggccagccatttcgctacatctcaggaagcattcactactcccgtgtgccccgcttctactggaaggaccggctgctgaagatgaagatggctgggctgaacgccatccagacgtatgtgccctggaactttcatgagccctggccaggacagtaccagttttctgaggaccatgatgtggaatattttcttcggctggctcatgagctgggactgctggttatcctgaggcccgggccctacatctgtgcagagtgggaaatgggaggattacctgcttggctgctagagaaagagtctattcttctccgctcctccgacccagattacctggcagctgtggacaagtggttgggagtccttctgcccaagatgaagcctctcctctatcagaatggagggccagttataacagtgcaggttgaaaatgaatatggcagctactttgcctgtgattttgactacctgcgcttcctgcagaagcgctttcgccaccatctgggggatgatgtggttctgtttaccactgatggagcacataaaacattcctgaaatgtggggccctgcagggcctctacaccacggtggactttggaacaggcagcaacatcacagatgctttcctaagccagaggaagtgtgagcccaaaggacccttgatcaattctgaattctatactggctggctagatcactggggccaacctcactccacaatcaagaccgaagcagtggcttcctccctctatgatatacttgcccgtggggcgagtgtgaacttgtacatgtttataggtgggaccaattttgcctattggaatggggccaactcaccctatgcagcacagcccaccagctacgactatgatgccccactgagtgaggctggggacctcactgagaagtattttgctctgcgaaacatcatccagaagtttgaaaaagtaccagaaggtcctatccctccatctacaccaaagtttgcatatggaaaggtcactttggaaaagttaaagacagtgggagcagctctggacattctgtgtccctctgggcccatcaaaagcctttatcccttgacatttatccaggtgaaacagcattatgggtttgtgctgtaccggacaacacttcctcaagattgcagcaacccagcacctctctcttcacccctcaatggagtccacgatcgagcatatgttgctgtggatgggatcccccagggagtccttgagcgaaacaatgtgatcactctgaacataacagggaaagctggagccactctggaccttctggtagagaacatgggacgtgtgaactatggtgcatatatcaacgattttaagggtttggtttctaacctgactctcagttccaatatcctcacggactggacgatctttccactggacactgaggatgcagtgtgcagccacctggggggctggggacaccgtgacagtggccaccatgatgaagcctgggcccacaactcatccaactacacgctcccggccttttatatggggaacttctccattcccagtgggatcccagacttgccccaggacacctttatccagtttcctggatggaccaagggccaggtctggattaatggctttaaccttggccgctattggccagcccggggccctcagttgaccttgtttgtgccccagcacatcctgatgacctcggccccaaacaccatcaccgtgctggaactggagtgggcaccctgcagcagtgatgatccagaactatgtgctgtgacgttcgtggacaggccagttattggctcatctgtgacctacgatcatccctccaaacctgttgaaaaaagactcatgcccccacccccgcaaaaaaacaaagattcatggctggaccatgtatgatgatgaaagcctgtgtctttgagggattctaccctgaacatacctcacagatcctccctgtcatgccacatttcactgattggaatgtggaaatggaaaaggaatttaggatgtgcattttcacctgaggtttccctgcatccctgcagtgccaaagccccaccttcagggaccacctggaatgtgtgaggggctgacagcacagtaacgtgcatacatatctgcagggctggaatggaagctttaaaggtggtagtgatttttattttggaagaatcatgttacctttttgttaaataaaatttgtactcaaatgatgatgtcactgtttttaatgtgcaggtattgaattatatggtctgacttaaatcataactagacttgagtgggctgaataaaccacttcactaacttgaagttcaaaaggatggaaaata

SEQ ID NO: 136270 - DNA, 2512 bp, Homo sapiens
  Payload ID: 6667
  Gene Symbol: GLB1
  Gene Name: galactosidase, beta 1
  Uniprot ID: P16278
  ENST ID: ENST00000399402
  CDS Start-End: 133-2076
gggcgggccgggcggggcgcgcgtccttccaggcagctcggtcgcttgtgcgttccgctccggccgccctttgcgcttggatccacttccccatctgtaacgaggtgttgagacgagaatgccacccagaggatgtttgaaattgactatagccgggactccttcctcaaggatggccagccatttcgctacatctcaggaagcattcactactcccgtgtgccccgcttctactggaaggaccggctgctgaagatgaagatggctgggctgaacgccatccagacgtatgtgccctggaactttcatgagccctggccaggacagtaccagttttctgaggaccatgatgtggaatattttcttcggctggctcatgagctgggactgctggttatcctgaggcccgggccctacatctgtgcagagtgggaaatgggaggattacctgcttggctgctagagaaagagtctattcttctccgctcctccgacccagattacctggcagctgtggacaagtggttgggagtccttctgcccaagatgaagcctctcctctatcagaatggagggccagttataacagtgcaggttgaaaatgaatatggcagctactttgcctgtgattttgactacctgcgcttcctgcagaagcgctttcgccaccatctgggggatgatgtggttctgtttaccactgatggagcacataaaacattcctgaaatgtggggccctgcagggcctctacaccacggtggactttggaacaggcagcaacatcacagatgctttcctaagccagaggaagtgtgagcccaaaggacccttgatcaattctgaattctatactggctggctagatcactggggccaacctcactccacaatcaagaccgaagcagtggcttcctccctctatgatatacttgcccgtggggcgagtgtgaacttgtacatgtttataggtgggaccaattttgcctattggaatggggccaactcaccctatgcagcacagcccaccagctacgactatgatgccccactgagtgaggctggggacctcactgagaagtattttgctctgcgaaacatcatccagaagtttgaaaaagtaccagaaggtcctatccctccatctacaccaaagtttgcatatggaaaggtcactttggaaaagttaaagacagtgggagcagctctggacattctgtgtccctctgggcccatcaaaagcctttatcccttgacatttatccaggtgaaacagcattatgggtttgtgctgtaccggacaacacttcctcaagattgcagcaacccagcacctctctcttcacccctcaatggagtccacgatcgagcatatgttgctgtggatgggatcccccagggagtccttgagcgaaacaatgtgatcactctgaacataacagggaaagctggagccactctggaccttctggtagagaacatgggacgtgtgaactatggtgcatatatcaacgattttaagggtttggtttctaacctgactctcagttccaatatcctcacggactggacgatctttccactggacactgaggatgcagtgtgcagccacctggggggctggggacaccgtgacagtggccaccatgatgaagcctgggcccacaactcatccaactacacgctcccggccttttatatggggaacttctccattcccagtgggatcccagacttgccccaggacacctttatccagtttcctggatggaccaagggccaggtctggattaatggctttaaccttggccgctattggccagcccggggccctcagttgaccttgtttgtgccccagcacatcctgatgacctcggccccaaacaccatcaccgtgctggaactggagtgggcaccctgcagcagtgatgatccagaactatgtgctgtgacgttcgtggacaggccagttattggctcatctgtgacctacgatcatccctccaaacctgttgaaaaaagactcatgcccccacccccgcaaaaaaacaaagattcatggctggaccatgtatgatgatgaaagcctgtgtctttgagggattctaccctgaacatacctcacagatcctccctgtcatgccacatttcactgattggaatgtggaaatggaaaaggaatttaggatgtgcattttcacctgaggtttccctgcatccctgcagtgccaaagccccaccttcagggaccacctggaatgtgtgaggggctgacagcacagtaacgtgcatacatatctgcagggctggaatggaagctttaaaggtggtagtgatttttattttggaagaatcatgttacctttttgttaaataaaatttgtactcaaatgatgatgtcactgtttttaatgtgcaggtattgaattatatggtctgacttaaatcataactagacttgagtgggctgaataaaccacttcactaacttgaagttcaaaaggatggaaaat

SEQ ID NO: 136271 - DNA, 558 bp, Homo sapiens
  Payload ID: 6667
  Gene Symbol: GLB1
  Gene Name: galactosidase, beta 1
  ENST ID: ENST00000436768
  CDS Start-End: 118-558
aggcgcgagggctggctgctgggccgacgaggggcggtgccaggccgtgggtccttagtcaagtgacgcgaagcggccggcctgggcgccgactgcagagccgggaggctggtggtcatgccggggttcctggttcgcatcctccctctgttgctggttctgctgcttctgggccctacgcgcggcttgcgctctcgattccttccttgggcttttcatctgccacggcaagcgcctaagtctcagctgccgcttcacaaaagaggtaccaagactgcaccgaatgagcacgcaagcagcaacaggagtgggagaagaaggaggcggcagcagtggaatgccacccagaggatgtttgaaattgactatagccgggactccttcctcaaggatggccagccatttcgctacatctcaggaagcattcactactcccgtgtgccccgcttctactggaaggaccggctgctgaagatgaagatggctgggctgaacgccatccagacgtatgtgccctggaactttcatgagccctggccaggacagtaccagttttct

SEQ ID NO: 136272 - DNA, 569 bp, Homo sapiens
  Payload ID: 6667
  Gene Symbol: GLB1
  Gene Name: galactosidase, beta 1
  ENST ID: ENST00000438227
  CDS Start-End: 62-187
agtcaagtgacgcgaagcggccggcctgggcgccgactgcagagccgggaggctggtggtcatgccggggttcctggttcgcatcctccctctgttgctggttctgctgcttctgggccctacgcgcggcttgcgcattacctggcagctgtggacaagtggttgggagtccttctgcccaagatgaagcctctcctctatcagaatggagggccagttataacagtgcaggttgaaaatgaatatggcagctactttgcctgtgattttgactacctgcgcttcctgcagaagcgctttcgccaccatctgggggatgatgtggttctgtttaccactgatggagcacataaaacattcctgaaatgtggggccctgcagggcctctacaccacggtggactttggaacaggcagcaacatcacagatgctttcctaagccagaggaagtgtgagcccaaaggacccttgatcaattctgaattctatactggctggctagatcactggggccaacctcactccacaatcaagaccgaagcagtggcttcctccctctatgatatact

SEQ ID NO: 136273 - DNA, 540 bp, Homo sapiens
  Payload ID: 6667
  Gene Symbol: GLB1
  Gene Name: galactosidase, beta 1
  ENST ID: ENST00000450835
  CDS Start-End: 234-540
gcttgtgcgttccgctccggccgccctttgcgcttggatccacttccccatctgtaacgaggtgttgagacgagtctcgattccttccttgggcttttcatctgccacggcaagcgcctaagtctcagctgccgcttcacaaaagaggtaccaagactgcaccgaatgagcacgcaagcagcaacaggagtgggagaagaaggaggcggcagcagtggaatgccacccagaggatgtttgaaattgactatagccgggactccttcctcaaggatggccagccatttcgctacatctcaggaagcattcactactcccgtgtgccccgcttctactggaaggaccggctgctgaagatgaagatggctgggctgaacgccatccagacgtatgtgccctggaactttcatgagccctggccaggacagtaccagttttctgaggaccatgatgtggaatattttcttcggctggctcatgagctgggactgctggttatcctgaggcccgggccctacatctgtgcagagtgggaaatgg

SEQ ID NO: 136274 - DNA, 631 bp, Homo sapiens
  Payload ID: 6667
  Gene Symbol: GLB1
  Gene Name: galactosidase, beta 1
  ENST ID: ENST00000446732
  CDS Start-End: 18-272
agaatgccacccagaggatgtttgaaattgactatagccgggactccttcctcaaggatggccagccatttcgctacatctcaggaagcattcactactcccgtgtgccccgcttctactggaaggaccggctgctgaagatgaagatggctgggctgaacgccatccagacattacctggcagctgtggacaagtggttgggagtccttctgcccaagatgaagcctctcctctatcagaatggagggccagttataacagtgcaggttgaaaatgaatatggcagctactttgcctgtgattttgactacctgcgcttcctgcagaagcgctttcgccaccatctgggggatgatgtggttctgtttaccactgatggagcacataaaacattcctgaaatgtggggccctgcagggcctctacaccacggtggactttggaacaggcagcaacatcacagatgctttcctaagccagaggaagtgtgagcccaaaggacccttgatcaattctgaattctatactggctggctagatcactggggccaacctcactccacaatcaagaccgaagcagtggcttcctccctctatgatatacttgcccgtggggcgagtgtgaacttgt

SEQ ID NO: 136275 - DNA, 626 bp, Homo sapiens
  Payload ID: 6667
  Gene Symbol: GLB1
  Gene Name: galactosidase, beta 1
  ENST ID: ENST00000440656
  CDS Start-End: 285-626
agtcaagtgacgcgaagcggccggcctgggcgccgactgcagagccgggaggctggtggtcatgccggggttcctggttcgcatcctccctctgttgctggttctgctgcttctgggccctacgcgcggcttgcgcgtatgtgccctggaactttcatgagccctggccaggacagtaccagttttctgaggaccatgatgtggaatattttcttcggctggctcatgagctgggactgctggttatcctgaggcccgggccctacatctgtgcagagtgggaaatgggaggattacctgcttggctgctagagaaagagtctattcttctccgctcctccgacccagattacctggcagctgtggacaagtggttgggagtccttctgcccaagatgaagcctctcctctatcagaatggagggccagttataacagtgcaggttgaaaatgaatatggcagctactttgcctgtgattttgactacctgcgcttcctgcagaagcgctttcgccaccatctgggggatgatgtggttctgtttaccactgatggagcacataaaacattcctgaaatgtggggccctgcagggcctctacaccacggtggactttggaacaggt

SEQ ID NO: 136276 - DNA, 591 bp, Homo sapiens
  Payload ID: 6667
  Gene Symbol: GLB1
  Gene Name: galactosidase, beta 1
  ENST ID: ENST00000415454
  CDS Start-End: 37-591
ctgggcgccgactgcagagccgggaggctggtggtcatgccggggttcctggttcgcatcctccctctgttgctggttctgctgcttctgggccctacgcgcggcttgcgcgttgaaaatgaatatggcagctactttgcctgtgattttgactacctgcgcttcctgcagaagcgctttcgccaccatctgggggatgatgtggttctgtttaccactgatggagcacataaaacattcctgaaatgtggggccctgcagggcctctacaccacggtggactttggaacaggcagcaacatcacagatgctttcctaagccagaggaagtgtgagcccaaaggacccttgatcaattctgaattctatactggctggctagatcactggggccaacctcactccacaatcaagaccgaagcagtggcttcctccctctatgatatacttgcccgtggggcgagtgtgaacttgtacatgtttataggtgggaccaattttgcctattggaatggggccaactcaccctatgcagcacagcccaccagctacgactatgatgccccactgagtgaggctggggacctcact

SEQ ID NO: 136277 - DNA, 2745 bp, Homo sapiens
  Payload ID: 6668
  Gene Symbol: GLB1L
  Gene Name: galactosidase, beta 1-like
  Uniprot ID: Q6UWU2
  ENST ID: ENST00000295759
  CDS Start-End: 315-2279
atcagtccgcgccggcgtaacggcccgcggtatctcagcaaccgctgggcatccggaggatgtggggacgcggagctgagaggctccgggctagctaggtgtaggggtggacgggtcccaggaccctggtgagggttctctacttggccttcggtgggggtcaagacgcaggcacctacgccaaaggggagcaaagccgggctcggcccgaggcccccaggacctccatctcccaatgttggaggttccctcccaggaatccgacacgtgacggtctgtccgccgtctcagactagaggagcgctgtaaacgccatggctcccaagaagctgtcctgccttcgttccctgctgctgccgctcagcctgacgctactgctgccccaggcagacactcggtcgttcgtagtggataggggtcatgaccggtttctcctagacggggccccgttccgctatgtgtctggcagcctgcactactttcgggtaccgcgggtgctttgggccgaccggcttttgaagatgcgatggagcggcctcaacgccatacagttttatgtgccctggaactaccacgagccacagcctggggtctataactttaatggcagccgggacctcattgcctttctgaatgaggcagctctagcgaacctgttggtcatactgagaccaggaccttacatctgtgcagagtgggagatggggggtctcccatcctggttgcttcgaaaacctgaaattcatctaagaacctcagatccagacttccttgccgcagtggactcctggttcaaggtcttgctgcccaagatatatccatggctttatcacaatgggggcaacatcattagcattcaggtggagaatgaatatggtagctacagagcctgtgacttcagctacatgaggcacttggctgggctcttccgtgcactgctaggagaaaagatcttgctcttcaccacagatgggcctgaaggactcaagtgtggctccctccggggactctataccactgtagattttggcccagctgacaacatgaccaaaatctttaccctgcttcggaagtatgaaccccatgggccattggtaaactctgagtactacacaggctggctggattactggggccagaatcactccacacggtctgtgtcagctgtaaccaaaggactagagaacatgctcaagttgggagccagtgtgaacatgtacatgttccatggaggtaccaactttggatattggaatggtgccgataagaagggacgcttccttccgattactaccagctatgactatgatgcacctatatctgaagcaggggaccccacacctaagctttttgctcttcgagatgtcatcagcaagttccaggaagttcctttgggacctttacctcccccgagccccaagatgatgcttggacctgtgactctgcacctggttgggcatttactggctttcctagacttgctttgcccccgtgggcccattcattcaatcttgccaatgacctttgaggctgtcaagcaggaccatggcttcatgttgtaccgaacctatatgacccataccatttttgagccaacaccattctgggtgccaaataatggagtccatgaccgtgcctatgtgatggtggatggggtgttccagggtgttgtggagcgaaatatgagagacaaactatttttgacggggaaactggggtccaaactggatatcttggtggagaacatggggaggctcagctttgggtctaacagcagtgacttcaagggcctgttgaagccaccaattctggggcaaacaatccttacccagtggatgatgttccctctgaaaattgataaccttgtgaagtggtggtttcccctccagttgccaaaatggccatatcctcaagctccttctggccccacattctactccaaaacatttccaattttaggctcagttggggacacatttctatatctacctggatggaccaagggccaagtctggatcaatgggtttaacttgggccggtactggacaaagcaggggccacaacagaccctctacgtgccaagattcctgctgtttcctaggggagccctcaacaaaattacattgctggaactagaagatgtacctctccagccccaagtccaatttttggataagcctatcctcaatagcactagtactttgcacaggacacatatcaattccctttcagctgatacactgagtgcctctgaaccaatggagttaagtgggcactgaaaggtaggccgggcatggtggctcatgcctgtaatcccagcactttgggaggctgagacgggtggattacctgaggtcaggacttcaagaccagcctggccaacatggtgaaaccccgtctccactaaaaatacaaaaattagccgggcgtgatggtgggcacctctaatcccagctacttgggaggctgagggcaggagaattgcttgaatccaggaggcagaggttgcagtgagtggaggttgtaccactgcactccagcctggctgacagtgagacactccatctcaaaaaaaaaaaaaaaaaaaaaagtaacccttggacctgggacatggagtgggcaggatcccttggtgctggccacggtgaccctaaggaactaaaggccacagtgcctctgaatgtaagtacaagtacacattccttgccaaactttattgtgattaaaattccagagacagtacca

SEQ ID NO: 136278 - DNA, 2574 bp, Homo sapiens
  Payload ID: 6668
  Gene Symbol: GLB1L
  Gene Name: galactosidase, beta 1-like
  Uniprot ID: Q6UWU2
  ENST ID: ENST00000392089
  CDS Start-End: 309-2273
gacatcatcagtccgcgccggcgtaacggcccgcggtatctcagcaaccgctgggcatccggaggatgtggggacgcggagctgagaggctccgggctagctaggtgtaggggtggacgggtcccaggaccctggtgagggttctctacttggccttcggtgggggtcaagacgcaggcacctacgccaaaggggagcaaagccgggctcggcccgaggcccccaggacctccatctcccaatgttggaggaatccgacacgtgacggtctgtccgccgtctcagactagaggagcgctgtaaacgccatggctcccaagaagctgtcctgccttcgttccctgctgctgccgctcagcctgacgctactgctgccccaggcagacactcggtcgttcgtagtggataggggtcatgaccggtttctcctagacggggccccgttccgctatgtgtctggcagcctgcactactttcgggtaccgcgggtgctttgggccgaccggcttttgaagatgcgatggagcggcctcaacgccatacagttttatgtgccctggaactaccacgagccacagcctggggtctataactttaatggcagccgggacctcattgcctttctgaatgaggcagctctagcgaacctgttggtcatactgagaccaggaccttacatctgtgcagagtgggagatggggggtctcccatcctggttgcttcgaaaacctgaaattcatctaagaacctcagatccagacttccttgccgcagtggactcctggttcaaggtcttgctgcccaagatatatccatggctttatcacaatgggggcaacatcattagcattcaggtggagaatgaatatggtagctacagagcctgtgacttcagctacatgaggcacttggctgggctcttccgtgcactgctaggagaaaagatcttgctcttcaccacagatgggcctgaaggactcaagtgtggctccctccggggactctataccactgtagattttggcccagctgacaacatgaccaaaatctttaccctgcttcggaagtatgaaccccatgggccattggtaaactctgagtactacacaggctggctggattactggggccagaatcactccacacggtctgtgtcagctgtaaccaaaggactagagaacatgctcaagttgggagccagtgtgaacatgtacatgttccatggaggtaccaactttggatattggaatggtgccgataagaagggacgcttccttccgattactaccagctatgactatgatgcacctatatctgaagcaggggaccccacacctaagctttttgctcttcgagatgtcatcagcaagttccaggaagttcctttgggacctttacctcccccgagccccaagatgatgcttggacctgtgactctgcacctggttgggcatttactggctttcctagacttgctttgcccccgtgggcccattcattcaatcttgccaatgacctttgaggctgtcaagcaggaccatggcttcatgttgtaccgaacctatatgacccataccatttttgagccaacaccattctgggtgccaaataatggagtccatgaccgtgcctatgtgatggtggatggggtgttccagggtgttgtggagcgaaatatgagagacaaactatttttgacggggaaactggggtccaaactggatatcttggtggagaacatggggaggctcagctttgggtctaacagcagtgacttcaagggcctgttgaagccaccaattctggggcaaacaatccttacccagtggatgatgttccctctgaaaattgataaccttgtgaagtggtggtttcccctccagttgccaaaatggccatatcctcaagctccttctggccccacattctactccaaaacatttccaattttaggctcagttggggacacatttctatatctacctggatggaccaagggccaagtctggatcaatgggtttaacttgggccggtactggacaaagcaggggccacaacagaccctctacgtgccaagattcctgctgtttcctaggggagccctcaacaaaattacattgctggaactagaagatgtacctctccagccccaagtccaatttttggataagcctatcctcaatagcactagtactttgcacaggacacatatcaattccctttcagctgatacactgagtgcctctgaaccaatggagttaagtgggcactgaaaggtaggccgggcatggtggctcatgcctgtaatcccagcactttgggaggctgagacgggtggattacctgaggtcaggacttcaagaccagcctggccaacatggtgaaaccccgtctccactaaaaatacaaaaattagccgggcgtgatggtgggcacctctaatcccagctacttgggaggctgagggcaggagaattgcttgaatccaggaggcagaggttgcagtgagtggaggttgtaccactgcactccagcctggctgacagtgagacactccatctcaaaaaaaaaaaa

SEQ ID NO: 136279 - DNA, 2042 bp, Homo sapiens
  Payload ID: 6668
  Gene Symbol: GLB1L
  Gene Name: galactosidase, beta 1-like
  Uniprot ID: Q6UWU2
  ENST ID: ENST00000409640
  CDS Start-End: 42-1736
gtctgtccgccgtctcagactagaggagcgctgtaaacgccatggctcccaagaagctgtcctgccttcgttccctgctgctgccgctcagcctgacgctactgctgccccaggcagacactcggtcgttcgtagtggataggggtcatgaccggtttctcctagacggggccccgttccgctatgtgtctggcagcctgcactactttcgggtaccgcgggtgctttgggccgaccggcttttgaagatgcgatggagcggcctcaacgccatacagttttatgtgccctggaactaccacgagccacagcctggggtctataactttaatggcagccgggacctcattgcctttctgaatgaggcagctctagcgaacctgttggtcatactgagaccaggaccttacatctgtgcagagtgggagatggggggtctcccatcctggttgcttcgaaaacctgaaattcatctaagaacctcagatccagctgacaacatgaccaaaatctttaccctgcttcggaagtatgaaccccatgggccattggtaaactctgagtactacacaggctggctggattactggggccagaatcactccacacggtctgtgtcagctgtaaccaaaggactagagaacatgctcaagttgggagccagtgtgaacatgtacatgttccatggaggtaccaactttggatattggaatggtgccgataagaagggacgcttccttccgattactaccagctatgactatgatgcacctatatctgaagcaggggaccccacacctaagctttttgctcttcgagatgtcatcagcaagttccaggaagttcctttgggacctttacctcccccgagccccaagatgatgcttggacctgtgactctgcacctggttgggcatttactggctttcctagacttgctttgcccccgtgggcccattcattcaatcttgccaatgacctttgaggctgtcaagcaggaccatggcttcatgttgtaccgaacctatatgacccataccatttttgagccaacaccattctgggtgccaaataatggagtccatgaccgtgcctatgtgatggtggatggggtgttccagggtgttgtggagcgaaatatgagagacaaactatttttgacggggaaactggggtccaaactggatatcttggtggagaacatggggaggctcagctttgggtctaacagcagtgacttcaagggcctgttgaagccaccaattctggggcaaacaatccttacccagtggatgatgttccctctgaaaattgataaccttgtgaagtggtggtttcccctccagttgccaaaatggccatatcctcaagctccttctggccccacattctactccaaaacatttccaattttaggctcagttggggacacatttctatatctacctggatggaccaagggccaagtctggatcaatgggtttaacttgggccggtactggacaaagcaggggccacaacagaccctctacgtgccaagattcctgctgtttcctaggggagccctcaacaaaattacattgctggaactagaagatgtacctctccagccccaagtccaatttttggataagcctatcctcaatagcactagtactttgcacaggacacatatcaattccctttcagctgatacactgagtgcctctgaaccaatggagttaagtgggcactgaaaggtaggccgggcatggtggctcatgcctgtaatcccagcactttgggaggctgagacgggtggattacctgaggtcaggacttcaagaccagcctggccaacatggtgaaaccccgtctccactaaaaatacaaaaattagccgggcgtgatggtgggcacctctaatcccagctacttgggaggctgagggcaggagaattgcttgaatccaggaggcagaggttgcagtgagtggaggttgtaccactgcactccagcctggctgacagtgagacactccatctcaaaaaaaaaaaaaaaaa

SEQ ID NO: 136280 - DNA, 556 bp, Homo sapiens
  Payload ID: 6668
  Gene Symbol: GLB1L
  Gene Name: galactosidase, beta 1-like
  ENST ID: ENST00000440853
  CDS Start-End: 1-556
tgaagatgcgatggagcggcctcaacgccatacagttttatgtgccctggaactaccacgagccacagcctggggtctataactttaatggcagccgggacctcattgcctttctgaatgaggcagctctagcgaacctgttggtcatactgagaccaggaccttacatctgtgcagagtgggagatggggggtctcccatcctggttgcttcgaaaacctgaaattcatctaagaacctcagatccagacttccttgccgcagtggactcctggttcaaggtcttgctgcccaagatatatccatggctttatcacaatgggggcaacatcattagcattcaggtggagaatgaatatggtagctacagagcctgtgacttcagctacatgaggcacttggctgggctcttccgtgcactgctaggagaaaagatcttgctcttcaccacagatgggcctgaaggactcaagtgtggctccctccggggactctataccactgtagattttggcccaggtctcaagcaagggctgggagtggagtctggggaaag

SEQ ID NO: 136281 - DNA, 609 bp, Homo sapiens
  Payload ID: 6668
  Gene Symbol: GLB1L
  Gene Name: galactosidase, beta 1-like
  ENST ID: ENST00000432839
  CDS Start-End: 583-609
atctcagcaaccgctgggcatccggaggatgtggggacgcggagctgagaggctccgggctagctaggtgtaggggtggacgggtcccaggaccctggtgagggttctctacttggccttcggtgggggtcaagacgcaggcacctacgccaaaggggagcaaagccgggctcggcccgaggcccccaggacctccatctcccaatgttggagtagagacagggttttgccctgttggccaagctggtcttgaactcctgacctcaagtgatccacccgcctcggcctcccaaagtgttgggattacaggcgtgagccatcgtgcccagccagattctccatttctaacaagttcccaggtgatgtcgatgaagctggttcgtgaactgcactttaacatgatgtagaaattttacaaactagtagagtaagggggtggctgcaggctggagaggaagtccaggctaaacgcctggcaacttgaggtggtttccgcccccttgctcgctgaggttccctcccaggaatccgacacgtgacggtctgtccgccgtctcagactagaggagcgctgtaaacgccatggctcccaagaagctgtcctgcctt

SEQ ID NO: 136282 - DNA, 635 bp, Homo sapiens
  Payload ID: 6668
  Gene Symbol: GLB1L
  Gene Name: galactosidase, beta 1-like
  ENST ID: ENST00000447002
  CDS Start-End: 26-178
agactagaggagcgctgtaaacgccatggctcccaagaagctgtcctgccttcgttccctgctgctgccgctcagcctgacgctactgctgccccagacggggccccgttccgctatgtgtctggcagcctgcactactttcgggtaccgcgggtgctttgggccgaccggcttttgaagatgcgatggagcggcctcaacgccatacagttttatgtgccctggaactaccacgagccacagcctggggtctataactttaatggcagccgggacctcattgcctttctgaatgaggcagctctagcgaacctgttggtcatactgagaccaggaccttacatctgtgcagagtgggagatggggggtctcccatcctggttgcttcgaaaacctgaaattcatctaagaacctcagatccagctgacaacatgaccaaaatctttaccctgcttcggaagtatgaaccccatgggccattggtaaactctgagtactacacaggctggctggattactggggccagaatcactccacacggtctgtgtcagctgtaaccaaaggactagagaacatgctcaagttgggagccagtgtgaacatgtacatgttccatggaggtaccaactttgg

SEQ ID NO: 136283 - DNA, 888 bp, Homo sapiens
  Payload ID: 6668
  Gene Symbol: GLB1L
  Gene Name: galactosidase, beta 1-like
  ENST ID: ENST00000428427
  CDS Start-End: 545-888
gacgcggagctgagaggctccgggctagctaggtgtaggggtggacgggtcccaggaccctggtgagggttctctacttggccttcggtgggggtcaagacgcaggcacctacgccaaaggggagcaaagccgggctcggcccgaggcccccaggacctccatctcccaatgttggagagacagggttttgccctgttggccaagctggtcttgaactcctgacctcaagtgatccacccgcctcggcctcccaaagtgttgggattacaggcgtgagccatcgtgcccagccagattctccatttctaacaagttcccaggtgatgtcgatgaagctggttcgtgaactgcactttaacatgatgtagaaattttacaaactagtagagtaagggggtggctgcaggctggagaggaagtccaggctaaacgcctggcaacttgaggtggtttccgcccccttgctcgctgaggttccctcccaggaatccgacacgtgacggtctgtccgccgtctcagactagaggagcgctgtaaacgccatggctcccaagaagctgtcctgccttcgttccctgctgctgccgctcagcctgacgctactgctgccccaggcagacactcggtcgttcgtagtggataggggtcatgaccggtttctcctagacggggccccgttccgctatgtgtctggcagcctgcactactttcgggtaccgcgggtgctttgggccgaccggcttttgaagatgcgatggagcggcctcaacgccatacagttttatgtgccctggaactaccacgagccacagcctggggtctataactttaatggcagccgggacctcattgcctttctgaatgaggcagctctagcgaacctgtt

SEQ ID NO: 136284 - DNA, 517 bp, Homo sapiens
  Payload ID: 6668
  Gene Symbol: GLB1L
  Gene Name: galactosidase, beta 1-like
  ENST ID: ENST00000424620
  CDS Start-End: 439-517
ggtatctcagcaaccgctgggcatccggaggatgtggggacgcggagctgagaggctccgggctagctaggtgtaggggtggacgggtcccaggaccctggtgagggttctctacttggccttcggtgggggtcaagacgcaggcacctacgccaaaggggagcaaagccgggctcggcccgaggcccccaggacctccatctcccaatgttggagtagagacagggttttgccctgttggccaagctggtcttgaactcctgacctcaagtgatccacccgcctcggcctcccaaagtgttgggattacaggcgtgagccatcgtgcccagccagattctccatttctaacaagttcccaggtgatgtcgatgaagctggaatccgacacgtgacggtctgtccgccgtctcagactagaggagcgctgtaaacgccatggctcccaagaagctgtcctgccttcgttccctgctgctgccgctcagcctgacgctactgctgccccaggcagaca

SEQ ID NO: 136285 - DNA, 3152 bp, Homo sapiens
  Payload ID: 6669
  Gene Symbol: GLB1L2
  Gene Name: galactosidase, beta 1-like 2
  Uniprot ID: Q8IW92
  ENST ID: ENST00000339772
  CDS Start-End: 189-2099
agccccgcccccgcttgcgcgaggcctagggctgcaggcgcggagccgcgagccccagccaatgagcgccggcgggccggttgcccaggcgaccagtgcgcggctccgccccccgcggcgaggctcccgcgcgcggctgagtgcggactggagtgggaacccgggtccccgcgcttagagaacacgcgatgaccacgtggagcctccggcggaggccggcccgcacgctgggactcctgctgctggtcgtcttgggcttcctggtgctccgcaggctggactggagcaccctggtccctctgcggctccgccatcgacagctggggctgcaggccaagggctggaacttcatgctggaggattccaccttctggatcttcgggggctccatccactatttccgtgtgcccagggagtactggagggaccgcctgctgaagatgaaggcctgtggcttgaacaccctcaccacctatgttccgtggaacctgcatgagccagaaagaggcaaatttgacttctctgggaacctggacctggaggccttcgtcctgatggccgcagagatcgggctgtgggtgattctgcgtccaggcccctacatctgcagtgagatggacctcgggggcttgcccagctggctactccaagaccctggcatgaggctgaggacaacttacaagggcttcaccgaagcagtggacctttattttgaccacctgatgtccagggtggtgccactccagtacaagcgtgggggacctatcattgccgtgcaggtggagaatgaatatggttcctataataaagaccccgcatacatgccctacgtcaagaaggcactggaggaccgtggcattgtggaactgctcctgacttcagacaacaaggatgggctgagcaaggggattgtccagggagtcttggccaccatcaacttgcagtcaacacacgagctgcagctactgaccacctttctcttcaacgtccaggggactcagcccaagatggtgatggagtactggacggggtggtttgactcgtggggaggccctcacaatatcttggattcttctgaggttttgaaaaccgtgtctgccattgtggacgccggctcctccatcaacctctacatgttccacggaggcaccaactttggcttcatgaatggagccatgcacttccatgactacaagtcagatgtcaccagctatgactatgatgctgtgctgacagaagccggcgattacacggccaagtacatgaagcttcgagacttcttcggctccatctcaggcatccctctccctcccccacctgaccttcttcccaagatgccgtatgagcccttaacgccagtcttgtacctgtctctgtgggacgccctcaagtacctgggggagccaatcaagtctgaaaagcccatcaacatggagaacctgccagtcaatgggggaaatggacagtccttcgggtacattctctatgagaccagcatcacctcgtctggcatcctcagtggccacgtgcatgatcgggggcaggtgtttgtgaacacagtatccataggattcttggactacaagacaacgaagattgctgtccccctgatccagggttacaccgtgctgaggatcttggtggagaatcgtgggcgagtcaactatggggagaatattgatgaccagcgcaaaggcttaattggaaatctctatctgaatgattcacccctgaaaaacttcagaatctatagcctggatatgaagaagagcttctttcagaggttcggcctggacaaatggagttccctcccagaaacacccacattacctgctttcttcttgggtagcttgtccatcagctccaccccttgtgacacctttctgaagctggagggctgggagaagggggttgtattcatcaatggccagaaccttggacgttactggaacattggaccccagaagacgctttacctcccaggtccctggttgagcagcggaatcaaccaggtcatcgtttttgaggagacgatggcgggccctgcattacagttcacggaaaccccccacctgggcaggaaccagtacattaagtgagcggtggcaccccctcctgctggtgccagtgggagactgccgcctcctcttgacctgaagcctggtggctgctgccccacccctcactgcaaaagcatctccttaagtagcaacctcagggactgggggctacagtctgcccctgtctcagctcaaaaccctaagcctgcagggaaaggtgggatggctctgggcctggctttgttgatgatggctttcctacagccctgctcttgtgccgaggctgtcgggctgtctctagggtgggagcagctaatcagatcgcccagcctttggccctcagaaaaagtgctgaaacgtgcccttgcactggacgtcacagccctgcgagcatctgctggactcaggcgtgctctttgctggttcctgggaggcttggccacatccctcatggccccattttatccccgaaatcctgggtgtgtcaccagtgtagagggtggggaaggggtgtctcacctgagctgactttgttcttccttcacaaccttctgagccttctttgggattctggaaggaactcggcgtgagaaacatgtgacttcccctttcccttcccactcgctgcttcccacagggtgacaggctgggctggagaaacagaaatcctcaccctgcgtcttcccaagttagcaggtgtctctggtgttcagtgaggaggacatgtgagtcctggcagaagccatggcccatgtctgcacatccagggaggaggacagaaggcccagctcacatgtgagtcctggcagaagccatggcccatgtctgcacatccagggaggaggacagaaggcccagctcacatgtgagtcctggcagaagccatggcccatgtctgcacatccagggaggaggacagaaggcccagctcagtggcccccgccccccaccccccacgcccgaacagcaggggcagagcagccctccttcgaagtgtgtccaagtccgcatttgagccttgttctggggcccagcccaacacctggcttgggctcactgtcctgagttgcagtaaagctataaccttgaatc

SEQ ID NO: 136286 - DNA, 3365 bp, Homo sapiens
  Payload ID: 6669
  Gene Symbol: GLB1L2
  Gene Name: galactosidase, beta 1-like 2
  Uniprot ID: Q8IW92
  ENST ID: ENST00000535456
  CDS Start-End: 189-2099
agccccgcccccgcttgcgcgaggcctagggctgcaggcgcggagccgcgagccccagccaatgagcgccggcgggccggttgcccaggcgaccagtgcgcggctccgccccccgcggcgaggctcccgcgcgcggctgagtgcggactggagtgggaacccgggtccccgcgcttagagaacacgcgatgaccacgtggagcctccggcggaggccggcccgcacgctgggactcctgctgctggtcgtcttgggcttcctggtgctccgcaggctggactggagcaccctggtccctctgcggctccgccatcgacagctggggctgcaggccaagggctggaacttcatgctggaggattccaccttctggatcttcgggggctccatccactatttccgtgtgcccagggagtactggagggaccgcctgctgaagatgaaggcctgtggcttgaacaccctcaccacctatgttccgtggaacctgcatgagccagaaagaggcaaatttgacttctctgggaacctggacctggaggccttcgtcctgatggccgcagagatcgggctgtgggtgattctgcgtccaggcccctacatctgcagtgagatggacctcgggggcttgcccagctggctactccaagaccctggcatgaggctgaggacaacttacaagggcttcaccgaagcagtggacctttattttgaccacctgatgtccagggtggtgccactccagtacaagcgtgggggacctatcattgccgtgcaggtggagaatgaatatggttcctataataaagaccccgcatacatgccctacgtcaagaaggcactggaggaccgtggcattgtggaactgctcctgacttcagacaacaaggatgggctgagcaaggggattgtccagggagtcttggccaccatcaacttgcagtcaacacacgagctgcagctactgaccacctttctcttcaacgtccaggggactcagcccaagatggtgatggagtactggacggggtggtttgactcgtggggaggccctcacaatatcttggattcttctgaggttttgaaaaccgtgtctgccattgtggacgccggctcctccatcaacctctacatgttccacggaggcaccaactttggcttcatgaatggagccatgcacttccatgactacaagtcagatgtcaccagctatgactatgatgctgtgctgacagaagccggcgattacacggccaagtacatgaagcttcgagacttcttcggctccatctcaggcatccctctccctcccccacctgaccttcttcccaagatgccgtatgagcccttaacgccagtcttgtacctgtctctgtgggacgccctcaagtacctgggggagccaatcaagtctgaaaagcccatcaacatggagaacctgccagtcaatgggggaaatggacagtccttcgggtacattctctatgagaccagcatcacctcgtctggcatcctcagtggccacgtgcatgatcgggggcaggtgtttgtgaacacagtatccataggattcttggactacaagacaacgaagattgctgtccccctgatccagggttacaccgtgctgaggatcttggtggagaatcgtgggcgagtcaactatggggagaatattgatgaccagcgcaaaggcttaattggaaatctctatctgaatgattcacccctgaaaaacttcagaatctatagcctggatatgaagaagagcttctttcagaggttcggcctggacaaatggagttccctcccagaaacacccacattacctgctttcttcttgggtagcttgtccatcagctccaccccttgtgacacctttctgaagctggagggctgggagaagggggttgtattcatcaatggccagaaccttggacgttactggaacattggaccccagaagacgctttacctcccaggtccctggttgagcagcggaatcaaccaggtcatcgtttttgaggagacgatggcgggccctgcattacagttcacggaaaccccccacctgggcaggaaccagtacattaagtgagcggtggcaccccctcctgctggtgccagtgggagactgccgcctcctcttgacctgaagcctggtggctgctgccccacccctcactgcaaaagcatctccttaagtagcaacctcagggactgggggctacagtctgcccctgtctcagctcaaaaccctaagcctgcagggaaaggtgggatggctctgggcctggctttgttgatgatggctttcctacagccctgctcttgtgccgaggctgtcgggctgtctctagggtgggagcagctaatcagatcgcccagcctttggccctcagaaaaagtgctgaaacgtgcccttgcactggacgtcacagccctgcgagcatctgctggactcaggcgtgctctttgctggttcctgggaggcttggccacatccctcatggccccattttatccccgaaatcctgggtgtgtcaccagtgtagagggtggggaaggggtgtctcacctgagctgactttgttcttccttcacaaccttctgagccttctttgggattctggaaggaactcggcgtgagaaacatgtgacttcccctttcccttcccactcgctgcttcccacagggtgacaggctgggctggagaaacagaaatcctcaccctgcgtcttcccaagttagcaggtgtctctggtgttcagtgaggaggacatgtgagtcctggcagaagccatggcccatgtctgcacatccagggaggaggacagaaggcccagctcacatgtgagtcctggcagaagccatggcccatgtctgcacatccagggaggaggacagaaggcccagctcacatgtgagtcctggcagaagccatggcccatgtctgcacatccagggaggaggacagaaggcccagctcacatgtgagtcctggcagaagccatggcccatgtctgcacatccagggaggaggacagaaggcccagctcacatgtgagtcctggcagaagccatggcccatgtctgcacatccagggaggaggacagaaggcccagctcacatgtgagtcctggcagaagccatggcccatgtctgcacatccagggaggaggacagaaggcccagctcagtggcccccgccccccaccccccacgcccgaacagcaggggcagagcagccctccttcgaagtgtgtccaagtccgcatttgagccttgttctggggcccagcccaacacctggcttgggctcactgtcctgagttgcagtaaagctataaccttgaatcaca

SEQ ID NO: 136287 - DNA, 3566 bp, Homo sapiens
  Payload ID: 6670
  Gene Symbol: GLB1L3
  Gene Name: galactosidase, beta 1-like 3
  Uniprot ID: Q8NCI6
  ENST ID: ENST00000389887
  CDS Start-End: 2497-3438
gcggccctagtggctggtctttcctgtgcttgggatgttggccttgtagagttacttctgtaatctcaagacagaaactgacagctttgtttgatcaaaattgttacttcaccttgcacattttcaagagttctacaggtttaatgagcacagaaatctgggggaactttcactctccagggctccttcatagaggttctcaaatactccatcagcagaggggagccccagatggcaaaaggacacaggatatgtcatctttcaaatgaaccaataatccattatttgattcttctacctttgtcaaaattcctccagcaacgcctgcagaaaatcacaattcttgatacatagcttgttccaataaagcaccacagcatttctagtgactgcaggcccagctgtcaaactctttcaacttgatagagaatatgtacacaaaacctatagctgtcatcatacttaatagtgaaaaacagaatgttttccagctgacactggggacaaggtaacagtgtcagttcctgccgctcttattcaacacagaaattttagtcatcatactaagacacacaaaaaaaggaataaaaagccacgcagactggaaaggtagaaataaaactctccatatttgcagatgacatgattatctacatggaaaatgccaagtaatacacaaataacctcttaaaattaataggtgagtttgccaaggtcacaggatatgagatcaacatgagaaacacaatcacatttctgtatgctaacaacaaacatgtaaaaactgaaataaaaataataacagtttaaatctcttgagagcaaaggaaatatttaagtataaacctaacaaaacgtgataggatctgatgttgaaaaaatcacacaattctgatgaaagaagtgaaaaaaaaaaaactatttaaatagacagacataccatgttcgtgggttggaagattcaacataataaggatacaattctcaatttgatccataggttgattgcaattcctctcgaaataccaacatggctttttgtagaaacagacaagtttattctaaattttatgtgggaaggcacaagccctagaatactttaaacttgacaaagaagaataaagtgtgtggctgtaaaaccaaactgtaaaaaattaacagttcattgcttgcagtcgaaaaaatgaggaaaagatggacgatctaggaaactttcagggagctaaggtgtcggagagcaaagtatccttgtaaggaatgagacaagataaactccctcccccacacacagtattttcagagaactacattcttggtttcaacctgatgtcataggctgtgttctttgcaacggaagaagcaaagacttcaaagggagaaatcggaagatttcttttttcatcgtagggacttcacatcagcgtttccaaaaccgagtccatcgccttttccctctgcgcagcctctatcccttcctgtgtttcgcatctcaataaacgtccccgccaagtgacttcagcctgaaacatgcggcctcccggactcctctctgtgtcaccgacctcttgcgctcagttctccggagctgccggtttaacctcgcaagtcttcccggaacccgtgccctcctcctgggcagcgttaccaccacgagcgcctacctgagaggacgcctgttctcatccagcctccaccctgcagccgagcaatctccgtaaaacgaacacctggcttagtttctgctggaaaccgttgaatagtccccactgtcttctggaagggtctgggcagctcggcgtggcgtccacggccccaccaggcctctgcctcctgcaggtcccgctacttcgtcaccaaagcgcccgccgcgctcgcatctgctgtgaggctgtgctcgggccgctcccgccgagggaacggccctcccaaggctctgcgccccaattctcgctcgtttgccaagaggtagccgtgtcggggagctagagttctccggggactctctcctgcccctcgtggccctctgtggaaccctcgttttaggatctgcacgccgtttccagtcgcgcgcgcggcacggagaccgcccgctgtgccccgcgctgcgctctctccgcccctctcccgcgcaggcctccctgtgccagccggctgtcgacccaggttaggaagcccgaggtcggggcgttaccccaagggccctcccgcttcccctccgagggcagagaggcgtccgcgcccggacgcactgcgggaacacctggagcgccggcggagctcggctgtccccgcgggagggagcccgacgcgcatccttgggacccggacccggcgcccgcgcctcgggacggatttctgcctcggctgcaggcgcagcgcgcagacctgagcctgccccgcggaaccggggctcgagtcccggcccgagcgcggcgtcggggccagcggagaggggcggaagccgcaagggaccctcggcgcctcggcctggccgcgatgaagtccccgcccctcctcagcccgtgtctctcctggaagagaatggcgggcatctttttcctgccatttatctcatcaggttttgctcctcggtttaagcaggaagagaacttcatgcttggaagagcgcatccgtcccagcctaggtttaattggtctcatctgacccctctggagctgaagaatcgatctgtgggacttggaactgaaagcacaggtcggggtaagccccacttcacactggagggccacaagttcctgatcttcgggggctccatccactatttccgggtgcccagggagtactggagggaccgcctgctgaagctgaaggcctgtggcttcaatactgtcaccacctatgttccgtggaacctgcatgagccagaaagaggcaaatttgacttctctgggaacctggacctggaggccttcgtcctgatggccgcagagatcgggctgtgggtgattctgcgtccaggccgctacatctgcagtgagatggacctcgggggcttgcccagctggctcctgcaagacccccggttactgttgaggacaaccaacaagagcttcattgaagcagttgagaagtattttgaccacctgattcccagagtgattcctctccagtaccgccaggcaggccctgtcatcgcggtgcaagtggagaatgagtatggctcattcaataaggataaaacatacatgccgtatctccacaaggccctgctgagaagagggattgtggagcttctcttgacctctgatggtgagaaacatgtgctgagtggccacaccaaaggagtgttggccgccatcaatttgcaaaaacttcaccaggatactttcaatcagcttcataaagtccagggagccagtatagatgcaggactgctctcagatgcctcacaagcagcaacttcttcctccttatagttcttatctgtgattcttccataattttgtccttctaagcttctgatgcactgaattatgtaaagtgcattcccttcaccagcttgtgcaccctattctgtaactgataataaatggttggtattgca

SEQ ID NO: 136288 - DNA, 2583 bp, Homo sapiens
  Payload ID: 6670
  Gene Symbol: GLB1L3
  Gene Name: galactosidase, beta 1-like 3
  Uniprot ID: Q8NCI6
  ENST ID: ENST00000431683
  CDS Start-End: 1-1962
atgaagtccccgcccctcctcagcccgtgtctctcctggaagagaatggcgggcatctttttcctgccatttatctcatcaggttttgctcctcggtttaagcaggaagagaacttcatgcttggaagagcgcatccgtcccagcctaggtttaattggtctcatctgacccctctggagctgaagaatcgatctgtgggacttggaactgaaagcacaggtcggggtaagccccacttcacactggagggccacaagttcctgatcttcgggggctccatccactatttccgggtgcccagggagtactggagggaccgcctgctgaagctgaaggcctgtggcttcaatactgtcaccacctatgttccgtggaacctgcatgagccagaaagaggcaaatttgacttctctgggaacctggacctggaggccttcgtcctgatggccgcagagatcgggctgtgggtgattctgcgtccaggccgctacatctgcagtgagatggacctcgggggcttgcccagctggctcctgcaagacccccggttactgttgaggacaaccaacaagagcttcattgaagcagttgagaagtattttgaccacctgattcccagagtgattcctctccagtaccgccaggcaggccctgtcatcgcggtgcaagtggagaatgagtatggctcattcaataaggataaaacatacatgccgtatctccacaaggccctgctgagaagagggattgtggagcttctcttgacctctgatggtgagaaacatgtgctgagtggccacaccaaaggagtgttggccgccatcaatttgcaaaaacttcaccaggatactttcaatcagcttcataaagtccagagagataagccccttctgattatggaatactgggtcggctggttcgacagatggggagataagcaccatgttaaagatgcaaaggaggttgaacatgctgtgtctgaattcatcaaatatgagatctccttcaatgtatatatgttccatggtggaaccaactttggtttcatgaacggggccacatatttcgggaagcactcgggcattgtcaccagctatgactatgatgcagtgctcacggaggctggagattacacagaaaaatatctgaagcttcaaaaactctttcaatctgtctcagcaactcccctgccccgagtacccaaacttcctcccaaggctgtgtatccccccgtgagaccgtcgctgtacctcccgctgtgggacgccctatcctacttaaatgagccagtcaggtcgcgtcagcccgtcaacatggagaaccttcccataaacaatgggagcggccagtcctacgggcttgtcctgtatgagaagtccatctgctccggaggccgcctccgtgcccacgctcatgacgtggcacaggtgtttttggatgagacaatgatagggattctgaatgagaataataaggacctgcacattcctgaactcagggactgccgatacctgaggatcctggtggagaatcaaggacgagtcaatttttcatggcaaatacagaatgagcagaaaggaataactggatctgtcagcatcaataactcttccctggagggctttaccatctattccctggagatgaaaatgagcttctttgagaggctccgctctgccacctggaagcctgtcccagacagccaccagggcccggccttctactgtgggaccttgaaggctggcccttctcccaaggacaccttcctgagcctgctgaactggaattatggatttgtgttcatcaatggacgtaaccttgggcgatattggaatattgggcctcagaaaacactgtaccttcctggagtttggcttcatccagaagacaatgaggtcatcttgtttgagaagatgatgagtggctcagatatcaaatctacagacaagcccacgctgtaaaactgtgtctgaacatttttttttttttttgagatggagtctcactttgtcgcccaggctggagtgcagtggcacaatctctgctcactgcaagctcagcctctcgggttcacgccattctcctgcctcagcctccccagcagctgggactacaggtgcacgccaccacgcctggctaattttttgtatttttagtagagatggggtttcaccaagttagccaggatggtcccaatctcctgaccttgtgatctgctctcctcagcctcccaaagtactgggattacaggcgtgagccaccactcccggccgtgaacatattttttgggttgctggagttcatctataagtcatttttgaggaataagatttatgttaagactatcaaacacagtgttgcctacaatagcaaaaatgtgaaaataacaacaacaacaaaacagcagaggaattgttatgtattttgtagtctatctatatgatgcctatttttaggctttaaaaagtcttcaaaatctttaatgactgatttatctagttaaatgcttaatccttagcaggctcttattctttaattaaacgtgcctttgagtagatgtgaataaaataaaaacaagtttc

SEQ ID NO: 136289 - DNA, 1279 bp, Homo sapiens
  Payload ID: 6670
  Gene Symbol: GLB1L3
  Gene Name: galactosidase, beta 1-like 3
  ENST ID: ENST00000455971
  CDS Start-End: 1-560
tgttaaagatgcaaagggttgaacatgctgtgtctgaattcatcaaatatgagatctccttcaatgtatatatgttccatggtggaaccaactttggtttcatgaacggggccacatatttcgggaagcactcgggcattgtcaccagctatgactatgatgcagtgctcacggaggctggagattacacagaaaaatatctgaagcttcaaaaactctttcaatctgtctcagcaactcccctgccccgagtacccaaacttcctcccaaggctgtgtatccccccgtgagaccgtcgctgtacctcccgctgtgggacgccctatcctacttaaatgagccagtcaggtcgcgtcagcccgtcaacatggagaaccttcccataaacaatgggagcggccagtcctacgggcttgtcctgtatgagaagtccatctgctccggaggccgcctccgtgcccacgctcatgacgtggcacaggtgtttttggatgagacaatgatagggattctgaatgagaataataaggacctgcacattcctgaactcagggaataactggatctgtcagcatcaataactcttccctggagggctttaccatctattccctggagatgaaaatgagcttctttgagaggctccgctctgccacctggaagcctgtcccagacagccaccagggcccggccttctactgtgggaccttgaaggctggcccttctcccaaggacaccttcctgagcctgctgaactggaattatggatttgtgttcatcaatggacgtaaccttgggcgatattggaatattgggcctcagaaaacactgtaccttcctggagtttggcttcatccagaagacaatgaggtcatcttgtttgagaagatgatgagtggctcagatatcaaatctacagacaagcccacgctgtaaaactgtgtctgaacatttttttttttttttgagatggagtctcactttgtcgcccaggctggagtgcagtggcacaatctctgctcactgcaagctcagcctctcgggttcacgccattctcctgcctcagcctccccagcagctgggactacaggtgcacgccaccacgcctggctaattttttgtatttttagtagagatggggtttcaccaagttagccaggatggtcccaatctcctgaccttgtgatctgctctcctcagcctcccaaagtactgggattacaggcgtgagccaccactcccggccgtgaacatattttttgggttgctggagttca

SEQ ID NO: 136290 - DNA, 3883 bp, Homo sapiens
  Payload ID: 6671
  Gene Symbol: GALC
  Gene Name: galactosylceramidase
  ENST ID: ENST00000261304
  CDS Start-End: 108-2165
actcaaaatggcggcggcggcgtcagcatcagcggcctcctgcccgtatctatcgtggcggcgacgggacccgcctccctgggcgccggagtcatgtgacccacacaatggctgagtggctactctcggcttcctggcaacgccgagcgaaagctatgactgcggccgcgggttcggcgggccgcgccgcggtgcccttgctgctgtgtgcgctgctggcgcccggcggcgcgtacgtgctcgacgactccgacgggctgggccgggagttcgacggcatcggcgcggtcagcggcggcggggcaacctcccgacttctagtaaattacccagagccctatcgttctcagatattggattatctctttaagccgaattttggtgcctctttgcatattttaaaagtggaaataggtggtgatgggcagacaacagacggcactgagccctcccacatgcattatgcactagatgagaattatttccgaggatacgagtggtggttgatgaaagaagctaagaagaggaatcccaatattacactcattgggttgccatggtcattccctggatggctgggaaaaggtttcgactggccttatgtcaatcttcagctgactgcctattatgtcgtgacctggattgtgggcgccaagcgttaccatgatttggacattgattatattggaatttggaatgagaggtcatataatgccaattatattaagatattaagaaaaatgctgaattatcaaggtctccagcgagtgaaaatcatagcaagtgataatctctgggagtccatctctgcatccatgctccttgatgccgaactcttcaaggtggttgatgttataggggctcattatcctggaacccattcagcaaaagatgcaaagttgactgggaagaagctttggtcttctgaagactttagcactttaaatagtgacatgggtgcaggctgctggggtcgcattttaaatcagaattatatcaatggctatatgacttccacaatcgcatggaatttagtggctagttactatgaacagttgccttatgggagatgcgggttgatgacggcccaggagccatggagtgggcactacgtggtagaatctcctgtctgggtatcagctcataccactcagtttactcaacctggctggtattacctgaagacagttggccatttagagaaaggaggaagctacgtagctctgactgatggcttagggaacctcaccatcatcattgaaaccatgagtcataaacattctaagtgcatacggccatttcttccttatttcaatgtgtcacaacaatttgccacctttgttcttaagggatcttttagtgaaataccagagctacaggtatggtataccaaacttggaaaaacatccgaaagatttctttttaagcagctggattctctatggctccttgacagcgatggcagtttcacactgagcctgcatgaagatgagctgttcacactcaccactctcaccactggtcgcaaaggcagctacccgcttcctccaaaatcccagcccttcccaagtacctataaggatgatttcaatgttgattacccattttttagtgaagctccaaactttgctgatcaaactggtgtatttgaatattttacaaatattgaagaccctggcgagcatcacttcacgctacgccaagttctcaaccagagacccattacatgggctgccgatgcatccaacacaatcagtattataggagactacaactggaccaatctgactataaagtgtgatgtatacatagagacccctgacacaggaggtgtgttcattgcaggaagagtaaataaaggtggtattttgattagaagtgccagaggaattttcttctggatttttgcaaatggatcttacagggttacaggtgatttagctggatggattatatatgctttaggacgtgttgaagttacagcaaaaaaatggtatacactcacgttaactattaagggtcatttcacctctggcatgctgaatgacaagtctctgtggacagacatccctgtgaattttccaaagaatggctgggctgcaattggaactcactcctttgaatttgcacagtttgacaactttcttgtggaagccacacgctaatacttaacagggcatcatagaatactctggattttcttcccttctttttggttttggttcagagccaattcttgtttcattggaacagtatatgaggcttttgagactaaaaataatgaagagtaaaaggggagagaaatttatttttaatttaccctgtggaagattttattagaattaattccaaggggaaaactggtgaatctttaacattacctggtgtgttccctaacattcaaactgtgcattggccatacccttaggagtggtttgagtagtacagacctcgaagccttgctgctaacactgaggtagctctcttcatcttatttgcaagcggtcctgtagatggcagtaacttgatcatcactgagatgtatttatgcatgctgaccgtgtgtccaagtgagccagtgtcttcatcacaagatgatgctgccataatagaaagctgaagaacactagaagtagctttttgaaaaccacttcaacctgttatgctttatgctctaaaaagtatttttttattttcctttttaagatgatacttttgaaatgcaggatatgatgagtgggatgattttaaaaatgcctctttaataaactacctctaacactatttctgcagtaatagatattagcagattaattgggttatttgcattatttaatttttttgattccaagttttggtcttgtaaccactataactctctgtgaacgtttttccaggtggctggaagaaggaagaaaacctgatatagccaatgctgttgtagtcgtttcctcagcctcatctcactgtgctgtggtctgtcctcacatgtgcactggtaacagactcacacagctgatgaatgcttttctctccttatgtgtggaaggaggggagcacttagacatttgctaactcccagaattggatcatctcctaagatgtacttactttttaaagtccaaatatgtttatatttaaatatacgtgagcgtgttcatcatgttgtatgatttatactaagcattaatgtggctctatgtagcaaatcagttattcatgtaggtaaagtaaatctagaattatttataagaattactcattgaactaattctactatttaggaatttgtaagagtctaacataggcttagctacagtgaagttttgcattgcttttgaagacaagaagataagtgctagaataaataagattacagagaaaattttttgttaaaaccaagtgatttccagctgatgtatctaatattttttaaaacgaacattatagaggtgtaatttatttacaataaaatgttcctactttaaatatacaattcagtgagttttgataaattgatatacccatgtaaccaacactccagtcaagcttcagaatatttccatcaccccagaaggttctcttgtatacctgctcagtcagttcctttcactcccaattgttggcagccattgataggaattctatcactataggttagttttctttgttccagaacatcatgaaagcggcgtcatgtactgtgtattcttatgaatggtttctttccatcagcataatgatttgagatttgtccatgttgtgtgattcagtggtttgttccttcttatttctgaagagttttccattgtatgaatataccacaatttgtttcctccccaccagtttctgatactacaattaaaactgtctacatttacaa

SEQ ID NO: 136291 - DNA, 2054 bp, Homo sapiens
  Payload ID: 6671
  Gene Symbol: GALC
  Gene Name: galactosylceramidase
  ENST ID: ENST00000393568
  CDS Start-End: 15-2003
atgtgacccacacaatggctgagtggctactctcggcttcctggcaacgccgagcgaaagctatgactgcggccgcgggttcggcgggccgcgccgcggtgcccttgctgctgtgtgcgctgctggcgcccggcggcgcgtacgtgctcgacgactccgacgggctgggccgggagttcgacggcatcggcgcggtcagcggcggcgggccgaattttggtgcctctttgcatattttaaaagtggaaataggtggtgatgggcagacaacagacggcactgagccctcccacatgcattatgcactagatgagaattatttccgaggatacgagtggtggttgatgaaagaagctaagaagaggaatcccaatattacactcattgggttgccatggtcattccctggatggctgggaaaaggtttcgactggccttatgtcaatcttcagctgactgcctattatgtcgtgacctggattgtgggcgccaagcgttaccatgatttggacattgattatattggaatttggaatgagaggtcatataatgccaattatattaagatattaagaaaaatgctgaattatcaaggtctccagcgagtgaaaatcatagcaagtgataatctctgggagtccatctctgcatccatgctccttgatgccgaactcttcaaggtggttgatgttataggggctcattatcctggaacccattcagcaaaagatgcaaagttgactgggaagaagctttggtcttctgaagactttagcactttaaatagtgacatgggtgcaggctgctggggtcgcattttaaatcagaattatatcaatggctatatgacttccacaatcgcatggaatttagtggctagttactatgaacagttgccttatgggagatgcgggttgatgacggcccaggagccatggagtgggcactacgtggtagaatctcctgtctgggtatcagctcataccactcagtttactcaacctggctggtattacctgaagacagttggccatttagagaaaggaggaagctacgtagctctgactgatggcttagggaacctcaccatcatcattgaaaccatgagtcataaacattctaagtgcatacggccatttcttccttatttcaatgtgtcacaacaatttgccacctttgttcttaagggatcttttagtgaaataccagagctacaggtatggtataccaaacttggaaaaacatccgaaagatttctttttaagcagctggattctctatggctccttgacagcgatggcagtttcacactgagcctgcatgaagatgagctgttcacactcaccactctcaccactggtcgcaaaggcagctacccgcttcctccaaaatcccagcccttcccaagtacctataaggatgatttcaatgttgattacccattttttagtgaagctccaaactttgctgatcaaactggtgtatttgaatattttacaaatattgaagaccctggcgagcatcacttcacgctacgccaagttctcaaccagagacccattacatgggctgccgatgcatccaacacaatcagtattataggagactacaactggaccaatctgactataaagtgtgatgtatacatagagacccctgacacaggaggtgtgttcattgcaggaagagtaaataaaggtggtattttgattagaagtgccagaggaattttcttctggatttttgcaaatggatcttacagggttacaggtgatttagctggatggattatatatgctttaggacgtgttgaagttacagcaaaaaaatggtatacactcacgttaactattaagggtcatttcacctctggcatgctgaatgacaagtctctgtggacagacatccctgtgaattttccaaagaatggctgggctgcaattggaactcactcctttgaatttgcacagtttgacaactttcttgtggaagccacacgctaatacttaacagggcatcatagaatactctggattttcttcccttctttttgg

SEQ ID NO: 136292 - DNA, 2547 bp, Homo sapiens
  Payload ID: 6671
  Gene Symbol: GALC
  Gene Name: galactosylceramidase
  ENST ID: ENST00000393569
  CDS Start-End: 167-2146
gtgcttattaacttttctctcagtccctcactctgctgctcttctcgcctcatctcacataagggaaaactcaggctccaaaagcaaagtgattccaccaagatgacaatggaatcgggacctggtgtccaagcctggtcctcgcacgaggtagatactccctgagatgctggggaagagccatggtagggccactcatggccctcttcctttggcggaccttggaatccaccttccctgcgttaaagtgctccaccaggtgacgccggaagagaagccagcagcaacctcccgacttctagtaaattacccagagccctatcgttctcagatattggattatctctttaagccgaattttggtgcctctttgcatattttaaaagtggaaataggtggtgatgggcagacaacagacggcactgagccctcccacatgcattatgcactagatgagaattatttccgaggatacgagtggtggttgatgaaagaagctaagaagaggaatcccaatattacactcattgggttgccatggtcattccctggatggctgggaaaaggtttcgactggccttatgtcaatcttcagctgactgcctattatgtcgtgacctggattgtgggcgccaagcgttaccatgatttggacattgattatattggaatttggaatgagaggtcatataatgccaattatattaagatattaagaaaaatgctgaattatcaaggtctccagcgagtgaaaatcatagcaagtgataatctctgggagtccatctctgcatccatgctccttgatgccgaactcttcaaggtggttgatgttataggggctcattatcctggaacccattcagcaaaagatgcaaagttgactgggaagaagctttggtcttctgaagactttagcactttaaatagtgacatgggtgcaggctgctggggtcgcattttaaatcagaattatatcaatggctatatgacttccacaatcgcatggaatttagtggctagttactatgaacagttgccttatgggagatgcgggttgatgacggcccaggagccatggagtgggcactacgtggtagaatctcctgtctgggtatcagctcataccactcagtttactcaacctggctggtattacctgaagacagttggccatttagagaaaggaggaagctacgtagctctgactgatggcttagggaacctcaccatcatcattgaaaccatgagtcataaacattctaagtgcatacggccatttcttccttatttcaatgtgtcacaacaatttgccacctttgttcttaagggatcttttagtgaaataccagagctacaggtatggtataccaaacttggaaaaacatccgaaagatttctttttaagcagctggattctctatggctccttgacagcgatggcagtttcacactgagcctgcatgaagatgagctgttcacactcaccactctcaccactggtcgcaaaggcagctacccgcttcctccaaaatcccagcccttcccaagtacctataaggatgatttcaatgttgattacccattttttagtgaagctccaaactttgctgatcaaactggtgtatttgaatattttacaaatattgaagaccctggcgagcatcacttcacgctacgccaagttctcaaccagagacccattacatgggctgccgatgcatccaacacaatcagtattataggagactacaactggaccaatctgactataaagtgtgatgtatacatagagacccctgacacaggaggtgtgttcattgcaggaagagtaaataaaggtggtattttgattagaagtgccagaggaattttcttctggatttttgcaaatggatcttacagggttacaggtgatttagctggatggattatatatgctttaggacgtgttgaagttacagcaaaaaaatggtatacactcacgttaactattaagggtcatttcacctctggcatgctgaatgacaagtctctgtggacagacatccctgtgaattttccaaagaatggctgggctgcaattggaactcactcctttgaatttgcacagtttgacaactttcttgtggaagccacacgctaatacttaacagggcatcatagaatactctggattttcttcccttctttttggttttggttcagagccaattcttgtttcattggaacagtatatgaggcttttgagactaaaaataatgaagagtaaaaggggagagaaatttatttttaatttaccctgtggaagattttattagaattaattccaaggggaaaactggtgaatctttaacattacctggtgtgttccctaacattcaaactgtgcattggccatacccttaggagtggtttgagtagtacagacctcgaagccttgctgctaacactgaggtagctctcttcatcttatttgcaagcggtcctgtagatggcagtaacttgatcatcactgagatgtatttatgcatgctgaccgtgtgt

SEQ ID NO: 136293 - DNA, 2528 bp, Homo sapiens
  Payload ID: 6671
  Gene Symbol: GALC
  Gene Name: galactosylceramidase
  Uniprot ID: P54803
  ENST ID: ENST00000544807
  CDS Start-End: 509-2278
agtcagcaggcggttggggcgggcccgctgcggggctggggcgggtgctttctcgtttaacacgaaccagacaggcagttaggtttgaacaaatgaggatccggaggtccagagagtataggtgcagagagtaaagtgacaggtctaagtagtgaagtagccggggctggaaccctcgtcccaggcagtggggcacaggctgtcttcatcgcggagatggcagtcggggagcgtcgctccagaaagggccagggagtgcgggagcgtccgtgtgcgaaagagaacgccccagtgggatgctttggctgtgtctctcccttttggaggagttggtgggtggtggagtcgttaagtcccgtgcagttgttagtgcagggtaagaatgggctcctccagagagggtagcgccgaataggatttcgtttggaggcaggactggtgcctcaaggtctctttaaaaggaagataagcgagcggcctgaaactaccgggtactccctctgggcccatgggcttcatggtggccgacctttgggcaacctcccgacttctagtaaattacccagagccctatcgttctcagatattggattatctctttaagccgaattttggtgcctctttgcatattttaaaagtggaaataggtggtgatgggcagacaacagacggcactgagccctcccacatgcattatgcactagatgagaattatttccgaggatacgagtggtggttgatgaaagaagctaagaagaggaatcccaatattacactcattgggttgccatggtcattccctggatggctgggaaaaggtttcgactggccttatgtcaatcttcagctgactgcctattatgtcgtgacctggattgtgggcgccaagcgttaccatgatttggacattgattatattggaatttggaatgagaggtcatataatgccaattatattaagatattaagaaaaatgctgaattatcaaggtctccagcgagtgaaaatcatagcaagtgataatctctgggagtccatctctgcatccatgctccttgatgccgaactcttcaaggtggttgatgttataggggctcattatcctggaacccattcagcaaaagatgcaaagttgactgggaagaagctttggtcttctgaagactttagcactttaaatagtgacatgggtgcaggctgctggggtcgcattttaaatcagaattatatcaatggctatatgacttccacaatcgcatggaatttagtggctagttactatgaacagttgccttatgggagatgcgggttgatgacggcccaggagccatggagtgggcactacgtggtagaatctcctgtctgggtatcagctcataccactcagtttactcaacctggctggtattacctgaagacagttggccatttagagaaaggaggaagctacgtagctctgactgatggcttagggaacctcaccatcatcattgaaaccatgagtcataaacattctaagtgcatacggccatttcttccttatttcaatgtgtcacaacaatttgccacctttgttcttaagggatcttttagtgaaataccagagctacaggtatggtataccaaacttggaaaaacatccgaaagatttctttttaagcagctggattctctatggctccttgacagcgatggcagtttcacactgagcctgcatgaagatgagctgttcacactcaccactctcaccactggtcgcaaaggcagctacccgcttcctccaaaatcccagcccttcccaagtacctataaggatgatttcaatgttgattacccattttttagtgaagctccaaactttgctgatcaaactggtgtatttgaatattttacaaatattgaagaccctggcgagcatcacttcacgctacgccaagttctcaaccagagacccattacatgggctgccgatgcatccaacacaatcagtattataggagactacaactggaccaatctgactataaagtgtgatgtatacatagagacccctgacacaggaggtgtgttcattgcaggaagagtaaataaaggtggtattttgattagaagtgccagaggaattttcttctggatttttgcaaatggatcttacagggttacaggtgatttagctggatggattatatatgctttaggacgtgttgaagttacagcaaaaaaatggtatacactcacgttaactattaaggtggctggaagaaggaagaaaacctgatatagccaatgctgttgtagtcgtttcctcagcctcatctcactgtgctgtggtctgtcctcacatgtgcactggtaacagactcacacagctgatgaatgcttttctctccttatgtgtggaaggaggggagcacttagacatttgctaactcccagaattggatcatctcctaagatgtacttactttttaaagtccaaatatgtttatatttaaatatacgtgagcgtgttcatcatgttgtatgat

SEQ ID NO: 136294 - DNA, 2067 bp, Homo sapiens
  Payload ID: 6671
  Gene Symbol: GALC
  Gene Name: galactosylceramidase
  ENST ID: ENST00000555000
  CDS Start-End: 157-1461
gagatgacacctctccctgggttgattagggaagtcttttagaggaggtgatgtgtaatttgaatcttcaagaacggatggataggaactctccactttgctaaggcaggggcatatcatgtgcaaagaactgaagattgagagatattaagaaaaatgctgaattatcaaggtctccagcgagtgaaaatcatagcaagtgataatctctgggagtccatctctgcatccatgctccttgatgccgaactcttcaaggtggttgatgttataggggctcattatcctggaacccattcagcaaaagatgcaaagttgactgggaagaagctttggtcttctgaagactttagcactttaaatagtgacatgggtgcaggctgctggggtcgcattttaaatcagaattatatcaatggctatatgacttccacaatcgcatggaatttagtggctagttactatgaacagttgccttatgggagatgcgggttgatgacggcccaggagccatggagtgggcactacgtggtagaatctcctgtctgggtatcagctcataccactcagtttactcaacctggctggtattacctgaagacagttggccatttagagaaaggaggaagctacgtagctctgactgatggcttagggaacctcaccatcatcattgaaaccatgagtcataaacattctaagtgcatacggccatttcttccttatttcaatgtgtcacaacaatttgccacctttgttcttaagggatcttttagtgaaataccagagctacaggtatggtataccaaacttggaaaaacatccgaaagatttctttttaagcagctggattctctatggctccttgacagcgatggcagtttcacactgagcctgcatgaagatgagctgttcacactcaccactctcaccactggtcgcaaaggcagctacccgcttcctccaaaatcccagcccttcccaagtacctataaggatgatttcaatgttgattacccattttttagtgaagctccaaactttgctgatcaaactggtgtatttgaatattttacaaatattgaagaccctggcgagcatcacttcacgctacgccaagttctcaaccagagacccattacatgggctgccgatgcatccaacacaatcagtattataggagactacaactggaccaatctgactataaagtgtgatgtatacatagagacccctgacacaggaggtgtgttcattgcaggaagagtaaataaaggtggtattttgattagaagtgccagaggaattttcttctggatttttgcaaatggatcttacagggttacaggtgatttagctggatggattatatatgctttaggacgtgttgaagttacagcaaaaaaatggtatacactcacgttaactattaaggtggctggaagaaggaagaaaacctgatatagccaatgctgttgtagtcgtttcctcagcctcatctcactgtgctgtggtctgtcctcacatgtgcactgagtctcgctctgtcacccaggctggaatgcattggctccatctcagctcactgcaacctccgcttcccgggttcaagtgattctcctgcctcagcctcctgagtagctgggattacagttctggcggctagaagttcaagatcaagatgttggcaggactggttcttccaggcttctctcctttgcttatagatgaccactgtcttcttgcatccccacatcatcttcaattctgtatatgtctatgccctaattttctcttcttataaggataccagtcacactggattagggcccaccccagtgacctattttaacttaattatacctctttaaagaccctagctccacatatagtcacattctgaggtactgagggttgacttcaacataggaatttaaaggtaggggtagggacacaattcagctcgtagctaagacactttgcatggagtccggagtctttcaaaatcaggccttgatagttcaaaagtaaatgctggaaatgacctacataggaaaaaaaaaagat

SEQ ID NO: 136295 - DNA, 554 bp, Homo sapiens
  Payload ID: 6671
  Gene Symbol: GALC
  Gene Name: galactosylceramidase
  ENST ID: ENST00000555179
  CDS Start-End: 1-217
caaacttggaaaaacatccgaaagatttctttttaagcagctggattctctatggctccttgacagcgatggcagtttcacactgagcctgcatgaagatgagctgttcacactcaccactctcaccactggtcgcaaaggcagctacccgcttcctccaaaatcccagcccttcccaagtacctataaggatgatttcaatgttggaccaatctgactataaagtgtgatgtatacatagagacccctgacacaggaggtgtgttcattgcaggaagagtaaataaaggtggtattttgattagaagtgccagaggaattttcttctggatttttgcaaatggatcttacagggttacaggtgatttagctggatggattatatatgctttaggacgtgttgaagttacagcaaaaaaatggtatacactcacgttaactattaagggtcatttcacctctggcatgctgaatgacaagtctctgtggacagacatccctgtgaattttccaaagaatggctgggctgcaattggaactcactcctttgaatt

SEQ ID NO: 136296 - DNA, 717 bp, Homo sapiens
  Payload ID: 6671
  Gene Symbol: GALC
  Gene Name: galactosylceramidase
  ENST ID: ENST00000554372
  CDS Start-End: 9-347
cccacacaatggctgagtggctactctcggcttcctggcaacgccgagcgaaagctatgactgcggccgcgggttcggcgggccgcgccgcggtgcccttgctgctgtgtgcgctgctggcgcccggcggcgcgtacgtgctcgacgactccgacgggctgggccgggagttcgacggcatcggcgcggtcagcggcggcggggcaacctcccgacttctagtaaattacccagagccctatcgttctcagatattggattatctctttaagccgaattttggtgcctctttgcatattttaaaagtggaaataggtggtgatgggcagacaacagacatattataggctaaaggtgtgggttctgagaacagggctcacgagtccagggattcatatccagcgttgaaaagctgaaagttgagacggcactgagccctcccacatgcattatgcactagatgagaattatttccgaggatacgagtggtggttgatgaaagaagctaagaagaggaatcccaatattacactcattgggttgccatggtcattccctggatggctgggaaaaggtttcgactggccttatgtcaatcttcagctgactgcctattatgtcgtgacctggattgtgggcgccaagcgttaccatgatttggacattgattatattggaatttggaatgagaggtcatataatgccaattatattaag

SEQ ID NO: 136297 - DNA, 595 bp, Homo sapiens
  Payload ID: 6671
  Gene Symbol: GALC
  Gene Name: galactosylceramidase
  ENST ID: ENST00000556879
  CDS Start-End: 1-189
aaagctatgactgcggccgcgggttcggcgggccgcgccgcggtgcccttgctgctgtgtgcgctgctggcgcccggcggcgcgtacgtgctcgacgactccgacgggctgggccgggagttcgacggcatcggcgcggtcagcggcggcggggactggtgcctcaaggtctctttaaaaggaagataagcgagcggcctgaaactaccgggtactccctctgggcccatgggcttcatggtggccgacctttgggcaacctcccgacttctagtaaattacccagagccctatcgttctcagatattggattatctctttaagccgaattttggtgcctctttgcatattttaaaagtggaaataggtggtgatgggcagacaacagacggcactgagccctcccacatgcattatgcactagatgagaattatttccgaggatacgagtggtggttgatgaaagaagctaagaagaggaatcccaatattacactcattgggttgccatggtcattccctggatggctgggaaaaggtttcgactggccttatgtcaatcttcagctgactgcctattatgtcgtgacctgga

SEQ ID NO: 136298 - DNA, 1874 bp, Homo sapiens
  Payload ID: 6671
  Gene Symbol: GALC
  Gene Name: galactosylceramidase
  ENST ID: ENST00000557316
  CDS Start-End: 7-642
cacacaatggctgagtggctactctcggcttcctggcaacgccgagcgaaagctatgactgcggccgcgggttcggcgggccgcgccgcggtgcccttgctgctgtgtgcgctgctggcgcccggcggcgcgtacgtgctcgacgactccgacgggctgggccgggagttcgacggcatcggcgcggtcagcggcggcggggcaacctcccgacttctagtaaattacccagagccctatcgttctcagatattggattatctctttaagccgaattttggtgcctctttgcatattttaaaagtggaaataggtggtgatgggcagacaacagacggcactgagccctcccacatgcattatgcactagatgagaattatttccgaggatacgagtggtggttgatgaaagaagctaagaagaggaatcccaatattacactcattgggttgccatggtcattccctggatggctgggaaaaggtttcgactggccttatgtcaatcttcagctgactgcctattatgtcgtgacctggattgtgggcgccaagcgttaccatgatttggacattgattatattggaatttggaatgagaggtcatataatgccaattatattaaggtttttggagaataggtggtatttggttacatgaatattaagaaaaatgctgaattatcaaggtctccagcgagtgaaaatcatagcaagtgataatctctgggagtccatctctgcatccatgctccttgatgccgaactcttcaaggtggttgatgttataggggctcattatcctggaacccattcagcaaaagatgcaaagttgactgggaagaagctttggtcttctgaagactttagcactttaaatagtgacatgggtgcaggctgctggggtcgcattttaaatcagaattatatcaatggctatatgacttccacaatcgcatggaatttagtggctagttactatgaacagttgccttatgggagatgcgggttgatgacggcccaggagccatggagtgggcactacgtggtagaatctcctgtctgggtatcagctcataccactcagtttactcaacctggctggtattacctgaagacagttggccatttagagaaaggaggaagctacgtagctctgactgatggcttagggaacctcaccatcatcattgaaaccatgagtcataaacattctaagtgcatacggccatttcttccttatttcaatgtgtcacaacaatttgccacctttgttcttaagggatcttttagtgaaataccagagctacaggtatggtataccaaacttggaaaaacatccgaaagatttctttttaagcagctggattctctatggctccttgacagcgatggcagtttcacactgagcctgcatgaagatgagctgttcacactcaccactctcaccactggtcgcaaaggcagctacccgcttcctccaaaatcccagcccttcccaagtacctataaggatgatttcaatgttgattacccattttttagtgaagctccaaactttgctgatcaaactggtgtatttgaatattttacaaatattgaagaccctggcgagcatcacttcacgctacgccaagttctcaaccagagacccattacatgggctgccgatgcatccaacacaatcagtattataggagactacaactggaccaatctgactataaagtgtgatgtatacatagagacccctgacacaggaggtgtgttcattgcaggaagagtaaataaaggtggtattttgattagaagtgccagaggaattttcttctggatttttgcaaatggatcttacagggttacaggtgatttag

SEQ ID NO: 136299 - DNA, 1221 bp, Homo sapiens
  Payload ID: 6671
  Gene Symbol: GALC
  Gene Name: galactosylceramidase
  ENST ID: ENST00000622264
  CDS Start-End: 1-1214
ggctactctcggcttcctggcaacgccgagcgaaagctatgactgcggccgcgggttcggcgggccgcgccgcggtgcccttgctgctgtgtgcgctgctggcgcccggcggcgcgtacgtgctcgacgactccgacgggctgggccgggagttcgacggcatcggcgcggtcagcggcggcggggcaacctcccgacttctagtaaattacccagagccctatcgttctcagatattggattatctctttaagccgaattttggtgcctctttgcatattttaaaagtggaaataggtggtgatgggcagacaacagacggcactgagccctcccacatgcattatgcactagatgagaattatttccgaggatacgagtggtggttgatgaaagaagctaagaagaggaatcccaatattacactcattgggttgccatggtcattccctggatggctgggaaaaggtttcgactggccttatgtcaatcttcagctgactgcctattatgtcgtgacctggattgtgggcgccaagcgttaccatgatttggacattgattatattggaatttggaatgagaggtcatataatgccaattatattaagatattaagaaaaatgctgaattatcaaggtctccagcgagtgaaaatcatagcaagtgataatctctgggagtccatctctgcatccatgctccttgatgccgaactcttcaaggtggttgatgttataggggctcattatcctggaacccattcagcaaaagatgcaaagttgactgggaagaagctttggtcttctgaagactttagcactttaaatagtgacatgggtgcaggctgctggggtcgcattttaaatcagaattatatcaatggctatatgacttccacaatcgcatggaatttagtggctagttactatgaacagttgccttatgggagatgcgggttgatgacggcccaggagccatggagtgggcactacgtggtagaatctcctgtctgggtatcagctcataccactcagtttactcaacctggctggtattacctgaagacagttggccatttagagaaaggaggaagctacgtagctctgactgatggcttagggaacctcaccatcatcattgaaaccatggtaaacttttgttgttgctattggattaactcacttctttactattggaaaaataaaatataaaactgaa

SEQ ID NO: 136300 - DNA, 10044 bp, Homo sapiens
  Payload ID: 6672
  Gene Symbol: GALR1
  Gene Name: galanin receptor 1
  Uniprot ID: P47211
  ENST ID: ENST00000299727
  CDS Start-End: 1-1050
atggagctggcggtcgggaacctcagcgagggcaacgcgagctggccggagccccccgccccggagcccgggccgctgttcggcatcggcgtggagaacttcgtcacgctggtggtgttcggcctgatcttcgcgctgggtgtgctgggcaacagcctagtgatcaccgtgctggcgcgcagcaagccgggcaagccgcggagcaccaccaacctgttcatcctcaacctgagcatcgccgacctggcctacctgctcttctgcatccccttccaggccaccgtgtacgcgctgcccacctgggtgctgggcgccttcatctgcaagttcatccactacttcttcaccgtgtccatgctggtgagcatcttcaccctggccgcgatgtccgtggaccgctacgtggccatcgtgcactcgcggcgctcctcctccctcagggtgtcccgcaacgcgctgctgggcgtgggctgcatctgggcgctgtccattgccatggcctcgcccgtggcctaccaccagggcctcttccacccgcgcgccagcaaccagaccttctgctgggagcagtggcccgaccctcgccacaagaaggcctacgtggtgtgcaccttcgtcttcggctacctgctgccgctcctgctcatctgcttctgctatgccaaggtccttaatcacttgcataaaaagttgaagaacatgtcaaagaagtctgaagcatccaagaaaaagactgcacagacagttctggtggtggttgtggtgtttggaatctcctggctgccgcaccacatcatccatctctgggctgagtttggagttttcccgctgacgccggcttccttcctcttcagaatcaccgcccactgcctggcgtacagcaattcctccgtgaatcctatcatttatgcatttctctctgaaaatttcaggaaggcctataaacaagtgttcaagtgtcacattcgcaaagattcacacctgagtgatactaaagaaagtaaaagtcgaatagacaccccaccatcaaccaattgtactcatgtgtgataaaagatagagtatccttatggttgagtttccatataagtggaccagacacagaaacaaacagaatgagctagtaagcgatgctgcaacttgttatcttaacaagaattcaagtcgttttaattaaatcccacgtgtgttaaaaagtactttgatccatttaggaaattcctaggtctagtgagaattatttttcaattttattttagttctaaattatgtttcagaaacaaaagacaatgctgtacagttttattcctcttcagacatgaaagggaacatatatattccatatatatgttcaactcttcatagattgtgaactggcccatcaatatggtcaggaatatttgcagtctacattttaaagccaatttatttagaaaaaaaaatttgagctttaattctttaattttaagagaagtaatattgtgaactatgtattttaaaatatgatcatggacacacaatgatgaattttttggccatttacatagacatatctattaagtggaaagaaggctttctgaagtctgtttgcacaggtggcatttgcttccaattgtagctagcgcacagagctttggaagcctgtcattatgagatacagtcggtttacctcaggagtcaattcagtgttgtactggtgacctgggatgcagtagtaggcactgttgattcaaatttatcctgtgaaactggctttatagagttaacaaaacagagtcagagaccactgtcttaacagtggaagatgcaaataagtttttgagaataaaactggattttgaaattttacattagtacttgacaaaagttttcattttgccttgaatggaacctactaaaaagagagatgaaaaaaaatcagcgaggttgatgtagataataatttctatgggaccaaagactagacagaattcagtaagtcacatgaagtaatggtcatgcctgtacataaagcatatttcatgtttgatttagatgacattcaaaaaaaatcatgggactgaatatacctggggtatcctatcttgtacaaatgcatgctttttcattaaatttgtaatgatgtttaatgaacatttccaccaaacattatttcctctaaaaatgttaatttggggttaaaaccatcaccatttgaatttcaaatgtagttttcatgacaattttatattgatgtgtgtttacaatgagaaaatggcatgaaaatattaaattgtcttgtatcggaaaagtacttttcagactgtaagactttgatatgttttaggaggcaacaaaagcaagaagttttttttttgtttgtttgttaaaaaggatttggccaagcacagtggctcatgcctgtaattccagcactttgggaggtccagctgtgtggaatgtacttgagctcaggagtttgagaccagtgtgggcaacatggcaaaactcggtctctactaaaaatacaaaaattagctgggtgtggtggcgcacgcctgtagtttcagctactctggaggctgatgtgggggatcacctgagcccgggaggtccaggatgcagtcagtcaagactgcaccactgcacttcagcctggatgacagagtaagactctgtctaaaatatatatatatatgtgtgtgtgtgtgtgtgtgtgtgtgtgtgtgtgtaatgtacctctgtgccaaatcagcactccacatgaaacatcaaattttagataaaaatgcaaacttgacataagcctttggcatgctaatttttttagctcattcacttactttcactaatcatatttcagtgactagtgtttacatttgcaatgttattaataactctctggataaaaggaaagaaaaacgttagaaagattttgaagtgatgtattatgtttgttgactagaagaagaaattgtgtttatgtgtaagtgagggtcttaaagaatatgtcctttgcatcgaatgttttttgcactttattcaaatatataggagcagaaaaattttatcctgacgatgatacttcctgtgatttgtggaacttgaagttgctgttgcaaactccagaacaacttctttgggtgtgaactcacaaaactgtgtaaagaagtgccttcttgttgtgtttgagtttgcatgaatggaaatgatttcttgcaccatggctatttctttgttttctccttctgatctgtaagcatataaatggaagtatttaaaaaaatactgtagctaatgttgctattttctagaggcatgccgaaaatgtgctgtgcctttggtccttcccagatgctactggcacgtctgaagcttgaggcatggtacaaaaagtaatagcttgcgcttgaaacccccccccccccgccactttgctaaatgtaaatgctaattgttgcattttacagttagataggatatacttcctgcatattgtcattctaatcaattcctcttactcagagttttggctgagtctacttctaaaacaaattttgatagggataatgacatcttctgcaaagatctaaacctctacaaaattttctgaataaagagtttcagaagaactcgtaaacagaatgaaattaaccagagaagtataggagtgtgttgcgtttgccaagcatctgcttcccagctagatttccccctaatatacaatgaccaattctgaagcaccttcttttccgtcactaaataaagacagcttcccaaggacacactttttctcccagcatcaggttgagggagaaatattgcttatacctttgaagtcaggctgcttgaaactcacattttcagtttacttcaaagaaaactgatgctttctaagcagatttggctgtctcagtgcccaaggcagctgttattttcctaggctttttgctttcacgtaaggagacaggctttgggatatttagtagctgaaatgcttgctgtttcacatgcataagcaaccatttcagtgtcctgctgatgaatacagtgatgtggatggaaacgttttcttgtcctatatcctggggataggaaacagattctctgtgctcttctgaccgggtatgtactcagcaacatgggggactgaggccattttctgaatactttaggtaaattacttttgcttttaactaaattgttttattttacacattgggagtaaaaccatttccgccccatcccaatctcttgtgcttttatcttttttatcctaactcacttctatccagatttcctctcgataatatttaccacagataaattcatctttcagcgcagatataacaaatcagagtggggaggagagatgcttaaggaactgcatgagtcatgcaaggctcagaacttcttgtggctcaactcgaaatcatattgcattcctgcattctcccagatgctttgaggcagtgcagcgatcattctaatatgttaactgagacccaagatctcagcaggagaggacagcttatccaagcatccctttccttttcagtcatggccatggctatctgtaaacaccaaaatgctcatgctgaagcagcattacattgaggaaaataacctattgggcagcttcatcatgttcttgctttaaatgatttatcaaatacatgtatgtaaactacatagtcactaactgcgaaaatacatcaatgtggctacttcctctggaaagttactgtctaaaatttgtaaattttaatcttcactgttgcacatattttccatgtcttaaatttgtaagtgggtttctatgaaaggtaatcgtattcttcttgaccattaaaaatgttgcatgtaaggctatttctcaagtagatgttaatgacttgtttaattattgacttacttattttaaaagctgtatgtagtaagaacaagtaggtggtttaaaattcagatagttacatgttggcctggaaagaacaaaattatgaaatggtaattatatctgattttatttaaccatattttaatattttctcttttagaagtggaaaagttgagcctgaggaagaatttaaaatgcttaagacatctttgatgggggctgtatttgcattaggcagaggtgtctaaggagagtgtatcgtgtattgtgatgcattagcaggatgttttgttcatcgacttgtgaaagtgctgtggataatagatggtggtttcttttcttagtgtggcaggttcactcacattcatgtttttgactttagctgccatcctggggttctgagggtagcatgtctgtttgactgggcaagaccctcacataccttggcaggccctggctttcgtttctctgtggtgcctggtgctactcacagggctgactcacgggcagatgctccccatccttccccataggccctgttcccgcatccgatgattctcaggttttgttctaggtgcagaaatagtgggagaggccataatcgtgaatgatgaataagaagggaaggtggggccgggcatgtgacttatgcctgtaatcccagcactttgggaggccgaggcaggtggatcacctgaggtcgggagttcgagaccagcctgaccaacatggagaaaacccgtctctactaaaaatacaaaaattagctgggggcacacatgtgtgatcccagctactcaggaggttgaggcaggagaattgcttgaacccgggaggtggaggttgcaatgagcctagattgcaccattgcactccagcctgggcaacaagagtgaaactctgtctcaaaaaaataaaaattaaaaaaaaaaaagaaggtggccagtgagggttttatctttgtattcactggaaataacctcagctgaattttctctctgaatcttttcaatgttggctccatttgccatactcagacaattgcttgaagagctgaactgttagctcaagatttcgttggcactgttggatagaaagcctctccttttctgctggagaagagatttctcaggccaagttgtgtagctccaaattctccgcaattagagaaggcacagtaaagaaaagatcccttgctgatggaatggactggaactgagctccactgtttaaatttttgactctcaggtagtggtgatcgttatggtaacccatgaactcggatgaatttcggggcctgctgtgggttttctatgggacaccatataccacagtactgtatttcaaaatattggatattgattatgaacactggaactatttatgtgtcatcattccaaagaccattgtgatctatgaagctcctttatttgctggctagattgtccaaaaacaagctcacttgtttttgggcaatctagccaaggtgtcacataatggagaaaaatgcagatggtcctgtggctggtgtgaatgaagaatgacctgggcccaacatagaacttttccagtatggtgagcatcaaagtaggcagacatccaaaagccaagtgaagggcagatagatccccaggtgccacccaggctctgcaggcaaagctctcagggccccatttgtgtttgtgtggcctgcactgtgtaagtgtcgttcccctaggacttctgcaatgggataccaaagatgacgtgtaaggccttcagtatataatggacttgtgccaagtacctaagggttcactgccttgtttgaggaatcgcagagcatcatttctgattggttcttagagcctgcatcttgtaccactgggacttctggagacctctggggaccgttgactatgctgggagggtgcagaaatgaagctgatggcagaagcaggctcccagctcctcttcttctgctcagccaggtgattcttacctccattggcctttggatgtctgcgtaataatttgttgagaatcattagagaacaactaatccaaaaaatctatcatcctttatttgtgttgactttctgattatgccttcattcactctttttattacttatacacatgtctgtttttattcttccctactcttttcttaaagttggtcatatttctacacttgagatcttccagtttctgtgaatgttgaggggttcacaaagtggcttggcctcagacctctatatccttgttgttctgtttggacttaggacttttttcctggctatcctgccaatacttttccatctaacagaaacgcaagcttcaagagcaagttatttttataacagatcatgtgagcaattcctccatagcattggttgtagaacaggtcagttggcatgtggcctcctgagggccttgcatggggttctggacccagcgggggccacatctctgagaattcgttccctgtgggtgtctggggtgcatcgttacttctgagatgttatgactcagcagatgagatttgtccgtctgctcagtgagaggaattccaatgctgggtcttgactcccgctgcagggagctctctgggcccgggcatgttggatggagttgtgatgggtgtgcctccctcggacttactctggccaggaactgcatctgctcctctaaggagatttgagcaggtgaatggagtttctgtcattcctggtctagagttcatgtgtgaaggtcaaatataggtggggacttggcagcacacaactctgagtgaaagacacgatcagcgtgatagacaggtgtcttgctatgtgacttgccattgcggtcactggttatacaaagtctctgtttagaaatagcaaagatccaagaaagcagaagagtgggggtgggagtggggctaaatgtgttgctcttcagtggaaatctgcccattttgttgaaaagaaaggaaacagggtacacaaatgctgtttgggaacattgtgtcaggatcacctagctttgacgatgagagtgttttttaaaacggaaaccatgtcattttccttctagagagaatttcctggtatgtcaatgtagcttcagaaataggtctcagtgttctggctcagggcgaggttacaaaagaggcttcggtagcgtcctcaggcccgcgtgccctgtgttcttaacagcctcatggggcctagaggaacttttacatggtagacactgagtgaatacacagattcctagatttgagatattttcaaaatagggctagcatgtataaagaatcaaacttagtcattccattgaagtgaaattggattataatttagaaatatttataagccagaaatggttgtgtaaatgttagttttcatattttggttttctaagagtcacattttattgccatatagcacaaaatttgacaatgaggtatagaaatccaaaattttcttgggtacaattgaacaaatcttttaatctcttcagttctatctgcctaagtgaggagagtagttgtggagcattgtagaaaggataaaatgaacattaggatactgagggtttggtctgaattctgttttttcattgctactggaagtgctgtctttggtatcctcatgcatacaagaaggatttggaaaatgtcagtgagtttgaaactggctgtacagttgaatgagctgggcagttgaaagtacccgtgatgctctggccttaccttagatcagagattcttatattttatcaagcatcagaatcacctgcagagcttgttgaatgcagattgttggccacatctccagaatttctcattcagtagatttgggatggagcccaacgatttgcagctggtccagagaccaccttgtgagatctactacctgatttaattggtttgaaggtgaaggtggagtccaggctttttaaaacagtgtctgtattttcagagcagataaccaatcaaattgagcagatggtcttttaaagtctaagcttctatggttctgtgaaaaaaattgtttacatggaatttaaatcattcagaatttttattgcttacattgatcagatccataaaatatctgtttaactattacattaccctagctacagaaatttgtaagttttcaaaagcatgaaggagtttaataacttgtaagactttcagagattgttataatttttgcctcaaaaaaataaaataaaatagcttggtggaaaagagcacctatgcattcaatttgtttccctcaaatgctaagggttaaaatagtactcaaaattgttagatgtgaagttttgaacccagtgtttaaactcagtgtttaaatatttgcatgtctttctatgtgactgctaatttttaactacattattatctctaagagataaataaactttccctgtacttaaagtttttaaattaagtatcttctgataacataagtagtatgagtaaggaaaaaaaatctatgtgtactgtatttttaaattttaataaggtttgatatggtttggctctgtgtctccacccaaatctcaccttgaattgtaataatcctcacgtgtcaaggaccagcaggtggagataattgaattatggggccggtttctctcatactgttcttgcgatagtgagttctcaggagatctgatggttttataagcatctagcatttcccctgctggtacattctctcttcgcctgctgccatccatgtaagatgtgacttgctcctccttgctctctgccatgattgtgaggcttccccaccacttggaaatgtaagtcaattaaaccactttctttagtaaattgcccagtctcgggtatgtctttatcagcaatgtgaaaacggactaatacaacgtgattgtttaaatgctgatatgaaagcagtgctgaatgtggatcttcttatgccagatactgttataattattctctagagagctggccatacaatttatctcattatttatagatctagcatgaatgccagtaagctgacaaagccaaaagccaaaaactaagagtttgtattaatccagttaatgccaaatctagtcatcctccatcatcctacctctgtgttctgcatgaaatataattggcctttgtgatggaaccagttttcttgcattgaaaataaaatttgttcctc

SEQ ID NO: 136301 - DNA, 1364 bp, Homo sapiens
  Payload ID: 6673
  Gene Symbol: GALR2
  Gene Name: galanin receptor 2
  Uniprot ID: O43603
  ENST ID: ENST00000329003
  CDS Start-End: 91-1254
gagttgcagcggccgcagccccgggagcttcccgctcgcggagacccagacggctgcaggagcccgggcagcctcggggtcagcggcaccatgaacgtctcgggctgcccaggggccgggaacgcgagccaggcgggcggcgggggaggctggcaccccgaggcggtcatcgtgcccctgctcttcgcgctcatcttcctcgtgggcaccgtgggcaacacgctggtgctggcggtgctgctgcgcggcggccaggcggtcagcactaccaacctgttcatccttaacctgggcgtggccgacctgtgtttcatcctgtgctgcgtgcccttccaggccaccatctacaccctggacggctgggtgttcggctcgctgctgtgcaaggcggtgcacttcctcatcttcctcaccatgcacgccagcagcttcacgctggccgccgtctccctggacaggtatctggccatccgctacccgctgcactcccgcgagctgcgcacgcctcgaaacgcgctggcagccatcgggctcatctgggggctgtcgctgctcttctccgggccctacctgagctactaccgccagtcgcagctggccaacctgaccgtgtgccatcccgcgtggagcgcccctcgccgccgcgccatggacatctgcaccttcgtcttcagctacctgcttcctgtgctggttctcggcctgacctacgcgcgcaccttgcgctacctctggcgcgccgtcgacccggtggccgcgggctcgggtgcccggcgcgccaagcgcaaggtgacacgcatgatcctcatcgtggccgcgctcttctgcctctgctggatgccccaccacgcgctcatcctctgcgtgtggttcggccagttcccgctcacgcgcgccacttatgcgcttcgcatcctctcgcacctggtctcctacgccaactcctgcgtcaaccccatcgtttacgcgctggtctccaagcacttccgcaaaggcttccgcacgatctgcgcgggcctgctgggccgtgccccaggccgagcctcgggccgtgtgtgcgctgccgcgcggggcacccacagtggcagcgtgttggagcgcgagtccagcgacctgttgcacatgagcgaggcggcgggggcccttcgtccctgccccggcgcttcccagccatgcatcctcgagccctgtcctggcccgtcctggcagggcccaaaggcaggcgacagcatcctgacggttgatgtggcctgaaagcacttagcgggcgcgctgggatgtcacagagttggagtcattgttgggggaccgtggggagagctttgcctgttaataaaacgcacaaaccatttcacacacagtga

SEQ ID NO: 136302 - DNA, 1157 bp, Homo sapiens
  Payload ID: 6674
  Gene Symbol: GALR3
  Gene Name: galanin receptor 3
  Uniprot ID: O60755
  ENST ID: ENST00000249041
  CDS Start-End: 26-1132
tcccaggtgcccgtctgatggggagatggctgatgcccagaacatttcactggacagcccagggagtgtgggggccgtggcagtgcctgtggtctttgccctaatcttcctgctgggcacagtgggcaatgggctggtgctggcagtgctcctgcagcctggcccgagtgcctggcaggagcctggcagcaccacggacctgttcatcctcaacctggcggtggctgacctctgcttcatcctgtgctgcgtgcccttccaggccaccatctacacgctggatgcctggctctttggggccctcgtctgcaaggccgtgcacctgctcatctacctcaccatgtacgccagcagctttacgctggctgctgtctccgtggacaggtacctggccgtgcggcacccgctgcgctcgcgcgccctgcgcacgccgcgtaacgcccgcgccgcagtggggctggtgtggctgctggcggcgctcttctcggcgccctacctcagctactacggcaccgtgcgctacggcgcgctggagctctgcgtgcccgcctgggaggacgcgcgccgccgcgccctggacgtggccaccttcgctgccggctacctgctgcccgtggctgtggtgagcctggcctacgggcgcacgctgcgcttcctgtgggccgccgtgggtcccgcgggcgcggcggcggccgaggcgcggcggagggcgacgggccgcgcggggcgcgccatgctggcggtggccgcgctctacgcgctctgctggggtccgcaccacgcgctcatcctgtgcttctggtacggccgcttcgccttcagcccggccacctacgcctgccgcctggcctcacactgcctggcctacgccaactcctgcctcaacccgctcgtctacgcgctcgcctcgcgccacttccgcgcgcgcttccgccgcctgtggccgtgcggccgccgacgccgccaccgtgcccgccgcgccttgcgtcgcgtccgccccgcgtcctcgggcccacccggctgccccggagacgcccggcctagcgggaggctgctggctggtggcggccagggcccggagcccagggagggacccgtccacggcggagaggctgcccgaggaccggaataaaccctgccgcctggactccgcctgt

SEQ ID NO: 136303 - DNA, 818 bp, Homo sapiens
  Payload ID: 6675
  Gene Symbol: GAL
  Gene Name: galanin/GMAP prepropeptide
  Uniprot ID: P22466
  ENST ID: ENST00000265643
  CDS Start-End: 259-630
ccggtgacgcgactccgggcggctcccgggtgcgccgcatatatagcagcggcggcggtggcggcggccacaccgggcggcggacacgtggagggacccggcccgcgccttctgcccctgctgccggccgcgccatgcggtgagcgccccaggccgccagagcccacccgacccggcccgacgcccggacctgccgcccagacccgccaccgcacccggaccccgacgctccgaacccgggcgcagccgcagctcaagatggcccgaggcagcgccctcctgctcgcctccctcctcctcgccgcggccctttctgcctctgcggggctctggtcgccggccaaggaaaaacgaggctggaccctgaacagcgcgggctacctgctgggcccacatgccgttggcaaccacaggtcattcagcgacaagaatggcctcaccagcaagcgggagctgcggcccgaagatgacatgaaaccaggaagctttgacaggtccatacctgaaaacaatatcatgcgcacaatcattgagtttctgtctttcttgcatctcaaagaggccggtgccctcgaccgcctcctggatctccccgccgcagcctcctcagaagacatcgagcggtcctgagagcctcctgggcatgtttgtctgtgtgctgtaacctgaagtcaaaccttaagataatggataatcttcggccaatttatgcagagtcagccattcctgttctctttgccttgatgttgtgttgttatcatttaagattttttttttttggtaattattttgagtggcaaaataaagaatagcaatta

SEQ ID NO: 136304 - DNA, 938 bp, Homo sapiens
  Payload ID: 6676
  Gene Symbol: GALP
  Gene Name: galanin-like peptide
  Uniprot ID: Q9UBC7
  ENST ID: ENST00000357330
  CDS Start-End: 83-433
gaggagccagagagagctgcggagagctgccagctgcagcgggcgtgttccgcagctgtaggcacctgtcgtcctgccttcgatggctcctccctccgtccccctggtcctcctcctcgtcctcttgctgagcctggcagagactccagcatccgcacctgcccaccggggacgaggaggctggaccctcaatagtgctggctaccttctgggtcccgtcctccaccttccccaaatgggtgaccaagacggaaagagggagacagcccttgagatcctagacctgtggaaggccatcgacgggctcccctactcccaccctccacagccctccaagaggaatgtgatggagacgtttgccaaaccagagattggagatctgggcatgctcagcatgaaaattcccaaggaggaagatgtcctgaagtcatagatgtcttcaaatccctgttcctatccttcttctccagctcctcctgctccctctgaaaccttttctaggtaccctatgctgagactaagatcctgaagttaaatacccaggtctcatgaagacattgtaaagcatttgaattattctaaaaaatttctggagtttcttaggttttattgattcatccttgaaatcagtataatgtgctattaatggaaccaatagtaattcgaggactagttgggagattctggggtaatcagggaatattcctgcaacacatttaaaggaattgtgttcttttggaatcatcccaattataacacgagctattgcataatacaaataaccctcttaagtctgagagtctgtgtctttatttgaaaagattcttcaaattgcgtacttactcctccatattctttcaacccacatgagtctcctcgagaagtgaggagaggcagtttggagcagaatggagagaataaaatgtttcttgtcaaac

SEQ ID NO: 136305 - DNA, 889 bp, Homo sapiens
  Payload ID: 6676
  Gene Symbol: GALP
  Gene Name: galanin-like peptide
  Uniprot ID: Q9UBC7
  ENST ID: ENST00000440823
  CDS Start-End: 83-232
gaggagccagagagagctgcggagagctgccagctgcagcgggcgtgttccgcagctgtaggcacctgtcgtcctgccttcgatggctcctccctccgtccccctggtcctcctcctcgtcctcttgctgagcctggcagagactccagcatccgcacctgcccaccggtcctccaccttccccaaatgggtgaccaagacggaaagagggagacagcccttgagatcctagacctgtggaaggccatcgacgggctcccctactcccaccctccacagccctccaagaggaatgtgatggagacgtttgccaaaccagagattggagatctgggcatgctcagcatgaaaattcccaaggaggaagatgtcctgaagtcatagatgtcttcaaatccctgttcctatccttcttctccagctcctcctgctccctctgaaaccttttctaggtaccctatgctgagactaagatcctgaagttaaatacccaggtctcatgaagacattgtaaagcatttgaattattctaaaaaatttctggagtttcttaggttttattgattcatccttgaaatcagtataatgtgctattaatggaaccaatagtaattcgaggactagttgggagattctggggtaatcagggaatattcctgcaacacatttaaaggaattgtgttcttttggaatcatcccaattataacacgagctattgcataatacaaataaccctcttaagtctgagagtctgtgtctttatttgaaaagattcttcaaattgcgtacttactcctccatattctttcaacccacatgagtctcctcgagaagtgaggagaggcagtttggagcagaatggagagaataaaatgtttcttgtcaaac

SEQ ID NO: 136306 - DNA, 150 bp, Homo sapiens
  Payload ID: 6676
  Gene Symbol: GALP
  Gene Name: galanin-like peptide
  Uniprot ID: Q9UBC7
  ENST ID: ENST00000590002
  CDS Start-End: 1-150
atggctcctccctccgtccccctggtcctcctcctcgtcctcttgctgagcctggcagagactccagcatccgcacctgcccaccggtcctccaccttccccaaatgggtgaccaagacggaaagagggagacagcccttgagatcctag

SEQ ID NO: 136307 - DNA, 461 bp, Homo sapiens
  Payload ID: 6677
  Gene Symbol: GRIFIN
  Gene Name: galectin-related inter-fiber protein
  Uniprot ID: A4D1Z8
  ENST ID: ENST00000614228
  CDS Start-End: 1-435
atggcagtgcagtctaaagccttctgtgcgggcggcctggcccccggctggaagctgctggtccagggacatgctgactctggagaggacaggttcgagactaacttcttgttggagacgggggacattgccttccacatcaagccccggttctccagcgccactgtggtgggcaatgccttccagtacggccgctggggcccggagcaggtgtctagcatcttcccgctggccccgggggagccctttgagatagaggtcagctgggacgcggagcacttccacgtctacgccccggagcacaaggtgctacagttcccatgccgtcagaggccgctgggcgccaccaccagggtgcgcgtgctgagtgaccactgcctggcccaggtggagctggccaagaggggcctgagctggggggaccggggctactgagtgacacctgcaccccaggagccagc

SEQ ID NO: 136308 - DNA, 804 bp, Homo sapiens
  Payload ID: 6678
  Gene Symbol: GTSF1
  Gene Name: gametocyte specific factor 1
  Uniprot ID: Q8WW33
  ENST ID: ENST00000305879
  CDS Start-End: 84-587
gctggggcttgcgtgggaggaaggtgactgtgaggaaggtgtgtgtccaccgagcacttggattcagcttcttcatttccaacatggaagaaacttacaccgactccctggaccctgagaagctattgcaatgcccctatgacaaaaaccatcaaatcagggcttgcaggtttccttatcatcttatcaagtgcagaaagaatcatcctgatgttgcaagcaaattggctacttgtcccttcaatgctcgccaccaggttcctcgagctgaaattagtcatcatatctcaagctgtgatgacagaagttgtattgagcaagatgttgtcaaccaaaccaggagccttagacaagagactctggctgagagcacttggcagtgccctccttgcgatgaagactgggataaagatttgtgggagcagaccagcaccccatttgtctggggcacaactcactactctgacaacaacagccctgcgagcaacatagttacagaacataagaataacctggcttcaggcatgcgagttcccaaatctctgccgtatgttctgccatggaaaaacaatggaaatgcacagtaactgaatacctatctcatcaaatgccagaccctagaagactgttgcttcttcttctaccagtgggttctcattttcctcctaatctaattatagaatggtaaactccctgtgactttccaaactgacaagcacacttttttcctccccccttgaatcctcatttaatgcaagaaccctcatactcagaagcttccaaataaacctttgatacagattg

SEQ ID NO: 136309 - DNA, 1621 bp, Homo sapiens
  Payload ID: 6678
  Gene Symbol: GTSF1
  Gene Name: gametocyte specific factor 1
  Uniprot ID: Q8WW33
  ENST ID: ENST00000552397
  CDS Start-End: 898-1401
aattttcagaagtttcgtatggggatggttttatataaattcaggtttttcccacaataataaatgtatttagtctcagtgctcaatagaagagatttctaatagaaaaggattcaaactgtgaaaccatttctcttttaatgtttcacattcctgttacagatttgttctcttgtgactctgttatccataatatggacagttcttgagtcctaacattgagaggttttcccttagtgcatagagggaatgagtattaattggagaagcttaaagtattgccactttagcactgaagattgggatgagaggaggtgaaacctcactagaaaaagggacaatgttagtgtggcccttcctgatcatgtttaagaaaagtcatgaaaatggtgaactagtgtttccaagcatattggaagggttgagtgtatactgtctgtcaaagacttccagcatttccaggtcctagagaggaacaagactggtaacctgcctatctgtatttttaagaacccaggaggaaagctttataatagaacattatttctgtgtttatgtataaggggttttttgtttttttaaagacaggatctcactccattgtccaggccaagtgcaatggcacgaacctcatagctcctggacttaagtgatctgcctgcctttgcctcctgagtagctgggactacaggcatgagcccccatgcctggctaagtttgtttttttgtttgtttgtttgtttgtttttgggggggggttgttttgttttttgtagagacgtagtcttgctttgttgccaggctagtctcaaactcctggcttcaagtgatcctcctgcctcagcctcccagagtgctaggattacagcacttggattcagcttcttcatttccaacatggaagaaacttacaccgactccctggaccctgagaagctattgcaatgcccctatgacaaaaaccatcaaatcagggcttgcaggtttccttatcatcttatcaagtgcagaaagaatcatcctgatgttgcaagcaaattggctacttgtcccttcaatgctcgccaccaggttcctcgagctgaaattagtcatcatatctcaagctgtgatgacagaagttgtattgagcaagatgttgtcaaccaaaccaggagccttagacaagagactctggctgagagcacttggcagtgccctccttgcgatgaagactgggataaagatttgtgggagcagaccagcaccccatttgtctggggcacaactcactactctgacaacaacagccctgcgagcaacatagttacagaacataagaataacctggcttcaggcatgcgagttcccaaatctctgccgtatgttctgccatggaaaaacaatggaaatgcacagtaactgaatacctatctcatcaaatgccagaccctagaagactgttgcttcttcttctaccagtgggttctcattttcctcctaatctaattatagaatggtaaactccctgtgactttccaaactgacaagcacacttttttcctccccccttgaatcctcatttaatgcaagaaccctcatactcagaagcttccaaataaacctttgatacagattgctt

SEQ ID NO: 136310 - DNA, 902 bp, Homo sapiens
  Payload ID: 6678
  Gene Symbol: GTSF1
  Gene Name: gametocyte specific factor 1
  ENST ID: ENST00000546931
  CDS Start-End: 34-564
cgagcacttggattcagcttcttcatttccaacatggaagaaacttacaccgactccctggaccctgagaagctattgcaatgcccctatgacaaaaaccatcaaatcagggcttgcaggtttccttatcatcttatcaagtgcagaaagaatcatcctgatgttgcaagcaaattggctacttgtcccttcaatgctcgccaccaggttcctcgagctgaaattagtcatcatatctcaagctgtgatgacagaagttgtattgagcaagatgttgtcaaccaaaccaggagccttagacaagagactctggctgagagcacttggcagtgccctccttgcgatgaagactgggataaagatttgtgggagcagaccagcaccccatttgtctggggcacaactcactactctgacaacaacagccctgcgagcaacatagttacagaacataagaataacctggcttcaggcatgcgagttcccaaatctctgccgtatgttctgccatggaaaaacaattcagattctcttgatttcagtctgtgctactgtttgagctaatttttaggtggctagaggattcactttaaaacgtttctccctggatacttgcatttcccaaaaaatgaagtcaccaaattatatgtcaaaaggcttgatggaaatgcacagtaactgaatacctatctcatcaaatgccagaccctagaagactgttgcttcttcttctaccagtgggttctcattttcctcctaatctaattatagaatggtaaactccctgtgactttccaaactgacaagcacacttttttcctccccccttgaatcctcatttaatgcaagaaccctcatactcagaagcttccaaataaacctttgatacagattgcttaata

SEQ ID NO: 136311 - DNA, 617 bp, Homo sapiens
  Payload ID: 6678
  Gene Symbol: GTSF1
  Gene Name: gametocyte specific factor 1
  ENST ID: ENST00000626692
  CDS Start-End: 87-617
gttgctggggcttgcgtgggaggaaggtgactgtgaggaaggtgtgtgtccaccgagcacttggattcagcttcttcatttccaacatggaagaaacttacaccgactccctggaccctgagaagctattgcaatgcccctatgacaaaaaccatcaaatcagggcttgcaggtttccttatcatcttatcaagtgcagaaagaatcatcctgatgttgcaagcaaattggctacttgtcccttcaatgctcgccaccaggttcctcgagctgaaattagtcatcatatctcaagctgtgatgacagaagttgtattgagcaagatgttgtcaaccaaaccaggagccttagacaagagactctggctgagagcacttggcagtgccctccttgcgatgaagactgggataaagatttgtgggagcagaccagcaccccatttgtctggggcacaactcactactctgacaacaacagccctgcgagcaacatagttacagaacataagaataacctggcttcaggcatgcgagttcccaaatctctgccgtatgttctgccatggaaaaacaattcagattctcttgatttcagtctgtgctactgtttgagctaa

SEQ ID NO: 136312 - DNA, 835 bp, Homo sapiens
  Payload ID: 6679
  Gene Symbol: GTSF1L
  Gene Name: gametocyte specific factor 1-like
  Uniprot ID: Q9H1H1
  ENST ID: ENST00000373003
  CDS Start-End: 305-751
tcatagtatatccgtgagtcaagcggctgtgggtttttggctcttgcatctgctatagttctgtctcgggtgccatttgctaactctgttctctgtgtagctgcttttggcagctcctcatctctcttctaatccaccactcacagtcctagagaacagaccacaagttaagaccgtcacctacagaatcccaagggccaaaactgggcagaggacaactccatccttcttacaaaagggcttctccacaagaagcatttccgttagactctagcagtgagataccctgcttcaagaatttctcatggagccagaagcctttgaaatttgcccttatgatcctcaccaccgaatcccactcagcagattccagtaccacctggcatcgtgcaggagaaagaaccccaagaaagccaaaaagatggccacctgcaaatacaacgcctgccacgtggtccccatcaaaaatctggaggaacatgaggctgtttgtgtcaacaggagcgctgtggaagaagaggacaccgagaaccctctgaaagtcagtcctcctagttcagagcagaacgatgacacccagcaggtctcaccctgccttcccagccccgatatctggaatgtcgatggcgctaattgccagcatgtgtttgtccttaagactttttttcctcaaaaggttgtttgtgaaaatgacacgaaagagtcagcaagagagaccagtccccagaagatcctcagaccaggacagtaaactgccagctgaggaaggagcacacgcctcatcaatgcatggaagaacgtgcaatgcatcagaataaaagacatgcaaagtaaa

SEQ ID NO: 136313 - DNA, 459 bp, Homo sapiens
  Payload ID: 6679
  Gene Symbol: GTSF1L
  Gene Name: gametocyte specific factor 1-like
  Uniprot ID: Q9H1H1
  ENST ID: ENST00000373005
  CDS Start-End: 4-375
ctcatggagccagaagcctttgaaatttgcccttatgatcctcaccaccgaatcccactcagcagattccagtaccacctggcatcgtgcaggagaaagaaccccaagaaagccaaaaagatggccacctgcaaatacaacgcctgccacgtggtccccatcaaaaatctggaggaacatgaggctgtttgtgtcaacaggagcgctgtggaagaagaggacaccgagaaccctctgaaagtcagtcctcctagttcagagcagaacgatgacacccagcagactttttttcctcaaaaggttgtttgtgaaaatgacacgaaagagtcagcaagagagaccagtccccagaagatcctcagaccaggacagtaaactgccagctgaggaaggagcacacgcctcatcaatgcatggaagaacgtgcaatgcatcagaataaaagacatgcaaagtaaa

SEQ ID NO: 136314 - DNA, 2239 bp, Homo sapiens
  Payload ID: 6680
  Gene Symbol: GGN
  Gene Name: gametogenetin
  Uniprot ID: Q86UU5
  ENST ID: ENST00000334928
  CDS Start-End: 134-2092
aaggcctgggggcgaggaacaagacctcggagtatttcaaggggagacctagttccctgccctgccccgggcccagggcgccgcggtctgaactctgctcggctggaggactcgtctccgagctccgtcagaaatggggaacttgcagtcggagccatccgcgggcgggggctcccgaaaagtgcagccctcggaccgcgcccccgactcccgccggacgtccctggtggagcccgagatgacctcccaggccatgcgcctgactcgtgggctgggtgtctggttccctggcagcgccacacccccgggactcatggtaccccgggagccccaggcctcaccctcgaccctgcccctcaccttagaacggccctctccagtgatgccccctcctgaagaggcggccgcggtctctgcaccacccccggcccccgcggggactctgctgcccggcccgtctaaatggcaaaagcccgcgggcactccagttccccggatccgccgcctgctggaggcgagccatcgcggccagggcgaccctccgagcctccgcccgctgaagccgccgccgccgccccggcaactatccgtgaaggacactgtcccgagggccccatcccaatttccgccgcccctggagacttggaagccgccaccaccattaccttctgaacggcagccggcggaccgcagaatcactcctgctctggccacacccgcctcacccccgacagaaagccaggctgggccccgcaaccagggccagacggccggcagggctcgcggaggggcgcctccccatgcgggcgaaggcgaaatggcccagcctgcggattccgagtccggtctgagcctgctgtgtaaaatcaccttcaagtcgaggccctctttggcccctccggcagcctcgagttccttagcagccaaagcttcgctggggggcggcggaggcggcggcctctttgctgcctcaggtgccatctcttacgccgaggtcctgaagcaagggcccctgcctcctggagccgctcgccccttgggagaggtttctcgaggggcacaggaagccgagggaggtgatggagacggcgaagggtgctctggtcctccctcggcgcctgcgtcccaagcccgggccctaccgccgccaccctacaccaccttcccaggctcgaagcccaaattcgactgggttagcgctcccgacggccctgaacgccacttccgcttcaacggggctggcggaggcatcggggcgccgcgacggcgtgcggccgcactctctgggccttggggctcccctccgccaccaccagagcagatacactcagctcccgggccccggaggcccgcacctgccctgctggcgccgcctacgttcatcttcccagcacccaccaatggcgagcccatgcgcccggggcctccaggcctgcaggagttaccaccgctgccaccgcccacaccgccgcccacactgcagccaccagcgctccagccaacgccgctgccggtggctcccccgctcaccccgggtctgggccacaaggagtcagccctggctcccaccgcagcccctgctctgcccccagccttagccgccgaccaggccccggccccatccccggctccagctcccaccgtggctgagccctcgccgcctgtgtccgcgcccgcacccgcggctgcgcccatcaagacccgcacgcgcaggaacaagggttcccgtgcagcccggggcgcgacccgtaaggatggcttgcatggagatggtcctcgcgaacgagctacagctaccgtgcctgacagcagtggtggagggggtggtggcagcggggcctctcagactggggcagctaacacccgcgctgcgcgccactggctgcccttccaggtgcttaactcctgtccctgcaagtgttactgccaccaccagccacgccatcgccgcctgccacgcaacgtctctgcctggctgagcacatccaccaaccacctgggcgagccaccctgggttgccaccatcaagctgtccggctctctggtggccaagctggagcactacgacttgcaggccacccattccaactgagtgtagtcggctcaacaccctccaccttcccctccatgccaataaaataaccaatccagatgccagcagcctgtcaatcactcgccaaggcagtgggtagggtgcagcagggcaggatcgccattaaagcacatcttggaaacaatc

SEQ ID NO: 136315 - DNA, 520 bp, Homo sapiens
  Payload ID: 6680
  Gene Symbol: GGN
  Gene Name: gametogenetin
  ENST ID: ENST00000587676
  CDS Start-End: 342-520
attctaaaggggaggggctaaggagaacaacccaaaggggtggagcttagaaccagaaggcctgggggcgaggaacaagacctcggagtatttcaaggggagacctaggttcgtaaggggccgggctcccgcgggctcgcaggagggcggggcctcgagctccgggggcggggcctacatctcggggtccgccctagttgtctcgcccacttgccttcacccgcacccccgttcttttcggttattttctgctacggcagttccctgccctgccccgggcccagggcgccgcggtctgaactctgctcggctggaggactcgtctccgagctccgtcagaaatggggaacttgcagtcggagccatccgcgggcgggggctcccgaaaagtgcagccctcggaccgcgcccccgactcccgccggacgtccctggtggagcccgagatgacctcccaggccatgcgcctgactcgtgggctgggtgtctggttccctggcagcgccacacccccgggact

SEQ ID NO: 136316 - DNA, 495 bp, Homo sapiens
  Payload ID: 6680
  Gene Symbol: GGN
  Gene Name: gametogenetin
  ENST ID: ENST00000586599
  CDS Start-End: 250-495
tttcaaggggagacctaggttcgtaaggggccgggctcccgcgggctcgcaggagggcggggcctcgagctccgggggcggggcctacatctcggggtccgccctagttgtctcgcccacttgccttcacccgcacccccgttcttttcggttattttctgctacggcagttccctgccctgccccgggcccagggcgccgcggtctgaactctgctcggctggaggactcgaacggccctctccagtgatgccccctcctgaagaggcggccgcggtctctgcaccacccccggcccccgcggggactctgctgcccggcccgtctaaatggcaaaagcccgcgggcactccagttccccggatccgccgcctgctggaggcgagccatcgcggccagggcgaccctccgagcctccgcccgctgaagccgccgccgccgccccggcaactatccgtgaaggacactgtcccgagggccccatcccaatttccg

SEQ ID NO: 136317 - DNA, 1747 bp, Homo sapiens
  Payload ID: 6680
  Gene Symbol: GGN
  Gene Name: gametogenetin
  Uniprot ID: Q86UU5
  ENST ID: ENST00000585737
  CDS Start-End: 125-1498
agaaccagaaggcctgggggcgaggaacaagacctcggagtatttcaaggggagacctagttccctgccctgccccgggcccagggcgccgcggtctgaactctgctcggctggaggactcgtgatgccccctcctgaagaggcggccgcggtctctgcaccacccccggcccccgcggggactctgctgcccggcccgtctaaatggcaaaagcccgcgggcactccagttccccggatccgccgcctgctggaggcgagccatcgcggccagggcgaccctccgagcctccgcccgctgaagccgccgccgccgccccggcaactatccgtgaaggacactgtcccgagggccccatcccaatttccgccgcccctggagacttggaagccgccaccaccattaccttctgaacggcagccggcggaccgcagaatcactcctgctctggccacacccgcctcacccccgacagaaagccaggctgggccccgcaaccagggccagacggccggcagggctcgcggaggggcgcctccccatgcgggcgaaggcgaaatggcccagcctgcggattccgagtccggtctgagcctgctgtgtaaaatcaccttcaagtcgaggccctctttggcccctccggcagcctcgagttccttagcagccaaagcttcgctggggggcggcggaggcggcggcctctttgctgcctcaggtgccatctcttacgccgaggtcctgaagcaagggcccctgcctcctggagccgctcgccccttgggagaggtttctcgaggggcacaggaagccgagggaggtgatggagacggcgaagggtgctctggtcctccctcggcgcctgcgtcccaagcccgggccctaccgccgccaccctacaccaccttcccaggctcgaagcccaaattcgactgggttagcgctcccgacggccctgaacgccacttccgcttcaacggggctggcggaggcatcggggcgccgcgacggcgtgcggccgcactctctgggccttggggctcccctccgccaccaccagagcagatacactcagctcccgggccccggaggcccgcacctgccctgctggcgccgcctacgttcatcttcccagcacccaccaatggcgagcccatgcgcccggggcctccaggcctgcaggagttaccaccgctgccaccgcccacaccgccgcccacactgcagccaccagcgctccagccaacgccgctgccggtggctcccccgctcaccccgggtctgggccacaaggagtcagccctggctcccaccgcagcccctgctctgcccccagccttagccgccgaccaggccccggccccatccccggctccagctcccaccgtggctgagccctcgccgcctgtgtccgcgcccgcacccgcggctgcgcccatcaagacccgcacgcgcaggaacaagggttcccgtgcagcccggggcgcgacccgtgcttaactcctgtccctgcaagtgttactgccaccaccagccacgccatcgccgcctgccacgcaacgtctctgcctggctgagcacatccaccaaccacctgggcgagccaccctgggttgccaccatcaagctgtccggctctctggtggccaagctggagcactacgacttgcaggccacccattccaactgagtgtagtcggctcaacaccctccaccttcccctccatgccaataaaataaccaatccag

SEQ ID NO: 136318 - DNA, 2847 bp, Homo sapiens
  Payload ID: 6681
  Gene Symbol: GGNBP2
  Gene Name: gametogenetin binding protein 2
  Uniprot ID: Q9H3C7
  ENST ID: ENST00000613102
  CDS Start-End: 317-2410
accttcccctcgtcccccgccctccttcttccactccccgcggcgcgagcggctgactgcccgtagaggaaacgacattcggagctgcgctcccgcccacgccggccctgacgcgggcctcgtcagccagtaacagggagcagaggtgggagttagcgaggcgaccacgaaaacggtgaaggtcggaaccgacagcctcctccgagaagggcaggagctgggaggaggcggcagcggcggcggcagaaacagcagcggcggcggcggcggcagctgggaggaggtggtgacggtggcaacggcagcgtcggggacgatggcgcgactcgtggcagtgtgcagggacggggaggaggagttccccttcgagaggaggcagattcccctctacatagacgacaccctgacgatggtgatggaatttcctgataatgtgttaaatctcgatggacatcagaataatggtgcacagctaaagcagttcattcagcgacatggtatgcttaagcaacaggatctaagtattgccatggtggtgacatcacgcgaagtcctgagtgcactttctcagcttgtcccatgtgttggttgtcgtcgcagtgtggagcgtctcttttcccagcttgtagagtctggaaatcctgctcttgaacccctaacagtagggcccaagggagtcctgtctgtaactagaagctgcatgactgatgcaaagaagctttatacattattttatgtacatgggtccaaactaaatgacatgatagatgctattccaaaaagtaagaagaataagagatgtcagttgcactccttagatacgcacaagccaaaacctttgggaggttgttggatggatgtatgggaactaatgtcgcaggaatgcagggatgaagtagttttaattgactcgagttgtcttttagaaacactagaaacatatctgcgaaaacacaggttttgcactgattgcaaaaataaagtcctccgagcatacaatatccttattggtgaacttgactgcagcaaagaaaagggctactgtgctgcactttatgaaggcttgcggtgctgtccacatgaacgacacatacatgtttgctgtgaaacagacttcattgcacatcttttgggtcgtgctgagccagagttcgcaggagggcgaagagaaaggcatgcaaagacaatagatatagctcaagaagaagttctgacctgcttgggaattcatctttatgaaagactgcatcgaatctggcagaagctacgggcagaagagcagacatggcagatgcttttctatcttggtgttgatgctttacgcaagagttttgagatgaccgtggaaaaagtacagggtattagcagattggaacaactttgtgaggaattttcagaagaggaacgagtaagagaactcaagcaagaaaagaaacgccaaaaacggaagaatagacgaaaaaataagtgtgtgtgtgatattcctactcccttacaaacagcagatgaaaaggaagtaagccaagagaaggaaacagacttcatagaaaatagcagctgcaaagcctgtggcagcactgaagatggtaatacttgtgtagaagtaattgttaccaatgaaaatacatcatgtacctgtcctagcagtggcaatcttttggggtcccctaaaataaagaaaggcttatctccacactgtaatggtagtgattgtggatattcatctagcatggaagggagtgaaacaggttctcgggagggttcggatgttgcctgcactgaaggcatttgtaatcatgatgaacacggtgatgactcttgtgttcatcactgtgaagacaaagaggatgatggtgatagttgtgttgaatgttgggcaaattctgaagagaacgacacaaaaggaaaaaataaaaagaagaagaagaaaagcaagatactgaaatgtgatgaacatatccagaagcttggaagctgtattacagatccaggtaatcgagagacctcaggaaataccatgcacacagtgtttcaccgtgacaagaccaaagatacacatcctgaaagctgttgcagctctgaaaagggtgggcagccattgccttggtttgagcataggaaaaatgtaccacagtttgcagaacctacagaaacgttgtttggtcccgattccggaaaaggtgccaagagcttagttgaactccttgatgagtctgaatgtacttcagatgaggaaatctttatctcacaagatgaaatacagtcatttatggctaataaccagtctttctacagcaatagagaacaataccgacagcatctgaaggagaaatttaataaatactgccggttaaatgatcacaagaggcccatttgtagtggctggttgacaacggctggagcaaattaaataaataaaatagctctgtctttcaatgaaacactcacgatgactactgcgccttctctttcgaaaaactcttaatttagtgacttatggcaaaattttatcttaaatcaatgtgattctttcttgttttgggagacggtggaggtatcctcattagttctttcttcaggcttgtgtctttagttgcgtggctgcgcaggcctgccatatgatttaagccatctcttttcattaaatgtttctcttcctgtgagacttactaaagcaacttagtggcaaaaagtaatgttgtacttataattctgtacagaaatgacaatgagctgaatatatggttttacaaagtagacatccacttgcaaaatgtttggatgtaatgttaaagcgcaatgtgcaaaatttaaaataaagaatatttattaatacgcacagtaaaa

SEQ ID NO: 136319 - DNA, 2847 bp, Homo sapiens; identical to SEQ ID NO: 136318
  Payload ID: 6681
  Gene Symbol: GGNBP2
  Gene Name: gametogenetin binding protein 2
  Uniprot ID: Q9H3C7
  ENST ID: ENST00000621686
  CDS Start-End: 317-2410

SEQ ID NO: 136320 - DNA, 2315 bp, Homo sapiens
  Payload ID: 6681
  Gene Symbol: GGNBP2
  Gene Name: gametogenetin binding protein 2
  ENST ID: ENST00000611219
  CDS Start-End: 293-499
cttcttccactccccgcggcgcgagcggctgactgcccgtagaggaaacgacattcggagctgcgctcccgcccacgccggccctgacgcgggcctcgtcagccagtaacagggagcagaggtgggagttagcgaggcgaccacgaaaacggtgaaggtcggaaccgacagcctcctccgagaagggcaggagctgggaggaggcggcagcggcggcggcagaaacagcagcggcggcggcggcggcagctgggaggaggtggtgacggtggcaacggcagcgtcggggacgatggcgcgactcgtggcagtgtgcagggacggggaggaggagttccccttcgagaggaggcagattcccctctacatagacgacaccctgacggtgagcgggccgggccgggctgggcccgccgctcccctggcagctgtttcccctcctccccctcccccaggccgagcgctgcgcactggagaaagagtgtgttgcaactcctaggcgaggccttctcttcagcaggccccacaaactcgcctttgcagtgggtggctcggtaacctctgtcggccccaagcccagagctccgtacgcactccctctctccagattttccttcttttggaaccttattccttgaccctttccctttaggagacgctgcttttgtcaaagcacacatctcagagaggggttgaaggatcttgggcgtttagggcctaccccatacagaaaccacctaccctcggggaggcttaattacctggtaatgtcgcagctgcactgctacctgtgtattttctgttttaatactggtagctctcaccacataagcttaattactgggggcagagtgacatgctcgtgcacagtcaagattccactaaaatggtttgatttcgttgtaaatagtctcgtattgcctaatgcattaaaactcttgaaatgattgtattgctaggccctttcttcaaaacgggctttcttcgcattatttagtttacaggtggacttttttttttttaaaggaagccaaattattgaatgtgtaagagtactataaaaagctgattgctcatcttgagtgtcaagacccagttccgggtactttattctttagatttggtagtgtagcattatcgaccctctgccctatgttgctgtactgtttcctttaaaaggaaatggctgaaatttgaattgaatctgaacaggaaatgagtgcagttgcttgccacttaagaaatgaaattaaccttttccgaatatcttttgaaatctgcgttttgatgatgctgaagctttggattatacatttgcttatttcgataaggtgcacctaagtctcttcatctcatcagtattcttttgctatcaaaggcagttgatcagttttgttcctcaatatttttttttgcaaatatctaccgaagttttttcaaattttatgtaaaatgcaagtcattgtagagatgccagtctatgcctttatgcttgccagtctcaattaagacttgattgagctgcagtactttaaaaaggattagaagagctattgaatgacttaatttattagaagtttttaagtgacagcatttctaattattcaagtgcatttatttttcatgaaaaaaggtagaatgatttgttctgacataaagtaaatagtgttgatgcattagaaattgtgtgtcttgattatgatttctgtactttttgcattagaagtataatggacttgtatttttaaatagttgaaactagcactgtgatcatattaaataatgcatttctcagtttggacttcagatagggattcatttgttgatattttctttcttctctcccctgctaacataaacacttttctgaagcatatagttatgatatcagcctttaaggtttattgtcccacaatggctgtggagttaaaaaaaaaaattcagtgagtttggatataagattattatttaatgaataatcataacataggaaaacatatcaaaacatagggaaaaccaacataaatagtcttcaaaagacactagttcttggtatattcacataaccacctttgtgaatgcagcacattaatacatctgtcatatagcactttaaaatggccaactttttaagtgcttttatactgtattctctccacaatgatgtgactttccaaaattttccactgaaaaagatgtaaccttgcaatgtggtttagtatggaacttactttgcactgtatctggcggttgaattttgcttttattgtactgtggacttgtgactaaggcaaataaaacttaagctcacttaa

SEQ ID NO: 136321 - DNA, 695 bp, Homo sapiens
  Payload ID: 6681
  Gene Symbol: GGNBP2
  Gene Name: gametogenetin binding protein 2
  ENST ID: ENST00000616019
  CDS Start-End: 222-695
gtgatgggaaacgcagcccggctctcccgtaccctcccgctccgctccctgccccccgtggcgaatgtgctgcgcagcggcgggtgcttacgctcgcggggtttggctgttgcaggcaggagctgggaggaggcggcagcggcggcggcagaaacagcagcggcggcggcggcggcagctgggaggaggtggtgacggtggcaacggcagcgtcggggacgatggcgcgactcgtggcagtgtgcagggacggggaggaggagttccccttcgagaggaggcagattcccctctacatagacgacaccctgacgatggtgatggaatttcctgataatgtgttaaatctcgatggacatcagaataatggtgcacagctaaagcagttcattcagcgacatggtatgcttaagcaacaggatctaagtattgccatggtggtgacatcacgcgaagtcctgagtgcactttctcagcttgtcccatgtgttggttgtcgtcgcagtgtggagcgtctcttttcccagcttgtagagtctggaaatcctgctcttgaacccctaacagtagggcccaagggagtcctgtctgtaactagaagctgcatgactgatgcaaagaagctttatacattattttatgtacatgggtccaaactaaatgacatgatagatgctattccaaaaagtaagaag

SEQ ID NO: 136322 - DNA, 665 bp, Homo sapiens
  Payload ID: 6681
  Gene Symbol: GGNBP2
  Gene Name: gametogenetin binding protein 2
  ENST ID: ENST00000615952
  CDS Start-End: 1-401
acgacacaaaaggaaaaaataaaaagaagaagaagaaaagcaagatactgaaatgtgatgaacatatccagaagcttggaagctgtattacagatccaggtaatcgagagacctcaggaaataccatgcacacagtgtttcaccgtgacaagaccaaagatacacatcctgaaagctgttgcagctctgaaaagggtgggcagccattgccttggtttgagcataggaaaaatgtaccacagtttgcagaacctacagaaacgttgtttggtcccgattccggaaaaggtgccaagagcttagttgaactccttgtaagtattccatgtggtcttactgtacataactgtttgggaacggggtggatgtgggaggggatagtatttgagggcttaaggtaggtagttgaaggaagcttatgagaaattaagggtagtatttcattattgtttggggacttcatttctgtccttccactcgtggtttatgcaactactctggaacacgtttccatggccgcctctgtctcagtagaagacattataggtattccttgagttacagtggggttacattccaataaacccattataactcaaaaatactgcgagttgaaaatacattcaacatcccaataaaccctttgtaaagttaaaaaaaaaaaa

SEQ ID NO: 136323 - DNA, 665 bp, Homo sapiens; identical to SEQ ID NO: 136322
  Payload ID: 6681
  Gene Symbol: GGNBP2
  Gene Name: gametogenetin binding protein 2
  ENST ID: ENST00000632761
  CDS Start-End: 1-401

SEQ ID NO: 136324 - DNA, 695 bp, Homo sapiens; identical to SEQ ID NO: 136321
  Payload ID: 6681
  Gene Symbol: GGNBP2
  Gene Name: gametogenetin binding protein 2
  ENST ID: ENST00000633772
  CDS Start-End: 222-695

SEQ ID NO: 136325 - DNA, 2315 bp, Homo sapiens; identical to SEQ ID NO: 136320
  Payload ID: 6681
  Gene Symbol: GGNBP2
  Gene Name: gametogenetin binding protein 2
  ENST ID: ENST00000633758
  CDS Start-End: 293-499

SEQ ID NO: 136326 - DNA, 2083 bp, Homo sapiens
  Payload ID: 6682
  Gene Symbol: GABRA1
  Gene Name: gamma-aminobutyric acid (GABA) A receptor, alpha 1
  Uniprot ID: P14867
  ENST ID: ENST00000023897
  CDS Start-End: 469-1839
aacagaagatgccggagaaggggggggaaaagtagatgcggatttcgtcctgacttctaaaaattcctcctctccctctcccattttcctaatccgagaatgatggagctcgaggcaaaggaatgattccggaaatggagatatgattctcaaacctagaaatgatcggagtgatttattagttaaatattcttcgtccaggaacccagcacaattcagagctgcagattggatattgggaagcaaatttgggtgtgaaatcttcagcaaaggagcacgcagagtccatgatggctcagaccaagtgagtgagaggcagagcgaggacgcccctctgctctggcgcgcccggactcggactcgcagactcgcgctggctccagtctctccacgattctctctcccagacttttccccggtcttaagagatcctgtgtccagagggggccttagctgctccagcccgcgatgaggaaaagtccaggtctgtctgactgtctttgggcctggatcctccttctgagcacactgactggaagaagctatggacagccgtcattacaagatgaacttaaagacaataccactgtcttcaccaggattttggacagactcctagatggttatgacaatcgcctgagaccaggattgggagagcgtgtaaccgaagtgaagactgatatcttcgtcaccagtttcggacccgtttcagaccatgatatggaatatacaatagatgtatttttccgtcaaagctggaaggatgaaaggttaaaatttaaaggacctatgacagtcctccggttaaataacctaatggcaagtaaaatctggactccggacacatttttccacaatggaaagaagtcagtggcccacaacatgaccatgcccaacaaactcctgcggatcacagaggatggcaccttgctgtacaccatgaggctgacagtgagagctgaatgtccgatgcatttggaggacttccctatggatgcccatgcttgcccactaaaatttggaagttatgcttatacaagagcagaagttgtttatgaatggaccagagagccagcacgctcagtggttgtagcagaagatggatcacgtctaaaccagtatgaccttcttggacaaacagtagactctggaattgtccagtcaagtacaggagaatatgttgttatgaccactcatttccacttgaagagaaagattggctactttgttattcaaacatacctgccatgcataatgacagtgattctctcacaagtctccttctggctcaacagagagtctgtaccagcaagaactgtctttggagtaacaactgtgctcaccatgacaacattgagcatcagtgccagaaactccctccctaaggtggcttatgcaacagctatggattggtttattgccgtgtgctatgcctttgtgttctcagctctgattgagtttgccacagtaaactatttcactaagagaggttatgcatgggatggcaaaagtgtggttccagaaaagccaaagaaagtaaaggatcctcttattaagaaaaacaacacttacgctccaacagcaaccagctacacccctaatttggccaggggcgacccgggcttagccaccattgctaaaagtgcaaccatagaacctaaagaggtcaagcccgaaacaaaaccaccagaacccaagaaaacctttaacagtgtcagcaaaattgaccgactgtcaagaatagccttcccgctgctatttggaatctttaacttagtctactgggctacgtatttaaacagagagcctcagctaaaagcccccacaccacatcaatagatcttttactcacattctgttgttcagtcctctgcactgggaatttatttatgttctcaacgcagtaattcccatctgctttattgcctctgtcttaaagaatttgaaagtttccttattttcataattcatttaagaacaagagacccctgtctggcagtctggagcaaagcagactatgcagcttggagacaggattctgacagagcaagcgaaagagcaaagtcatgtcagaaggagacag

SEQ ID NO: 136327 - DNA, 4686 bp, Homo sapiens
  Payload ID: 6682
  Gene Symbol: GABRA1
  Gene Name: gamma-aminobutyric acid (GABA) A receptor, alpha 1
  Uniprot ID: P14867
  ENST ID: ENST00000393943
  CDS Start-End: 784-2154
atatgtgtgggagtgtgtgtgtgagggagagaggcgagacgagtgctctccccacacgtgtaaccctgcatctcccagtttcagagcttgcgttcattcatatgcaggcagtggtttaatatttgatcaaaggtagaatagttgcactaaatagttgtatttttaatgggctcaccttaaaatcgggtgttcataaattgcaagtgtgaaaagactctaagtgcagtccgtatgtctctcaccctttctacccttccctcccccattgccgctccccccaaaaagagaagcttgcagcagattgtagaaggatttgagcctgcagctagagagaaggggattagggccagagtggtgcaagttaaattgtgctgcatataaaaaatgggcggattggtctccagatccagaggctggtaccaccttcctttctaaaataaaatctctctggcatgaagtcaccgcctatttcacatccggtttgccctgggacgtattactactgtcttggtaaagagaaatcttttgttgtatagctgcagattggatattgggaagcaaatttgggtgtgaaatcttcagcaaaggagcacgcagagtccatgatggctcagaccaagtgagtgagaggcagagcgaggacgcccctctgctctggcgcgcccggactcggactcgcagactcgcgctggctccagtctctccacgattctctctcccagacttttccccggtcttaagagatcctgtgtccagagggggccttagctgctccagcccgcgatgaggaaaagtccaggtctgtctgactgtctttgggcctggatcctccttctgagcacactgactggaagaagctatggacagccgtcattacaagatgaacttaaagacaataccactgtcttcaccaggattttggacagactcctagatggttatgacaatcgcctgagaccaggattgggagagcgtgtaaccgaagtgaagactgatatcttcgtcaccagtttcggacccgtttcagaccatgatatggaatatacaatagatgtatttttccgtcaaagctggaaggatgaaaggttaaaatttaaaggacctatgacagtcctccggttaaataacctaatggcaagtaaaatctggactccggacacatttttccacaatggaaagaagtcagtggcccacaacatgaccatgcccaacaaactcctgcggatcacagaggatggcaccttgctgtacaccatgaggctgacagtgagagctgaatgtccgatgcatttggaggacttccctatggatgcccatgcttgcccactaaaatttggaagttatgcttatacaagagcagaagttgtttatgaatggaccagagagccagcacgctcagtggttgtagcagaagatggatcacgtctaaaccagtatgaccttcttggacaaacagtagactctggaattgtccagtcaagtacaggagaatatgttgttatgaccactcatttccacttgaagagaaagattggctactttgttattcaaacatacctgccatgcataatgacagtgattctctcacaagtctccttctggctcaacagagagtctgtaccagcaagaactgtctttggagtaacaactgtgctcaccatgacaacattgagcatcagtgccagaaactccctccctaaggtggcttatgcaacagctatggattggtttattgccgtgtgctatgcctttgtgttctcagctctgattgagtttgccacagtaaactatttcactaagagaggttatgcatgggatggcaaaagtgtggttccagaaaagccaaagaaagtaaaggatcctcttattaagaaaaacaacacttacgctccaacagcaaccagctacacccctaatttggccaggggcgacccgggcttagccaccattgctaaaagtgcaaccatagaacctaaagaggtcaagcccgaaacaaaaccaccagaacccaagaaaacctttaacagtgtcagcaaaattgaccgactgtcaagaatagccttcccgctgctatttggaatctttaacttagtctactgggctacgtatttaaacagagagcctcagctaaaagcccccacaccacatcaatagatcttttactcacattctgttgttcagtcctctgcactgggaatttatttatgttctcaacgcagtaattcccatctgctttattgcctctgtcttaaagaatttgaaagtttccttattttcataattcatttaagaacaagagacccctgtctggcagtctggagcaaagcagactatgcagcttggagacaggattctgacagagcaagcgaaagagcaaagtcatgtcagaaggagacagaatgagagagaaaagagggggaagatggttcaaagatacaagaaaaagtagaaaaaaaaataacacttaactaaaacccctaggtcatttgtagatatatatttccaaatattctaaaaaagatactgtatatgtcaaaaatatttttatgtgaaggtgtttcaaagggtaaattataaatgtttcatgaagaaaaaattttaaaaatctacgtctttattacacaaactatggtgtgcttatgtttttgttttgctttttaaactgatgtatagctttaacattttgtttccaaagctgaagatccccattctttctctttgaaaaaaaaaaaggcctaatgcattattttgtcataaaatgctattttaaaattcatggaactttcatacgtaaaggtgcagttgctcattgtagagcacatttagtccaatgaagataaatgctttaaatagtttacttcactttcatctgagcttttaccactagactcaaggaagaataattttaacagacatgtatactccatagaaactaaactaaaatagtttaaaaatattccctttttcaccctattttcagatagcacatgagcccaacactcacttaattctcattatgaagatgtttttagaggggcaaaaatattttgcaagctctggaattgttgaatgtattcttttatataactacattaaaagctttagattgaaatttatgactagcaaacaaaaatagaatatataaacgatatatgtaaatatacagcatgagattgtacattttttacttttttaaaattgtgttcttaaaatattgtgtaagaatcactgcacttagctgttggaatgttgttaaatgctatggaaatacatttagaacctgcatttaagaacagaacagcaagtatgaaccacatggaacttaaaacatatgggtgtgaagtccacttatgtagacaaaacttataatttccaaactgttgtctagtatacagtgatcagttgctctctgttcaagtcattccacacatttccctattttaggctattataatatagaaagaaaatgggaagcattagttggagctagaaaatgaactgtatattattgctatatttgctaataccaactatttcaataagtgttgtaccatatgtagcattaaatataaaatacataaaagaatgtacagaaaatagcttttattgagtaatattacatttcatttatactgtagcaatatatttgtaggtatactatgtaagggctttaaataaaagaggtccattaatacttccttataaaaattctagtctgtttcattactgcccagatgttttagagataaatatttatgcagaaggtatttttgaagtctccttttgtctgatagagtttaacagatatttaaatttagtgctcagaatccacaagtcacggtctaaacacacttagaatactacagcataaatctgttagcattattgccaaataagacagttgggatccaaacccaagtcttgagcaatgtttttctcaaaaagctgctatccaatgatataggaaaatacattgtgttttcctaaacacacttttctttttaaatgtgcttcattgtttgatttggtcctgcctaaatttcacaagctaggccaatgaaggctgaatcaaagacatttcatccaccaatatcatgtgtagatattatgtatagaaaataaaataaattatggctctaacttctgtgttgctgtttatcttgttatttttcggcgttatactaatgtgtttattgagagcattttaccttccagacttctcatggctaacttttggtctgtattttgctccttagatgtgaatatttcttattagtctgcttcctgctacgcaatgactgcatttctatcatttctcagtttgttagtatatgtggatagtattctactgtataaatgattgcaaagtttatcaaaaacaaattattatatgtagcttttctacagtgctttgctaaaccatgtagtactagttaagtcttccttgaaaataaagatacactcttataggggacagttcctgttcactcccaggaaacttttttaaaagatgacactgaatgtttattgcactttagtgcagtgaagtggcaataaaacctaacatgaatcaaggttgtttatggcagatgcatgtgttgctttacagagtttagcaaaagctcttaattttatgtcatactgtattctactgaataataaagctaacattattcaataataaaa

SEQ ID NO: 136328 - DNA, 4285 bp, Homo sapiens
  Payload ID: 6682
  Gene Symbol: GABRA1
  Gene Name: gamma-aminobutyric acid (GABA) A receptor, alpha 1
  Uniprot ID: P14867
  ENST ID: ENST00000428797
  CDS Start-End: 356-1726
gggagagaggcgagacgagtgctctccccacacgtgtaaccctgcatctcccagtttcagagcttgcgttcattcatatgcaggcagtggtttaatatttgatcaaagctgcagattggatattgggaagcaaatttgggtgtgaaatcttcagcaaaggagcacgcagagtccatgatggctcagaccaagtgagtgagaggcagagcgaggacgcccctctgctctggcgcgcccggactcggactcgcagactcgcgctggctccagtctctccacgattctctctcccagacttttccccggtcttaagagatcctgtgtccagagggggccttagctgctccagcccgcgatgaggaaaagtccaggtctgtctgactgtctttgggcctggatcctccttctgagcacactgactggaagaagctatggacagccgtcattacaagatgaacttaaagacaataccactgtcttcaccaggattttggacagactcctagatggttatgacaatcgcctgagaccaggattgggagagcgtgtaaccgaagtgaagactgatatcttcgtcaccagtttcggacccgtttcagaccatgatatggaatatacaatagatgtatttttccgtcaaagctggaaggatgaaaggttaaaatttaaaggacctatgacagtcctccggttaaataacctaatggcaagtaaaatctggactccggacacatttttccacaatggaaagaagtcagtggcccacaacatgaccatgcccaacaaactcctgcggatcacagaggatggcaccttgctgtacaccatgaggctgacagtgagagctgaatgtccgatgcatttggaggacttccctatggatgcccatgcttgcccactaaaatttggaagttatgcttatacaagagcagaagttgtttatgaatggaccagagagccagcacgctcagtggttgtagcagaagatggatcacgtctaaaccagtatgaccttcttggacaaacagtagactctggaattgtccagtcaagtacaggagaatatgttgttatgaccactcatttccacttgaagagaaagattggctactttgttattcaaacatacctgccatgcataatgacagtgattctctcacaagtctccttctggctcaacagagagtctgtaccagcaagaactgtctttggagtaacaactgtgctcaccatgacaacattgagcatcagtgccagaaactccctccctaaggtggcttatgcaacagctatggattggtttattgccgtgtgctatgcctttgtgttctcagctctgattgagtttgccacagtaaactatttcactaagagaggttatgcatgggatggcaaaagtgtggttccagaaaagccaaagaaagtaaaggatcctcttattaagaaaaacaacacttacgctccaacagcaaccagctacacccctaatttggccaggggcgacccgggcttagccaccattgctaaaagtgcaaccatagaacctaaagaggtcaagcccgaaacaaaaccaccagaacccaagaaaacctttaacagtgtcagcaaaattgaccgactgtcaagaatagccttcccgctgctatttggaatctttaacttagtctactgggctacgtatttaaacagagagcctcagctaaaagcccccacaccacatcaatagatcttttactcacattctgttgttcagtcctctgcactgggaatttatttatgttctcaacgcagtaattcccatctgctttattgcctctgtcttaaagaatttgaaagtttccttattttcataattcatttaagaacaagagacccctgtctggcagtctggagcaaagcagactatgcagcttggagacaggattctgacagagcaagcgaaagagcaaagtcatgtcagaaggagacagaatgagagagaaaagagggggaagatggttcaaagatacaagaaaaagtagaaaaaaaaataacacttaactaaaacccctaggtcatttgtagatatatatttccaaatattctaaaaaagatactgtatatgtcaaaaatatttttatgtgaaggtgtttcaaagggtaaattataaatgtttcatgaagaaaaaattttaaaaatctacgtctttattacacaaactatggtgtgcttatgtttttgttttgctttttaaactgatgtatagctttaacattttgtttccaaagctgaagatccccattctttctctttgaaaaaaaaaaaggcctaatgcattattttgtcataaaatgctattttaaaattcatggaactttcatacgtaaaggtgcagttgctcattgtagagcacatttagtccaatgaagataaatgctttaaatagtttacttcactttcatctgagcttttaccactagactcaaggaagaataattttaacagacatgtatactccatagaaactaaactaaaatagtttaaaaatattccctttttcaccctattttcagatagcacatgagcccaacactcacttaattctcattatgaagatgtttttagaggggcaaaaatattttgcaagctctggaattgttgaatgtattcttttatataactacattaaaagctttagattgaaatttatgactagcaaacaaaaatagaatatataaacgatatatgtaaatatacagcatgagattgtacattttttacttttttaaaattgtgttcttaaaatattgtgtaagaatcactgcacttagctgttggaatgttgttaaatgctatggaaatacatttagaacctgcatttaagaacagaacagcaagtatgaaccacatggaacttaaaacatatgggtgtgaagtccacttatgtagacaaaacttataatttccaaactgttgtctagtatacagtgatcagttgctctctgttcaagtcattccacacatttccctattttaggctattataatatagaaagaaaatgggaagcattagttggagctagaaaatgaactgtatattattgctatatttgctaataccaactatttcaataagtgttgtaccatatgtagcattaaatataaaatacataaaagaatgtacagaaaatagcttttattgagtaatattacatttcatttatactgtagcaatatatttgtaggtatactatgtaagggctttaaataaaagaggtccattaatacttccttataaaaattctagtctgtttcattactgcccagatgttttagagataaatatttatgcagaaggtatttttgaagtctccttttgtctgatagagtttaacagatatttaaatttagtgctcagaatccacaagtcacggtctaaacacacttagaatactacagcataaatctgttagcattattgccaaataagacagttgggatccaaacccaagtcttgagcaatgtttttctcaaaaagctgctatccaatgatataggaaaatacattgtgttttcctaaacacacttttctttttaaatgtgcttcattgtttgatttggtcctgcctaaatttcacaagctaggccaatgaaggctgaatcaaagacatttcatccaccaatatcatgtgtagatattatgtatagaaaataaaataaattatggctctaacttctgtgttgctgtttatcttgttatttttcggcgttatactaatgtgtttattgagagcattttaccttccagacttctcatggctaacttttggtctgtattttgctccttagatgtgaatatttcttattagtctgcttcctgctacgcaatgactgcatttctatcatttctcagtttgttagtatatgtggatagtattctactgtataaatgattgcaaagtttatcaaaaacaaattattatatgtagcttttctacagtgctttgctaaaccatgtagtactagttaagtcttccttgaaaataaagatacactcttataggggacagttcctgttcactcccaggaaacttttttaaaagatgacactgaatgtttattgcactttagtgcagtgaagtggcaataaaacctaacatgaatcaaggttgtttatggcagatgcatgtgttgctttacagagtttagcaaaagctcttaattttatgtcatactgtattctactgaataataaagctaacattattcaataataaaatggaatacttgactctcttttcatgtt

SEQ ID NO: 136329 - DNA, 4087 bp, Homo sapiens
  Payload ID: 6682
  Gene Symbol: GABRA1
  Gene Name: gamma-aminobutyric acid (GABA) A receptor, alpha 1
  Uniprot ID: P14867
  ENST ID: ENST00000437025
  CDS Start-End: 185-1555
gatacacagacagagctttgaacgtggcttttcctagctggagagacaggaatgttatagtcggggggggggggcggggggagacggggggagagagagagagagagaagaaggagagcgagcgagcgagcaagggagcgagcaggacaggagcctgatcccacagcagctgctccagcccgcgatgaggaaaagtccaggtctgtctgactgtctttgggcctggatcctccttctgagcacactgactggaagaagctatggacagccgtcattacaagatgaacttaaagacaataccactgtcttcaccaggattttggacagactcctagatggttatgacaatcgcctgagaccaggattgggagagcgtgtaaccgaagtgaagactgatatcttcgtcaccagtttcggacccgtttcagaccatgatatggaatatacaatagatgtatttttccgtcaaagctggaaggatgaaaggttaaaatttaaaggacctatgacagtcctccggttaaataacctaatggcaagtaaaatctggactccggacacatttttccacaatggaaagaagtcagtggcccacaacatgaccatgcccaacaaactcctgcggatcacagaggatggcaccttgctgtacaccatgaggctgacagtgagagctgaatgtccgatgcatttggaggacttccctatggatgcccatgcttgcccactaaaatttggaagttatgcttatacaagagcagaagttgtttatgaatggaccagagagccagcacgctcagtggttgtagcagaagatggatcacgtctaaaccagtatgaccttcttggacaaacagtagactctggaattgtccagtcaagtacaggagaatatgttgttatgaccactcatttccacttgaagagaaagattggctactttgttattcaaacatacctgccatgcataatgacagtgattctctcacaagtctccttctggctcaacagagagtctgtaccagcaagaactgtctttggagtaacaactgtgctcaccatgacaacattgagcatcagtgccagaaactccctccctaaggtggcttatgcaacagctatggattggtttattgccgtgtgctatgcctttgtgttctcagctctgattgagtttgccacagtaaactatttcactaagagaggttatgcatgggatggcaaaagtgtggttccagaaaagccaaagaaagtaaaggatcctcttattaagaaaaacaacacttacgctccaacagcaaccagctacacccctaatttggccaggggcgacccgggcttagccaccattgctaaaagtgcaaccatagaacctaaagaggtcaagcccgaaacaaaaccaccagaacccaagaaaacctttaacagtgtcagcaaaattgaccgactgtcaagaatagccttcccgctgctatttggaatctttaacttagtctactgggctacgtatttaaacagagagcctcagctaaaagcccccacaccacatcaatagatcttttactcacattctgttgttcagtcctctgcactgggaatttatttatgttctcaacgcagtaattcccatctgctttattgcctctgtcttaaagaatttgaaagtttccttattttcataattcatttaagaacaagagacccctgtctggcagtctggagcaaagcagactatgcagcttggagacaggattctgacagagcaagcgaaagagcaaagtcatgtcagaaggagacagaatgagagagaaaagagggggaagatggttcaaagatacaagaaaaagtagaaaaaaaaataacacttaactaaaacccctaggtcatttgtagatatatatttccaaatattctaaaaaagatactgtatatgtcaaaaatatttttatgtgaaggtgtttcaaagggtaaattataaatgtttcatgaagaaaaaattttaaaaatctacgtctttattacacaaactatggtgtgcttatgtttttgttttgctttttaaactgatgtatagctttaacattttgtttccaaagctgaagatccccattctttctctttgaaaaaaaaaaaggcctaatgcattattttgtcataaaatgctattttaaaattcatggaactttcatacgtaaaggtgcagttgctcattgtagagcacatttagtccaatgaagataaatgctttaaatagtttacttcactttcatctgagcttttaccactagactcaaggaagaataattttaacagacatgtatactccatagaaactaaactaaaatagtttaaaaatattccctttttcaccctattttcagatagcacatgagcccaacactcacttaattctcattatgaagatgtttttagaggggcaaaaatattttgcaagctctggaattgttgaatgtattcttttatataactacattaaaagctttagattgaaatttatgactagcaaacaaaaatagaatatataaacgatatatgtaaatatacagcatgagattgtacattttttacttttttaaaattgtgttcttaaaatattgtgtaagaatcactgcacttagctgttggaatgttgttaaatgctatggaaatacatttagaacctgcatttaagaacagaacagcaagtatgaaccacatggaacttaaaacatatgggtgtgaagtccacttatgtagacaaaacttataatttccaaactgttgtctagtatacagtgatcagttgctctctgttcaagtcattccacacatttccctattttaggctattataatatagaaagaaaatgggaagcattagttggagctagaaaatgaactgtatattattgctatatttgctaataccaactatttcaataagtgttgtaccatatgtagcattaaatataaaatacataaaagaatgtacagaaaatagcttttattgagtaatattacatttcatttatactgtagcaatatatttgtaggtatactatgtaagggctttaaataaaagaggtccattaatacttccttataaaaattctagtctgtttcattactgcccagatgttttagagataaatatttatgcagaaggtatttttgaagtctccttttgtctgatagagtttaacagatatttaaatttagtgctcagaatccacaagtcacggtctaaacacacttagaatactacagcataaatctgttagcattattgccaaataagacagttgggatccaaacccaagtcttgagcaatgtttttctcaaaaagctgctatccaatgatataggaaaatacattgtgttttcctaaacacacttttctttttaaatgtgcttcattgtttgatttggtcctgcctaaatttcacaagctaggccaatgaaggctgaatcaaagacatttcatccaccaatatcatgtgtagatattatgtatagaaaataaaataaattatggctctaacttctgtgttgctgtttatcttgttatttttcggcgttatactaatgtgtttattgagagcattttaccttccagacttctcatggctaacttttggtctgtattttgctccttagatgtgaatatttcttattagtctgcttcctgctacgcaatgactgcatttctatcatttctcagtttgttagtatatgtggatagtattctactgtataaatgattgcaaagtttatcaaaaacaaattattatatgtagcttttctacagtgctttgctaaaccatgtagtactagttaagtcttccttgaaaataaagatacactcttataggggacagttcctgttcactcccaggaaacttttttaaaagatgacactgaatgtttattgcactttagtgcagtgaagtggcaataaaacctaacatgaatcaaggttgtttatggcagatgcatgtgttgctttacagagtttagcaaaagctcttaattttatgtcatactgtattctactgaataataaagctaacattattcaataataaaa

SEQ ID NO: 136330 - DNA, 566 bp, Homo sapiens
  Payload ID: 6682
  Gene Symbol: GABRA1
  Gene Name: gamma-aminobutyric acid (GABA) A receptor, alpha 1
  ENST ID: ENST00000519621
  CDS Start-End: 63-566
gagagcgagcgagcgagcaagggagcgagcaggacaggagcctgatcccacagcagcccgcgatgaggaaaagtccaggtctgtctgactgtctttgggcctggatcctccttctgagcacactgactggaagaagctatggacagccgtcattacaagatgaacttaaagacaataccactgtcttcaccaggattttggacagactcctagatggttatgacaatcgcctgagaccaggattgggagagcgtgtaaccgaagtgaagactgatatcttcgtcaccagtttcggacccgtttcagaccatgatatggaatatacaatagatgtatttttccgtcaaagctggaaggatgaaaggttaaaatttaaaggacctatgacagtcctccggttaaataacctaatggcaagtaaaatctggactccggacacatttttccacaatggaaagaagtcagtggcccacaacatgaccatgcccaacaaactcctgcggatcacagaggatggcaccttgctgtacaccatgaggctgacagtgagagctgaatgtccgatg

SEQ ID NO: 136331 - DNA, 591 bp, Homo sapiens
  Payload ID: 6682
  Gene Symbol: GABRA1
  Gene Name: gamma-aminobutyric acid (GABA) A receptor, alpha 1
  ENST ID: ENST00000522651
  CDS Start-End: 253-591
agcttaaaaattttaatgcacagttcactgtggaaactgaaatcttaaaagtccaaatatttagatgataaacaacaagaagagaataaaccaaactatattctaaatataaaacctagagataaacaactcacagtttttatgttgagcaatactgtcacctgaaagcgtttcagcttgtattcttttacaggagaataaggacactgatatatttctgaatggagaaatggaagggaaagtggagaatggatggtccaggtttccattgcttccaatgaggtgtcatatcccagtgagctgctccagcccgcgatgaggaaaagtccaggtctgtctgactgtctttgggcctggatcctccttctgagcacactgactggaagaagctatggacagccgtcattacaagatgaacttaaagacaataccactgtcttcaccaggattttggacagactcctagatggttatgacaatcgcctgagaccaggattgggagagcgtgtaaccgaagtgaagactgatatcttcgtcaccagtttcggacccgtttcagaccatgatatggaatatacaatagatgtattt

SEQ ID NO: 136332 - DNA, 414 bp, Homo sapiens
  Payload ID: 6682
  Gene Symbol: GABRA1
  Gene Name: gamma-aminobutyric acid (GABA) A receptor, alpha 1
  ENST ID: ENST00000521339
  CDS Start-End: 142-414
ggaaggcacgctcttgtcctggctgcaaaattgcctgtttttccctttccagtggacgctggtgaaatgccctcttgtgtaggggtctctcccattctgaacacgaaaactcaacttagtctttgatatggatggcatgggatgctgctccagcccgcgatgaggaaaagtccaggtctgtctgactgtctttgggcctggatcctccttctgagcacactgactggaagaagctatggacagccgtcattacaagatgaacttaaagacaataccactgtcttcaccaggattttggacagactcctagatggttatgacaatcgcctgagaccaggattgggagagcgtgtaaccgaagtgaagactgatatcttcgtcaccagtttcggacccgtttcagaccatgatatg

SEQ ID NO: 136333 - DNA, 411 bp, Homo sapiens
  Payload ID: 6682
  Gene Symbol: GABRA1
  Gene Name: gamma-aminobutyric acid (GABA) A receptor, alpha 1
  ENST ID: ENST00000635096
  CDS Start-End: 307-411
atatgtgtgggagtgtgtgtgtgagggagagaggcgagacgagtgctctccccacacgtctgcagattggatattgggaagcaaatttgggtgtgaaatcttcagcaaaggagcacgcagagtccatgatggctcagaccaagtgagtgagaggcagagcgaggacgcccctctgctctggcgcgcccggactcggactcgcagactcgcgctggctccagtctctccacgattctctctcccagacttttccccggtcttaagagatcctgtgtccagagggggccttagctgctccagcccgcgatgaggaaaagtccaggtctgtctgactgtctttgggcctggatcctccttctgagcacactgactggaagaagctatggacagccgtcattacaagatgaactt

SEQ ID NO: 136334 - DNA, 1070 bp, Homo sapiens
  Payload ID: 6682
  Gene Symbol: GABRA1
  Gene Name: gamma-aminobutyric acid (GABA) A receptor, alpha 1
  ENST ID: ENST00000634335
  CDS Start-End: 215-1070
atatttctgaatggagaaatggaagggaaagtggagaatggatggtccaggtttccattgcttccaatgaggtgtcatatcccagtgaggtcatttcctgacttcaaagcattcatctaaactgcctcagtcagccctggtggttataacctgatgtttcttgctagagacattgatctctacttattctacttttcagctgctccagcccgcgatgaggaaaagtccaggtctgtctgactgtctttgggcctggatcctccttctgagcacactgactggaagaagctatggacagccgtcattacaagatgaacttaaagacaataccactgtcttcaccaggattttggacagactcctagatggttatgacaatcgcctgagaccaggattgggagagcgtgtaaccgaagtgaagactgatatcttcgtcaccagtttcggacccgtttcagaccatgatatggaatatacaatagatgtatttttccgtcaaagctggaaggatgaaaggttaaaatttaaaggacctatgacagtcctccggttaaataacctaatggcaagtaaaatctggactccggacacatttttccacaatggaaagaagtcagtggcccacaacatgaccatgcccaacaaactcctgcggatcacagaggatggcaccttgctgtacaccatgaggctgacagtgagagctgaatgtccgatgcatttggaggacttccctatggatgcccatgcttgcccactaaaatttggaagttatgcttatacaagagcagaagttgtttatgaatggaccagagagccagcacgctcagtggttgtagcagaagatggatcacgtctaaaccagtatgaccttcttggacaaacagtagactctggaattgtccagtcaagtacaggagaatatgttgttatgaccactcatttccacttgaagagaaagattggctactttgttattcaaacatacctgccatgcataatgacagtgattctctcacaagtctccttctggctcaacagagagtctgtaccagcaagaactgtctttg

SEQ ID NO: 136335 - DNA, 2770 bp, Homo sapiens
  Payload ID: 6683
  Gene Symbol: GABRA2
  Gene Name: gamma-aminobutyric acid (GABA) A receptor, alpha 2
  Uniprot ID: P47869
  ENST ID: ENST00000356504
  CDS Start-End: 674-2029
aaacgcgtcgtttcgcagcacttgatcggaacccggctgcctctaagacttggtcttgggcaaccgtgggtgggcaggaagggaaattatttattttattttgttaaggggagtgaagaaaagaagacgtgaggaccgcagttcactgtaatgtagagtaattgcaaaagtgggctgcctgcccctagcttttcccgctgtggttgcggaggtggtcttggttgagggggttgtggcgtgaagtacccatctctcctctcctctcctttcctcccctcccctccaacccattccctttccagctgctatgccagtttaaagtccagggtgttattattacgtgtgcgcaaaacagtgtttgctgacgatgaggctgggggacgttcctggcagagagaagtctgattacttggtcatcttgctgttaaagaaagaaagaaagaaaaaaagaaagaaagaaacagaaaggaaaagggtgggggtgggggtccataaaaaagaaatcgtctctcaatcatcaagtcctacacagagtccaggaagtaatctccatagctttaacacgaatccctaactaaaaggatattctttggggttacttggatagtgaaactgaaggcaattttaagtgtattttgtttttcattccatggctttgtaaagagcggcggtgatgaagacaaaattgaacatctacaacatgcagttcctgctttttgttttcttggtgtgggaccctgccaggttggtgctggctaacatccaagaagatgaggctaaaaataacattaccatctttacgagaattcttgacagacttctggatggttacgataatcggcttagaccaggactgggagacagtattactgaagtcttcactaacatctacgtgaccagttttggccctgtctcagatacagatatggaatatacaattgatgttttctttcgacaaaaatggaaagatgaacgtttaaaatttaaaggtcctatgaatatccttcgactaaacaatttaatggctagcaaaatctggactccagataccttttttcacaatgggaaaaaatcagtagctcataatatgacaatgccaaataagttgcttcgaattcaggatgatgggactctgctgtataccatgaggcttacagttcaagctgaatgcccaatgcacttggaggatttcccaatggatgctcattcatgtcctctgaaatttggcagctatgcatatacaacttcagaggtcacttatatttggacttacaatgcatctgattcagtacaggttgctcctgatggctctaggttaaatcaatatgacctgctgggccaatcaatcggaaaggagacaattaaatccagtacaggtgaatatactgtaatgacagctcatttccacctgaaaagaaaaattgggtattttgtgattcaaacctatctgccttgcatcatgactgtcattctctcccaagtttcattctggcttaacagagaatctgtgcctgcaagaactgtgtttggagtaacaactgtcctaacaatgacaactctaagcatcagtgctcggaattctctccccaaagtggcttatgcaactgccatggactggtttattgctgtttgttatgcatttgtgttctctgccctaattgaatttgcaactgttaattacttcaccaaaagaggatgggcttgggatgggaagagtgtagtaaatgacaagaaaaaagaaaaggcttccgttatgatacagaacaacgcttatgcagtggctgttgccaattatgccccgaatctttcaaaagatccagttctctccaccatctccaagagtgcaaccacgccagaacccaacaagaagccagaaaacaagccagctgaagcaaagaaaactttcaacagtgttagcaaaattgacagaatgtccagaatagtttttccagttttgtttggtacctttaatttagtttactgggctacatatttaaacagagaacctgtattaggggtcagtccttgaattgagacccatgttatctttgggatgtatagcaacattaaatttggtttgttttgctatgtacagtctgactaataactgctaatttgtgatccaacatgtacagtatgtatatagtgacatagcttaccagtagacctttaatggagacatgcatttgctaactcatggaactgcagacagaaagcactccatgcgaaaacagccattgccttttttaaagatttaccctaggacctgatttaaagtgaatttcaagtgacctgattaatttcctattcttccaaatgagatgaaaatggggatcctgtacaaccctttgtggacccttttggtttagctcttaagtaggggtattttctactgttgcttaattatgatggaagataacattgtcattcctagatgaatcctttgaagtaacaaacattgtatctgacatcagctctgttcatgagtgctcagagtccctgctaatgtaattggaagcttggtacacataagaaaaactagagatttgaaatcagctatgaattactctatatagtatctatagccatgtacatattacagcatgacaagctcaaataattatgagtcagcccgaaaggatgttaattatgcctacgatgtaataactattggaatgtcatggtcattacatttttagcttcagagtttatttgaaagtaataattgaaatcctacaatttattttaatcattggaaactaccttaatt

SEQ ID NO: 136336 - DNA, 2525 bp, Homo sapiens
  Payload ID: 6683
  Gene Symbol: GABRA2
  Gene Name: gamma-aminobutyric acid (GABA) A receptor, alpha 2
  Uniprot ID: P47869
  ENST ID: ENST00000381620
  CDS Start-End: 205-1560
cctagcgctcctctccggcttccaccagcccatcgctccacgctctcttggctgctgcagtctcggtctctctctctctctctctctctctctctctctctctctctctctctctctctctctctcccaagtttcctatctcgtcaagatcagggcaaaaggaagaaaacaccgaattctgcttgccgtttcagagcggcggtgatgaagacaaaattgaacatctacaacatgcagttcctgctttttgttttcttggtgtgggaccctgccaggttggtgctggctaacatccaagaagatgaggctaaaaataacattaccatctttacgagaattcttgacagacttctggatggttacgataatcggcttagaccaggactgggagacagtattactgaagtcttcactaacatctacgtgaccagttttggccctgtctcagatacagatatggaatatacaattgatgttttctttcgacaaaaatggaaagatgaacgtttaaaatttaaaggtcctatgaatatccttcgactaaacaatttaatggctagcaaaatctggactccagataccttttttcacaatgggaaaaaatcagtagctcataatatgacaatgccaaataagttgcttcgaattcaggatgatgggactctgctgtataccatgaggcttacagttcaagctgaatgcccaatgcacttggaggatttcccaatggatgctcattcatgtcctctgaaatttggcagctatgcatatacaacttcagaggtcacttatatttggacttacaatgcatctgattcagtacaggttgctcctgatggctctaggttaaatcaatatgacctgctgggccaatcaatcggaaaggagacaattaaatccagtacaggtgaatatactgtaatgacagctcatttccacctgaaaagaaaaattgggtattttgtgattcaaacctatctgccttgcatcatgactgtcattctctcccaagtttcattctggcttaacagagaatctgtgcctgcaagaactgtgtttggagtaacaactgtcctaacaatgacaactctaagcatcagtgctcggaattctctccccaaagtggcttatgcaactgccatggactggtttattgctgtttgttatgcatttgtgttctctgccctaattgaatttgcaactgttaattacttcaccaaaagaggatgggcttgggatgggaagagtgtagtaaatgacaagaaaaaagaaaaggcttccgttatgatacagaacaacgcttatgcagtggctgttgccaattatgccccgaatctttcaaaagatccagttctctccaccatctccaagagtgcaaccacgccagaacccaacaagaagccagaaaacaagccagctgaagcaaagaaaactttcaacagtgttagcaaaattgacagaatgtccagaatagtttttccagttttgtttggtacctttaatttagtttactgggctacatatttaaacagagaacctgtattaggggtcagtccttgaattgagacccatgttatctttgggatgtatagcaacattaaatttggtttgttttgctatgtacagtctgactaataactgctaatttgtgatccaacatgtacagtatgtatatagtgacatagcttaccagtagacctttaatggagacatgcatttgctaactcatggaactgcagacagaaagcactccatgcgaaaacagccattgccttttttaaagatttaccctaggacctgatttaaagtgaatttcaagtgacctgattaatttcctattcttccaaatgagatgaaaatggggatcctgtacaaccctttgtggacccttttggtttagctcttaagtaggggtattttctactgttgcttaattatgatggaagataacattgtcattcctagatgaatcctttgaagtaacaaacattgtatctgacatcagctctgttcatgagtgctcagagtccctgctaatgtaattggaagcttggtacacataagaaaaactagagatttgaaatcagctatgaattactctatatagtatctatagccatgtacatattacagcatgacaagctcaaataattatgagtcagcccgaaaggatgttaattatgcctacgatgtaataactattggaatgtcatggtcattacatttttagcttcagagtttatttgaaagtaataattgaaatcctacaatttattttaatcattggaaactaccttaattaaaaaaaaagaaaagaaatgtgtcttaacatttccaggtatgtgttgtattgaaattgatcagctaaattttacgggtgctggagactggaaaaagcatccagtttggttgctgtggagcaacatgcatattggattagaaaattgtgccaaaaactcccactgatgagaattcataggtgccccacactatgacaaacacttatatgattctcctctttcctg

SEQ ID NO: 136337 - DNA, 3401 bp, Homo sapiens
  Payload ID: 6683
  Gene Symbol: GABRA2
  Gene Name: gamma-aminobutyric acid (GABA) A receptor, alpha 2
  Uniprot ID: P47869
  ENST ID: ENST00000514090
  CDS Start-End: 182-1537
tcaaacgcgtcgtttcgcagcacttgatcggaacccggctgcctctaagacttggtcttgggcaaccgtgggtgggcaggaagggaaattatttattttattttgttaaggggagtgaagaaaagaagacgtgaggaccgcagttcactgtaatgtagagtaattgcaaaaagcggcggtgatgaagacaaaattgaacatctacaacatgcagttcctgctttttgttttcttggtgtgggaccctgccaggttggtgctggctaacatccaagaagatgaggctaaaaataacattaccatctttacgagaattcttgacagacttctggatggttacgataatcggcttagaccaggactgggagacagtattactgaagtcttcactaacatctacgtgaccagttttggccctgtctcagatacagatatggaatatacaattgatgttttctttcgacaaaaatggaaagatgaacgtttaaaatttaaaggtcctatgaatatccttcgactaaacaatttaatggctagcaaaatctggactccagataccttttttcacaatgggaaaaaatcagtagctcataatatgacaatgccaaataagttgcttcgaattcaggatgatgggactctgctgtataccatgaggcttacagttcaagctgaatgcccaatgcacttggaggatttcccaatggatgctcattcatgtcctctgaaatttggcagctatgcatatacaacttcagaggtcacttatatttggacttacaatgcatctgattcagtacaggttgctcctgatggctctaggttaaatcaatatgacctgctgggccaatcaatcggaaaggagacaattaaatccagtacaggtgaatatactgtaatgacagctcatttccacctgaaaagaaaaattgggtattttgtgattcaaacctatctgccttgcatcatgactgtcattctctcccaagtttcattctggcttaacagagaatctgtgcctgcaagaactgtgtttggagtaacaactgtcctaacaatgacaactctaagcatcagtgctcggaattctctccccaaagtggcttatgcaactgccatggactggtttattgctgtttgttatgcatttgtgttctctgccctaattgaatttgcaactgttaattacttcaccaaaagaggatgggcttgggatgggaagagtgtagtaaatgacaagaaaaaagaaaaggcttccgttatgatacagaacaacgcttatgcagtggctgttgccaattatgccccgaatctttcaaaagatccagttctctccaccatctccaagagtgcaaccacgccagaacccaacaagaagccagaaaacaagccagctgaagcaaagaaaactttcaacagtgttagcaaaattgacagaatgtccagaatagtttttccagttttgtttggtacctttaatttagtttactgggctacatatttaaacagagaacctgtattaggggtcagtccttgaattgagacccatgttatctttgggatgtatagcaacattaaatttggtttgttttgctatgtacagtctgactaataactgctaatttgtgatccaacatgtacagtatgtatatagtgacatagcttaccagtagacctttaatggagacatgcatttgctaactcatggaactgcagacagaaagcactccatgcgaaaacagccattgccttttttaaagatttaccctaggacctgatttaaagtgaatttcaagtgacctgattaatttcctattcttccaaatgagatgaaaatggggatcctgtacaaccctttgtggacccttttggtttagctcttaagtaggggtattttctactgttgcttaattatgatggaagataacattgtcattcctagatgaatcctttgaagtaacaaacattgtatctgacatcagctctgttcatgagtgctcagagtccctgctaatgtaattggaagcttggtacacataagaaaaactagagatttgaaatcagctatgaattactctatatagtatctatagccatgtacatattacagcatgacaagctcaaataattatgagtcagcccgaaaggatgttaattatgcctacgatgtaataactattggaatgtcatggtcattacatttttagcttcagagtttatttgaaagtaataattgaaatcctacaatttattttaatcattggaaactaccttaattaaaaaaaaagaaaagaaatgtgtcttaacatttccaggtatgtgttgtattgaaattgatcagctaaattttacgggtgctggagactggaaaaagcatccagtttggttgctgtggagcaacatgcatattggattagaaaattgtgccaaaaactcccactgatgagaattcataggtgccccacactatgacaaacacttatatgattctcctctttcctgtttactgcaaattctgccttaaggcttcttttcaagactcagaagccactaattataaaggaaagggcagttaattggcacatttttctcttgtgaaagcagttctttcagataagaattaatgtaaatctgcttttgtaaattgcaactttaaatttcgctgactcaaatttacaacagctttgtataccagaagaggttttggtaagggttgaacatttttacactgcaactttaaaacatcaccaatagattgtggattatttcacgtgcacaaacatacacacacacacacacacacacacacatacacagctaaattagaaaacacaattttaaattttatataattactagttattaatgggtaaaattcatttttcttttaatatcttaaaatattatttatgccccgaaatatgctaataaaagttaaagattgtgtattatgcctagattcaaagtttttggcaaacttcaaatacttttgattgacatgtacattagcagttattagttgacttttactaaaacatgcacctttacgatggtgtttttgtagaaacataagtagtcaaatagtaacatttattgcagttttgtacagtatttgagtatagtgcataaataggtatgttcataaaatcaataaaaggagtatctatggaaataagcaaaatatcagcaaaaattgctattcctttgcctcatttaatttttaaaatttctttgtttccatgtgattctattatatgctttgcatgcttgtataaaaccaaggtcacaaatgcaacttattaacggaatttgccaagaagacagccttgacattaaaaattccctcacaagaggtaatccataatccttaataaaataaaattgttacatgagccaataaa

SEQ ID NO: 136338 - DNA, 1017 bp, Homo sapiens
  Payload ID: 6683
  Gene Symbol: GABRA2
  Gene Name: gamma-aminobutyric acid (GABA) A receptor, alpha 2
  ENST ID: ENST00000513005
  CDS Start-End: 8-208
ggcggtgatgaagacaaaattgaacatctacaacatgcagttcctgctttttgttttcttggtgtgggaccctgccaggttggtgctggctaacatccaagaagatgaggctaaaaataacattaccatctttacgagaattcttgacagacttctggatggttacgataatcggcttagaccaggactgggaggaatatacaattgatgttttctttcgacaaaaatggaaagatgaacgtttaaaatttaaaggtcctatgaatatccttcgactaaacaatttaatggctagcaaaatctggactccagataccttttttcacaatgggaaaaaatcagtagctcataatatgacaatgccaaataagttgcttcgaattcaggatgatgggactctgctgtataccatgaggcttacagttcaagctgaatgcccaatgcacttggaggatttcccaatggatgctcattcatgtcctctgaaatttggcagctgagtaacaactgtcctaacaatgacaactctaagcatcagtgctcggaattctctccccaaagtggcttatgcaactgccatggactggtttattgctgtttgttatgcatttgtgttctctgccctaattgaatttgcaactgttaattacttcaccaaaagaggatgggcttgggatgggaagagtgtagtaaatgacaagaaaaaagaaaaggcttccgttatgatacagaacaacgcttatgcagtggctgttgccaattatgccccgaatctttcaaaagatccagttctctccaccatctccaagagtgcaaccacgccagaacccaacaagaagccagaaaacaagccagctgaagcaaagaaaactttcaacagtgttagcaaaattgacagaatgtccagaatagtttttccagttttgtttggtacctttaatttagtttactgggctacatatttaaacagagaacctgtattaggggtcagtccttgaattgagacccatgttatct

SEQ ID NO: 136339 - DNA, 3411 bp, Homo sapiens
  Payload ID: 6683
  Gene Symbol: GABRA2
  Gene Name: gamma-aminobutyric acid (GABA) A receptor, alpha 2
  Uniprot ID: P47869
  ENST ID: ENST00000510861
  CDS Start-End: 175-1530
gagaacaagctttagagatgataaaagcacagtatcttggcaaccttttgtgttgggttatttttaaaaaatggataatattgtgctctagttctcatttattcagctacttgctgagtgatagcaacattacaactacagaacctgtatgtcatcttgacattagcggcggtgatgaagacaaaattgaacatctacaacatgcagttcctgctttttgttttcttggtgtgggaccctgccaggttggtgctggctaacatccaagaagatgaggctaaaaataacattaccatctttacgagaattcttgacagacttctggatggttacgataatcggcttagaccaggactgggagacagtattactgaagtcttcactaacatctacgtgaccagttttggccctgtctcagatacagatatggaatatacaattgatgttttctttcgacaaaaatggaaagatgaacgtttaaaatttaaaggtcctatgaatatccttcgactaaacaatttaatggctagcaaaatctggactccagataccttttttcacaatgggaaaaaatcagtagctcataatatgacaatgccaaataagttgcttcgaattcaggatgatgggactctgctgtataccatgaggcttacagttcaagctgaatgcccaatgcacttggaggatttcccaatggatgctcattcatgtcctctgaaatttggcagctatgcatatacaacttcagaggtcacttatatttggacttacaatgcatctgattcagtacaggttgctcctgatggctctaggttaaatcaatatgacctgctgggccaatcaatcggaaaggagacaattaaatccagtacaggtgaatatactgtaatgacagctcatttccacctgaaaagaaaaattgggtattttgtgattcaaacctatctgccttgcatcatgactgtcattctctcccaagtttcattctggcttaacagagaatctgtgcctgcaagaactgtgtttggagtaacaactgtcctaacaatgacaactctaagcatcagtgctcggaattctctccccaaagtggcttatgcaactgccatggactggtttattgctgtttgttatgcatttgtgttctctgccctaattgaatttgcaactgttaattacttcaccaaaagaggatgggcttgggatgggaagagtgtagtaaatgacaagaaaaaagaaaaggcttccgttatgatacagaacaacgcttatgcagtggctgttgccaattatgccccgaatctttcaaaagatccagttctctccaccatctccaagagtgcaaccacgccagaacccaacaagaagccagaaaacaagccagctgaagcaaagaaaactttcaacagtgttagcaaaattgacagaatgtccagaatagtttttccagttttgtttggtacctttaatttagtttactgggctacatatttaaacagagaacctgtattaggggtcagtccttgaattgagacccatgttatctttgggatgtatagcaacattaaatttggtttgttttgctatgtacagtctgactaataactgctaatttgtgatccaacatgtacagtatgtatatagtgacatagcttaccagtagacctttaatggagacatgcatttgctaactcatggaactgcagacagaaagcactccatgcgaaaacagccattgccttttttaaagatttaccctaggacctgatttaaagtgaatttcaagtgacctgattaatttcctattcttccaaatgagatgaaaatggggatcctgtacaaccctttgtggacccttttggtttagctcttaagtaggggtattttctactgttgcttaattatgatggaagataacattgtcattcctagatgaatcctttgaagtaacaaacattgtatctgacatcagctctgttcatgagtgctcagagtccctgctaatgtaattggaagcttggtacacataagaaaaactagagatttgaaatcagctatgaattactctatatagtatctatagccatgtacatattacagcatgacaagctcaaataattatgagtcagcccgaaaggatgttaattatgcctacgatgtaataactattggaatgtcatggtcattacatttttagcttcagagtttatttgaaagtaataattgaaatcctacaatttattttaatcattggaaactaccttaattaaaaaaaaagaaaagaaatgtgtcttaacatttccaggtatgtgttgtattgaaattgatcagctaaattttacgggtgctggagactggaaaaagcatccagtttggttgctgtggagcaacatgcatattggattagaaaattgtgccaaaaactcccactgatgagaattcataggtgccccacactatgacaaacacttatatgattctcctctttcctgtttactgcaaattctgccttaaggcttcttttcaagactcagaagccactaattataaaggaaagggcagttaattggcacatttttctcttgtgaaagcagttctttcagataagaattaatgtaaatctgcttttgtaaattgcaactttaaatttcgctgactcaaatttacaacagctttgtataccagaagaggttttggtaagggttgaacatttttacactgcaactttaaaacatcaccaatagattgtggattatttcacgtgcacaaacatacacacacacacacacacacacacacatacacagctaaattagaaaacacaattttaaattttatataattactagttattaatgggtaaaattcatttttcttttaatatcttaaaatattatttatgccccgaaatatgctaataaaagttaaagattgtgtattatgcctagattcaaagtttttggcaaacttcaaatacttttgattgacatgtacattagcagttattagttgacttttactaaaacatgcacctttacgatggtgtttttgtagaaacataagtagtcaaatagtaacatttattgcagttttgtacagtatttgagtatagtgcataaataggtatgttcataaaatcaataaaaggagtatctatggaaataagcaaaatatcagcaaaaattgctattcctttgcctcatttaatttttaaaatttctttgtttccatgtgattctattatatgctttgcatgcttgtataaaaccaaggtcacaaatgcaacttattaacggaatttgccaagaagacagccttgacattaaaaattccctcacaagaggtaatccataatccttaataaaataaaattgttacatgagccaataaatgtatttctttaattcc

SEQ ID NO: 136340 - DNA, 1155 bp, Homo sapiens
  Payload ID: 6683
  Gene Symbol: GABRA2
  Gene Name: gamma-aminobutyric acid (GABA) A receptor, alpha 2
  ENST ID: ENST00000510233
  CDS Start-End: 8-487
ggcggtgatgaagacaaaattgaacatctacaacatgcagttcctgctttttgttttcttggtgtgggaccctgccaggttggtgctggctaacatccaagaagatgaggctaaaaataacattaccatctttacgagaattcttgacagacttctggatggttacgataatcggcttagaccaggactgggagacagtattactgaagtcttcactaacatctacgtgaccagttttggccctgtctcagatacagatatggaatatacaattgatgttttctttcgacaaaaatggaaagatgaacgtttaaaatttaaaggtcctatgaatatccttcgactaaacaatttaatggctagcaaaatctggactccagataccttttttcacaatgggaaaaaatcagtagctcataatatgacaatgccaaataagttgcttcgaattcaggatgatgggactctgctgtataccatgaggtgaatatactgtaatgacagctcatttccacctgaaaagaaaaattgggtattttgtgattcaaacctatctgccttgcatcatgactgtcattctctcccaagtttcattctggcttaacagagaatctgtgcctgcaagaactgtgtttggagtaacaactgtcctaacaatgacaactctaagcatcagtgctcggaattctctccccaaagtggcttatgcaactgccatggactggtttattgctgtttgttatgcatttgtgttctctgccctaattgaatttgcaactgttaattacttcaccaaaagaggatgggcttgggatgggaagagtgtagtaaatgacaagaaaaaagaaaaggcttccgttatgatacagaacaacgcttatgcagtggctgttgccaattatgccccgaatctttcaaaagatccagttctctccaccatctccaagagtgcaaccacgccagaacccaacaagaagccagaaaacaagccagctgaagcaaagaaaactttcaacagtgttagcaaaattgacagaatgtccagaatagtttttccagttttgtttggtacctttaatttagtttactgggctacatatttaaacagagaacctgtattaggggtcagtccttgaattgagacccatgttatct

SEQ ID NO: 136341 - DNA, 5812 bp, Homo sapiens
  Payload ID: 6683
  Gene Symbol: GABRA2
  Gene Name: gamma-aminobutyric acid (GABA) A receptor, alpha 2
  ENST ID: ENST00000507460
  CDS Start-End: 334-555
atttgcaactacaataaaatccaggacacctgctcggcagcacgttagcctggctcttttatagtcttcaactttgctcactgtgattaccgctgcctgcctggctggtgtttgctgccggagcctcacgcgccttctcttattgtgatcctcggctccagagcagctgtcaaacgcgtcgtttcgcagcacttgatcggaacccggctgcctctaagacttggtcttgggcaaccgtgggtgggcaggaagggaaattatttattttattttgttaaggggagtgaagaaaagaagacgtgaggaccgcagttcactgtaatagcggcggtgatgaagacaaaattgaacatctacaacatgcagttcctgctttttgttttcttggtgtgggaccctgccaggttggtgctggctaacatccaagaagatgaggctaaaaataacattaccatctttacgagaattcttgacagacttctggatggttacgataatcggcttagaccaggactgggagtttccagagtggaatctccagtctgtgtaacatagccttcaagagccagaacaaagggacccaaactcaaatgctctccatgggcagaacaaataaaggaatgagtggagcataatggagattgaagaactggagagcacatttcttgtatgaagggggttgagttttatctgatcattgccacataagtatttaaaatcagagttgccagatattccaattatttttcaaaagttgttgaagatctccatttttatagaaagttttcttcagtcttaaaggtcaaccaattttcatttaaatcaaactaaacaaaatctgtgcttcccaaacaaatcacacttgagtattagtttgcagcctctggccctaaaccaagacttctcataaagggtatgaaaaaaccagtcggaaaacttgttaagtgcaaatttaacaaatcttcaaagactcattcagatttggtttggtcccagaactatatttcaacaaatgttcttgattctgatgcacatggtccaaacactggactgagtcatctgttttcaaggttctggttaaaaatgatggtttctttcttctttctctcatagtactttatttgaactcttttaagttaaagggaaaaagaaatgtgtatggtaagattggtctgttaccagatgagtctagctagcattttcctcaaaacctcaaagagaggcctctgtcccccattgttctgaggtggctgtcagtgttacaaggtcagagtcctacttttgtttagtgattggattagtcagaattaactggcttatgtttcagtaataactatccagttttatctctcgatcatgtatcttgctcacgatccaaccttgtccactgaggttggatggcatgtaggaatgggctctcttttatgtcttcctcacttagggtttcggattgatggacttccaccacctaaaacattgctagccactgtgtccaggggaaagatgtggctaggtgtacactgtcatttaaagcttctgcccagatgtgacacaatgtccctctgcccacagtccattgttcaaaggaaaccatatacacatgtttaacttcaaggtggcagggaagtgcaaccctaccatttactcagaagtggaagaactagcaatattttgcaagtaacttaataactaccacacttggcaagtagaacccatttctcagggtgcaagtcatcttccatagtgactgattatacaaactgtttggtgacacaggtcatatctcatttcaagatgtataattctgcaactttgttttgtctgtagcatgcatagaatgtttatgaagttaattattatgaagatatgatattaataaccatgcttttttggatatagtcaactttatgtaccttctcttttcttggtgttagaaggcagtgctgtatgccctttttccaaagctcccaggaataaagaggtttgccatttgtgctgtgaaggcatagttccagttgaagatatttaaaaagagatactctttgaagtgttagtctgaaatttcaacctccgtgacagtaattgccagggagaatggagttagataggtgaggaagagaccatgtgtggtttgctactgtgtccttagtgcttggcacagtatgtagaattcaccatttgtcaattgattatgtgaatccaacactcatatatgcaaaaacagacatatctgtgctttggagagctacttattttgggttcttagaaatgtttttgacattcaacaatcaatttttttctatatattttagtggtttagacttctgacattgctaacaacgagtcatccttctcagaaacaatgttgattgatagatgggttaaattggtctgctgaaccttaaattcagtagcacataaaattagaaccattgggttgaacctggatttaatatagtgaaatggactaattcagtagcccctgctgttactgcttttcagaccatctgagcagtgatcatgaacaaaggctctatggcttcagtcatctgtaatgcatacaacactgccttctaaccccacaacaaaagctttggaagagccactagatgcacatgatagagacaaaaacaagaactacaaaaatgtattttaaaagcctgaaaagcataagcctaaaatgtctctgtattttgagattttgcaaaactattgttagttttataccaaccgtttaaagtttttcagttgtcttgcagaggctgttaatgaaaagttataagataatggaatcatactaaattataatttctaacaggttctgagattgaggtgccatgctaagcactttacatatcatttaatactcattataactcccatgagatagataaattgatgacccctaccttagaagcaaggaaatgagagccgcagaccaattacttgccttttgtcacctaattattttgtgatggcatggatattctatccaatataattttctcaagagcctttctccagagtctcatcaatcaggaattaagcaccctcaaatcaaacaaaggtggtatcaatgagtatatgtatgctttggaggaggagctcactatttgttacatttgtgtaatcattagcatctggataagtatctctggaaggggaaggatggtgcgcagtttcattcttttatttgtttaggtgttcttattattgcatttcttggtcatcctgagtttgacgtatatccagacttgaatacaggtttagacatgaaggatcagaaaggacagtgcagtgtttagcagaaaatctattagggtgttgtgaattaaagccagaatctgttactctcactgctgattttactcccttactgtgtgaatcagagcttttggtattattatgctggagaatagctaatgagaaggagataagaagaccatgtagtctagatagataatctcagcatttcttggtacaaagtacattggtacttgagttatttgtaaaattagtaatacaatgatgcaattgttcatataaatttcaatcatgttaagcttattataagtgatattgaagtaatatgatacatgaagaagggatgagtatatgaaaggcaaatagatgaaggcatattaaatgcaagaaccctctttccagatgcattgagttacaactgcttcatttccctttgttcccatttgacccatgtacatcttatgagacacaatatagtgtactttggaaaagatcaggctttggagcttgaaaaaccagggtttgtattctggtttgagcatgttcttaccatgtgctttttgtatacatgaattgccttctctaaacctcagtttcttcatcagtaaaataagtataaaataactaacatttatagcaaggttacaaagagtaatgaaattatttgtaatgttcctgtaaaagtacccagcatatgttgggtgttcattagtggccaacttcccatgtgccttttgatttttgcgaacatgtcataatgtggagatttgttcacaatttaggaaataatgagtgaaaatgagagaacatctaaaaataggacatgagatagttatttttactaagagagttcatggagtttgatagtctttatttaactgtgtatcctagggttacatgtgattaaatttttcctttgtgggatgccctttaagtagaagtttattgcaaaattctccatagaatgtttaaatttcatggtatttcttgtcatacactagaattaaatgagaaggaatagttggattttgagattacatctatggaagtacagaaccaaacaggagaataaggtgtttctgagaaaacctgagcagtcaaataaatgatagcttaacttcatctggcttttctttagaaatttagacttccataaatatgttgtatttcccttgcataaatattagccattagtgatctaattacctgttagatttctaatcatgattacttatgatttcttcaaaacttaaaaaaggtaaccttttaaaatgattgaaagtgttatgcaatagacaatttttaaaacatttactgaaatgagtaggagatagaattctaggctatccccaaatttcttgtcacatgttttacatgccctgtatgatttctgtgactgtgactgtgatttcagtctgatgattagtttttgttatatggcacagttgactttaagaaagggacattatccgagtgggtctgacctaatcacatgagccttttaaatctaaatcaagagatcagagacagaaaagtccaggatatttaaaacatgagggagattcttcattgctggtagggggccacatggcaaggaacacaacagcctctaggagatgagacttgacagccagcagggaaaatgggaatcttaattctacagctgcaaggaactagatttggacaacaatctgaaagagcttagaagctgattcttccccagaggctccagaaaggagcacagcacacccataccttgatttcagccatgtgagaatctgagcagagaaccaagacatagcatgctggacttctgacctacagaactatgtgctaataaatgggtattgtcttacattgttaagtttgtaataatttgttaaacaatagaaaactagcatatctactgttactaattttttaaaatacatttttcagtgtttaacctgtgctaggcatagtgtactttacacctaccatctcatttaattatttcaaagtactgtaagataggcattataagccacatttaacagataagaatatcgaagcacatataagttaagtaatatgcatagggtcacaaattattagtgtataactctgaattgaatttagatctctttgattccaaggcttgggatcttacatgcccctttattaggtaggaatagatacttcatgaagatgataacatgccatctacagaatacgatatggcattgatgtgacactttacctacaaaatatcttatttctgagtcttccgcaagagaaaaagcaattttatttttatgggacaagattggatgttacatttttaatcaattacatgtaagtgtattctacctttaaaattgctatggaaaagtttaattatttccaacaggatttataactatcagttatacctcaaagttgttattaactgaataaaactacacattccaaaatgattaactcttaaagcgcattattggtacattcataatgtttaattttatttttatcatccttgctcatattgaataaatgccttttaaaacca

SEQ ID NO: 136342 - DNA, 2366 bp, Homo sapiens
  Payload ID: 6683
  Gene Symbol: GABRA2
  Gene Name: gamma-aminobutyric acid (GABA) A receptor, alpha 2
  ENST ID: ENST00000515082
  CDS Start-End: 154-1257
aagcggcctcggggagcagcccgaggctgcgcgtgggctccgctcctccggcgaggtgtgggcgaggggagcggcgctccgagcgcacccaggcgcccgacgccgcccgggtctgcgccgctgctagtgccaggcgggcgacgagcggcggtgatgaagacaaaattgaacatctacaacatgcagttcctgctttttgttttcttggtgtgggaccctgccaggttggtgctggctaacatccaagaagatgaggctaaaaataacattaccatctttacgagaattcttgacagacttctggatggttacgataatcggcttagaccaggactgggagacagtattactgaagtcttcactaacatctacgtgaccagttttggccctgtctcagatacagatatggaatatacaattgatgttttctttcgacaaaaatggaaagatgaacgtttaaaatttaaaggtcctatgaatatccttcgactaaacaatttaatggctagcaaaatctggactccagataccttttttcacaatgggaaaaaatcagtagctcataatatgacaatgccaaataagttgcttcgaattcaggatgatgggactctgctgtataccatgaggcttacagttcaagctgaatgcccaatgcacttggaggatttcccaatggatgctcattcatgtcctctgaaatttggcagctatgcatatacaacttcagaggtcacttatatttggacttacaatgcatctgattcagtacaggttgctcctgatggctctaggttaaatcaatatgacctgctgggccaatcaatcggaaaggagacaattaaatccagtacaggtgaatatactgtaatgacagctcatttccacctgaaaagaaaaattgggtattttgtgattcaaacctatctgccttgcatcatgactgtcattctctcccaagtttcattctggcttaacagagaatctgtgcctgcaagaactgtgtttggagtaacaactgtcctaacaatgacaactctaagcatcagtgctcggaattctctccccaaagtggcttatgcaactgccatggactggtttattgctgtttgttatgcatttgtgttctctgccctaattgaatttgcaactgttaattacttcaccaaaagaggatgggcttgggatgggaagagtgtagtaaatgacaaggtaagtgagagcttccgtgttatcattattaagaaaataccctaatgaattccgcttgtaacagatatgtttctaaaaactgacattaaagacatccatatatatatgaatttgaatcatatcaatttcttttaaagtgttcttgcctgaaatcctttaggagttcttgtagtactaatacttccattaaaaccactccgtagcatctgttgagctgtatgtgtcaggcactgtgctaagtgttttacatatgctctctcacataatctttatagcatccttatgactagactgccttcttattcttatttttactcatgaagaatctgaagcagtaaagttattttcttgcccaagcttacacaacttgttagtaagtatacttgaactccgatctacctgtctgactgttaagttcatggttttaacaccacactgcattattataaagagattagaaaaagaaaatgggcattaattttacttattatagaattccaggctctatcaatgaattgaatcctcttcacctgttccagtctctgctgattgattgtaaaagcccggatagcatttttttaaaatctttcccatgttgtatggaataaatatgtcggtgctggaatgcttaggaattttaaattgttcatatggtctaaaagggaaaagttatttgtttttaagattaacttcttttgagattattgctgtccatatttaggtttcaagtactgaatctaatgggagatttgtgcattgatataacagctgtttcctttcatactctgtagattatgtatctgcctaagaggaggctttgaatgtatcataatcatctatattcttaataatggtaaaaagttgtattcagaggatatctttaacattgtatcaacctaaatgcttcttttattaaatttggattaacatacttgcagatttgatttctttttcagttatttgaatatattttttcatttctatgaccatgttacagtttaaatatacaagcagtaaatgttatagtttaaaagtcttggtctttttccttaattttgtaagccatagaaattttaataagactgattatttatttcattttataagttgtgttttccctactaacggagccaacaaataaatattaaaaggaa

SEQ ID NO: 136343 - DNA, 582 bp, Homo sapiens
  Payload ID: 6683
  Gene Symbol: GABRA2
  Gene Name: gamma-aminobutyric acid (GABA) A receptor, alpha 2
  ENST ID: ENST00000506961
  CDS Start-End: 171-582
gtcaaacgcgtcgtttcgcagcacttgatcggaacccggctgcctctaagacttggtcttgggcaaccgtgggtgggcaggaagggaaattatttattttattttgttaaggggagtgaagaaaagaagacgtgaggaccgcagttcactgtaatgtagaagcggcggtgatgaagacaaaattgaacatctacaacatgcagttcctgctttttgttttcttggtgtgggaccctgccaggttggtgctggctaacatccaagaagatgaggctaaaaataacattaccatctttacgagaattcttgacagacttctggatggttacgataatcggcttagaccaggactgggagacagtattactgaagtcttcactaacatctacgtgaccagttttggccctgtctcagatacagatatggaatatacaattgatgttttctttcgacaaaaatggaaagatgaacgtttaaaatttaaaggtcctatgaatatccttcgactaaacaatttaatggctagcaaaatctggactccagataccttttttcacaatgggaaaaaatcagtagctcata

SEQ ID NO: 136344 - DNA, 596 bp, Homo sapiens
  Payload ID: 6683
  Gene Symbol: GABRA2
  Gene Name: gamma-aminobutyric acid (GABA) A receptor, alpha 2
  ENST ID: ENST00000503806
  CDS Start-End: 142-596
agcacttgatcggaacccggctgcctctaagacttggtcttgggcaaccgtgggtgggcaggaagggaaattatttattttattttgttaaggggagtgaagaaaagaagacgtgaggaccgcagttcactagcggcggtgatgaagacaaaattgaacatctacaacatgcagttcctgctttttgttttcttggtgtgggaccctgccaggttggtgctggctaacatccaagaagatgaggctaaaaataacattaccatctttacgagaattcttgacagacttctggatggttacgataatcggcttagaccaggactgggagacagtattactgaagtcttcactaacatctacgtgaccagttttggccctgtctcagatacagatatggaatatacaattgatgttttctttcgacaaaaatggaaagatgaacgtttaaaatttaaaggtcctatgaatatccttcgactaaacaatttaatggctagcaaaatctggactccagataccttttttcacaatgggaaaaaatcagtagctcataatatgacaatgccaaataagttgcttcgaattcaggatgatgg

SEQ ID NO: 136345 - DNA, 605 bp, Homo sapiens
  Payload ID: 6683
  Gene Symbol: GABRA2
  Gene Name: gamma-aminobutyric acid (GABA) A receptor, alpha 2
  ENST ID: ENST00000514236
  CDS Start-End: 1-171
tccagtacaggtgaatatactgtaatgacagctcatttccacctgaaaagaaaaattgggtattttgtgattcaaacctatctgccttgcatcatgactgtcattctctcccaagtttcattctggcttaacagagaatctgtgcctgcaagaactgtgtttggtgagtgaatacacactttgcagtacagcacattatgtttcatagcatactttcaaaaacattatctctcttgatcctcaaactaattatttgtagtaggtggggcggggagtattgtttttgccttataggtgaagaagtaggctcagagtggtaacatagtgctacactgttaataagggatataaggaaagaaaagtactcaaatattcttaaaacacacttagtcttctttctgttaaatcatactgctgttcaacatttgtctgtactatatttacacaaggagaattttcttagaagttttaatttatagtctcactaccatatttctaggctttctatatttttctgttgtttttagatgaagagtgatgatcttaaaactttaagttagaaacaggtagaaagggagggaggaagagagacctcattcactttt

SEQ ID NO: 136346 - DNA, 574 bp, Homo sapiens
  Payload ID: 6683
  Gene Symbol: GABRA2
  Gene Name: gamma-aminobutyric acid (GABA) A receptor, alpha 2
  ENST ID: ENST00000514193
  CDS Start-End: 65-265
tcgtcaagatcagggcaaaaggaagaaaacaccgaattctgcttgccgtttcagagcggcggtgatgaagacaaaattgaacatctacaacatgcagttcctgctttttgttttcttggtgtgggaccctgccaggttggtgctggctaacatccaagaagatgaggctaaaaataacattaccatctttacgagaattcttgacagacttctggatggttacgataatcggcttagaccaggactgggaggaatatacaattgatgttttctttcgacaaaaatggaaagatgaacgtttaaaatttaaaggtcctatgaatatccttcgactaaacaatttaatggctagcaaaatctggactccagataccttttttcacaatgggaaaaaatcagtagctcataatatgacaatgccaaataagttgcttcgaattcaggatgatgggactctgctgtataccatgaggcttacagttcaagctgaatgcccaatgcacttggaggatttcccaatggatgctcattcatgtcctctgaaatttggcagctatgcatatacaacttcaga

SEQ ID NO: 136347 - DNA, 1562 bp, Homo sapiens
  Payload ID: 6683
  Gene Symbol: GABRA2
  Gene Name: gamma-aminobutyric acid (GABA) A receptor, alpha 2
  ENST ID: ENST00000507069
  CDS Start-End: 8-1543
ggcggtgatgaagacaaaattgaacatctacaacatgcagttcctgctttttgttttcttggtgtgggaccctgccaggttggtgctggctaacatccaagaagatgaggctaaaaataacattaccatctttacgagaattcttgacagacttctggatggttacgataatcggcttagaccaggactgggagacagtattactgaagtcttcactaacatctacgtgaccagttttggccctgtctcagatacagatatggaatatacaattgatgttttctttcgacaaaaatggaaagatgaacgtttaaaatttaaaggtcctatgaatatccttcgactaaacaatttaatggctagcaaaatctggactccagataccttttttcacaatgggaaaaaatcagtagctcataatatgacaatgccaaataagttgcttcgaattcaggatgatgggactctgctgtataccatgaggcttacagttcaagctgaatgcccaatgcacttggaggatttcccaatggatgctcattcatgtcctctgaaatttggcagctatgcatatacaacttcagaggtcacttatatttggacttacaatgcatctgattcagtacaggttgctcctgatggctctaggttaaatcaatatgacctgctgggccaatcaatcggaaaggagacaattaaatccagtacaggtgaatatactgtaatgacagctcatttccacctgaaaagaaaaattgggtattttgtgattcaaacctatctgccttgcatcatgactgtcattctctcccaagtttcattctggcttaacagagaatctgtgcctgcaagaactgtgtttggagtaacaactgtcctaacaatgacaactctaagcatcagtgctcggaattctctccccaaagtggcttatgcaactgccatggactggtttattgctgtttgttatgcatttgtgttctctgccctaattgaatttgcaactgttaattacttcaccaaaagaggatgggcttgggatgggaagagtgtagtaaatgacaagtccccttcaataaaagctgaaggcattacattaacatacaactcagtgaaagcaattcttcaaggagctaagctaatatggtccaagtatatagctttctcatggcccagtttattccaagaaaagactttagagtacttagagaagtggatggactgtttaaccttcaaacaatcttctaaaaaagaaaaggcttccgttatgatacagaacaacgcttatgcagtggctgttgccaattatgccccgaatctttcaaaagatccagttctctccaccatctccaagagtgcaaccacgccagaacccaacaagaagccagaaaacaagccagctgaagcaaagaaaactttcaacagtgttagcaaaattgacagaatgtccagaatagtttttccagttttgtttggtacctttaatttagtttactgggctacatatttaaacagagaacctgtattaggggtcagtccttgaattgagacccatgttatct

SEQ ID NO: 136348 - DNA, 2588 bp, Homo sapiens
  Payload ID: 6683
  Gene Symbol: GABRA2
  Gene Name: gamma-aminobutyric acid (GABA) A receptor, alpha 2
  ENST ID: ENST00000540012
  CDS Start-End: 568-1851
atcgttttccccctcctcctcttcctcctcctcctcttcctcctcctccgcccatcaccgccactacgaacgccttcgcctccttctacacctcgcgccgccgccgcggctcctagcgctcctctccggcttccaccagcccatcgctccacgctctcttggctgctgcagtctcggtctctctctctctctctctctctctctctctctctctctctctctctctctctctctctcccaagtttcctatctcgtcaagatcagggcaaaaggaagaaaacaccgaattctgcttgccgtttcagagcggcggtgatgaagacaaaattgaacatctacaacatgcagttcctgctttttgttttcttggtgtgggaccctgccaggttggtgctggctaacatccaagaagatgaggctaaaaataacattaccatctttacgagaattcttgacagacttctggatggttacgataatcggcttagaccaggactgggagacagtattactgaagtcttcactaacatctacgtgaccagttttggccctgtctcagatacagatatggaatatacaattgatgttttctttcgacaaaaatggaaagatgaacgtttaaaatttaaaggtcctatgaatatccttcgactaaacaatttaatggctagcaaaatctggactccagataccttttttcacaatgggaaaaaatcagtagctcataatatgacaatgccaaataagttgcttcgaattcaggatgatgggactctgctgtataccatgaggcttacagttcaagctgaatgcccaatgcacttggaggatttcccaatggatgctcattcatgtcctctgaaatttggcagctatgcatatacaacttcagaggtcacttatatttggacttacaatgcatctgattcagtacaggttgctcctgatggctctaggttaaatcaatatgacctgctgggccaatcaatcggaaaggagacaattaaatccagtacaggtgaatatactgtaatgacagctcatttccacctgaaaagaaaaattgggtattttgtgattcaaacctatctgccttgcatcatgactgtcattctctcccaagtttcattctggcttaacagagaatctgtgcctgcaagaactgtgtttggagtaacaactgtcctaacaatgacaactctaagcatcagtgctcggaattctctccccaaagtggcttatgcaactgccatggactggtttattgctgtttgttatgcatttgtgttctctgccctaattgaatttgcaactgttaattacttcaccaaaagaggatgggcttgggatgggaagagtgtagtaaatgacaagtccccttcaataaaagctgaaggcattacattaacatacaactcagtgaaagcaattcttcaaggagctaagctaatatggtccaagtatatagctttctcatggcccagtttattccaagaaaagactttagagtacttagagaagtggatggactgtttaaccttcaaacaatcttctaaaaaagaaaaggcttccgttatgatacagaacaacgcttatgcagtggctgttgccaattatgccccgaatctttcaaaagatccagttctctccaccatctccaagagtgcaaccacgccagaacccaacaagaagccagaaaacaagccagctgaagcaaagaaaactttcaacagtgttagcaaaattgacagaatgtccagaatagtttttccagttttgtttggtacctttaatttagtttactgggctacatatttaaacagagaacctgtattaggggtcagtccttgaattgagacccatgttatctttgggatgtatagcaacattaaatttggtttgttttgctatgtacagtctgactaataactgctaatttgtgatccaacatgtacagtatgtatatagtgacatagcttaccagtagacctttaatggagacatgcatttgctaactcatggaactgcagacagaaagcactccatgcgaaaacagccattgccttttttaaagatttaccctaggacctgatttaaagtgaatttcaagtgacctgattaatttcctattcttccaaatgagatgaaaatggggatcctgtacaaccctttgtggacccttttggtttagctcttaagtaggggtattttctactgttgcttaattatgatggaagataacattgtcattcctagatgaatcctttgaagtaacaaacattgtatctgacatcagctctgttcatgagtgctcagagtccctgctaatgtaattggaagcttggtacacataagaaaaactagagatttgaaatcagctatgaattactctatatagtatctatagccatgtacatattacagcatgacaagctcaaataattatgagtcagcccgaaaggatgttaattatgcctacgatgtaataactattggaatgtcatggtcattacatttttagcttcagagtttatttgaaagtaataattgaaatcctacaatttattttaatcattggaaactacctt

SEQ ID NO: 136349 - DNA, 2273 bp, Homo sapiens
  Payload ID: 6683
  Gene Symbol: GABRA2
  Gene Name: gamma-aminobutyric acid (GABA) A receptor, alpha 2
  ENST ID: ENST00000630416
  CDS Start-End: 65-265
tcgtcaagatcagggcaaaaggaagaaaacaccgaattctgcttgccgtttcagagcggcggtgatgaagacaaaattgaacatctacaacatgcagttcctgctttttgttttcttggtgtgggaccctgccaggttggtgctggctaacatccaagaagatgaggctaaaaataacattaccatctttacgagaattcttgacagacttctggatggttacgataatcggcttagaccaggactgggaggaatatacaattgatgttttctttcgacaaaaatggaaagatgaacgtttaaaatttaaaggtcctatgaatatccttcgactaaacaatttaatggctagcaaaatctggactccagataccttttttcacaatgggaaaaaatcagtagctcataatatgacaatgccaaataagttgcttcgaattcaggatgatgggactctgctgtataccatgaggcttacagttcaagctgaatgcccaatgcacttggaggatttcccaatggatgctcattcatgtcctctgaaatttggcagctatgcatatacaacttcagaggtcacttatatttggacttacaatgcatctgattcagtacaggttgctcctgatggctctaggttaaatcaatatgacctgctgggccaatcaatcggaaaggagacaattaaatccagtacaggtgaatatactgtaatgacagctcatttccacctgaaaagaaaaattgggtattttgtgattcaaacctatctgccttgcatcatgactgtcattctctcccaagtttcattctggcttaacagagaatctgtgcctgcaagaactgtgtttggagtaacaactgtcctaacaatgacaactctaagcatcagtgctcggaattctctccccaaagtggcttatgcaactgccatggactggtttattgctgtttgttatgcatttgtgttctctgccctaattgaatttgcaactgttaattacttcaccaaaagaggatgggcttgggatgggaagagtgtagtaaatgacaagtccccttcaataaaagctgaaggcattacattaacatacaactcagtgaaagcaattcttcaaggagctaagctaatatggtccaagtatatagctttctcatggcccagtttattccaagaaaagactttagagtacttagagaagtggatggactgtttaaccttcaaacaatcttctaaaaaagaaaaggcttccgttatgatacagaacaacgcttatgcagtggctgttgccaattatgccccgaatctttcaaaagatccagttctctccaccatctccaagagtgcaaccacgccagaacccaacaagaagccagaaaacaagccagctgaagcaaagaaaactttcaacagtgttagcaaaattgacagaatgtccagaatagtttttccagttttgtttggtacctttaatttagtttactgggctacatatttaaacagagaacctgtattaggggtcagtccttgaattgagacccatgttatctttgggatgtatagcaacattaaatttggtttgttttgctatgtacagtctgactaataactgctaatttgtgatccaacatgtacagtatgtatatagtgacatagcttaccagtagacctttaatggagacatgcatttgctaactcatggaactgcagacagaaagcactccatgcgaaaacagccattgccttttttaaagatttaccctaggacctgatttaaagtgaatttcaagtgacctgattaatttcctattcttccaaatgagatgaaaatggggatcctgtacaaccctttgtggacccttttggtttagctcttaagtaggggtattttctactgttgcttaattatgatggaagataacattgtcattcctagatgaatcctttgaagtaacaaacattgtatctgacatcagctctgttcatgagtgctcagagtccctgctaatgtaattggaagcttggtacacataagaaaaactagagatttgaaatcagctatgaattactctatatagtatctatagccatgtacatattacagcatgacaagctcaaataattatgagtcagcccgaaaggatgttaattatgcctacgatgtaataactattggaatgtcatggtcattacatttttagcttcagagtttatttgaaagtaataattgaaatcctacaatttattttaatcattggaaactaccttaatt

SEQ ID NO: 136350 - DNA, 3712 bp, Homo sapiens
  Payload ID: 6684
  Gene Symbol: GABRA3
  Gene Name: gamma-aminobutyric acid (GABA) A receptor, alpha 3
  Uniprot ID: P34903
  ENST ID: ENST00000370314
  CDS Start-End: 240-1718
agagagagagagagagagagagagagagagagcgagagagcgtgagcgcgcgcaagctagcgagcaaaccagagagacagaccgagagagggaccaggagagagacccagagagagaagaagaagccagaagccgagctctgtcagggctcaacctccaacttgtttcagttcattcatccttctctcctttccgctcagactgtagagctcggtctctccaagtttgtgcctaagaagatgataatcacacaaacaagtcactgttacatgaccagccttgggattcttttcctgattaatattctccctggaaccactggtcaaggggaatcaagacgacaagaacccggggactttgtgaagcaggacattggcgggctgtctcctaagcatgccccagatattcctgatgacagcactgacaacatcactatcttcaccagaatcttggatcgtcttctggacggctatgacaaccggctgcgacctgggcttggagatgcagtgactgaagtgaagactgacatctacgtgaccagttttggccctgtgtcagacactgacatggagtacactattgatgtattttttcggcagacatggcatgatgaaagactgaaatttgatggccccatgaagatccttccactgaacaatctcctggctagtaagatctggacaccggacaccttcttccacaatggcaagaaatcagtggctcataacatgaccacgcccaacaagctgctcagattggtggacaacggaaccctcctctatacaatgaggttaacaattcatgctgagtgtcccatgcatttggaagattttcccatggatgtgcatgcctgcccactgaagtttggaagctatgcctatacaacagctgaagtggtttattcttggactctcggaaagaacaaatccgtggaagtggcacaggatggttctcgcttgaaccagtatgaccttttgggccatgttgttgggacagagataatccggtctagtacaggagaatatgtcgtcatgacaacccacttccatctcaagcgaaaaattggctactttgtgatccagacctacttgccatgtatcatgactgtcattctgtcacaagtgtcgttctggctcaacagagagtctgttcctgcccgtacagtctttggtgtcaccactgtgcttaccatgaccaccttgagtatcagtgccagaaattccttacctaaagtggcatatgcgacggccatggactggttcatagccgtctgttatgcctttgtattttctgcactgattgaatttgccactgtcaactatttcaccaagcggagttgggcttgggaaggcaagaaggtgccagaggccctggagatgaagaagaaaacaccagcagccccagcaaagaaaaccagcactaccttcaacatcgtggggaccacctatcccatcaacctggccaaggacactgaattttccaccatctccaagggcgctgctcccagtgcctcctcaaccccaacaatcattgcttcacccaaggccacctacgtgcaggacagcccgactgagaccaagacctacaacagtgtcagcaaggttgacaaaatttcccgcatcatctttcctgtgctctttgccatattcaatctggtctattgggccacatatgtcaaccgggagtcagctatcaagggcatgatccgcaaacagtagatagtggtggcagtgcagcaaccagagcactgtataccccgtgaagcatccaggcacccaaaccccggggctccccttcgcgtatttcaggattctcctttttacccctctaccaagctgtgaccctcaattcatatttatgaatctctacgcaaaaaataactacagaaaaattacttgtccctccaatattgcccagtataaccccatcaaagccaaacactgccatttgtccagttgctcatcttagtctgccaatctcccctagctgagggcactgcatgtattttattgcactctgcccgctgcaaaaagaacaagagattctactctccatagtggaagccttggctgtttgagaggcccagaacaaggagaattgttgactcccatctagatcagatgactctaacttactaggcagccaggttaggctaggccatgtgatcctgcgtgccacctcccctgccttcagcaaggcctactaggcataagtactgatagcaaaggtgggagccagttctacacccccaacccatttattggtttggaaattagtggggacaattggtactaaccaccgtctaccatgtatggccaaaataaatagaactagctctgccagcctggcaccaagatggctggtgccctgccatgtccagcccctcgggaaaatagtcccctccttggtacatctctcctccagaaaatcttcttcccccactgcctttggcacccttgtagccaactgagcactacttaatttggactcattaccacctgtaaacttttcaggaaaaaatgatcaagcattttttatttatatcgaaaagttgcaaatagaaacaaagtgatctagatttaaaaaaaacatttttttaaaatatgggagagatacaaaagtcacctccctgccaaggcaactagcctatactggattgggtaagaggtttggagtggatggtagttgaggattgaagtctggctcaaaagagaaggctactggcagatgaaagtcaaattcttccttccatacactccacattccacaccctggcccaggcacttttctcccaccatatcgggaacctccggtcctctgttgatgccgattctatgaggggtgaattggaaattcatacaaataaatatctctagtcaatattgagtcaactagatcattaactttattgccaattttataatatattatttagaggccatttgttcttaatcttaatgtgagtaaaagacacaggcataaatacgcaatttttataaggtagataaactgaatcccagaagtttgaatgatttgcctaggctccttacaagtgtctttaataaagagctatcgtgcgcccctttccaaaggccaaaataaaggactgagaagccaggtccaccgtgacctcagaatcagcacaatctcagcgggccttctgggtcactagtggaacttggttgggcaccaaaaaggtttttagaaagtcacaatgtgtcacccaagaagatcacttttaatagtctcagcccaagagaatgagactgtttatgatggcagccccagccactttggctctgaatacctgcactagtccagagtatcctagaagcccagggtaaagccacagagggcaccacaagcagattctccctgcccaccggctgaacaaagctcctaaggggtgtatcattagctgctggttgccttttcatccatcctttccccgtcccctgcttccttgccattgctgggataatgcatgcccgtcccattattcctaagactgtgtctgtaggtaaattcatgactagaagagtgtagtcttgtggatatgtggggatatggggggtgggagggcggggctgttaatggttgtcttaaggaacttagaatggaagcctgatctttgcctctctgtagaaattgtgtttccaaatgctttggtgcaatgtttagctgctgtttattaaaccctttctgaattgta

SEQ ID NO: 136351 - DNA, 1697 bp, Homo sapiens
  Payload ID: 6684
  Gene Symbol: GABRA3
  Gene Name: gamma-aminobutyric acid (GABA) A receptor, alpha 3
  Uniprot ID: P34903
  ENST ID: ENST00000535043
  CDS Start-End: 219-1697
agtgccgcttcatcacgcagcatggttgtctgggaatgtgccgtgggatctccatttgcattaattccttcagctcctggaccaaagccatttttaaaaattcatgttctgtgtatcacataacacagtatttgtgattgcacctgtactatgtccatttatttctgcatcatggctacttcctcctgtttcgtctctccaagtttgtgcctaagaagatgataatcacacaaacaagtcactgttacatgaccagccttgggattcttttcctgattaatattctccctggaaccactggtcaaggggaatcaagacgacaagaacccggggactttgtgaagcaggacattggcgggctgtctcctaagcatgccccagatattcctgatgacagcactgacaacatcactatcttcaccagaatcttggatcgtcttctggacggctatgacaaccggctgcgacctgggcttggagatgcagtgactgaagtgaagactgacatctacgtgaccagttttggccctgtgtcagacactgacatggagtacactattgatgtattttttcggcagacatggcatgatgaaagactgaaatttgatggccccatgaagatccttccactgaacaatctcctggctagtaagatctggacaccggacaccttcttccacaatggcaagaaatcagtggctcataacatgaccacgcccaacaagctgctcagattggtggacaacggaaccctcctctatacaatgaggttaacaattcatgctgagtgtcccatgcatttggaagattttcccatggatgtgcatgcctgcccactgaagtttggaagctatgcctatacaacagctgaagtggtttattcttggactctcggaaagaacaaatccgtggaagtggcacaggatggttctcgcttgaaccagtatgaccttttgggccatgttgttgggacagagataatccggtctagtacaggagaatatgtcgtcatgacaacccacttccatctcaagcgaaaaattggctactttgtgatccagacctacttgccatgtatcatgactgtcattctgtcacaagtgtcgttctggctcaacagagagtctgttcctgcccgtacagtctttggtgtcaccactgtgcttaccatgaccaccttgagtatcagtgccagaaattccttacctaaagtggcatatgcgacggccatggactggttcatagccgtctgttatgcctttgtattttctgcactgattgaatttgccactgtcaactatttcaccaagcggagttgggcttgggaaggcaagaaggtgccagaggccctggagatgaagaagaaaacaccagcagccccagcaaagaaaaccagcactaccttcaacatcgtggggaccacctatcccatcaacctggccaaggacactgaattttccaccatctccaagggcgctgctcccagtgcctcctcaaccccaacaatcattgcttcacccaaggccacctacgtgcaggacagcccgactgagaccaagacctacaacagtgtcagcaaggttgacaaaatttcccgcatcatctttcctgtgctctttgccatattcaatctggtctattgggccacatatgtcaaccgggagtcagctatcaagggcatgatccgcaaacagtag

SEQ ID NO: 136352 - DNA, 11973 bp, Homo sapiens
  Payload ID: 6685
  Gene Symbol: GABRA4
  Gene Name: gamma-aminobutyric acid (GABA) A receptor, alpha 4
  Uniprot ID: P48169
  ENST ID: ENST00000264318
  CDS Start-End: 984-2648
agtcaacctctggaagtaagtcaactccattctgaaaaagaagagtgtcgcaagaagtgaaagtgattttgaccagaggtcgcttgtctccacctctcccctcctctccagaaaaggatggagcagcaaagcggagggtgtgcgcgtgtctggtggaggcgggtaaagaaatggggtgtctttaaagcaatagcttagcaaatactgggactagagtgcggctcgagtccacttcccaatagtttggcgagagtccgccgggtgagctgcaacccctgttaccaggaagaatctttctgctttcattgctctccctaccgccccccataacacctgaatgggagggtctcaaaggtggtttgagcccggacttgatcccctctcctcaccaccgctaccacccgacgcccagcagtccccgtcacccgccctttctccacctccaaccttgactctgggtacaaacaggtcctcgcacaacctgatgacagaggagcttcattggttagatccaaatcccagcggaagggagggggccaggaggtaggaggacgaacactgctgtgggcggggagcccacttggggtcgggggctgcgaagccggaggaggggcgagagaccccgttcctcatccccggagttacagtcggaacaaacttgccgagtcttgcagcgcaagcgcgcggatacgaaccccagaaccttcagcgcgcgggcacgaaagggtgtggagcggtatacatagctctacatacacattgagcgctgagcgagaaaggagggggcgaggaaggcaggttccgcctcccctggccccgtgcacacacacgcccaccgcggctcgggctggctgagcgcgggcgagtgtgagcgcgagtgtgcgcacgccgcgggagcctctctgccctctcctcgcaccctgctcagggcatctgaagagcctggaaacgtgaacaggcttgaagtatggcatgttgcaaagatggtttctgccaagaaggtacccgcgatcgctctgtccgccggggtcagtttcgccctcctgcgcttcctgtgcctggcggtttgtttaaacgaatccccaggacagaaccaaaaggaggagaaattgtgcacagaaaatttcacccgcatcctggacagtttgctcgatggttatgacaacaggctgcgtcctggatttgggggtcctgttacagaagtgaaaactgacatatatgtcaccagctttggacctgtttctgatgttgaaatggaatacacaatggatgtgttcttcaggcagacatggattgacaaaagattaaaatatgacggccccattgaaattttgagattgaacaatatgatggtaacgaaagtgtggacccctgatactttcttcaggaatggaaagaaatctgtctcacataatatgacagctccaaataagctttttagaattatgagaaatggtactattttatacacaatgagactcaccataagtgcggagtgtcccatgagattggtggattttcccatggatggtcatgcatgccctttgaaattcgggagttatgcctatccaaagagtgagatgatctatacctggacaaaaggtcctgagaaatcagttgaagttccgaaggagtcttccagcttagttcaatatgatttgattgggcaaaccgtatcaagtgaaaccatcaaatcaattacgggtgaatatattgttatgacggtttacttccacctcagacggaagatgggttattttatgattcagacctatattccgtgcattatgacagtgattctttctcaagtttcattttggataaataaagaatcagttcccgctaggactgtatttggaataacaactgtcctcaccatgaccacactaagcatcagtgcacgacattctttgcccaaagtgtcctatgctaccgccatggactggttcatagctgtctgctttgcttttgtattttcggcccttatcgagtttgctgctgtcaactatttcaccaatattcaaatggaaaaagccaaaaggaagacatcaaagccccctcaggaagttcccgctgctccagtgcagagagagaagcatcctgaagcccctctgcagaatacaaatgccaatttgaacatgagaaaaagaacaaatgctttggttcactctgaatctgatgttggcaacagaactgaggtgggaaaccattcaagcaaatcttccacagttgttcaagaatcttctaaaggcacacctcggtcttacttagcttccagtccaaacccattcagccgtgcaaatgcagctgaaaccatatctgcagcaagagcacttccatctgcttctcctacttctatccgaactggatatatgcctcgaaaggcttcagttggatctgcttctactcgtcacgtgtttggatcaagactgcagaggataaagaccacagttaataccataggggctactgggaagttgtcagctactcctcctccatcggctccaccaccttctggatctggcacaagtaaaatagacaaatatgcccgtattctctttccagtcacatttggggcatttaacatggtttattgggttgtttatttatctaaggacactatggagaaatcagaaagtctaatgtaatttcgttgctatagtagtttgctaaaagatgatgaaaatgcagaatgtctttttaaatgtttttaaatataaacaaatattctttactaaaataaaaactctgtgtaatttttccatttaaagatataagccagttattgggagagttaattaattcctgagtgaaaaagtgaactatgttttttttcagaaaaattattttaaaagaactcagcattcagttagatagaatacacaccatcctggaaagttgggataagagaaatagagctattagagacaagtggcgcatattttttcattgatatttgaaaacagactatgacattttaaaaatctgccctatgagtatcaacctgccaccctaaatttcccagtggcactacccttaaccagaattgtttattagatgtcatatgcagtgacctttggtgatcttcttaggaacttcaagaaaaggaattttcctgttaaattaaacattggcaaaaggaaatggaatagtataaacactgatcaatagagtaaaatatctgctgcataaaaaactaagacaaagaccagaggaaatatcttccctttcttatgttggctaaacagtacttaacagttgacttgaaattttgttctctgagccaaagtttaactcattgtatgaattctttttcatggtagttcattcagttatgtgtttatttactacatagttattcagagcctactgtgttccaggaactatgctagaaactgtctctctaggaaagctcttgcacctttatctacaatattacttaaaaagtagaacagtcaatgcatgccaaagaaccataaactagcagaggacattgcattctttagtgaaggacatttatttagagtctgacaacatattcaaaatatttttcagcctctactgatagtggataacaaatatatttgttcacataaccactttgatgtcagtacaacttcagcaattggttttcaaaatagatgagaatatggtacagattgttctataagtgaaaagcattatgtacttgaaagtaaaaatcagggcaatataagacttaatagattaactgtcgcaaatttgatcagagtcacagagtagaatttgatcagaatcacagaatcatcagacataggaactgagcacaggctttttcaggtgctttccccaagatagatctagatattagctagtgaaatgctaaattttgaagagttttgtgtccgtagttctgtaattctgggcagtcatcatgttggtttttttgggagtttttttaaggtttaataactaaggggaatattttaaaattaagagagcagcaaatgaaaggagtaaagaaaaaaatagctgtcgggtaggatgccactgactctgctatgtgatttatcagggttttcatctactgacttctttctcattaggtaggcttaacaacttacttgagaattttgcaactgtctatgcagctgaatctaagtatggttttttgtcatattgcctctagattttcttctgtgcttctctctatctgctctggaatggatgagtgaatgtgttctgggtgttttagggaacatattgatagaaatgaccaccttgcagacaaaatctctctctctctttttgtttttatagaaaagaagtgatagtagttaattggcatcgatttttcagatattgcactaccttataatggttgtttttgatacctgaaaattgtgcaaatgccaaatattaattgtaagtcatatctgagaaatcattcttggctgtctttctaggtattccatagaatcaacacattttaaggctgaaagatactgtcgaaatcacccagtcccaaccccccaatttaaaattgattctagtaaaattaggtccagtaacacctgtatatatgtatatatttaataaagagtacttgtacaaaaaagcttatcataaattatttcatgaatgtgaatagatttctggccttgaggacgatgtttggaaatatggttggaagcacaattcattcgctactagttattcagagcgtactttgttccaggaactatgctggaaactgatagttcactattctgatgaaaaggctggttttgttgttgttgttgttgttgttgttgttgtttttggtgaggaactcttactctttgctaatctattggcctatcttaagaaataattatttggttattcattggcttcctttaaaaaaaagtgttcttctacaaatcttacagagtgtaaagagataaaaagaaatgattttttttcttacctttacatatgaaggtttaaaaatacatcatgtggccaaagaatgagaaaggacagaattaaccaaggattcttaattgttaatttgaagaacacattaaccagaaagcttaaacattattattaaaataaattatttcatttgcacacaatgataataatgatgataataataataataataataataataataataataataataatatgttgtttgctttccttaactgaatttcatcaaattcattcagtgatttttattttggtcattatttctatcttcccaataacccagaggtacatcaagtaaaaacacttttgcaaagagccagtcacttttccctcttagaaaatctcagaagaatgattaggggcacccaaagttctggttatctatgaataataatgaataattttggctgagaatggtacctttatataactcttttaaagatgaaattcagaataattttattcaggacctagtatctgcagtccatgttggccactaactgctacataattactttcaatttcctccaggcatgactaggtataaacatatatttacatgattaatccacattttaaaatgacttgcacttgtgcatatacatagtactttgaataatgtatattttaaattggacctcacaaatcttgtattaaagtaggtagagagtagagtcacactttttttgatgaaatgagtcacagagaagttacatgacaaagataaaatcacagggttggaaagaactttgaaaggtcatttttcaataatctcaccttaaaagtgaccccttttcaaacaaagcataaacaatttatttgtggcttattttacccatgagctggccaatacttcctggcctagaaaaatatctccactctccccattcctgttcttaatggtcttctcttctcaatttgtaaatattctccagtaaaagacaccaggtgtggagatgggtcacttaatttcaagttctgagtgtcttgtggttttaaacaagtctcttaacctctctaagactgattcctcatttataacagggaggaggtggattatgtaatatctaagagcttttcagttttaatactctctgattctcatagtaaatacaagcatactcttgtaagaaaaacactgaatactttgaaccacaaataagtgtttatggacaaaaatttagttctactgcttgattactttaagttcattgcttgcttcaaactaaggtttccctaccttcaaaaatatatataacatctctccatttagataaagtatattcttccccagggaagactgtattctttaaagacagtagaatattggctatttctcttttctgggatttcctgggcttttattcactaaatgggctcctgcccagtttgggtactgtgctgatttttagatatacagagataaaaatagcccctttccttgcaggtagtcacagtccggaagagatgatagatgcatagacaaaaaattatgggatgtaactaatgcttcagtagaatacagcagggccaaaactagagtgatactcatctcaggcacaaatatatatggggacatcaaaacttcaataatcaagatacctaatatttaagtgaatatttttaaaactcaaaattaatgcaaaagatttatgatgaacagaatatacaaattttaaataaattaatagaatcagtagtaataatattttcttctgcctcaggctccaaaattgctcagcatagcactgatctagatagaggtggataaaagatccacataacttaattacattgttgaaggagaggaacaagagtgatagcagagaaggtttcacagatataatcttaagctaaattttatagaatgatttggagttcttatagcctccattcccacttccacaaacaaacaaaaaaatgaaagcgcaattttatcagcacctgaggcaggagaagagatgaggatgtggaaagtcaaggggaactcttactacaaattcttagttctgtgtttggaggtaagggtgaatgcagggaagtgagagttgttgatgttggaaagacctaaagagcctggattaggaagagttttgtgtaaattactgaaggaatggaatttgatcaggattagtggcaatttattaaaaatcttgaagaataatacgatgaaaactaacatccttatttttctgttttagagaaagcacctgattattgtgtgaactatggtttggagggccacaaatctagaggtagtggaacagttgagatctcttattttttctttcctgtcttaaactttgccttctattccttttttctttttttgaccgcaatgacttcattgtcatttgtaaaagtgatacatgactgttaaagatagacattgtagaaacttaaaaacaatctcaaaattctaccacccagaaatcagaaatattttgtatttggatatgtttgtctagaagagtagattgcttgattaaaagacagagttttataaatgtagaagccaatatgacatacatgctgccattaaataataaaaaattaaattgacttttatctcaagataagattaaaattggagggtaaaactgaagaaattgttgaaatttggatggtgcttctttaaagcaagagatttagagagtcagagctttttatcccaggtttcaatctttatttcaggaaaattttctgcaattttgtctaagttaattttttttttttaagaaatgccaattatgtcaaatcccttttgtctctatacaatagtccccaactgttttggcaacaggcacgggtgagggtgggggaatggttttcagatgaaattgttccatctcagatcatcaggcattagtcgattctcataaggagcggacaaccttgcatgccctcctatgagaatctaatgccgccgctaatctgacaggaggcagagctcaggcgataatgctcaatgggtgccactcacctcctgttgtgctgcccaattcctaacaggtcatggataagtactggtcagtggcccaggggttggggaccactgctctgtaactatttacagtattctttgtaactactttggtatctttaaaattttctttaacttttgtcaaccataaccctagtgagttttcagttgtgattattctattttgtaacttccaatgtacttttcaacttcataatggttaattttgttttccattgctttcttggtcactgtcatttcatttttcttctctttctctatttttaccattgctttattgaaatatcttctttgagcttctcatgtttctctattaatgagatcatgtctataatattttttgagactacagagacctatttatataaactcttcctctatttcttgaaaaagtttttatctggcgtgagcttcatctgctttttcattgaggttttatctcccttgcctatttttggggctggtttctttctattaatcactgagcagagccagctatttactgaactacagtgtgggaagtggtgggagggtgagtcagatcagcccacagaagctatttaaatttcaggtttcaagcccacctccccaaaaccgttttatgtgttttttcttctgcccaggcaccatatttttatatctatttttgacatttgggcggcctatgtagttcacagtgtaaaactctctgttttactttctttatgttattgctagtgattattgcttgtagtcccacccccttccccacattagccttagtattctatattattcagcaagcttgttcacaactctcaaatatagtctatcagaatttttatctttacctctacattccactattcggaagtatatagtaaaatcgtatgaagacagattttgtctttttcttgcctgtttacactctatcttacagaggtttcaaacaaaccatctttgtttgaaacatcgcaggataatgatacttattgaaatctacatcctgcccaagatatatgccagtcaatttcctttctcctattagtgcaaatggctacctacttaaaagctgctgactatagtttgtcatcaattacttgttaattacagatatggttttcatttttttttctcaatttttcattatgttatttttggagactgtcttaggtggggagtgaattataaatatttttatttcaccacctttaactgagtcaccatatgttatttgcacttccaatagaccagggattgaccagagtatcttttactgatatgaccaccagagctacatggcttttaccttctgtatatcagatgtcactggaatcaagcattaaacctagattaaatctggattaaaccagctgtatggcaccttagaaaattgagaaggactaggaagctgatagaaagaactcctgtataaaaaataaattctttttacattttccttggtagtatttctgcaagcttctttagtttctataggggaatcccagagttttcctctgagattgcttccctttcctttgtattttcatttttccctcttgggctttacttttcagtcgtgtatttctatcccaatgttaatttattacactgtttatattttcctgtccttcaattcatcagtagattagtgaagtacttattcctttaattataagtataaacgtttttaatttctttttggataacgatacatttaatggaaaatttttaaatgctatggtttcttaatagcttttctctaccactaattacttccgttaaaaaaaaaaagaaatacccatgcgtaatataaaagaaattttgaataaaatgttatcctttccttttactagagacaaacatctccacttcaaaatggaaaaatggaactatgcaaaggaaatttacgatattcaagagtatgatattatcactgaaccgattaatttaattgaaaatactaacctgcaaaaaagaattacacaaatgtatttgaaatgtcatcagatacctcaagctatgacagagttgattatgttacacaagtagtaaaggataaattaaatatattctatattaacactaagatttaaaactaattatagtcttctttaatttttctactgtatacatttcatctagttttcagtaaaacaaacttttcattacttttacttatcccatgcaaatctagttgctataagatataacctaatttggaaatacctccctgtaatacattggaattttggtgtgagtgtgtgtgatcagagaggataaacaaatggtgtcagcaaaatagaatgtaaaatatggagataatgtggatttacacaatttgataaaaattctcccttgaattttgcagatcatatatgaatatcatcatgtgaagtgcaattaggattttttcatatattaatacatatacatcatctctttaataaaatattttgctgaactcgtttaatatttctcatgtctcatatttcatattttctcatatgtctcatattttatattttctcatatgtgtctcatttttattattactatagtatccattaaaggagactggcaaatacctgaacaaagttatgttgttggcaatataagatattaccaattgcataatattatttccaaaggcaaattaatatgcaaactatagatttccatgggtatctatacaaattattacttgaagtccatagaaaacagcttccttagagggaagtaaaagaagctctgataacagacaatgtatagcatttcagttaaagtttgattgacatatttttttctcagtcttttatacttgtgaattatagtctacattttgtctttacagatgttgctaacacagtgcagcatgttggcttgtcattttactgattatgtatattgtctcctagttcaagtatacagtaaatcagagctttcatttttcaaggggcagaaaaataattgttggttgataaggtaaggttatatgattttgagggagcttcattgtaaattgaatgagaatccggttttcatgcaaaggtgtatctatgcgataatactttgaatgtctgtagtttgaaatagaaggttaattttttccactggcttatccttaatgaaggaaatcccctgataattactttgattctgaaaatgttgaaaactccagaagaaataaagcttttctttgatttctcagctgaagtgttgtacaaactgaggaatatgaagtccattcccttctttcttctcttgaataattttaaaattgtttgtttagttgtacaattgaaaatattccttattatagaagtaaaaaaacaataatgcatatttcctcatatcataaaaactaaatttgttatcatctgagcttcaatattcttgctcaattagaatagtaaatataaagtgtgatatttataacagttcaaggtttgataggagatagaggtgttttgattttatgggaaaattacttcctcaagaacacatttcttgaggttttagtaatcacatttgactccctgaaattggcaattttattcaatgtaggaatattatcatggtatattatagtgaggagcacatagtcattattattttgtttttgcaaatttattttgaaaaaaaggagcattatcaaatattggtttactattttaaagtaattcatcaggaaatgattttttaaacactgtccctttaagtaaatgtcccttgcttttcaaagctcaacttattacttatggtaatagagttactttgcttcttaaaacaaagtttatactagagcatagcattgtagaattattcaggtctcaatttctcactggaaaatgagtctttaaaatagtaaggatttaaatttctataaaatttaatcacagatacttatattttaagataaatgtgttggagctaaactctggaattattaaaatataaaacattatatccctctaatgtattttttctatttaaatttaaaacaataaacataaatatctttggaa

SEQ ID NO: 136353 - DNA, 1623 bp, Homo sapiens
  Payload ID: 6685
  Gene Symbol: GABRA4
  Gene Name: gamma-aminobutyric acid (GABA) A receptor, alpha 4
  ENST ID: ENST00000511523
  CDS Start-End: 82-192
ctgccctctcctcgcaccctgctcagggcatctgaagagcctggaaacgtgaacaggcttgaagtatggcatgttgcaaagatggtttctgccaagaagtttaaacgaatccccaggacagaaccaaaaggaggagaaattgtgcacagaaaatttcacccgcatcctggacagtttgctcgatggttatgacaacaggctgcgtcctggatttgggggtcctgttacagaagtgaaaactgacatatatgtcaccagctttggacctgtttctgatgttgaaatggaatacacaatggatgtgttcttcaggcagacatggattgacaaaagattaaaatatgacggccccattgaaattttgagattgaacaatatgatggtaacgaaagtgtggacccctgatactttcttcaggaatggaaagaaatctgtctcacataatatgacagctccaaataagctttttagaattatgagaaatggtactattttatacacaatgagactcaccataagtgcggagtgtcccatgagattggtggattttcccatggatggtcatgcatgccctttgaaattcgggagttatgcctatccaaagagtgagatgatctatacctggacaaaaggtcctgagaaatcagttgaagttccgaaggagtcttccagcttagttcaatatgatttgattgggcaaaccgtatcaagtgaaaccatcaaatcaattacgggaataacaactgtcctcaccatgaccacactaagcatcagtgcacgacattctttgcccaaagtgtcctatgctaccgccatggactggttcatagctgtctgctttgcttttgtattttcggcccttatcgagtttgctgctgtcaactatttcaccaatattcaaatggaaaaagccaaaaggaagacatcaaagccccctcaggaagttcccgctgctccagtgcagagagagaagcatcctgaagcccctctgcagaatacaaatgccaatttgaacatgagaaaaagaacaaatgctttggttcactctgaatctgatgttggcaacagaactgaggtgggaaaccattcaagcaaatcttccacagttgttcaagaatcttctaaaggcacacctcggtcttacttagcttccagtccaaacccattcagccgtgcaaatgcagctgaaaccatatctgcagcaagagcacttccatctgcttctcctacttctatccgaactggatatatgcctcgaaaggcttcagttggatctgcttctactcgtcacgtgtttggatcaagactgcagaggataaagaccacagttaataccataggggctactgggaagttgtcagctactcctcctccatcggctccaccaccttctggatctggcacaagtaaaatagacaaatatgcccgtattctctttccagtcacatttggggcatttaacatggtttattgggttgtttatttatctaaggacactatggagaaatcagaaagtctaatgtaatttcgttgctatagtagtttgctaaaagatgatgaaaatgcagaatgtctttttaaatgtttttaaatataaacaaatattctttactaaaataaaaa

SEQ ID NO: 136354 - DNA, 871 bp, Homo sapiens
  Payload ID: 6685
  Gene Symbol: GABRA4
  Gene Name: gamma-aminobutyric acid (GABA) A receptor, alpha 4
  ENST ID: ENST00000502874
  CDS Start-End: 117-227
gtgagcgcgagtgtgcgcacgccgcgggagcctctctgccctctcctcgcaccctgctcagggcatctgaagagcctggaaacgtgaacaggcttgaagtatggcatgttgcaaagatggtttctgccaagaaggtacccgcgatcgctctgtccgccggggtcagtttcgccctcctgcgcttcctgtgcctggcggtttggtcctgttacagaagtgaaaactgacatatatgtcaccagctttggacctgtttctgatgttgaaatggaatacacaatggatgtgttcttcaggcagacatggattgacaaaagattaaaatatgacggccccattgaaattttgagattgaacaatatgatggtaacgaaagtgtggacccctgatactttcttcaggaatggaaagaaatctgtctcacataatatgacagctccaaataagctttttagaattatgagaaatggtactattttatacacaatgagactcaccataagtgcggagtgtcccatgagattggtggattttcccatggatggtcatgcatgccctttgaaattcgggagttatgcctatccaaagagtgagatgatctatacctggacaaaaggtcctgagaaatcagttgaagttccgaaggagtcttccagcttagttcaatatgatttgattgggcaaaccgtatcaagtgaaaccatcaaatcaattacgggtgaatatattgttatgacggtttacttccacctcagacggaagatgggttattttatgattcagacctatattccgtgcattatgacagtgattctttctcaagtttcattttggataaataaagaatcagttcccgctaggactgtatttg

SEQ ID NO: 136355 - DNA, 1776 bp, Homo sapiens
  Payload ID: 6685
  Gene Symbol: GABRA4
  Gene Name: gamma-aminobutyric acid (GABA) A receptor, alpha 4
  ENST ID: ENST00000508560
  CDS Start-End: 82-192
ctgccctctcctcgcaccctgctcagggcatctgaagagcctggaaacgtgaacaggcttgaagtatggcatgttgcaaagatggtttctgccaagaagtttaaacgaatccccaggacagaaccaaaaggaggagaaattgtgcacagaaaatttcacccgcatcctggacagtttgctcgatggttatgacaacaggctgcgtcctggatttgggggtcctgttacagaagtgaaaactgacatatatgtcaccagctttggacctgtttctgatgttgaaatggaatacacaatggatgtgttcttcaggcagacatggattgacaaaagattaaaatatgacggccccattgaaattttgagattgaacaatatgatggtaacgaaagtgtggacccctgatactttcttcaggaatggaaagaaatctgtctcacataatatgacagctccaaataagctttttagaattatgagaaatggtactattttatacacaatgagactcaccataagtgcggagtgtcccatgagattggtggattttcccatggatggtcatgcatgccctttgaaattcgggagttatgcctatccaaagagtgagatgatctatacctggacaaaaggtcctgagaaatcagttgaagttccgaaggagtcttccagcttagttcaatatgatttgattgggcaaaccgtatcaagtgaaaccatcaaatcaattacgggtgaatatattgttatgacggtttacttccacctcagacggaagatgggttattttatgattcagacctatattccgtgcattatgacagtgattctttctcaagtttcattttggataaataaagaatcagttcccgctaggactgtatttggaataacaactgtcctcaccatgaccacactaagcatcagtgcacgacattctttgcccaaagtgtcctatgctaccgccatggactggttcatagctgtctgctttgcttttgtattttcggcccttatcgagtttgctgctgtcaactatttcaccaatattcaaatggaaaaagccaaaaggaagacatcaaagccccctcaggaagttcccgctgctccagtgcagagagagaagcatcctgaagcccctctgcagaatacaaatgccaatttgaacatgagaaaaagaacaaatgctttggttcactctgaatctgatgttggcaacagaactgaggtgggaaaccattcaagcaaatcttccacagttgttcaagaatcttctaaaggcacacctcggtcttacttagcttccagtccaaacccattcagccgtgcaaatgcagctgaaaccatatctgcagcaagagcacttccatctgcttctcctacttctatccgaactggatatatgcctcgaaaggcttcagttggatctgcttctactcgtcacgtgtttggatcaagactgcagaggataaagaccacagttaataccataggggctactgggaagttgtcagctactcctcctccatcggctccaccaccttctggatctggcacaagtaaaatagacaaatatgcccgtattctctttccagtcacatttggggcatttaacatggtttattgggttgtttatttatctaaggacactatggagaaatcagaaagtctaatgtaatttcgttgctatagtagtttgctaaaagatgatgaaaatgcagaatgtctttttaaatgtttttaaatataaacaaatattctttactaaaataaaaa

SEQ ID NO: 136356 - DNA, 3251 bp, Homo sapiens
  Payload ID: 6686
  Gene Symbol: GABRA5
  Gene Name: gamma-aminobutyric acid (GABA) A receptor, alpha 5
  Uniprot ID: P31644
  ENST ID: ENST00000335625
  CDS Start-End: 889-2277
aggaactgcaccactaggacggacgacacaccgacgtaatgaccatagtaagaccccatgtacgtggctaatgaggcagtgacccgacgtggctcggaagccctgctggggagatcccgccccgtcaccccagaggcgctctccgacctgcagcccccagggctcctggccctttcccgtttgccactgcggcttgttgtcaagaaatggaacttcagaaaacccccagatatacactgcgttaggtaaggatttcattctaatcgagtccaatgtgaccctggctttccctcccgtagttatgcattcctgtctatgagtgagatgaaaagaatgtccacaggccagcttctttcagaagcgcctaagagatgcgcatgtaaggggtgccatggagcacccgggaaggacccaggcctgggcagggaggcgttggggccggctctagggagcaaagctgtcggagtccaggcctctatcacccgactgctgacactgccctcccatccctgctctacaagcgggcggtggtgactacacgaggcgccgaagatgctgttgagggccctggagaaacttcagcagaacagggcctctccccttgcaggccgagccgggggccctgcgccctccccctccgcccagctcggccaagggcgcatttgctgagcgtctggcggcctctaccggagcacctctgcagagggccgatcctccagcccagagacgacatgtggcgctcgggcgagtgccttgcagagagaggagtagcttgctggctttgaacgcgtggcgtggcagatatttcagaaagcttcaagaacaagctggagaagggaagagttattcctccatattcacctgcttcaactactattcttattgggaatggacaatggaatgttctctggttttatcatgatcaaaaacctccttctcttttgtatttccatgaacttatccagtcactttggcttttcacagatgccaaccagttcagtgaaagatgagaccaatgacaacatcacgatatttaccaggatcttggatgggctcttggatggctacgacaacagacttcggcccgggctgggagagcgcatcactcaggtgaggaccgacatctacgtcaccagcttcggcccggtgtccgacacggaaatggagtacaccatagacgtgtttttccgacaaagctggaaagatgaaaggcttcggtttaaggggcccatgcagcgcctccctctcaacaacctccttgccagcaagatctggaccccagacacgttcttccacaacgggaagaagtccatcgctcacaacatgaccacgcccaacaagctgctgcggctggaggacgacggcaccctgctctacaccatgcgcttgaccatctctgcagagtgccccatgcagcttgaggacttcccgatggatgcgcacgcttgccctctgaaatttggcagctatgcgtaccctaattctgaagtcgtttacgtctggaccaacggctccaccaagtcggtggtggtggcggaagatggctccagactgaaccagtaccacctgatggggcagacggtgggcactgagaacatcagcaccagcacaggcgaatacacaatcatgacagctcacttccacctgaaaaggaagattggctactttgtcatccagacctaccttccctgcataatgaccgtgatcttatcacaggtgtccttttggctgaaccgggaatcagtcccagccaggacagtttttggggtcaccacggtgctgaccatgacgaccctcagcatcagcgccaggaactctctgcccaaagtggcctacgccaccgccatggactggttcatagccgtgtgctatgccttcgtcttctcggcgctgatagagtttgccacggtcaattactttaccaagagaggctgggcctgggatggcaaaaaagccttggaagcagccaagatcaagaaaaagcgtgaagtcatactaaataagtcaacaaacgcttttacaactgggaagatgtctcaccccccaaacattccgaaggaacagaccccagcagggacgtcgaatacaacctcagtctcagtaaaaccctctgaagagaagacttctgaaagcaaaaagacttacaacagtatcagcaaaattgacaaaatgtcccgaatcgtattcccagtcttgttcggcactttcaacttagtttactgggcaacgtatttgaatagggagccggtgataaaaggagccgcctctccaaaataaccggccacactcccaaactccaagacagccatacttccagcgaaatggtaccaaggagaggtcttgctcacagggactctccatatgtgagcactatctttcaggaaatttttgcatgtttaataatatgtacaaataatattgccttgatgtttctatatgtaacttcagatgtttccaagatgtcccattgataattcgagcaaacaactttctggaaaaacaggatacgatgactgacactcagatgcccagtatcatacgttgatagtttacaaacaagatacgtatatttttaactgcttcaagtgttacctaacaatgttttttatacttcaaatgtcatttcatacaaattttcccagtgaataaatattttaggaaactctccatgattattagttgaccaactatattgcgagaaacagagatcataaagagcacgttttccattatgaggaaacttggacatttatgtacaaaatgaattgcctttgataattcttactgttctgaaattaggaaagtactgcatgatcttacacgaagaaatagaataggcaaacttttatgcaggcagattaataacagaaatacatcatatgttagatacacaaaatatttccctgaggaaaaaaaatcaactgcttaaattttttgggaagaaaaagaaacatttcttaccccacaccacccactacctgaacaatagccaagaaaggaaaggagatgttaaaacaaacagtgttttgatgacattctcagcacttggcccatgtgatcgctgtctctgaaacactgaccacctctccctacagccagcgtgtagtgcttcagtggtgagaaattgtaattgagttattttccattttatttccttgtatgtatttcatgactggacttactgctctgtcagcttttgtatatgaatcttaaatgttcattaaaaaataaaaaatgaactgatcttgtgg

SEQ ID NO: 136357 - DNA, 2183 bp, Homo sapiens
  Payload ID: 6686
  Gene Symbol: GABRA5
  Gene Name: gamma-aminobutyric acid (GABA) A receptor, alpha 5
  Uniprot ID: P31644
  ENST ID: ENST00000355395
  CDS Start-End: 276-1664
gaagatgctgttgagggccctggagaaacttcagcagaacagggcctctccccttgcaggccgagccgggggccctgcgccctccccctccgcccagctcggccaagggcgcatttgctgagcgtctggcggcctctaccggagcacctctgcagagggccgatcctccagcccagagacgacatgtggcgctcgggcgagcttcaagaacaagctggagaagggaagagttattcctccatattcacctgcttcaactactattcttattgggaatggacaatggaatgttctctggttttatcatgatcaaaaacctccttctcttttgtatttccatgaacttatccagtcactttggcttttcacagatgccaaccagttcagtgaaagatgagaccaatgacaacatcacgatatttaccaggatcttggatgggctcttggatggctacgacaacagacttcggcccgggctgggagagcgcatcactcaggtgaggaccgacatctacgtcaccagcttcggcccggtgtccgacacggaaatggagtacaccatagacgtgtttttccgacaaagctggaaagatgaaaggcttcggtttaaggggcccatgcagcgcctccctctcaacaacctccttgccagcaagatctggaccccagacacgttcttccacaacgggaagaagtccatcgctcacaacatgaccacgcccaacaagctgctgcggctggaggacgacggcaccctgctctacaccatgcgcttgaccatctctgcagagtgccccatgcagcttgaggacttcccgatggatgcgcacgcttgccctctgaaatttggcagctatgcgtaccctaattctgaagtcgtttacgtctggaccaacggctccaccaagtcggtggtggtggcggaagatggctccagactgaaccagtaccacctgatggggcagacggtgggcactgagaacatcagcaccagcacaggcgaatacacaatcatgacagctcacttccacctgaaaaggaagattggctactttgtcatccagacctaccttccctgcataatgaccgtgatcttatcacaggtgtccttttggctgaaccgggaatcagtcccagccaggacagtttttggggtcaccacggtgctgaccatgacgaccctcagcatcagcgccaggaactctctgcccaaagtggcctacgccaccgccatggactggttcatagccgtgtgctatgccttcgtcttctcggcgctgatagagtttgccacggtcaattactttaccaagagaggctgggcctgggatggcaaaaaagccttggaagcagccaagatcaagaaaaagcgtgaagtcatactaaataagtcaacaaacgcttttacaactgggaagatgtctcaccccccaaacattccgaaggaacagaccccagcagggacgtcgaatacaacctcagtctcagtaaaaccctctgaagagaagacttctgaaagcaaaaagacttacaacagtatcagcaaaattgacaaaatgtcccgaatcgtattcccagtcttgttcggcactttcaacttagtttactgggcaacgtatttgaatagggagccggtgataaaaggagccgcctctccaaaataaccggccacactcccaaactccaagacagccatacttccagcgaaatggtaccaaggagaggtcttgctcacagggactctccatatgtgagcactatctttcaggaaatttttgcatgtttaataatatgtacaaataatattgccttgatgtttctatatgtaacttcagatgtttccaagatgtcccattgataattcgagcaaacaactttctggaaaaacaggatacgatgactgacactcagatgcccagtatcatacgttgatagtttacaaacaagatacgtatatttttaactgcttcaagtgttacctaacaatgttttttatacttcaaatgtcatttcatacaaattttcccagtgaataaatattttaggaaactctccatgattattagttgaccaactatattgcgagaaacagagatcataaagagcacgttttccattatgaggaaacttggacatttatgtacaaaatgaattgcctttgataattcttactgttctgaaat

SEQ ID NO: 136358 - DNA, 2761 bp, Homo sapiens
  Payload ID: 6686
  Gene Symbol: GABRA5
  Gene Name: gamma-aminobutyric acid (GABA) A receptor, alpha 5
  Uniprot ID: P31644
  ENST ID: ENST00000400081
  CDS Start-End: 399-1787
gagtgcgccgggggcgctggggggctctgcggcgggcggcgcgcggcccggggcgcggcgcggagcggagctgcagggcggcggcgggagcgcggggcgcaagagccgctccgccgggagtgccggggaagttcgcgctggcagcatggggcggtgacgccgcaccggccttccgcgcctgccagccgggcgagagcaggcggaggagaaggaggatgcatcctcaccgacggctcgcctcccggggccggcgcgcaggtgccttgcagagagaggagtagcttgctggctttgaacgcgtggcgtggcagatatttcagaaagcttcaagaacaagctggagaagggaagagttattcctccatattcacctgcttcaactactattcttattgggaatggacaatggaatgttctctggttttatcatgatcaaaaacctccttctcttttgtatttccatgaacttatccagtcactttggcttttcacagatgccaaccagttcagtgaaagatgagaccaatgacaacatcacgatatttaccaggatcttggatgggctcttggatggctacgacaacagacttcggcccgggctgggagagcgcatcactcaggtgaggaccgacatctacgtcaccagcttcggcccggtgtccgacacggaaatggagtacaccatagacgtgtttttccgacaaagctggaaagatgaaaggcttcggtttaaggggcccatgcagcgcctccctctcaacaacctccttgccagcaagatctggaccccagacacgttcttccacaacgggaagaagtccatcgctcacaacatgaccacgcccaacaagctgctgcggctggaggacgacggcaccctgctctacaccatgcgcttgaccatctctgcagagtgccccatgcagcttgaggacttcccgatggatgcgcacgcttgccctctgaaatttggcagctatgcgtaccctaattctgaagtcgtttacgtctggaccaacggctccaccaagtcggtggtggtggcggaagatggctccagactgaaccagtaccacctgatggggcagacggtgggcactgagaacatcagcaccagcacaggcgaatacacaatcatgacagctcacttccacctgaaaaggaagattggctactttgtcatccagacctaccttccctgcataatgaccgtgatcttatcacaggtgtccttttggctgaaccgggaatcagtcccagccaggacagtttttggggtcaccacggtgctgaccatgacgaccctcagcatcagcgccaggaactctctgcccaaagtggcctacgccaccgccatggactggttcatagccgtgtgctatgccttcgtcttctcggcgctgatagagtttgccacggtcaattactttaccaagagaggctgggcctgggatggcaaaaaagccttggaagcagccaagatcaagaaaaagcgtgaagtcatactaaataagtcaacaaacgcttttacaactgggaagatgtctcaccccccaaacattccgaaggaacagaccccagcagggacgtcgaatacaacctcagtctcagtaaaaccctctgaagagaagacttctgaaagcaaaaagacttacaacagtatcagcaaaattgacaaaatgtcccgaatcgtattcccagtcttgttcggcactttcaacttagtttactgggcaacgtatttgaatagggagccggtgataaaaggagccgcctctccaaaataaccggccacactcccaaactccaagacagccatacttccagcgaaatggtaccaaggagaggtcttgctcacagggactctccatatgtgagcactatctttcaggaaatttttgcatgtttaataatatgtacaaataatattgccttgatgtttctatatgtaacttcagatgtttccaagatgtcccattgataattcgagcaaacaactttctggaaaaacaggatacgatgactgacactcagatgcccagtatcatacgttgatagtttacaaacaagatacgtatatttttaactgcttcaagtgttacctaacaatgttttttatacttcaaatgtcatttcatacaaattttcccagtgaataaatattttaggaaactctccatgattattagttgaccaactatattgcgagaaacagagatcataaagagcacgttttccattatgaggaaacttggacatttatgtacaaaatgaattgcctttgataattcttactgttctgaaattaggaaagtactgcatgatcttacacgaagaaatagaataggcaaacttttatgcaggcagattaataacagaaatacatcatatgttagatacacaaaatatttccctgaggaaaaaaaatcaactgcttaaattttttgggaagaaaaagaaacatttcttaccccacaccacccactacctgaacaatagccaagaaaggaaaggagatgttaaaacaaacagtgttttgatgacattctcagcacttggcccatgtgatcgctgtctctgaaacactgaccacctctccctacagccagcgtgtagtgcttcagtggtgagaaattgtaattgagttattttccattttatttccttgtatgtatttcatgactggacttactgctctgtcagcttttgtatatgaatcttaaatgttcattaaaaaataaaaaatgaactgatcttgtgg

SEQ ID NO: 136359 - DNA, 570 bp, Homo sapiens
  Payload ID: 6686
  Gene Symbol: GABRA5
  Gene Name: gamma-aminobutyric acid (GABA) A receptor, alpha 5
  ENST ID: ENST00000554083
  CDS Start-End: 314-570
gctaattggttgttaaaaatggctaaaatattgacataaaccaattccttagaatcacagaatgatagactttgagcctcaggttaggtggttggataactagccccaagcagagtatccttggatgttggagaactgaggtgtatcaaggccaaacaatcccctaggcactatgggagctgtgttctcagatcctcgtctcaggagacaagcctccacgtgactccctggtttctgtatcttgagaagaatttgtaagaaataatatgttttaacgcttcctcttgtttctctttttaaaagcttttcacagatgccaaccagttcagtgaaagatgagaccaatgacaacatcacgatatttaccaggatcttggatgggctcttggatggctacgacaacagacttcggcccgggctgggagagcgcatcactcaggtgaggaccgacatctacgtcaccagcttcggcccggtgtccgacacggaaatggagtacaccatagacgtgtttttccgacaaagctggaaagatgaaaggcttcggtttaaggggcccatgcagcgcct

SEQ ID NO: 136360 - DNA, 549 bp, Homo sapiens
  Payload ID: 6686
  Gene Symbol: GABRA5
  Gene Name: gamma-aminobutyric acid (GABA) A receptor, alpha 5
  ENST ID: ENST00000555182
  CDS Start-End: 51-549
gatcctccagcccagagacgacatgtggcgctcgggcgagcttttcacagatgccaaccagttcagtgaaagatgagaccaatgacaacatcacgatatttaccaggatcttggatgggctcttggatggctacgacaacagacttcggcccgggctgggagagcgcatcactcaggtgaggaccgacatctacgtcaccagcttcggcccggtgtccgacacggaaatggagtacaccatagacgtgtttttccgacaaagctggaaagatgaaaggcttcggtttaaggggcccatgcagcgcctccctctcaacaacctccttgccagcaagatctggaccccagacacgttcttccacaacgggaagaagtccatcgctcacaacatgaccacgcccaacaagctgctgcggctggaggacgacggcaccctgctctacaccatgcgcttgaccatctctgcagagtgccccatgcagcttgaggacttcccgatggatgcgcacgcttgccctctgaaatttggcagctatgcgtaccctaatt

SEQ ID NO: 136361 - DNA, 650 bp, Homo sapiens
  Payload ID: 6686
  Gene Symbol: GABRA5
  Gene Name: gamma-aminobutyric acid (GABA) A receptor, alpha 5
  ENST ID: ENST00000554599
  CDS Start-End: 154-650
acgtactttctcagtgccttgcagagagaggagtagcttgctggctttgaacgcgtggcgtggcagatatttcagaaagcttcaagaacaagctggagaagggaagagttattcctccatattcacctgcttcaactactattcttattgggaatggacaatggaatgttctctggttttatcatgatcaaaaacctccttctcttttgtatttccatgaacttatccagtcactttggcttttcacagatgccaaccagttcagtgaaagatgagaccaatgacaacatcacgatatttaccaggatcttggatgggctcttggatggctacgacaacagacttcggcccgggctgggagagcgcatcactcaggtgaggaccgacatctacgtcaccagcttcggcccggtgtccgacacggaaatggagtacaccatagacgtgtttttccgacaaagctggaaagatgaaaggcttcggtttaaggggcccatgcagcgcctccctctcaacaacctccttgccagcaagatctggaccccagacacgttcttccacaacgggaagaagtccatcgctcacaacatgaccacgcccaacaagctgctgcggctggaggacgacggcaccctgctctacaccatgcg

SEQ ID NO: 136362 - DNA, 728 bp, Homo sapiens
  Payload ID: 6686
  Gene Symbol: GABRA5
  Gene Name: gamma-aminobutyric acid (GABA) A receptor, alpha 5
  ENST ID: ENST00000554596
  CDS Start-End: 283-728
ggagtgccggggaagttcgcgctggcagcatggggcggtgacgccgcaccggccttccgcgcctgccagccgggcgagagcaggcggaggagaaggaggatgcatcctcaccgacggctcgcctcccggggccggcgcgcaggtgccttgcagagagaggagtagcttgctggctttgaacgcgtggcgtggcagatatttcagaaagcttcaagaacaagctggagaagggaagagttattcctccatattcacctgcttcaactactattcttattgggaatggacaatggaatgttctctggttttatcatgatcaaaaacctccttctcttttgtatttccatgaacttatccagtcactttggcttttcacagatgccaaccagttcagtgaaagatgagaccaatgacaacatcacgatatttaccaggatcttggatgggctcttggatggctacgacaacagacttcggcccgggctgggagagcgcatcactcaggtgaggaccgacatctacgtcaccagcttcggcccggtgtccgacacggaaatggagtacaccatagacgtgtttttccgacaaagctggaaagatgaaaggcttcggtttaaggggcccatgcagcgcctccctctcaacaacctccttgccagcaagatctggaccccagacacgttcttccacaacgggaagaagtccatcgctcacaacatgaccacgcc

SEQ ID NO: 136363 - DNA, 458 bp, Homo sapiens
  Payload ID: 6686
  Gene Symbol: GABRA5
  Gene Name: gamma-aminobutyric acid (GABA) A receptor, alpha 5
  ENST ID: ENST00000555060
  CDS Start-End: 411-458
gctcgaggccaggggacttggagtcgctgctgcaccgcgcgctcccagcccaggaggaaggcgctgcctggcggagcgcttggctcgtacccggggcaggagcaggggaagtctgcgaaagccgggagcgagccggggagggccggggagctggagaccctcggcgtgccgctgcggaccgcgcgggtggcgaccgcgggtgccagggcgacccaggctgcggctccgcagtgcagcccccgcgcccacctgccctggcgcgccggccctgtgccttgcagagagaggagtagcttgctggctttgaacgcgtggcgtggcagatatttcagaaagcttcaagaacaagctggagaagggaagagttattcctccatattcacctgcttcaactactattcttattgggaatggacaatggaatgttctctggttttatcatgatcaaaaacctcctt

SEQ ID NO: 136364 - DNA, 653 bp, Homo sapiens
  Payload ID: 6686
  Gene Symbol: GABRA5
  Gene Name: gamma-aminobutyric acid (GABA) A receptor, alpha 5
  ENST ID: ENST00000554038
  CDS Start-End: 396-653
ggcgcgcggcccggggcgcggcgcggagcggagctgcagggcggcggcgggagcgcggggcgcaagagccgctccgccgggagtgccggggaagttcgcgctggcagcatggggcggtgacgccgcaccggccttccgcgcctgccagccgggcgagagcaggcggaggagaaggaggatgcatcctcaccgacggctcgcctcccggggccggcgcgcagggtgagccctgggcgcgctgggccggggcagtgggtgccttgcagagagaggagtagcttgctggctttgaacgcgtggcgtggcagatatttcagaaagcttcaagaacaagctggagaagggaagagttattcctccatattcacctgcttcaactactattcttattgggaatggacaatggaatgttctctggttttatcatgatcaaaaacctccttctcttttgtatttccatgaacttatccagtcactttggcttttcacagatgccaaccagttcagtgaaagatgagaccaatgacaacatcacgatatttaccaggatcttggatgggctcttggatggctacgacaacagacttcggcccgggctgggagagcgcatcactcaggtgaggaccgacatctacgtcaccagcttcggcccg

SEQ ID NO: 136365 - DNA, 2128 bp, Homo sapiens
  Payload ID: 6687
  Gene Symbol: GABRA6
  Gene Name: gamma-aminobutyric acid (GABA) A receptor, alpha 6
  Uniprot ID: Q16445
  ENST ID: ENST00000274545
  CDS Start-End: 434-1795
aagatgccaatgctttccagatttcctcacagggccctgctaattccatgccaaaactggcagtggatttcttccttctaatctcccttaatgccttattcgattattgtcactgctctccgaccatgcactgtcccttcagactctcctttcccaactgagtcagtcagaggagcctgggtgtctgcaggacataatctaagaccacaaaccaccttgttccacgtgagaaggaaacaagaaagaagggagccaggggaatcctgcaaatttttaggcaacctctttatctattggattactgacttgaggcaaacaaggaacagagatatgaagggtttgaaagatttctccagttgattggcagagaagagctggctagcagggaggacgaccctaggagggtgaattctgcatttcagtgcactgcaggatggcgtcgtctctgccctggctgtgcattattctgtggctagaaaatgccctagggaaactcgaagttgaaggcaacttctactcagaaaacgtcagtcggatcctggacaacttgcttgaaggctatgacaatcggctgcggccgggatttggaggtgctgtcactgaagtcaaaacagacatttatgtgaccagttttgggcccgtgtcagatgtggagatggagtatacgatggatgtttttttccgccagacctggactgatgagaggttgaagtttggggggccaactgagattctgagtctgaataatttgatggtcagtaaaatctggacgcctgacacctttttcagaaatggtaaaaagtccattgctcacaacatgacaactcctaataaactcttcagaataatgcagaatggaaccattttatacaccatgaggcttaccatcaatgctgactgtcccatgaggctggttaactttcctatggatgggcatgcttgtccactcaagtttgggagctatgcttatcccaaaagtgaaatcatatatacgtggaaaaaaggaccactttactcagtagaagtcccagaagaatcttcaagccttctccagtatgatctgattggacaaacagtatctagtgagacaattaaatctaacacaggtgaatacgttataatgacagtttacttccacttgcaaaggaagatgggctacttcatgatacagatatacactccttgcattatgacagtcattctttcccaggtgtctttctggattaataaggagtccgtcccagcaagaactgtttttgggatcaccactgttttaactatgaccactttgagcatcagtgcccggcactctttgccaaaagtgtcatatgccactgccatggattggttcatagctgtttgctttgcattcgtcttctctgcgcttatcgagttcgcagctgtcaactactttaccaatcttcagacacagaaggccaaaaggaaggcacagtttgcagccccacccacagtgacaatatcaaaagctactgaacctttggaagctgagattgttttgcatcctgactccaaatatcatctgaagaaaaggatcacttctctgtctttgccaatagtttcatcttccgaggccaataaagtgctcacgagagcgcccatcttacaatcaacacctgtcacacccccaccactctcgccagcctttggaggcaccagtaaaatagaccagtattctcgaattctcttcccagttgcatttgcaggattcaaccttgtgtactgggtagtttatctttccaaagatacaatggaagtcagtagcagtgttgaatagcttgcggccaggacaacctgaattctataagttcttgttttctgtttcctatgttttcttaaaaaatagcattgagacttgtgtagatgcttctcagaacatgaaatcaaattggaaatctgtaacgcagcttccgtaagcatgtgtgggcaaaaaagcaataatcctactcctcaaaatagaaagttgaagattgctgaaaaatatgacttttctgtatgttagagaaaaactttatgaggatgaaatgggttcaagatgaatttgtcaacttttgtcttccattgttcagtatttttaattgtcactgtaaataacatttaccacaaggca

SEQ ID NO: 136366 - DNA, 573 bp, Homo sapiens
  Payload ID: 6687
  Gene Symbol: GABRA6
  Gene Name: gamma-aminobutyric acid (GABA) A receptor, alpha 6
  ENST ID: ENST00000523691
  CDS Start-End: 1-573
ttgatggtcagtaaaatctggacgcctgacacctttttcagaaatggtaaaaagtccattgctcacaacatgacaactcctaataaactcttcagaataatgcagaatggaaccattttatacaccatgaggcttaccatcaatgctgactgtcccatgaggctggttaactttcctatggatgggcatgcttgtccactcaagtttgggagctacaatgtgcactttgaaggaaaaaaagacaactcgtcaaattcactgctatatttaatttgtttcaaatatttagatgcttatcccaaaagtgaaatcatatatacgtggaaaaaaggaccactttactcagtagaagtcccagaagaatcttcaagccttctccagtatgatctgattggacaaacagtatctagtgagacaattaaatctaacacaggtgaatacgttataatgacagtttacttccacttgcaaaggaagatgggctacttcatgatacagatatacactccttgcattatgacagtcattctttcccaggtgtctttctggattaataaggagtccgtcccagca

SEQ ID NO: 136367 - DNA, 591 bp, Homo sapiens
  Payload ID: 6687
  Gene Symbol: GABRA6
  Gene Name: gamma-aminobutyric acid (GABA) A receptor, alpha 6
  ENST ID: ENST00000520000
  CDS Start-End: 1-591
acattgaggatggaccagtaggtgttctggggactctgttccaggagtatacgatggatgtttttttccgccagacctggactgatgagaggttgaagtttggggggccaactgagattctgagtctgaataatttgatggtcagtaaaatctggacgcctgacacctttttcagaaatggtaaaaagtccattgctcacaacatgacaactcctaataaactcttcagaataatgcagaatggaaccattttatacaccatgaggcttaccatcaatgctgactgtcccatgaggctggttaactttcctatggatgggcatgcttgtccactcaagtttgggagctatgcttatcccaaaagtgaaatcatatatacgtggaaaaaaggaccactttactcagtagaagtcccagaagaatcttcaagccttctccagtatgatctgattggacaaacagtatctagtgagacaattaaatctaacacaggtgaatacgttataatgacagtttacttccacttgcaaaggaagatgggctacttcatgatacagatatacactccttgcattatgacagtcattcttt

SEQ ID NO: 136368 - DNA, 555 bp, Homo sapiens
  Payload ID: 6687
  Gene Symbol: GABRA6
  Gene Name: gamma-aminobutyric acid (GABA) A receptor, alpha 6
  ENST ID: ENST00000517823
  CDS Start-End: 1-555
agtaggtgttctggggactctgttccaggtacagatggctgtagcattcataagagggtatttatagagtatacgatggatgtttttttccgccagacctggactgatgagaggttgaagtttggggggccaactgagattctgagtctgaataatttgatggtcagtaaaatctggacgcctgacacctttttcagaaatggtaaaaagtccattgctcacaacatgacaactcctaataaactcttcagaataatgcagaatggaaccattttatacaccatgaggcttaccatcaatgctgactgtcccatgaggctggttaactttcctatggatgggcatgcttgtccactcaagtttgggagctatgcttatcccaaaagtgaaatcatatatacgtggaaaaaaggaccactttactcagtagaagtcccagaagaatcttcaagccttctccagtatgatctgattggacaaacagtatctagtgagacaattaaatctaacacaggtgaatacgttataatgacagtttacttccacttgcaaagg

SEQ ID NO: 136369 - DNA, 2393 bp, Homo sapiens
  Payload ID: 6687
  Gene Symbol: GABRA6
  Gene Name: gamma-aminobutyric acid (GABA) A receptor, alpha 6
  ENST ID: ENST00000523217
  CDS Start-End: 243-1574
acataatctaagaccacaaaccaccttgttccacgtgagaaggaaacaagaaagaagggagccaggggaatcctgcaaatttttaggcaacctctttatctattggattactgacttgaggcaaacaaggaacagagatatgaagggtttgaaagatttctccagttgattggcagagaagagctggctagcagggaggacgaccctaggagggtgaattctgcatttcagtgcactgcaggatggcgtcgtctctgccctggctgtgcattattctgtggctagaaaatgccctagggaaactcgaagttgaaggcaacttctactcagaaaacgtcagtcggatcctggacaacttgcttgaaggctatgacaatcggctgcggccgggatttggaggtgctgtcactgaagtcaaaacagacatttatgtgaccagttttgggcccgtgtcagatgtggagatgacctggactgatgagaggttgaagtttggggggccaactgagattctgagtctgaataatttgatggtcagtaaaatctggacgcctgacacctttttcagaaatggtaaaaagtccattgctcacaacatgacaactcctaataaactcttcagaataatgcagaatggaaccattttatacaccatgaggcttaccatcaatgctgactgtcccatgaggctggttaactttcctatggatgggcatgcttgtccactcaagtttgggagctatgcttatcccaaaagtgaaatcatatatacgtggaaaaaaggaccactttactcagtagaagtcccagaagaatcttcaagccttctccagtatgatctgattggacaaacagtatctagtgagacaattaaatctaacacaggtgaatacgttataatgacagtttacttccacttgcaaaggaagatgggctacttcatgatacagatatacactccttgcattatgacagtcattctttcccaggtgtctttctggattaataaggagtccgtcccagcaagaactgtttttgggatcaccactgttttaactatgaccactttgagcatcagtgcccggcactctttgccaaaagtgtcatatgccactgccatggattggttcatagctgtttgctttgcattcgtcttctctgcgcttatcgagttcgcagctgtcaactactttaccaatcttcagacacagaaggccaaaaggaaggcacagtttgcagccccacccacagtgacaatatcaaaagctactgaacctttggaagctgagattgttttgcatcctgactccaaatatcatctgaagaaaaggatcacttctctgtctttgccaatagtttcatcttccgaggccaataaagtgctcacgagagcgcccatcttacaatcaacacctgtcacacccccaccactctcgccagcctttggaggcaccagtaaaatagaccagtattctcgaattctcttcccagttgcatttgcaggattcaaccttgtgtactgggtagtttatctttccaaagatacaatggaagtcagtagcagtgttgaatagcttgcggccaggacaacctgaattctataagttcttgttttctgtttcctatgttttcttaaaaaatagcattgagacttgtgtagatgcttctcagaacatgaaatcaaattggaaatctgtaacgcagcttccgtaagcatgtgtgggcaaaaaagcaataatcctactcctcaaaatagaaagttgaagattgctgaaaaatatgacttttctgtatgttagagaaaaactttatgaggatgaaatgggttcaagatgaatttgtcaacttttgtcttccattgttcagtatttttaattgtcactgtaaataacatttaccacaaggcagataaaataagaaatgctgacacttccaaaggttgccttaaaatatgtttattttggcttagttcccgagagggcaaaatataaatacagtctaaatatttatcagtaggttaataccagcatgttggaggcctttatgctagtaaaatggctttcagtggcattgtaaagcctacattgagcttagccatttgtttttaacctcgctgtgctcttttacctcaataaaatgtggtgtttgtatacatataaattatacatagctcataaattatgtatgcatatgtacatagctgtagttggactaaaattcagtgtgttttatcctactaaattctccttttaaaataatacacttaccataattctatgaggttgtagaaaaaagtactcattataaggaagccttgtatattatgactatggttatctcttgtgttttccacatttccaattataacactaaataaaacaacaataaacatg

SEQ ID NO: 136370 - DNA, 2143 bp, Homo sapiens
  Payload ID: 6688
  Gene Symbol: GABRB1
  Gene Name: gamma-aminobutyric acid (GABA) A receptor, beta 1
  Uniprot ID: P18505
  ENST ID: ENST00000295454
  CDS Start-End: 293-1717
aatgcatgaaggaaactccgtttacacatgctcgtaggatcccctgcgtggaaacagcagcttgtctctgactacccggaggacatggagcaccccaaataggaactttagagggattgaaatctgttgcctgttccactaggaatattgtttgcaaggcacaaggtgtcttttggtagtgagcgcgctctgcgcatgcgcaggtccattcgggaattactgcccagcagccgactaagttgcattccttgaatcttcgcagaaaagacaattcttttaatcagagttagtaatgtggacagtacaaaatcgagagagtctggggcttctctctttccctgtgatgattaccatggtctgttgtgcacacagcaccaatgaacccagcaacatgtcatacgtgaaagagacagtggacagattgctcaaaggatatgacattcgcttgcggccggacttcggagggccccccgtcgacgttgggatgcggatcgatgtcgccagcatagacatggtctccgaagtgaatatggattatacactcaccatgtatttccagcagtcttggaaagacaaaaggctttcttattctggaatcccactgaacctcaccctagacaatagggtagctgaccaactctgggtaccagacacctactttctgaatgacaagaaatcatttgtgcatggggtcacagtgaaaaatcgaatgattcgactgcatcctgatggaacagttctctatggactccgaatcacaaccacagctgcatgtatgatggatcttcgaagatatccattggatgagcagaactgcaccctggagatcgaaagttatggctataccactgatgacattgaattttactggaatggaggagaaggggcagtcactggtgttaataaaatcgaacttcctcaattttcaattgttgactacaagatggtgtctaagaaggtggagttcacaacaggagcgtatccacgactgtcactaagttttcgtctaaagagaaacattggttacttcattttgcaaacctacatgccttctacactgattacaattctgtcctgggtgtctttttggatcaactatgatgcatctgcagccagagtcgcactaggaatcacgacagtgcttacaatgacaaccatcagcacccacctcagggagaccctgccaaagatcccttatgtcaaagcgattgatatttatctgatgggttgctttgtgtttgtgttcctggctctgctggagtatgcctttgtaaattacatcttctttgggaaaggccctcagaaaaagggagctagcaaacaagaccagagtgccaatgagaagaataaactggagatgaataaagtccaggtcgacgcccacggtaacattctcctcagcaccctggaaatccggaatgagacgagtggctcggaagtgctcacgagcgtgagcgaccccaaggccaccatgtactcctatgacagcgccagcatccagtaccgcaagcccctgagcagccgcgaggcctacgggcgcgccctggaccggcacggggtacccagcaaggggcgcatccgcaggcgtgcctcccagctcaaagtcaagatccccgacttgactgatgtgaattccatagacaagtggtcccgaatgtttttccccatcaccttttctctttttaatgtcgtctattggctttactatgtacactgaggtctgttctaatggttccatttagactactttcctcttctattgttttttaaccttacaggtccccaacagcgatactgctgtttctcgaggtaagagattcagccatccaattggttttaggtcttgcatatcagttttattactgcaccatgtttacttcaaaaagacaaaacaaaaaaaaaattatttttccagtctaccgtggtccaggttatcagctctttaagagctctattaattgccatgtttacaaacaaacacaaagagagaagttagacaggtagatctttagcagtcttttctagtttccctggatttcactgatttattttttagggaaaatgaaaagaggaccttgctgtccgcctgcactgcttcctggtaaactataacaaacttatgctgccaaaaaaaaaaaaaaaa

SEQ ID NO: 136371 - DNA, 576 bp, Homo sapiens
  Payload ID: 6688
  Gene Symbol: GABRB1
  Gene Name: gamma-aminobutyric acid (GABA) A receptor, beta 1
  ENST ID: ENST00000513567
  CDS Start-End: 224-576
gcgcgcttgcgctgcaagactcggcaagtttgttccgactgtaactccggggatgaggaacggggtctctcgcccctcctccggcttcgcagcccccgaccccaagtgggctccccgcccacagcagtgttcgtcctcctacctcctggccccctcccttccgctgggatttggatctaaccaatgaagctcctctgtcatcagcaccaatgaacccagcaacatgtcatacgtgaaagagacagtggacagattgctcaaaggatatgacattcgcttgcggccggacttcggagggccccccgtcgacgttgggatgcggatcgatgtcgccagcatagacatggtctccgaagtgaatatggattatacactcaccatgtatttccagcagtcttggaaagacaaaaggctttcttattctggaatcccactgaacctcaccctagacaatagggtagctgaccaactctgggtaccagacacctactttctgaatgacaagaaatcatttgtgcatggggtcacagtgaaaaatcgaatgattcgactgcatcctgatggaacagttctcta

SEQ ID NO: 136372 - DNA, 563 bp, Homo sapiens
  Payload ID: 6688
  Gene Symbol: GABRB1
  Gene Name: gamma-aminobutyric acid (GABA) A receptor, beta 1
  Uniprot ID: P18505
  ENST ID: ENST00000510909
  CDS Start-End: 20-283
cttttaatcagagttagtaatgtggacagtacaaaatcgagagagtctggggcttctctctttccctgtgatgattaccatggtctgttgtgcacacagcaccaatgaacccagcaacatgtcatacgtgaaagagacagtggacagattgctcaaaggatatgacattcgcttgcggccggacttcggaggattatacactcaccatgtatttccagcagtcttggaaagacaaaaggctttcttattctggaatcccactgaacctcaccctagacaatagggtagctgaccaactctgggtaccagacacctactttctgaatgacaagaaatcatttgtgcatggggtcacagtgaaaaatcgaatgattcgactgcatcctgatggaacagttctctatggactccgaatcacaaccacagctgcatgtatgatggatcttcgaagatatccattggatgagcagaactgcaccctggagatcgaaagttatggctataccactgatgacattgaattttactggaatggaggagaaggggcagtcactggtgttaat

SEQ ID NO: 136373 - DNA, 1963 bp, Homo sapiens
  Payload ID: 6689
  Gene Symbol: GABRB2
  Gene Name: gamma-aminobutyric acid (GABA) A receptor, beta 2
  Uniprot ID: P47870
  ENST ID: ENST00000353437
  CDS Start-End: 322-1746
accccaagcttgctgcctcctccgggtcccggcggccacggcgaggcggcctgagcttcaggaggaagggaagaggcagcctctgggtgtgcgagtcccctgggcgcggggaagggaagaagaggacgaggtggcgcggagaccgcgggagaacacagtgcctccggaggaaatctgctcggtccccggcagccgccgcttcccctttgatgttttggtacgccgtgcgcatgcgcctcacattagaattactgcactgggcagactaagttggatctcctctcttcagtgaaaccctcaattccatcaaaaactaaagggatgtggagagtgcggaaaaggggctactttgggatttggtccttccccttaataatcgccgctgtctgtgcgcagagtgtcaatgaccctagtaatatgtcgctggttaaagagacggtggatagactcctgaaaggctatgacattcgtctgagaccagattttggaggtccccccgtggctgtggggatgaacattgacattgccagcatcgatatggtttctgaagtcaatatggattataccttgacaatgtactttcaacaagcctggagagataagaggctgtcctataatgtaatacctttaaacttgactctggacaacagagtggcagaccagctctgggtgcctgatacctatttcctgaacgataagaagtcatttgtgcacggagtgactgttaagaaccgcatgattcgcctgcatcctgatggcaccgtcctttatggactcagaatcacaaccacagctgcctgcatgatggacctaaggaggtacccactggatgaacaaaactgcaccttggaaattgagagctatggatacacaactgatgacattgagttttactggcgtggcgatgataatgcagtaacaggagtaacgaaaattgaacttccacagttctctattgtagattacaaacttatcaccaagaaggttgttttttccacaggttcctatcccaggttatccctcagctttaagcttaagagaaacattggctactttatcctgcaaacatacatgccttccatcctgattaccatcctctcctgggtctccttctggattaattacgatgcttcagctgcaagggtggcattaggaatcacaactgtcctcacaatgaccacaatcaacacccacctccgggaaactctccctaaaatcccctatgtgaaggccattgacatgtacctgatggggtgctttgtcttcgttttcatggcccttctggaatatgccctagtcaactacatcttctttgggagggggccccaacgccaaaagaaagcagctgagaaggctgccagtgccaacaatgagaagatgcgcctggatgtcaacaagatggacccccatgagaacatcttactgagcactctcgagataaaaaatgaaatggccacatctgaggctgtgatgggacttggagaccccagaagcacaatgctagcctatgatgcctccagcatccagtatcggaaagctgggttgcccaggcatagttttggccgaaatgctctggaacgacatgtggcgcaaaagaaaagtcgcctgaggagacgcgcctcccaactgaaaatcaccatccctgacttgactgatgtgaatgccatagatcggtggtcccgcatattcttcccagtggttttttccttcttcaacatcgtctattggctttattatgtgaactaaaacatggcctcccactggaagcaaggactagattcctcctcaaaccagttgtacagcctgatgtaggacttggaaaacacatcaatccaggacaaaagtgacgctaaaataccttagttgctggcctatcctgtggtccatttcataccatttgggttgcttctgctaagtaatgaatacactaaggtccttgtggttttccagttaaaacgcaagt

SEQ ID NO: 136374 - DNA, 7409 bp, Homo sapiens
  Payload ID: 6689
  Gene Symbol: GABRB2
  Gene Name: gamma-aminobutyric acid (GABA) A receptor, beta 2
  Uniprot ID: P47870
  ENST ID: ENST00000274547
  CDS Start-End: 219-1757
gcgcggggaagggaagaagaggacgaggtggcgcggagaccgcgggagaacacagtgcctccggaggaaatctgctcggtccccggcagccgccgcttcccctttgatgttttggtacgccgtgcgcatgcgcctcacattagaattactgcactgggcagactaagttggatctcctctcttcagtgaaaccctcaattccatcaaaaactaaagggatgtggagagtgcggaaaaggggctactttgggatttggtccttccccttaataatcgccgctgtctgtgcgcagagtgtcaatgaccctagtaatatgtcgctggttaaagagacggtggatagactcctgaaaggctatgacattcgtctgagaccagattttggaggtccccccgtggctgtggggatgaacattgacattgccagcatcgatatggtttctgaagtcaatatggattataccttgacaatgtactttcaacaagcctggagagataagaggctgtcctataatgtaatacctttaaacttgactctggacaacagagtggcagaccagctctgggtgcctgatacctatttcctgaacgataagaagtcatttgtgcacggagtgactgttaagaaccgcatgattcgcctgcatcctgatggcaccgtcctttatggactcagaatcacaaccacagctgcctgcatgatggacctaaggaggtacccactggatgaacaaaactgcaccttggaaattgagagctatggatacacaactgatgacattgagttttactggcgtggcgatgataatgcagtaacaggagtaacgaaaattgaacttccacagttctctattgtagattacaaacttatcaccaagaaggttgttttttccacaggttcctatcccaggttatccctcagctttaagcttaagagaaacattggctactttatcctgcaaacatacatgccttccatcctgattaccatcctctcctgggtctccttctggattaattacgatgcttcagctgcaagggtggcattaggaatcacaactgtcctcacaatgaccacaatcaacacccacctccgggaaactctccctaaaatcccctatgtgaaggccattgacatgtacctgatggggtgctttgtcttcgttttcatggcccttctggaatatgccctagtcaactacatcttctttgggagggggccccaacgccaaaagaaagcagctgagaaggctgccagtgccaacaatgagaagatgcgcctggatgtcaacaagattttttataaagatattaaacaaaatgggacccaatatcgatccttgtgggaccctactggaaacctctccccaactagacggactaccaattacgatttctctctgtatacgatggacccccatgagaacatcttactgagcactctcgagataaaaaatgaaatggccacatctgaggctgtgatgggacttggagaccccagaagcacaatgctagcctatgatgcctccagcatccagtatcggaaagctgggttgcccaggcatagttttggccgaaatgctctggaacgacatgtggcgcaaaagaaaagtcgcctgaggagacgcgcctcccaactgaaaatcaccatccctgacttgactgatgtgaatgccatagatcggtggtcccgcatattcttcccagtggttttttccttcttcaacatcgtctattggctttattatgtgaactaaaacatggcctcccactggaagcaaggactagattcctcctcaaaccagttgtacagcctgatgtaggacttggaaaacacatcaatccaggacaaaagtgacgctaaaataccttagttgctggcctatcctgtggtccatttcataccatttgggttgcttctgctaagtaatgaatacactaaggtccttgtggttttccagttaaaacgcaagtgatttttacacatggtggctagacagcctgagtgctccatgttgtctgtttagtatgcagcctactcagaggggaataatttggaagatattcttagaaggctcaacagcattgtcagtcatttggtcataaccagatactcctcatcttcctttttaaggtcggcatgctgttgagatggcattgtccttatgaaacattatctgtaatgccatgcaaacacattacttgaagatgatctatgattttcttactgagatgataatggtgtcatgggaagattattcccactggtttctaaaagattctcttgtgatttgagcaggctaggggaatcaagacagagactcaggaaaccgatttggccagtccctttgcttgagcacggagaatcaactatgatgtctttcattttggcatttagagatgaggagacttctggacaatatcatgcatggtggccaagaaaatttttgctaaacggctatttcctaggtggttaaagtaagagttaacaacacagagcagagtagaaaatcagaaacgacggttgtaacaaaaagcaagcaagcaagaaagcatgacccttatcagctccacacagcatctggtctatacatactgtgtctagtggcagagggtgagtaagagagattgtttttccaacatcactagcttttgacagcatacctaaagaggtttttatagtttaatcgaagataaccatgaaatacaaaaattagagaaatgagaattgtcttagatattcaggttagattcagagtcattcaaatatacaaatacagagcacaaactagcaaacagattgtttttctcagacgaagtcagctgtccctgcaatttttgtccctataattttatttcttaatttaatagagtatttcaagagaaggatttgttcatcactttaaaggattcatggtcctctccagctttttttttgcttccaaaattctgattatattcttaggagactggcaaagtaaggctttggagagattgagtgaactatattttcttatatgcaatgaaattcaccattgtatttttcaaagcaaataatacttcaaggagtatgaacacacagagagttaatttgtgcattcattggtttggggcttgattttcttaagagtgctttcattgtatatgttgcaatctgcctaatcaaggaaaatatgaaaactagtggaaaataataacaaagccacattaacatgataaatgttatgagcctcagttgatattgcagaaaaatatataactgttaatcaggcaggcatgatgtattttttttctatttttaagttatgccattgtgcttctttctacactaattggacataagcattcatatgttggacaagaggagaataagctaatatgtcttccttctatcaatataaggctcatattttgcttttcttatagaaaatagtgaattgctaaattttccttaaagttgaatttgattgaactttttcttggaggatgactttgctatttctattttgaaaacaaagaaagctcttctttttagagtaatatccctaattgtgcatagcagccagtatccacctgtgaataatgtatgttttcttgattccttgtttccttcatgatttagcagcttggaatatgatggagtactattgcccttgcattccagctgtccaagaacaacaacaaacctttatccttcagctttctgaatttgccccaaaatggaatggtattttgtttttcaccagtgtaggaaaccttggccattatattttgattacataatcttgagcacctctgagtatcatctttgggcagaatctgaccaagattcttctcacaggctcagagtagagattcctcatgtttctccaggacacactttctcctaggcaatcattttggggcatcacactaagtaaagtgcctgccccttgtcaacagggggtaaagtttgactaaaaaacatcaggaaggaacatattgataactcaggggcacaactccaaaatgccattctgaaaaggctcttctagagtcaactcagagcccaagtgtagaagtgggctcttatgtgcaatcactgtacaagccataaaaatctttgatattgccatttatgattacaacaaaattttagatgtccaagaaagtcaacagaacaatccagatcaaagtgtagagaagcatctttgcagcttgagcctcaaaagcataaaaccaggaattcatttctgctctcagtgatacaagaaacaaggcaaaggaaaaaagatgggaccttagaagcaatgccctagagtaaaaagcatacattggcactcagtaaccacagagatagaaacaactgactcagcctctccagaaataacagtagatgtagaatttgttcttaaatatatgtttcgttgaaatgaaatgcagtcatcaaatgcgaggaggggtgctagacctgataagtctaggaagaccagtcagcttgatagccagttgttaaactaaaggaccacaaaggtgtgtttagtagttctgatatgggattactatcagtttatacatatgtatagattttcttttaattataaacagccagatagccagcaattaaggtgttttttcatctttgtgaaattcatggacaaattctgactctaaaatgcacagtctacatgaaatctttgatctcaatctgtatatatatatattgtacatgaccgctagtaggtatgaaatgcatttcagagttgaaaactcatgcaacataatcatgtgtttgcataaggaatgttaaaattctttctactacaatttattaacaggggaaaagattcaagcagtgccatctagaccttttctcttctcatttcttcaaaagcagtgctaagtaaaataataataataaaaatggtttatgaaccaaaagactttacattctagcattaggaacacacacaaaaaaatctgtcagcttacaaaagcacaacacataaagaaagagcagtggaatgcgtaatggggaaatgaatcatgtttaaagcaagacttgcattaaattggcaactaagataatttccattttctataggtaaccgtgttccagtttaatgattaccttcatactcaacaagaaaaatggcaaagcaacatcatcaaaataggtcttacaacatatctacatgtatatatgtgtatatatagattcatataaacatacatacatatatatgcattcatatgttggaaaacaaaaggaataagctaatatgttttatttccttcattaaaccagtatatgagtatttttaatttggcaaacaaaaatcaacatactgaaataagtaatacagggtactgagcatttctctatcagcaaatcaatgcctacagtttttatgaaccattgcacagttcaactcgacaatagtactgtaccccagaacatcagaagttaagtagttgtcacattgcttgtctaattgctctctttttcaaggaaacaaataacattgtccattggtgagtcaaaaacaaacatgtcttaagaaaatgaaaaatgataaaaattcctccaaagaggaagaaaaaaaaaaaactaaaccccaccatgttggttagggcaaaatactaagtattcacaactgtagcaatcatgccatttggctaaatgtacagagtacatgtaatgtgagcaaccataactttcactgaacgtgtgtaaatattaaaacagatttcttaaatatttttaacttctaatttgtattttatggtaaggcaatgtgctaattccgtttatggcttaagttgatgtgttataatatgtaaataattaaacatgctgtaaatgaatagtcaatagatacaaataattgtttagtttttttcttaatttttatttattttttactaagtactattactgcagtgcccccagcagagtaatttaaacacccttttgcataaatggtttgggaatcccagacagaagggtttcaatttgctatcacacacacagtcacacacagtcacacacacacacacacacacactcaaacacacataatcttttgctcacccactctgtctctctgcccgtctatgggaaacactctactatttatgtagtcaatataacaaacaagagatagcctttgaaatggcaattgggaaaagcaaaaatgatcattgataacttaatagacttttttatatgtcagagttcaagaaaccaaagtttgcaacttaaatctcagttttcaaacagtaaaagtttgtatagatggcactacagaaaaataaaaatggttattcctaccagctccagaaatgtgttacacaatatacactagaagactttttttttaataatagtattttgtccttaggtagtattgttcctttcaaccaaagactccagaattattgaaaaacaaaaaaggaaaaaaaaaatgagataatgggggaaaaaaaggacgctgcttcacaccaaaggtttaaaaaaatattttccaaatgcactaggaacattgtaaaaaccagaaaggagtgaacagaatgctaatgaagatactgccctaaagaaatctgtacaaaaaaaaaaaaaaaaagcagcactcttaaaaagctactaggtttttggaaattgaagtaaaatatttctgtagatatattcaaaattctgacatcaaattttaatttgcttaaagaagttttatttgtgatgaagatcaatatgattcaaatgatgaaaaacaaaactgtatgtcctttgagttcccaaaccaaatgtcactgccgtgtcacatcctctaatctgatgcccatgtgtgtgtccttgcgccatttgaagcaagttgacagttccatcagtttgtttttgtttttgtttttggttcaataatttgagttcaaccatcgtcattttaaacataattaatcccaacaaagttgcctatagtttaatttaaacctcacagcatttttaatttattttgcatgggtgtttaaatagttctgttacgaatattgtccctgcacagttctaaattgtccttttataaaaaaaaaaagtgatattctagtttcttcacaatgtagtgattatcagccttactaattaccttgtagcctttcttaatatgcacataatgcacattttccgatggctagaaaaatgcaaaacacagtggatatcattgcatctattttcatgtctttctaaaaacaggactattaaaatctctgggatacatgagatagtaaaaaatgaggattataaatgaatagcacataagaattattttcttgaatttaaacttattgcagccagtttcagcatgtaaatatataataatgttggctagtgtgtaattcttgaactaagaaatataaataaaaataaaaagattgtg

SEQ ID NO: 136375 - DNA, 7191 bp, Homo sapiens
  Payload ID: 6689
  Gene Symbol: GABRB2
  Gene Name: gamma-aminobutyric acid (GABA) A receptor, beta 2
  Uniprot ID: P47870
  ENST ID: ENST00000393959
  CDS Start-End: 1-1539
atgtggagagtgcggaaaaggggctactttgggatttggtccttccccttaataatcgccgctgtctgtgcgcagagtgtcaatgaccctagtaatatgtcgctggttaaagagacggtggatagactcctgaaaggctatgacattcgtctgagaccagattttggaggtccccccgtggctgtggggatgaacattgacattgccagcatcgatatggtttctgaagtcaatatggattataccttgacaatgtactttcaacaagcctggagagataagaggctgtcctataatgtaatacctttaaacttgactctggacaacagagtggcagaccagctctgggtgcctgatacctatttcctgaacgataagaagtcatttgtgcacggagtgactgttaagaaccgcatgattcgcctgcatcctgatggcaccgtcctttatggactcagaatcacaaccacagctgcctgcatgatggacctaaggaggtacccactggatgaacaaaactgcaccttggaaattgagagctatggatacacaactgatgacattgagttttactggcgtggcgatgataatgcagtaacaggagtaacgaaaattgaacttccacagttctctattgtagattacaaacttatcaccaagaaggttgttttttccacaggttcctatcccaggttatccctcagctttaagcttaagagaaacattggctactttatcctgcaaacatacatgccttccatcctgattaccatcctctcctgggtctccttctggattaattacgatgcttcagctgcaagggtggcattaggaatcacaactgtcctcacaatgaccacaatcaacacccacctccgggaaactctccctaaaatcccctatgtgaaggccattgacatgtacctgatggggtgctttgtcttcgttttcatggcccttctggaatatgccctagtcaactacatcttctttgggagggggccccaacgccaaaagaaagcagctgagaaggctgccagtgccaacaatgagaagatgcgcctggatgtcaacaagattttttataaagatattaaacaaaatgggacccaatatcgatccttgtgggaccctactggaaacctctccccaactagacggactaccaattacgatttctctctgtatacgatggacccccatgagaacatcttactgagcactctcgagataaaaaatgaaatggccacatctgaggctgtgatgggacttggagaccccagaagcacaatgctagcctatgatgcctccagcatccagtatcggaaagctgggttgcccaggcatagttttggccgaaatgctctggaacgacatgtggcgcaaaagaaaagtcgcctgaggagacgcgcctcccaactgaaaatcaccatccctgacttgactgatgtgaatgccatagatcggtggtcccgcatattcttcccagtggttttttccttcttcaacatcgtctattggctttattatgtgaactaaaacatggcctcccactggaagcaaggactagattcctcctcaaaccagttgtacagcctgatgtaggacttggaaaacacatcaatccaggacaaaagtgacgctaaaataccttagttgctggcctatcctgtggtccatttcataccatttgggttgcttctgctaagtaatgaatacactaaggtccttgtggttttccagttaaaacgcaagtgatttttacacatggtggctagacagcctgagtgctccatgttgtctgtttagtatgcagcctactcagaggggaataatttggaagatattcttagaaggctcaacagcattgtcagtcatttggtcataaccagatactcctcatcttcctttttaaggtcggcatgctgttgagatggcattgtccttatgaaacattatctgtaatgccatgcaaacacattacttgaagatgatctatgattttcttactgagatgataatggtgtcatgggaagattattcccactggtttctaaaagattctcttgtgatttgagcaggctaggggaatcaagacagagactcaggaaaccgatttggccagtccctttgcttgagcacggagaatcaactatgatgtctttcattttggcatttagagatgaggagacttctggacaatatcatgcatggtggccaagaaaatttttgctaaacggctatttcctaggtggttaaagtaagagttaacaacacagagcagagtagaaaatcagaaacgacggttgtaacaaaaagcaagcaagcaagaaagcatgacccttatcagctccacacagcatctggtctatacatactgtgtctagtggcagagggtgagtaagagagattgtttttccaacatcactagcttttgacagcatacctaaagaggtttttatagtttaatcgaagataaccatgaaatacaaaaattagagaaatgagaattgtcttagatattcaggttagattcagagtcattcaaatatacaaatacagagcacaaactagcaaacagattgtttttctcagacgaagtcagctgtccctgcaatttttgtccctataattttatttcttaatttaatagagtatttcaagagaaggatttgttcatcactttaaaggattcatggtcctctccagctttttttttgcttccaaaattctgattatattcttaggagactggcaaagtaaggctttggagagattgagtgaactatattttcttatatgcaatgaaattcaccattgtatttttcaaagcaaataatacttcaaggagtatgaacacacagagagttaatttgtgcattcattggtttggggcttgattttcttaagagtgctttcattgtatatgttgcaatctgcctaatcaaggaaaatatgaaaactagtggaaaataataacaaagccacattaacatgataaatgttatgagcctcagttgatattgcagaaaaatatataactgttaatcaggcaggcatgatgtattttttttctatttttaagttatgccattgtgcttctttctacactaattggacataagcattcatatgttggacaagaggagaataagctaatatgtcttccttctatcaatataaggctcatattttgcttttcttatagaaaatagtgaattgctaaattttccttaaagttgaatttgattgaactttttcttggaggatgactttgctatttctattttgaaaacaaagaaagctcttctttttagagtaatatccctaattgtgcatagcagccagtatccacctgtgaataatgtatgttttcttgattccttgtttccttcatgatttagcagcttggaatatgatggagtactattgcccttgcattccagctgtccaagaacaacaacaaacctttatccttcagctttctgaatttgccccaaaatggaatggtattttgtttttcaccagtgtaggaaaccttggccattatattttgattacataatcttgagcacctctgagtatcatctttgggcagaatctgaccaagattcttctcacaggctcagagtagagattcctcatgtttctccaggacacactttctcctaggcaatcattttggggcatcacactaagtaaagtgcctgccccttgtcaacagggggtaaagtttgactaaaaaacatcaggaaggaacatattgataactcaggggcacaactccaaaatgccattctgaaaaggctcttctagagtcaactcagagcccaagtgtagaagtgggctcttatgtgcaatcactgtacaagccataaaaatctttgatattgccatttatgattacaacaaaattttagatgtccaagaaagtcaacagaacaatccagatcaaagtgtagagaagcatctttgcagcttgagcctcaaaagcataaaaccaggaattcatttctgctctcagtgatacaagaaacaaggcaaaggaaaaaagatgggaccttagaagcaatgccctagagtaaaaagcatacattggcactcagtaaccacagagatagaaacaactgactcagcctctccagaaataacagtagatgtagaatttgttcttaaatatatgtttcgttgaaatgaaatgcagtcatcaaatgcgaggaggggtgctagacctgataagtctaggaagaccagtcagcttgatagccagttgttaaactaaaggaccacaaaggtgtgtttagtagttctgatatgggattactatcagtttatacatatgtatagattttcttttaattataaacagccagatagccagcaattaaggtgttttttcatctttgtgaaattcatggacaaattctgactctaaaatgcacagtctacatgaaatctttgatctcaatctgtatatatatatattgtacatgaccgctagtaggtatgaaatgcatttcagagttgaaaactcatgcaacataatcatgtgtttgcataaggaatgttaaaattctttctactacaatttattaacaggggaaaagattcaagcagtgccatctagaccttttctcttctcatttcttcaaaagcagtgctaagtaaaataataataataaaaatggtttatgaaccaaaagactttacattctagcattaggaacacacacaaaaaaatctgtcagcttacaaaagcacaacacataaagaaagagcagtggaatgcgtaatggggaaatgaatcatgtttaaagcaagacttgcattaaattggcaactaagataatttccattttctataggtaaccgtgttccagtttaatgattaccttcatactcaacaagaaaaatggcaaagcaacatcatcaaaataggtcttacaacatatctacatgtatatatgtgtatatatagattcatataaacatacatacatatatatgcattcatatgttggaaaacaaaaggaataagctaatatgttttatttccttcattaaaccagtatatgagtatttttaatttggcaaacaaaaatcaacatactgaaataagtaatacagggtactgagcatttctctatcagcaaatcaatgcctacagtttttatgaaccattgcacagttcaactcgacaatagtactgtaccccagaacatcagaagttaagtagttgtcacattgcttgtctaattgctctctttttcaaggaaacaaataacattgtccattggtgagtcaaaaacaaacatgtcttaagaaaatgaaaaatgataaaaattcctccaaagaggaagaaaaaaaaaaaactaaaccccaccatgttggttagggcaaaatactaagtattcacaactgtagcaatcatgccatttggctaaatgtacagagtacatgtaatgtgagcaaccataactttcactgaacgtgtgtaaatattaaaacagatttcttaaatatttttaacttctaatttgtattttatggtaaggcaatgtgctaattccgtttatggcttaagttgatgtgttataatatgtaaataattaaacatgctgtaaatgaatagtcaatagatacaaataattgtttagtttttttcttaatttttatttattttttactaagtactattactgcagtgcccccagcagagtaatttaaacacccttttgcataaatggtttgggaatcccagacagaagggtttcaatttgctatcacacacacagtcacacacagtcacacacacacacacacacacactcaaacacacataatcttttgctcacccactctgtctctctgcccgtctatgggaaacactctactatttatgtagtcaatataacaaacaagagatagcctttgaaatggcaattgggaaaagcaaaaatgatcattgataacttaatagacttttttatatgtcagagttcaagaaaccaaagtttgcaacttaaatctcagttttcaaacagtaaaagtttgtatagatggcactacagaaaaataaaaatggttattcctaccagctccagaaatgtgttacacaatatacactagaagactttttttttaataatagtattttgtccttaggtagtattgttcctttcaaccaaagactccagaattattgaaaaacaaaaaaggaaaaaaaaaatgagataatgggggaaaaaaaggacgctgcttcacaccaaaggtttaaaaaaatattttccaaatgcactaggaacattgtaaaaaccagaaaggagtgaacagaatgctaatgaagatactgccctaaagaaatctgtacaaaaaaaaaaaaaaaaagcagcactcttaaaaagctactaggtttttggaaattgaagtaaaatatttctgtagatatattcaaaattctgacatcaaattttaatttgcttaaagaagttttatttgtgatgaagatcaatatgattcaaatgatgaaaaacaaaactgtatgtcctttgagttcccaaaccaaatgtcactgccgtgtcacatcctctaatctgatgcccatgtgtgtgtccttgcgccatttgaagcaagttgacagttccatcagtttgtttttgtttttgtttttggttcaataatttgagttcaaccatcgtcattttaaacataattaatcccaacaaagttgcctatagtttaatttaaacctcacagcatttttaatttattttgcatgggtgtttaaatagttctgttacgaatattgtccctgcacagttctaaattgtccttttataaaaaaaaaaagtgatattctagtttcttcacaatgtagtgattatcagccttactaattaccttgtagcctttcttaatatgcacataatgcacattttccgatggctagaaaaatgcaaaacacagtggatatcattgcatctattttcatgtctttctaaaaacaggactattaaaatctctgggatacatgagatagtaaaaaatgaggattataaatgaatagcacataagaattattttcttgaatttaaacttattgcagccagtttcagcatgtaaatatataataatgttggctagtgtgtaattcttgaactaagaaatataaataaaaataaaaagattgtg

SEQ ID NO: 136376 - DNA, 2030 bp, Homo sapiens
  Payload ID: 6689
  Gene Symbol: GABRB2
  Gene Name: gamma-aminobutyric acid (GABA) A receptor, beta 2
  Uniprot ID: P47870
  ENST ID: ENST00000520240
  CDS Start-End: 389-1813
gcgcggggaagggaagaagaggacgaggtggcgcggagaccgcgggagaacacagtgcctccggaggtgaggggctcttcctcattttgcctgccttctagggaccgctccggcttcttgtatccagaggtacagcccctgaacagccgggagtccccgtcccctgtcccggacgaggggccgggggcgccagctccgcacgccgcgggagtgggcggcgagcgcgggcctgcgaggaaatctgctcggtccccggcagccgccgcttcccctttgatgttttggtacgccgtgcgcatgcgcctcacattagaattactgcactgggcagactaagttggatctcctctcttcagtgaaaccctcaattccatcaaaaactaaagggatgtggagagtgcggaaaaggggctactttgggatttggtccttccccttaataatcgccgctgtctgtgcgcagagtgtcaatgaccctagtaatatgtcgctggttaaagagacggtggatagactcctgaaaggctatgacattcgtctgagaccagattttggaggtccccccgtggctgtggggatgaacattgacattgccagcatcgatatggtttctgaagtcaatatggattataccttgacaatgtactttcaacaagcctggagagataagaggctgtcctataatgtaatacctttaaacttgactctggacaacagagtggcagaccagctctgggtgcctgatacctatttcctgaacgataagaagtcatttgtgcacggagtgactgttaagaaccgcatgattcgcctgcatcctgatggcaccgtcctttatggactcagaatcacaaccacagctgcctgcatgatggacctaaggaggtacccactggatgaacaaaactgcaccttggaaattgagagctatggatacacaactgatgacattgagttttactggcgtggcgatgataatgcagtaacaggagtaacgaaaattgaacttccacagttctctattgtagattacaaacttatcaccaagaaggttgttttttccacaggttcctatcccaggttatccctcagctttaagcttaagagaaacattggctactttatcctgcaaacatacatgccttccatcctgattaccatcctctcctgggtctccttctggattaattacgatgcttcagctgcaagggtggcattaggaatcacaactgtcctcacaatgaccacaatcaacacccacctccgggaaactctccctaaaatcccctatgtgaaggccattgacatgtacctgatggggtgctttgtcttcgttttcatggcccttctggaatatgccctagtcaactacatcttctttgggagggggccccaacgccaaaagaaagcagctgagaaggctgccagtgccaacaatgagaagatgcgcctggatgtcaacaagatggacccccatgagaacatcttactgagcactctcgagataaaaaatgaaatggccacatctgaggctgtgatgggacttggagaccccagaagcacaatgctagcctatgatgcctccagcatccagtatcggaaagctgggttgcccaggcatagttttggccgaaatgctctggaacgacatgtggcgcaaaagaaaagtcgcctgaggagacgcgcctcccaactgaaaatcaccatccctgacttgactgatgtgaatgccatagatcggtggtcccgcatattcttcccagtggttttttccttcttcaacatcgtctattggctttattatgtgaactaaaacatggcctcccactggaagcaaggactagattcctcctcaaaccagttgtacagcctgatgtaggacttggaaaacacatcaatccaggacaaaagtgacgctaaaataccttagttgctggcctatcctgtggtccatttcataccatttgggttgcttctgctaagtaatgaatacactaaggtccttgtggttttccagttaaaacgcaagt

SEQ ID NO: 136377 - DNA, 1349 bp, Homo sapiens
  Payload ID: 6689
  Gene Symbol: GABRB2
  Gene Name: gamma-aminobutyric acid (GABA) A receptor, beta 2
  ENST ID: ENST00000517547
  CDS Start-End: 222-1166
aagttggatctcctctcttcagtgaaaccctcaattccatcaaaaactaaagggatgtggagagtgcggaaaaggggctactttgggatttggtccttccccttaataatcgccgctgtctgtgcgcagaggtccccccgtggctgtggggatgaacattgacattgccagcatcgatatggtttctgaagtcaatatgaatcacaaccacagctgcctgcatgatggacctaaggaggtacccactggatgaacaaaactgcaccttggaaattgagagctatggatacacaactgatgacattgagttttactggcgtggcgatgataatgcagtaacaggagtaacgaaaattgaacttccacagttctctattgtagattacaaacttatcaccaagaaggttgttttttccacaggttcctatcccaggttatccctcagctttaagcttaagagaaacattggctactttatcctgcaaacatacatgccttccatcctgattaccatcctctcctgggtctccttctggattaattacgatgcttcagctgcaagggtggcattaggaatcacaactgtcctcacaatgaccacaatcaacacccacctccgggaaactctccctaaaatcccctatgtgaaggccattgacatgtacctgatggggtgctttgtcttcgttttcatggcccttctggaatatgccctagtcaactacatcttctttgggagggggccccaacgccaaaagaaagcagctgagaaggctgccagtgccaacaatgagaagatgcgcctggatgtcaacaagatggacccccatgagaacatcttactgagcactctcgagataaaaaatgaaatggccacatctgaggctgtgatgggacttggagaccccagaagcacaatgctagcctatgatgcctccagcatccagtatcggaaagctgggttgcccaggcatagttttggccgaaatgctctggaacgacatgtggcgcaaaagaaaagtcgcctgaggagacgcgcctcccaactgaaaatcaccatccctgacttgactgatgtgaatgccatagatcggtggtcccgcatattcttcccagtggttttttccttcttcaacatcgtctattggctttattatgtgaactaaaacatggcctcccactggaagcaaggactagattcctcctcaaaccagttgtacagcctgatgtaggacttggaaaacacatcaatccaggacaaaagtgacgctaaaataccttagttgctggcctatcctgtggtccatttcataccatttgggttgcttctgctaagtaatgaatacact

SEQ ID NO: 136378 - DNA, 1779 bp, Homo sapiens
  Payload ID: 6689
  Gene Symbol: GABRB2
  Gene Name: gamma-aminobutyric acid (GABA) A receptor, beta 2
  ENST ID: ENST00000517901
  CDS Start-End: 327-1562
gagtcccctgggcgcggggaagggaagaagaggacgaggtggcgcggagaccgcgggagaacacagtgcctccggaggaaatctgctcggtccccggcagccgccgcttcccctttgatgttttggtacgccgtgcgcatgcgcctcacattagaattactgcactgggcagactaagttggatctcctctcttcagtgaaaccctcaattccatcaaaaactaaagggatgtggagagtgcggaaaaggggctactttgggatttggtccttccccttaataatcgccgctgtctgtgcgcagaggtccccccgtggctgtggggatgaacattgacattgccagcatcgatatggtttctgaagtcaatatggattataccttgacaatgtactttcaacaagcctggagagataagaggctgtcctataatgtaatacctttaaacttgactctggacaacagagtggcagaccagctctgggtgcctgatacctatttcctgaacgataagaagtcatttgtgcacggagtgactgttaagaaccgcatgattcgcctgcatcctgatggcaccgtcctttatggactcagaatcacaaccacagctgcctgcatgatggacctaaggaggtacccactggatgaacaaaactgcaccttggaaattgagagctatggatacacaactgatgacattgagttttactggcgtggcgatgataatgcagtaacaggagtaacgaaaattgaacttccacagttctctattgtagattacaaacttatcaccaagaaggttgttttttccacaggttcctatcccaggttatccctcagctttaagcttaagagaaacattggctactttatcctgcaaacatacatgccttccatcctgattaccatcctctcctgggtctccttctggattaattacgatgcttcagctgcaagggtggcattaggaatcacaactgtcctcacaatgaccacaatcaacacccacctccgggaaactctccctaaaatcccctatgtgaaggccattgacatgtacctgatggggtgctttgtcttcgttttcatggcccttctggaatatgccctagtcaactacatcttctttgggagggggccccaacgccaaaagaaagcagctgagaaggctgccagtgccaacaatgagaagatgcgcctggatgtcaacaagatggacccccatgagaacatcttactgagcactctcgagataaaaaatgaaatggccacatctgaggctgtgatgggacttggagaccccagaagcacaatgctagcctatgatgcctccagcatccagtatcggaaagctgggttgcccaggcatagttttggccgaaatgctctggaacgacatgtggcgcaaaagaaaagtcgcctgaggagacgcgcctcccaactgaaaatcaccatccctgacttgactgatgtgaatgccatagatcggtggtcccgcatattcttcccagtggttttttccttcttcaacatcgtctattggctttattatgtgaactaaaacatggcctcccactggaagcaaggactagattcctcctcaaaccagttgtacagcctgatgtaggacttggaaaacacatcaatccaggacaaaagtgacgctaaaataccttagttgctggcctatcctgtggtccatttcataccatttgggttgcttctgctaagtaatgaatacactaaggtccttgtggttttccagttaaaacgcaagt

SEQ ID NO: 136379 - DNA, 2470 bp, Homo sapiens
  Payload ID: 6689
  Gene Symbol: GABRB2
  Gene Name: gamma-aminobutyric acid (GABA) A receptor, beta 2
  Uniprot ID: P47870
  ENST ID: ENST00000612710
  CDS Start-End: 134-1075
tcagtgaaaccctcaattccatcaaaaactaaagggatgtggagagtgcggaaaaggggctactttgggatttggtccttccccttaataatcgccgctgtctgtgcgcagaggtccccccgtggctgtggggatgaacattgacattgccagcatcgatatggtttctgaagtcaatatggattataccttgacaatgtactttcaacaagcctggagagataagaggctgtcctataatgtaatacctttaaacttgactctggacaacagagtggcagaccagctctgggtgcctgatacctatttcctgaacgataagaagtcatttgtgcacggagtgactgttaagaaccgcatgattcgcctgcatcctgatggcaccgtcctttatggactcagaatcacaaccacagctgcctgcatgatggacctaaggaggtacccactggatgaacaaaactgcaccttggaaattgagagctatggatacacaactgatgacattgagttttactggcgtggcgatgataatgcagtaacaggagtaacgaaaattgaacttccacagttctctattgtagattacaaacttatcaccaagaaggttgttttttccacaggttcctatcccaggttatccctcagctttaagcttaagagaaacattggctactttatcctgcaaacatacatgccttccatcctgattaccatcctctcctgggtctccttctggattaattacgatgcttcagctgcaagggtggcattaggaatcacaactgtcctcacaatgaccacaatcaacacccacctccgggaaactctccctaaaatcccctatgtgaaggccattgacatgtacctgatggggtgctttgtcttcgttttcatggcccttctggaatatgccctagtcaactacatcttctttgggagggggccccaacgccaaaagaaagcagctgagaaggctgccagtgccaacaatgagaagatgcgcctggatgtcaacaaggtaaattcagagggcaagccctccttgcttcttaaactcatggaagaatgctagcaatacaggttgatgaccttgttgagcaaatgaggaaaccaagcccagggaagagaatgggtaattttccccaaagcacacaaacaattaatgatggaagcacaattagggaccaaactcatgacacaagatttggatgccctttccattaacaagaggagtgaccaaacatgagaagacctttatgatgctttctcacatattgagtatagtacctataattatttatgcattctttaaatttattcacctaatttatttaaaaaggaaatttaatgttgcttcagtcagtattacttgctggacaatagctttacaaatatataagtaacaaatttaaaaaactatatcattaagttctaatttatactagatgaagtctctggccctgaaatctgcattctctttgacttaaaggaaagataagcaagtatacagatgtgttacagacccaccaagcaacaaactgagactttttctttgaagcgatcagaagaacataagaagagtaagggggaaaagacaaataattttctcctttaaatgacaatgccttgcacatataccacttatcattgcagcatttgactatatgaggccaccatcttgcttaagtcagacatggtcaaagattcccacaaaactataaaccctgtttatttgttaagtcagtagttttcaatcatgggtgccaatggaatgacctgaacagattaaaaaaaaatactgaagccttggtcccctccccagaaaatctgatttgattttcttggagaaagcatgggcaacacaattttaaaaagttccccaagttattctaatctgcatccaaatttgagaatcaccactttaaggtttttgatggtagtcccagtagagccagctctctttactctcaatattaaacttcacctggcttcctgttatagcacttgctgcactaacagaatacttgtatatgtatcttcccagaggccacatttagacctttagcaatagccaaagaaaagtcttattttcatatctgccctaaatactgtttatgaagtagtgtctaatattggaccaataaatagttcatcatgatgggactaggaaaacattaatcaatcctcttaaaccatttggaattattaattataacaaaagctgattatttccttgatgttttgatatttctaacttcaaattaatttcaaggatagcaaagtataaataatctctgccattgagttgtatttggagcaaaccatatggaagcttctaactcagtaatgtttttcacatatccataggtctaatatttggttttagactcttctctaatccaaggcacttcttgcttagaagatgatatttgcaacaatgcaaattttaagtatggcccttggaaac

SEQ ID NO: 136380 - DNA, 4494 bp, Homo sapiens
  Payload ID: 6690
  Gene Symbol: GABRB3
  Gene Name: gamma-aminobutyric acid (GABA) A receptor, beta 3
  Uniprot ID: P28472
  ENST ID: ENST00000299267
  CDS Start-End: 65-1486
tttggctgctcggagagtaggggggagagcggatcccagcaggttaggccggaggaacagcgccatgtgctccgggctcctggagctcctgctgcccatctggctctcctggaccctggggacccgaggctctgagccccgcagtgtgaacgatcccgggaacatgtcctttgtgaaggagacggtggacaagctgttgaaaggctacgacattcgcctaagacccgacttcgggggtcccccggtctgcgtggggatgaacatcgacatcgccagcatcgacatggtttccgaagtcaacatggattataccttaaccatgtattttcaacaatattggagagataaaaggctcgcctattctgggatccctctcaacctcacgcttgacaatcgagtggctgaccagctatgggtgcccgacacatatttcttaaatgacaaaaagtcatttgtgcatggagtgacagtgaaaaaccgcatgatccgtcttcaccctgatgggacagtgctgtatgggctcagaatcaccacgacagcagcatgcatgatggacctcaggagataccccctggacgagcagaactgcactctggaaattgaaagctatggctacaccacggatgacattgagttttactggcgaggcggggacaaggctgttaccggagtggaaaggattgagctcccgcagttctccatcgtggagcaccgtctggtctcgaggaatgttgtcttcgccacaggtgcctatcctcgactgtcactgagctttcggttgaagaggaacattggatacttcattcttcagacttatatgccctctatactgataacgattctgtcgtgggtgtccttctggatcaattatgatgcatctgctgctagagttgccctcgggatcacaactgtgctgacaatgacaaccatcaacacccaccttcgggagaccttgcccaaaatcccctatgtcaaagccattgacatgtaccttatgggctgcttcgtctttgtgttcctggcccttctggagtatgcctttgtcaactacattttctttggaagaggccctcaaaggcagaagaagcttgcagaaaagacagccaaggcaaagaatgaccgttcaaagagcgaaagcaaccgggtggatgctcatggaaatattctgttgacatcgctggaagttcacaatgaaatgaatgaggtctcaggcggcattggcgataccaggaattcagcaatatcctttgacaactcaggaatccagtacaggaaacagagcatgcctcgagaagggcatgggcgattcctgggggacagaagcctcccgcacaagaagacccatctacggaggaggtcttcacagctcaaaattaaaatacctgatctaaccgatgtgaatgccatagacagatggtccaggatcgtgtttccattcactttttctcttttcaacttagtttactggctgtactatgttaactgagtgactgtacttgatttttcaaagacttcatttaacactgagtgaaatattactctgcctgtcaagtttttatacctgtacacacacagacacacaagcagacacacacatatatacatacgcaattgtatatatatgtgaactttctcagcatatatataaaatacacgtgtatatgaggatgtatgtgtatatgtttatacacacaggagtcagtgcccatgtgtatggaagacaaatacacatacatatatacattttgcagctatggacaatttaccacaggatgcatattaaagaaagtcatagtttttttcttttttaattgaaagggacaagtatcatctaaatattatgccttgagaatgagggcgtgaaacacaatatcatccccaaatgtgtcttgtattatcataagttagatgttttagtttaaaaatcagaaagacattcttagttaatctttgaaaactcatacagtggtattgctagtttaaaatgagtcacttacttcatatcctctcgttcagtttagtaagcaaaggcttcttggcttctctggtgatggggtttgttttcatcgggcatacgttttctgcaatggtttagtggctggggtgagccactggcagtgtgcttacctgttgtctgaaacatagatagatcccacgttgatgtctgaacgaccgtcttttgaaaactcatcgggagtgaatggcatctcgttgtaagtactctaatatacagtgtgtagtttgtttctgttgttcacttggagtggatccagcttcactgtcatgtgcgaacacagtgacacgtttggccagtgacatttcaatcactgaaaatgtgctctacatctcgtatggatttctaggcctgatatccaacagaaagcatagacgtctcaggttattcgttactctaaggtaaaaccatctaggatgattttcccccttgcagttatgttatcattcttataacattgtatgttaatagaaaatatatttgcataatatgcatatatatgtatatttaccaagattttgtttcttacgcttgctatcatggcagcatgcgatgtcatattttcctttatgtgatgtaactactttctgttatctagaaattaagattgaagctaaaacacttctactgttcaatttcagaaactaagaatcatcctcatgcctttatttctgtatctgacatatttcataagcacatccaactactcctagactgactaggattctgcaggaacatgacccgtacacaccacgcgtcacccaacgacccatgaccgttctctgaggcaaaggagggcaacctgacagcaaacacagtcactgttggttccttctgatccacagcctcatcagtatttggactttttaaagctcgtagaaacaagacaaggtgcaccggtttcatagacgcaaccttaacttactatttagatgagatctttctaaagaaaaaaaaaagagatgatatattttttgtaaacaatatttctatcacaggcatccataaactgaaatgactacagttgtgcaaacaggtgtcacagtgaagttgagcatttggagaaaaaaataaaaagcaaaatttgcaggaagaactgctaaattaatactttatcccaaaatgccacgtatgcctcaccctctctgttctatccaaaaccaaggaccagagtgctccaatggtaggccccagttgtctcgatgtaggtagaggcaccaccctccccgaggatgcgtgtggtgtggactatccccatgagctgaccactacttgatttttctttggtggccgtaacaacctttaatttgtgggcatctgcaacagttcaaaacccaccatcagataaaacataatccacaaaatctcacgctagaggcaattacctacttttagacccttttccctctttcattcctatctttttcctcctaatcgctgctctctggttttattttcatctggagactagccagggatttctttggctttggcttttctctgaccattttttccatgggtaacaatgggggatcctaaaagttaaacagattgggaaaaaccttgttaagtggccttatcattattatcatgttaaagaaaaaaaatacatttgcaaagaccttatccctttcaatacttcaggtatctttttctgtatccagtaattaaaggtgtgaggtccacatgcagaagagggaccccaaaatgtaaatggatgtggacaaaaacagtcaatggtctatttaagtgtataatttatactattcagaactgtgacattaattctttctgggagaaaagtgatttaaaacttttttgatgcatagttgaggtacccaaatatcaaaggcagagaccccatggggctccaaagagctgcagtctccttcccaaggttttctggatataaatttgcatggtatagtcataatagcttttgagctttttatatgcatttggcaccaagactgggatccacaactttgtagacactgcgatgaagttaacatattagctatactataaatagtgtttgtaactacacacacacacacacacacacacacaaatacatacatatattctgtaaaaacaaaaaaaaactttttaagatccttgggtatgtgtttgctttactccatttcagaagaaaattacttttcttctaacaaaattattttatagcttctccatttttaaaacttgtgagagcattgagaagagaactctgactgtgttaacagaagagagttgaattggagtctctgttgtgttaaaatgacctctcgttactccacagtagttatttgagccagtgactgagtcgcgttgaggaattctgaacccggacctctgacgttgttgggaggtggctgttacccacacccagacctcttgagtaaggacagaaacgttatcattggggatataatgagatttctttcttaacaattgaaagtaataaagagttaattttc

SEQ ID NO: 136381 - DNA, 5781 bp, Homo sapiens
  Payload ID: 6690
  Gene Symbol: GABRB3
  Gene Name: gamma-aminobutyric acid (GABA) A receptor, beta 3
  Uniprot ID: P28472
  ENST ID: ENST00000311550
  CDS Start-End: 113-1534
tccgggccagcgcggcggcggcggcggcggcggcagcagcaggagcagccccggctgcgggtcgcgacggcggcggggcgccccctcccccgtgccggggcgcggcggagggatgtggggccttgcgggaggaaggcttttcggcatcttctcggccccggtgctggtggctgtggtgtgctgcgcccagagtgtgaacgatcccgggaacatgtcctttgtgaaggagacggtggacaagctgttgaaaggctacgacattcgcctaagacccgacttcgggggtcccccggtctgcgtggggatgaacatcgacatcgccagcatcgacatggtttccgaagtcaacatggattataccttaaccatgtattttcaacaatattggagagataaaaggctcgcctattctgggatccctctcaacctcacgcttgacaatcgagtggctgaccagctatgggtgcccgacacatatttcttaaatgacaaaaagtcatttgtgcatggagtgacagtgaaaaaccgcatgatccgtcttcaccctgatgggacagtgctgtatgggctcagaatcaccacgacagcagcatgcatgatggacctcaggagataccccctggacgagcagaactgcactctggaaattgaaagctatggctacaccacggatgacattgagttttactggcgaggcggggacaaggctgttaccggagtggaaaggattgagctcccgcagttctccatcgtggagcaccgtctggtctcgaggaatgttgtcttcgccacaggtgcctatcctcgactgtcactgagctttcggttgaagaggaacattggatacttcattcttcagacttatatgccctctatactgataacgattctgtcgtgggtgtccttctggatcaattatgatgcatctgctgctagagttgccctcgggatcacaactgtgctgacaatgacaaccatcaacacccaccttcgggagaccttgcccaaaatcccctatgtcaaagccattgacatgtaccttatgggctgcttcgtctttgtgttcctggcccttctggagtatgcctttgtcaactacattttctttggaagaggccctcaaaggcagaagaagcttgcagaaaagacagccaaggcaaagaatgaccgttcaaagagcgaaagcaaccgggtggatgctcatggaaatattctgttgacatcgctggaagttcacaatgaaatgaatgaggtctcaggcggcattggcgataccaggaattcagcaatatcctttgacaactcaggaatccagtacaggaaacagagcatgcctcgagaagggcatgggcgattcctgggggacagaagcctcccgcacaagaagacccatctacggaggaggtcttcacagctcaaaattaaaatacctgatctaaccgatgtgaatgccatagacagatggtccaggatcgtgtttccattcactttttctcttttcaacttagtttactggctgtactatgttaactgagtgactgtacttgatttttcaaagacttcatttaacactgagtgaaatattactctgcctgtcaagtttttatacctgtacacacacagacacacaagcagacacacacatatatacatacgcaattgtatatatatgtgaactttctcagcatatatataaaatacacgtgtatatgaggatgtatgtgtatatgtttatacacacaggagtcagtgcccatgtgtatggaagacaaatacacatacatatatacattttgcagctatggacaatttaccacaggatgcatattaaagaaagtcatagtttttttcttttttaattgaaagggacaagtatcatctaaatattatgccttgagaatgagggcgtgaaacacaatatcatccccaaatgtgtcttgtattatcataagttagatgttttagtttaaaaatcagaaagacattcttagttaatctttgaaaactcatacagtggtattgctagtttaaaatgagtcacttacttcatatcctctcgttcagtttagtaagcaaaggcttcttggcttctctggtgatggggtttgttttcatcgggcatacgttttctgcaatggtttagtggctggggtgagccactggcagtgtgcttacctgttgtctgaaacatagatagatcccacgttgatgtctgaacgaccgtcttttgaaaactcatcgggagtgaatggcatctcgttgtaagtactctaatatacagtgtgtagtttgtttctgttgttcacttggagtggatccagcttcactgtcatgtgcgaacacagtgacacgtttggccagtgacatttcaatcactgaaaatgtgctctacatctcgtatggatttctaggcctgatatccaacagaaagcatagacgtctcaggttattcgttactctaaggtaaaaccatctaggatgattttcccccttgcagttatgttatcattcttataacattgtatgttaatagaaaatatatttgcataatatgcatatatatgtatatttaccaagattttgtttcttacgcttgctatcatggcagcatgcgatgtcatattttcctttatgtgatgtaactactttctgttatctagaaattaagattgaagctaaaacacttctactgttcaatttcagaaactaagaatcatcctcatgcctttatttctgtatctgacatatttcataagcacatccaactactcctagactgactaggattctgcaggaacatgacccgtacacaccacgcgtcacccaacgacccatgaccgttctctgaggcaaaggagggcaacctgacagcaaacacagtcactgttggttccttctgatccacagcctcatcagtatttggactttttaaagctcgtagaaacaagacaaggtgcaccggtttcatagacgcaaccttaacttactatttagatgagatctttctaaagaaaaaaaaaagagatgatatattttttgtaaacaatatttctatcacaggcatccataaactgaaatgactacagttgtgcaaacaggtgtcacagtgaagttgagcatttggagaaaaaaataaaaagcaaaatttgcaggaagaactgctaaattaatactttatcccaaaatgccacgtatgcctcaccctctctgttctatccaaaaccaaggaccagagtgctccaatggtaggccccagttgtctcgatgtaggtagaggcaccaccctccccgaggatgcgtgtggtgtggactatccccatgagctgaccactacttgatttttctttggtggccgtaacaacctttaatttgtgggcatctgcaacagttcaaaacccaccatcagataaaacataatccacaaaatctcacgctagaggcaattacctacttttagacccttttccctctttcattcctatctttttcctcctaatcgctgctctctggttttattttcatctggagactagccagggatttctttggctttggcttttctctgaccattttttccatgggtaacaatgggggatcctaaaagttaaacagattgggaaaaaccttgttaagtggccttatcattattatcatgttaaagaaaaaaaatacatttgcaaagaccttatccctttcaatacttcaggtatctttttctgtatccagtaattaaaggtgtgaggtccacatgcagaagagggaccccaaaatgtaaatggatgtggacaaaaacagtcaatggtctatttaagtgtataatttatactattcagaactgtgacattaattctttctgggagaaaagtgatttaaaacttttttgatgcatagttgaggtacccaaatatcaaaggcagagaccccatggggctccaaagagctgcagtctccttcccaaggttttctggatataaatttgcatggtatagtcataatagcttttgagctttttatatgcatttggcaccaagactgggatccacaactttgtagacactgcgatgaagttaacatattagctatactataaatagtgtttgtaactacacacacacacacacacacacacacaaatacatacatatattctgtaaaaacaaaaaaaaactttttaagatccttgggtatgtgtttgctttactccatttcagaagaaaattacttttcttctaacaaaattattttatagcttctccatttttaaaacttgtgagagcattgagaagagaactctgactgtgttaacagaagagagttgaattggagtctctgttgtgttaaaatgacctctcgttactccacagtagttatttgagccagtgactgagtcgcgttgaggaattctgaacccggacctctgacgttgttgggaggtggctgttacccacacccagacctcttgagtaaggacagaaacgttatcattggggatataatgagatttctttcttaacaattgaaagtaataaagagttaattttctcagtagtcctgtctttccaaaatgcgccacaggggctcaagatctacagaagaatcttgttatgacagtttgttattacccatattcagatatccttgagataatggaagagccctgctacataactccctacagagaaagactgatagacttgagtagtccttaaaacaagtgttattcctgttcaccaaccccgggactgtggaggggtttcactgtctataccatgcgacatccatttcccctgaatctcaaacgaactagaaagtatgtcatgataatatttccattagatttggaagctacctgtacatctgcaatattgtgtttttaacgccagcacccagaactttgacatgttcagtcactccctgaaaggcacttctctcttgtccaaacacagcgttgacatttttactgaggagatcatctcaaaggtgatgccaaacgagtctggggctggttttaaggggacaggcacattgcagttgtaggtgttcattttcagcatctagtagataatccattggtgtttgtcccaccattggtgtattctaacaagaatgtgtccaactttgaatctcctggcttgaaagtataaaccatcacttaattcttattttaactctccacctgaaaaccagttcatatttctggccattttatgtaagcaaaactgaacaattggtgaaacattttgttactcttggaattgactctggctgtcagtgtgagccattagagtaacatcgaatcttggggcaaagaactgcccaggtgaattaaatttttccaggacactagctagtgtgccttggattgattacctcttctactgcattgaaaggcgccatgttttcctgaaatactaaattcccaacacctgggtaaacaatgaccttccagagagtggctcccgtatgcctctccctaggaccaaccccatgaacatgttttgtcacgtttgtctcatgtttctacttcacaagtcagtgagtgtgtttaaggtaagtacaggattattctagtaggaataggcgattgctgtcataatcaattctcatgttgatttcattttattgtaaagataaatttaaacccagttttgcttaagcacattgatgtaattttttggtattatttgacatgaaaaaacagcaaaattgagtgatagatacaatatgaaacttgttgatgaatgaattcaaatttattaaaaaaggagtaactgacctaaa

SEQ ID NO: 136382 - DNA, 1900 bp, Homo sapiens
  Payload ID: 6690
  Gene Symbol: GABRB3
  Gene Name: gamma-aminobutyric acid (GABA) A receptor, beta 3
  Uniprot ID: P28472
  ENST ID: ENST00000400188
  CDS Start-End: 88-1296
agtcacaacttccggttagcgtggcggaggctctcggagtctttgggacctcagcaccgggataccgggagactccctcgtgtccccatgtgggccacctaccagacagaagaggattataccttaaccatgtattttcaacaatattggagagataaaaggctcgcctattctgggatccctctcaacctcacgcttgacaatcgagtggctgaccagctatgggtgcccgacacatatttcttaaatgacaaaaagtcatttgtgcatggagtgacagtgaaaaaccgcatgatccgtcttcaccctgatgggacagtgctgtatgggctcagaatcaccacgacagcagcatgcatgatggacctcaggagataccccctggacgagcagaactgcactctggaaattgaaagctatggctacaccacggatgacattgagttttactggcgaggcggggacaaggctgttaccggagtggaaaggattgagctcccgcagttctccatcgtggagcaccgtctggtctcgaggaatgttgtcttcgccacaggtgcctatcctcgactgtcactgagctttcggttgaagaggaacattggatacttcattcttcagacttatatgccctctatactgataacgattctgtcgtgggtgtccttctggatcaattatgatgcatctgctgctagagttgccctcgggatcacaactgtgctgacaatgacaaccatcaacacccaccttcgggagaccttgcccaaaatcccctatgtcaaagccattgacatgtaccttatgggctgcttcgtctttgtgttcctggcccttctggagtatgcctttgtcaactacattttctttggaagaggccctcaaaggcagaagaagcttgcagaaaagacagccaaggcaaagaatgaccgttcaaagagcgaaagcaaccgggtggatgctcatggaaatattctgttgacatcgctggaagttcacaatgaaatgaatgaggtctcaggcggcattggcgataccaggaattcagcaatatcctttgacaactcaggaatccagtacaggaaacagagcatgcctcgagaagggcatgggcgattcctgggggacagaagcctcccgcacaagaagacccatctacggaggaggtcttcacagctcaaaattaaaatacctgatctaaccgatgtgaatgccatagacagatggtccaggatcgtgtttccattcactttttctcttttcaacttagtttactggctgtactatgttaactgagtgactgtacttgatttttcaaagacttcatttaacactgagtgaaatattactctgcctgtcaagtttttatacctgtacacacacagacacacaagcagacacacacatatatacatacgcaattgtatatatatgtgaactttctcagcatatatataaaatacacgtgtatatgaggatgtatgtgtatatgtttatacacacaggagtcagtgcccatgtgtatggaagacaaatacacatacatatatacattttgcagctatggacaatttaccacaggatgcatattaaagaaagtcatagtttttttcttttttaattgaaagggacaagtatcatctaaatattatgccttgagaatgagggcgtgaaacacaatatcatccccaaatgtgtcttgtattatcataagttagatgttttagtttaaaaatcagaaagacattcttagttaatctttgaaaactcatacagtggtattgctagtttaaaatgagtcacttacttcatatcctctcgttcagtttagtaagcaaaggcttcttggcttctctggtgatggggtttgttttcatcgggcatacgttttctgcaatgg

SEQ ID NO: 136383 - DNA, 1267 bp, Homo sapiens
  Payload ID: 6690
  Gene Symbol: GABRB3
  Gene Name: gamma-aminobutyric acid (GABA) A receptor, beta 3
  Uniprot ID: P28472
  ENST ID: ENST00000545868
  CDS Start-End: 101-1267
ggaaaactgcttacatggaaggcacttcaggggtaaggtccagggtgtgtgtctgtgcttggctctaggttgctccatttgggaggattataccttaaccatgtattttcaacaatattggagagataaaaggctcgcctattctgggatccctctcaacctcacgcttgacaatcgagtggctgaccagctatgggtgcccgacacatatttcttaaatgacaaaaagtcatttgtgcatggagtgacagtgaaaaaccgcatgatccgtcttcaccctgatgggacagtgctgtatgggctcagaatcaccacgacagcagcatgcatgatggacctcaggagataccccctggacgagcagaactgcactctggaaattgaaagctatggctacaccacggatgacattgagttttactggcgaggcggggacaaggctgttaccggagtggaaaggattgagctcccgcagttctccatcgtggagcaccgtctggtctcgaggaatgttgtcttcgccacaggtgcctatcctcgactgtcactgagctttcggttgaagaggaacattggatacttcattcttcagacttatatgccctctatactgataacgattctgtcgtgggtgtccttctggatcaattatgatgcatctgctgctagagttgccctcgggatcacaactgtgctgacaatgacaaccatcaacacccaccttcgggagaccttgcccaaaatcccctatgtcaaagccattgacatgtaccttatgggctgcttcgtctttgtgttcctggcccttctggagtatgcctttgtcaactacattttctttggaagaggccctcaaaggcagaagaagcttgcagaaaagacagccaaggcaaagaatgaccgttcaaagagcgaaagcaaccgggtggatgctcatggaaatattctgttgacatcgctggaagttcacaatgaaatgaatgaggtctcaggcggcattggcgataccaggaattcagcaatatcctttgacaactcaggaatccagtacaggaaacagagcatgcctcgagaagggcatgggcgattcctgggggacagaagcctcccgcacaagaagacccatctacggaggaggtcttcacagctcaaaattaaaatacctgatctaaccgatgtgaatgccatagacagatggtccaggatcgtgtttccattcactttttctcttttcaacttagtttactggctgtactatgttaactga

SEQ ID NO: 136384 - DNA, 5934 bp, Homo sapiens
  Payload ID: 6690
  Gene Symbol: GABRB3
  Gene Name: gamma-aminobutyric acid (GABA) A receptor, beta 3
  ENST ID: ENST00000541819
  CDS Start-End: 104-1693
acagagtccttcctgtttccagtctagaggctccagggaggtgagacgaccactcccaccagcagcaggccctgtgctggctgtgtcgcaggtgcagagtgagatgcagcagctcaggaggctctgggtcctggcagctcaacccttctgccacctaccagagaggtgtcgcctgttctttgaaatcgggggcatttcattggcgatgccccagtgccttctctggatttgcctggctgtgtgggaggcacgaggagacctcccattcattgctgagaatgatgccgtcctcacggtgaactggaacgcagtcaaagaacacagaacattttatgccatttatgaaaccagtgtgaacgatcccgggaacatgtcctttgtgaaggagacggtggacaagctgttgaaaggctacgacattcgcctaagacccgacttcgggggtcccccggtctgcgtggggatgaacatcgacatcgccagcatcgacatggtttccgaagtcaacatggattataccttaaccatgtattttcaacaatattggagagataaaaggctcgcctattctgggatccctctcaacctcacgcttgacaatcgagtggctgaccagctatgggtgcccgacacatatttcttaaatgacaaaaagtcatttgtgcatggagtgacagtgaaaaaccgcatgatccgtcttcaccctgatgggacagtgctgtatgggctcagaatcaccacgacagcagcatgcatgatggacctcaggagataccccctggacgagcagaactgcactctggaaattgaaagctatggctacaccacggatgacattgagttttactggcgaggcggggacaaggctgttaccggagtggaaaggattgagctcccgcagttctccatcgtggagcaccgtctggtctcgaggaatgttgtcttcgccacaggtgcctatcctcgactgtcactgagctttcggttgaagaggaacattggatacttcattcttcagacttatatgccctctatactgataacgattctgtcgtgggtgtccttctggatcaattatgatgcatctgctgctagagttgccctcgggatcacaactgtgctgacaatgacaaccatcaacacccaccttcgggagaccttgcccaaaatcccctatgtcaaagccattgacatgtaccttatgggctgcttcgtctttgtgttcctggcccttctggagtatgcctttgtcaactacattttctttggaagaggccctcaaaggcagaagaagcttgcagaaaagacagccaaggcaaagaatgaccgttcaaagagcgaaagcaaccgggtggatgctcatggaaatattctgttgacatcgctggaagttcacaatgaaatgaatgaggtctcaggcggcattggcgataccaggaattcagcaatatcctttgacaactcaggaatccagtacaggaaacagagcatgcctcgagaagggcatgggcgattcctgggggacagaagcctcccgcacaagaagacccatctacggaggaggtcttcacagctcaaaattaaaatacctgatctaaccgatgtgaatgccatagacagatggtccaggatcgtgtttccattcactttttctcttttcaacttagtttactggctgtactatgttaactgagtgactgtacttgatttttcaaagacttcatttaacactgagtgaaatattactctgcctgtcaagtttttatacctgtacacacacagacacacaagcagacacacacatatatacatacgcaattgtatatatatgtgaactttctcagcatatatataaaatacacgtgtatatgaggatgtatgtgtatatgtttatacacacaggagtcagtgcccatgtgtatggaagacaaatacacatacatatatacattttgcagctatggacaatttaccacaggatgcatattaaagaaagtcatagtttttttcttttttaattgaaagggacaagtatcatctaaatattatgccttgagaatgagggcgtgaaacacaatatcatccccaaatgtgtcttgtattatcataagttagatgttttagtttaaaaatcagaaagacattcttagttaatctttgaaaactcatacagtggtattgctagtttaaaatgagtcacttacttcatatcctctcgttcagtttagtaagcaaaggcttcttggcttctctggtgatggggtttgttttcatcgggcatacgttttctgcaatggtttagtggctggggtgagccactggcagtgtgcttacctgttgtctgaaacatagatagatcccacgttgatgtctgaacgaccgtcttttgaaaactcatcgggagtgaatggcatctcgttgtaagtactctaatatacagtgtgtagtttgtttctgttgttcacttggagtggatccagcttcactgtcatgtgcgaacacagtgacacgtttggccagtgacatttcaatcactgaaaatgtgctctacatctcgtatggatttctaggcctgatatccaacagaaagcatagacgtctcaggttattcgttactctaaggtaaaaccatctaggatgattttcccccttgcagttatgttatcattcttataacattgtatgttaatagaaaatatatttgcataatatgcatatatatgtatatttaccaagattttgtttcttacgcttgctatcatggcagcatgcgatgtcatattttcctttatgtgatgtaactactttctgttatctagaaattaagattgaagctaaaacacttctactgttcaatttcagaaactaagaatcatcctcatgcctttatttctgtatctgacatatttcataagcacatccaactactcctagactgactaggattctgcaggaacatgacccgtacacaccacgcgtcacccaacgacccatgaccgttctctgaggcaaaggagggcaacctgacagcaaacacagtcactgttggttccttctgatccacagcctcatcagtatttggactttttaaagctcgtagaaacaagacaaggtgcaccggtttcatagacgcaaccttaacttactatttagatgagatctttctaaagaaaaaaaaaagagatgatatattttttgtaaacaatatttctatcacaggcatccataaactgaaatgactacagttgtgcaaacaggtgtcacagtgaagttgagcatttggagaaaaaaataaaaagcaaaatttgcaggaagaactgctaaattaatactttatcccaaaatgccacgtatgcctcaccctctctgttctatccaaaaccaaggaccagagtgctccaatggtaggccccagttgtctcgatgtaggtagaggcaccaccctccccgaggatgcgtgtggtgtggactatccccatgagctgaccactacttgatttttctttggtggccgtaacaacctttaatttgtgggcatctgcaacagttcaaaacccaccatcagataaaacataatccacaaaatctcacgctagaggcaattacctacttttagacccttttccctctttcattcctatctttttcctcctaatcgctgctctctggttttattttcatctggagactagccagggatttctttggctttggcttttctctgaccattttttccatgggtaacaatgggggatcctaaaagttaaacagattgggaaaaaccttgttaagtggccttatcattattatcatgttaaagaaaaaaaatacatttgcaaagaccttatccctttcaatacttcaggtatctttttctgtatccagtaattaaaggtgtgaggtccacatgcagaagagggaccccaaaatgtaaatggatgtggacaaaaacagtcaatggtctatttaagtgtataatttatactattcagaactgtgacattaattctttctgggagaaaagtgatttaaaacttttttgatgcatagttgaggtacccaaatatcaaaggcagagaccccatggggctccaaagagctgcagtctccttcccaaggttttctggatataaatttgcatggtatagtcataatagcttttgagctttttatatgcatttggcaccaagactgggatccacaactttgtagacactgcgatgaagttaacatattagctatactataaatagtgtttgtaactacacacacacacacacacacacacacaaatacatacatatattctgtaaaaacaaaaaaaaactttttaagatccttgggtatgtgtttgctttactccatttcagaagaaaattacttttcttctaacaaaattattttatagcttctccatttttaaaacttgtgagagcattgagaagagaactctgactgtgttaacagaagagagttgaattggagtctctgttgtgttaaaatgacctctcgttactccacagtagttatttgagccagtgactgagtcgcgttgaggaattctgaacccggacctctgacgttgttgggaggtggctgttacccacacccagacctcttgagtaaggacagaaacgttatcattggggatataatgagatttctttcttaacaattgaaagtaataaagagttaattttctcagtagtcctgtctttccaaaatgcgccacaggggctcaagatctacagaagaatcttgttatgacagtttgttattacccatattcagatatccttgagataatggaagagccctgctacataactccctacagagaaagactgatagacttgagtagtccttaaaacaagtgttattcctgttcaccaaccccgggactgtggaggggtttcactgtctataccatgcgacatccatttcccctgaatctcaaacgaactagaaagtatgtcatgataatatttccattagatttggaagctacctgtacatctgcaatattgtgtttttaacgccagcacccagaactttgacatgttcagtcactccctgaaaggcacttctctcttgtccaaacacagcgttgacatttttactgaggagatcatctcaaaggtgatgccaaacgagtctggggctggttttaaggggacaggcacattgcagttgtaggtgttcattttcagcatctagtagataatccattggtgtttgtcccaccattggtgtattctaacaagaatgtgtccaactttgaatctcctggcttgaaagtataaaccatcacttaattcttattttaactctccacctgaaaaccagttcatatttctggccattttatgtaagcaaaactgaacaattggtgaaacattttgttactcttggaattgactctggctgtcagtgtgagccattagagtaacatcgaatcttggggcaaagaactgcccaggtgaattaaatttttccaggacactagctagtgtgccttggattgattacctcttctactgcattgaaaggcgccatgttttcctgaaatactaaattcccaacacctgggtaaacaatgaccttccagagagtggctcccgtatgcctctccctaggaccaaccccatgaacatgttttgtcacgtttgtctcatgtttctacttcacaagtcagtgagtgtgtttaaggtaagtacaggattattctagtaggaataggcgattgctgtcataatcaattctcatgttgatttcattttattgtaaagataaatttaaacccagttttgcttaagcacattgatgtaattttttggtattatttgacatgaaaaaacagcaaaattgagtgatagatacaatatgaaacttgttgatgaatgaattcaaatttattaaaaaaggagtaactga

SEQ ID NO: 136385 - DNA, 817 bp, Homo sapiens
  Payload ID: 6690
  Gene Symbol: GABRB3
  Gene Name: gamma-aminobutyric acid (GABA) A receptor, beta 3
  ENST ID: ENST00000554556
  CDS Start-End: 96-413
gcggcggcggcggcggcagcagcaggagcagccccggctgcgggtcgcgacggcggcggggcgccccctcccccgtgccggggcgcggcggagggatgtggggccttgcgggaggaaggcttttcggcatcttctcggccccggtgctggtggctgtggtgtgctgcgcccagagtgtgaacgatcccgggaacatgtcctttgtgaaggagacggtggacaagctgttgaaaggctacgacattcgcctaagacccgacttcgggggtcccccggtctgcgtggggatgaacatcgacatcgccagcatcgacatggtttccgaagtcaacatgaatcaccacgacagcagcatgcatgatggacctcaggagataccccctggacgagcagaactgcactctggaaattgaaagctatggctacaccacggatgacattgagttttactggcgaggcggggacaaggctgttaccggagtggaaaggattgagctcccgcagttctccatcgtggagcaccgtctggtctcgaggaatgttgtcttcgccacaggtgcctatcctcgactgtcactgagctttcggttgaagaggaacattggatacttcattcttcagacttatatgccctctatactgataacgattctgtcgtgggtgtccttctggatcaattatgatgcatctgctgctagagttgccctcgggatcacaactgtgctgacaatgacaaccatcaacacccaccttcgggagaccttgcccaaaatcccctatgtcaaagccattgacatgtaccttatgggctgcttcg

SEQ ID NO: 136386 - DNA, 2109 bp, Homo sapiens
  Payload ID: 6690
  Gene Symbol: GABRB3
  Gene Name: gamma-aminobutyric acid (GABA) A receptor, beta 3
  ENST ID: ENST00000555632
  CDS Start-End: 53-316
gtcgcgacggcggcggggcgccccctcccccgtgccggggcgcggcggagggatgtggggccttgcgggaggaaggcttttcggcatcttctcggccccggtgctggtggctgtggtgtgctgcgcccagagtgtgaacgatcccgggaacatgtcctttgtgaaggagacggtggacaagctgttgaaaggctacgacattcgcctaagacccgacttcgggggtcccccggtctgcgtggggatgaacatcgacatcgccagcatcgacatggtttccgaagtcaacatggctatgcaggaactgcacagctaggattcagccactgtggaactaacgtggcttatagattcattttttcctttccaggagtttggaattgaaaatgattataccttaaccatgtattttcaacaatattggagagataaaaggctcgcctattctgggatccctctcaacctcacgcttgacaatcgagtggctgaccagctatgggtgcccgacacatatttcttaaatgacaaaaagtcatttgtgcatggagtgacagtgaaaaaccgcatgatccgtcttcaccctgatgggacagtgctgtatgggctcagaatcaccacgacagcagcatgcatgatggacctcaggagataccccctggacgagcagaactgcactctggaaattgaaagctatggctacaccacggatgacattgagttttactggcgaggcggggacaaggctgttaccggagtggaaaggattgagctcccgcagttctccatcgtggagcaccgtctggtctcgaggaatgttgtcttcgccacaggtgcctatcctcgactgtcactgagctttcggttgaagaggaacattggatacttcattcttcagacttatatgccctctatactgataacgattctgtcgtgggtgtccttctggatcaattatgatgcatctgctgctagagttgccctcgggatcacaactgtgctgacaatgacaaccatcaacacccaccttcgggagaccttgcccaaaatcccctatgtcaaagccattgacatgtaccttatgggctgcttcgtctttgtgttcctggcccttctggagtatgcctttgtcaactacattttctttggaagaggccctcaaaggcagaagaagcttgcagaaaagacagccaaggcaaagaatgaccgttcaaagagcgaaagcaaccgggtggatgctcatggaaatattctgttgacatcgctggaagttcacaatgaaatgaatgaggtctcaggcggcattggcgataccaggaattcagcaatatcctttgacaactcaggaatccagtacaggaaacagagcatgcctcgagaagggcatgggcgattcctgggggacagaagcctcccgcacaagaagacccatctacggaggaggtcttcacagctcaaaattaaaatacctgatctaaccgatgtgaatgccatagacagatggtccaggatcgtgtttccattcactttttctcttttcaacttagtttactggctgtactatgttaactgagtgactgtacttgatttttcaaagacttcatttaacactgagtgaaatattactctgcctgtcaagtttttatacctgtacacacacagacacacaagcagacacacacatatatacatacgcaattgtatatatatgtgaactttctcagcatatatataaaatacacgtgtatatgaggatgtatgtgtatatgtttatacacacaggagtcagtgcccatgtgtatggaagacaaatacacatacatatatacattttgcagctatggacaatttaccacaggatgcatattaaagaaagtcatagtttttttcttttttaattgaaagggacaagtatcatctaaatattatgccttgagaatgagggcgtgaaacacaatatcatccccaaatgtgtcttgtattatcataagttagatgttttagtttaaaaatcagaaagacattcttagttaatctttgaaaactcatacagtggtattgctagtttaaaatgagtcacttacttcatatcctctcgttcagtttagtaag

SEQ ID NO: 136387 - DNA, 501 bp, Homo sapiens
  Payload ID: 6690
  Gene Symbol: GABRB3
  Gene Name: gamma-aminobutyric acid (GABA) A receptor, beta 3
  ENST ID: ENST00000556636
  CDS Start-End: 1-133
cttaaatgacaaaaagtcatttgtgcatggagtgacagtgaaaaaccgcatgatccgtcttcaccctgatgggacagtgctgtatgggctcaggtactatggccctggcctggaggaggtctggcacagctgagaacactgaagttaaattccccatggtggaaggtttgcagagagctggggttgttcctgctgttcctgcttgtaaagtactgctgaggaaggtcctgcccagcagagattgctttcctactgattatgtgcttgaaatactggttggactggctgtatcactgagaccttcagactgaatttctctcacccctggacactgagattggctctcaccttgtctatccagcagtagcctacactgcttgagctcagctgaatatgacggtgaactgagatccctgcaccagcttgtcagcatgtgatgggagagaatgctctggacagggtatgcatgccatcctaaaataaaacataaatccttgacaa

SEQ ID NO: 136388 - DNA, 5876 bp, Homo sapiens
  Payload ID: 6690
  Gene Symbol: GABRB3
  Gene Name: gamma-aminobutyric acid (GABA) A receptor, beta 3
  Uniprot ID: P28472
  ENST ID: ENST00000622697
  CDS Start-End: 466-1632
gctccgggccagcgcggcggcggcggcggcggcggcagcagcaggagcagccccggctgcgggtcgcgacggcggcggggcgccccctcccccgtgccggggcgcggcggagggatgtggggccttgcgggaggaaggcttttcggcatcttctcggccccggtgctggtggctgtggtgtgctgcgcccagagtgtgaacgatcccgggaacatgtcctttgtgaaggagacggtggacaagctgttgaaaggctacgacattcgcctaagacccgacttcgggggtcccccggtctgcgtggggatgaacatcgacatcgccagcatcgacatggtttccgaagtcaacatggctatgcaggaactgcacagctaggattcagccactgtggaactaacgtggcttatagattcattttttcctttccaggagtttggaattgaaaatgattataccttaaccatgtattttcaacaatattggagagataaaaggctcgcctattctgggatccctctcaacctcacgcttgacaatcgagtggctgaccagctatgggtgcccgacacatatttcttaaatgacaaaaagtcatttgtgcatggagtgacagtgaaaaaccgcatgatccgtcttcaccctgatgggacagtgctgtatgggctcagaatcaccacgacagcagcatgcatgatggacctcaggagataccccctggacgagcagaactgcactctggaaattgaaagctatggctacaccacggatgacattgagttttactggcgaggcggggacaaggctgttaccggagtggaaaggattgagctcccgcagttctccatcgtggagcaccgtctggtctcgaggaatgttgtcttcgccacaggtgcctatcctcgactgtcactgagctttcggttgaagaggaacattggatacttcattcttcagacttatatgccctctatactgataacgattctgtcgtgggtgtccttctggatcaattatgatgcatctgctgctagagttgccctcgggatcacaactgtgctgacaatgacaaccatcaacacccaccttcgggagaccttgcccaaaatcccctatgtcaaagccattgacatgtaccttatgggctgcttcgtctttgtgttcctggcccttctggagtatgcctttgtcaactacattttctttggaagaggccctcaaaggcagaagaagcttgcagaaaagacagccaaggcaaagaatgaccgttcaaagagcgaaagcaaccgggtggatgctcatggaaatattctgttgacatcgctggaagttcacaatgaaatgaatgaggtctcaggcggcattggcgataccaggaattcagcaatatcctttgacaactcaggaatccagtacaggaaacagagcatgcctcgagaagggcatgggcgattcctgggggacagaagcctcccgcacaagaagacccatctacggaggaggtcttcacagctcaaaattaaaatacctgatctaaccgatgtgaatgccatagacagatggtccaggatcgtgtttccattcactttttctcttttcaacttagtttactggctgtactatgttaactgagtgactgtacttgatttttcaaagacttcatttaacactgagtgaaatattactctgcctgtcaagtttttatacctgtacacacacagacacacaagcagacacacacatatatacatacgcaattgtatatatatgtgaactttctcagcatatatataaaatacacgtgtatatgaggatgtatgtgtatatgtttatacacacaggagtcagtgcccatgtgtatggaagacaaatacacatacatatatacattttgcagctatggacaatttaccacaggatgcatattaaagaaagtcatagtttttttcttttttaattgaaagggacaagtatcatctaaatattatgccttgagaatgagggcgtgaaacacaatatcatccccaaatgtgtcttgtattatcataagttagatgttttagtttaaaaatcagaaagacattcttagttaatctttgaaaactcatacagtggtattgctagtttaaaatgagtcacttacttcatatcctctcgttcagtttagtaagcaaaggcttcttggcttctctggtgatggggtttgttttcatcgggcatacgttttctgcaatggtttagtggctggggtgagccactggcagtgtgcttacctgttgtctgaaacatagatagatcccacgttgatgtctgaacgaccgtcttttgaaaactcatcgggagtgaatggcatctcgttgtaagtactctaatatacagtgtgtagtttgtttctgttgttcacttggagtggatccagcttcactgtcatgtgcgaacacagtgacacgtttggccagtgacatttcaatcactgaaaatgtgctctacatctcgtatggatttctaggcctgatatccaacagaaagcatagacgtctcaggttattcgttactctaaggtaaaaccatctaggatgattttcccccttgcagttatgttatcattcttataacattgtatgttaatagaaaatatatttgcataatatgcatatatatgtatatttaccaagattttgtttcttacgcttgctatcatggcagcatgcgatgtcatattttcctttatgtgatgtaactactttctgttatctagaaattaagattgaagctaaaacacttctactgttcaatttcagaaactaagaatcatcctcatgcctttatttctgtatctgacatatttcataagcacatccaactactcctagactgactaggattctgcaggaacatgacccgtacacaccacgcgtcacccaacgacccatgaccgttctctgaggcaaaggagggcaacctgacagcaaacacagtcactgttggttccttctgatccacagcctcatcagtatttggactttttaaagctcgtagaaacaagacaaggtgcaccggtttcatagacgcaaccttaacttactatttagatgagatctttctaaagaaaaaaaaaagagatgatatattttttgtaaacaatatttctatcacaggcatccataaactgaaatgactacagttgtgcaaacaggtgtcacagtgaagttgagcatttggagaaaaaaataaaaagcaaaatttgcaggaagaactgctaaattaatactttatcccaaaatgccacgtatgcctcaccctctctgttctatccaaaaccaaggaccagagtgctccaatggtaggccccagttgtctcgatgtaggtagaggcaccaccctccccgaggatgcgtgtggtgtggactatccccatgagctgaccactacttgatttttctttggtggccgtaacaacctttaatttgtgggcatctgcaacagttcaaaacccaccatcagataaaacataatccacaaaatctcacgctagaggcaattacctacttttagacccttttccctctttcattcctatctttttcctcctaatcgctgctctctggttttattttcatctggagactagccagggatttctttggctttggcttttctctgaccattttttccatgggtaacaatgggggatcctaaaagttaaacagattgggaaaaaccttgttaagtggccttatcattattatcatgttaaagaaaaaaaatacatttgcaaagaccttatccctttcaatacttcaggtatctttttctgtatccagtaattaaaggtgtgaggtccacatgcagaagagggaccccaaaatgtaaatggatgtggacaaaaacagtcaatggtctatttaagtgtataatttatactattcagaactgtgacattaattctttctgggagaaaagtgatttaaaacttttttgatgcatagttgaggtacccaaatatcaaaggcagagaccccatggggctccaaagagctgcagtctccttcccaaggttttctggatataaatttgcatggtatagtcataatagcttttgagctttttatatgcatttggcaccaagactgggatccacaactttgtagacactgcgatgaagttaacatattagctatactataaatagtgtttgtaactacacacacacacacacacacacacacaaatacatacatatattctgtaaaaacaaaaaaaaactttttaagatccttgggtatgtgtttgctttactccatttcagaagaaaattacttttcttctaacaaaattattttatagcttctccatttttaaaacttgtgagagcattgagaagagaactctgactgtgttaacagaagagagttgaattggagtctctgttgtgttaaaatgacctctcgttactccacagtagttatttgagccagtgactgagtcgcgttgaggaattctgaacccggacctctgacgttgttgggaggtggctgttacccacacccagacctcttgagtaaggacagaaacgttatcattggggatataatgagatttctttcttaacaattgaaagtaataaagagttaattttctcagtagtcctgtctttccaaaatgcgccacaggggctcaagatctacagaagaatcttgttatgacagtttgttattacccatattcagatatccttgagataatggaagagccctgctacataactccctacagagaaagactgatagacttgagtagtccttaaaacaagtgttattcctgttcaccaaccccgggactgtggaggggtttcactgtctataccatgcgacatccatttcccctgaatctcaaacgaactagaaagtatgtcatgataatatttccattagatttggaagctacctgtacatctgcaatattgtgtttttaacgccagcacccagaactttgacatgttcagtcactccctgaaaggcacttctctcttgtccaaacacagcgttgacatttttactgaggagatcatctcaaaggtgatgccaaacgagtctggggctggttttaaggggacaggcacattgcagttgtaggtgttcattttcagcatctagtagataatccattggtgtttgtcccaccattggtgtattctaacaagaatgtgtccaactttgaatctcctggcttgaaagtataaaccatcacttaattcttattttaactctccacctgaaaaccagttcatatttctggccattttatgtaagcaaaactgaacaattggtgaaacattttgttactcttggaattgactctggctgtcagtgtgagccattagagtaacatcgaatcttggggcaaagaactgcccaggtgaattaaatttttccaggacactagctagtgtgccttggattgattacctcttctactgcattgaaaggcgccatgttttcctgaaatactaaattcccaacacctgggtaaacaatgaccttccagagagtggctcccgtatgcctctccctaggaccaaccccatgaacatgttttgtcacgtttgtctcatgtttctacttcacaagtcagtgagtgtgtttaaggtaagtacaggattattctagtaggaataggcgattgctgtcataatcaattctcatgttgatttcattttattgtaaagataaatttaaacccagttttgcttaagcacattgatgtaattttttggtattatttgacatgaaaaaacagcaaaattgagtgatagatacaatatgaaacttgttgatgaatgaattcaaatttattaaaaaaggagtaactgacct

SEQ ID NO: 136389 - DNA, 5581 bp, Homo sapiens
  Payload ID: 6690
  Gene Symbol: GABRB3
  Gene Name: gamma-aminobutyric acid (GABA) A receptor, beta 3
  Uniprot ID: P28472
  ENST ID: ENST00000628124
  CDS Start-End: 168-1334
agagctgggctgttactggatatatgccatgtgagctggatggcctgtgaaagagaaaggcagttggtgataaaaataattggatgattcttaaagaaatagaagagacttgctgttggcagtgagaacccacaagaggcctctaaggagatgattataccttaaccatgtattttcaacaatattggagagataaaaggctcgcctattctgggatccctctcaacctcacgcttgacaatcgagtggctgaccagctatgggtgcccgacacatatttcttaaatgacaaaaagtcatttgtgcatggagtgacagtgaaaaaccgcatgatccgtcttcaccctgatgggacagtgctgtatgggctcagaatcaccacgacagcagcatgcatgatggacctcaggagataccccctggacgagcagaactgcactctggaaattgaaagctatggctacaccacggatgacattgagttttactggcgaggcggggacaaggctgttaccggagtggaaaggattgagctcccgcagttctccatcgtggagcaccgtctggtctcgaggaatgttgtcttcgccacaggtgcctatcctcgactgtcactgagctttcggttgaagaggaacattggatacttcattcttcagacttatatgccctctatactgataacgattctgtcgtgggtgtccttctggatcaattatgatgcatctgctgctagagttgccctcgggatcacaactgtgctgacaatgacaaccatcaacacccaccttcgggagaccttgcccaaaatcccctatgtcaaagccattgacatgtaccttatgggctgcttcgtctttgtgttcctggcccttctggagtatgcctttgtcaactacattttctttggaagaggccctcaaaggcagaagaagcttgcagaaaagacagccaaggcaaagaatgaccgttcaaagagcgaaagcaaccgggtggatgctcatggaaatattctgttgacatcgctggaagttcacaatgaaatgaatgaggtctcaggcggcattggcgataccaggaattcagcaatatcctttgacaactcaggaatccagtacaggaaacagagcatgcctcgagaagggcatgggcgattcctgggggacagaagcctcccgcacaagaagacccatctacggaggaggtcttcacagctcaaaattaaaatacctgatctaaccgatgtgaatgccatagacagatggtccaggatcgtgtttccattcactttttctcttttcaacttagtttactggctgtactatgttaactgagtgactgtacttgatttttcaaagacttcatttaacactgagtgaaatattactctgcctgtcaagtttttatacctgtacacacacagacacacaagcagacacacacatatatacatacgcaattgtatatatatgtgaactttctcagcatatatataaaatacacgtgtatatgaggatgtatgtgtatatgtttatacacacaggagtcagtgcccatgtgtatggaagacaaatacacatacatatatacattttgcagctatggacaatttaccacaggatgcatattaaagaaagtcatagtttttttcttttttaattgaaagggacaagtatcatctaaatattatgccttgagaatgagggcgtgaaacacaatatcatccccaaatgtgtcttgtattatcataagttagatgttttagtttaaaaatcagaaagacattcttagttaatctttgaaaactcatacagtggtattgctagtttaaaatgagtcacttacttcatatcctctcgttcagtttagtaagcaaaggcttcttggcttctctggtgatggggtttgttttcatcgggcatacgttttctgcaatggtttagtggctggggtgagccactggcagtgtgcttacctgttgtctgaaacatagatagatcccacgttgatgtctgaacgaccgtcttttgaaaactcatcgggagtgaatggcatctcgttgtaagtactctaatatacagtgtgtagtttgtttctgttgttcacttggagtggatccagcttcactgtcatgtgcgaacacagtgacacgtttggccagtgacatttcaatcactgaaaatgtgctctacatctcgtatggatttctaggcctgatatccaacagaaagcatagacgtctcaggttattcgttactctaaggtaaaaccatctaggatgattttcccccttgcagttatgttatcattcttataacattgtatgttaatagaaaatatatttgcataatatgcatatatatgtatatttaccaagattttgtttcttacgcttgctatcatggcagcatgcgatgtcatattttcctttatgtgatgtaactactttctgttatctagaaattaagattgaagctaaaacacttctactgttcaatttcagaaactaagaatcatcctcatgcctttatttctgtatctgacatatttcataagcacatccaactactcctagactgactaggattctgcaggaacatgacccgtacacaccacgcgtcacccaacgacccatgaccgttctctgaggcaaaggagggcaacctgacagcaaacacagtcactgttggttccttctgatccacagcctcatcagtatttggactttttaaagctcgtagaaacaagacaaggtgcaccggtttcatagacgcaaccttaacttactatttagatgagatctttctaaagaaaaaaaaaagagatgatatattttttgtaaacaatatttctatcacaggcatccataaactgaaatgactacagttgtgcaaacaggtgtcacagtgaagttgagcatttggagaaaaaaataaaaagcaaaatttgcaggaagaactgctaaattaatactttatcccaaaatgccacgtatgcctcaccctctctgttctatccaaaaccaaggaccagagtgctccaatggtaggccccagttgtctcgatgtaggtagaggcaccaccctccccgaggatgcgtgtggtgtggactatccccatgagctgaccactacttgatttttctttggtggccgtaacaacctttaatttgtgggcatctgcaacagttcaaaacccaccatcagataaaacataatccacaaaatctcacgctagaggcaattacctacttttagacccttttccctctttcattcctatctttttcctcctaatcgctgctctctggttttattttcatctggagactagccagggatttctttggctttggcttttctctgaccattttttccatgggtaacaatgggggatcctaaaagttaaacagattgggaaaaaccttgttaagtggccttatcattattatcatgttaaagaaaaaaaatacatttgcaaagaccttatccctttcaatacttcaggtatctttttctgtatccagtaattaaaggtgtgaggtccacatgcagaagagggaccccaaaatgtaaatggatgtggacaaaaacagtcaatggtctatttaagtgtataatttatactattcagaactgtgacattaattctttctgggagaaaagtgatttaaaacttttttgatgcatagttgaggtacccaaatatcaaaggcagagaccccatggggctccaaagagctgcagtctccttcccaaggttttctggatataaatttgcatggtatagtcataatagcttttgagctttttatatgcatttggcaccaagactgggatccacaactttgtagacactgcgatgaagttaacatattagctatactataaatagtgtttgtaactacacacacacacacacacacacacacaaatacatacatatattctgtaaaaacaaaaaaaaactttttaagatccttgggtatgtgtttgctttactccatttcagaagaaaattacttttcttctaacaaaattattttatagcttctccatttttaaaacttgtgagagcattgagaagagaactctgactgtgttaacagaagagagttgaattggagtctctgttgtgttaaaatgacctctcgttactccacagtagttatttgagccagtgactgagtcgcgttgaggaattctgaacccggacctctgacgttgttgggaggtggctgttacccacacccagacctcttgagtaaggacagaaacgttatcattggggatataatgagatttctttcttaacaattgaaagtaataaagagttaattttctcagtagtcctgtctttccaaaatgcgccacaggggctcaagatctacagaagaatcttgttatgacagtttgttattacccatattcagatatccttgagataatggaagagccctgctacataactccctacagagaaagactgatagacttgagtagtccttaaaacaagtgttattcctgttcaccaaccccgggactgtggaggggtttcactgtctataccatgcgacatccatttcccctgaatctcaaacgaactagaaagtatgtcatgataatatttccattagatttggaagctacctgtacatctgcaatattgtgtttttaacgccagcacccagaactttgacatgttcagtcactccctgaaaggcacttctctcttgtccaaacacagcgttgacatttttactgaggagatcatctcaaaggtgatgccaaacgagtctggggctggttttaaggggacaggcacattgcagttgtaggtgttcattttcagcatctagtagataatccattggtgtttgtcccaccattggtgtattctaacaagaatgtgtccaactttgaatctcctggcttgaaagtataaaccatcacttaattcttattttaactctccacctgaaaaccagttcatatttctggccattttatgtaagcaaaactgaacaattggtgaaacattttgttactcttggaattgactctggctgtcagtgtgagccattagagtaacatcgaatcttggggcaaagaactgcccaggtgaattaaatttttccaggacactagctagtgtgccttggattgattacctcttctactgcattgaaaggcgccatgttttcctgaaatactaaattcccaacacctgggtaaacaatgaccttccagagagtggctcccgtatgcctctccctaggaccaaccccatgaacatgttttgtcacgtttgtctcatgtttctacttcacaagtcagtgagtgtgtttaaggtaagtacaggattattctagtaggaataggcgattgctgtcataatcaattctcatgttgatttcattttattgtaaagataaatttaaacccagttttgcttaagcacattgatgtaattttttggtattatttgacatgaaaaaacagcaaaattgagtgatagatacaatatgaaacttgttgatgaatgaattcaaatttattaaaaaaggagtaactgacctaaa

SEQ ID NO: 136390 - DNA, 1928 bp, Homo sapiens
  Payload ID: 6691
  Gene Symbol: GABRD
  Gene Name: gamma-aminobutyric acid (GABA) A receptor, delta
  Uniprot ID: O14764
  ENST ID: ENST00000378585
  CDS Start-End: 101-1459
gcgcccgcgccgcgctcgctcagctcccgcccgcctgtgccgcctgtgcggccgccgggagccaagtttgcgcggaccccgtcccgagcccgccgcggccatggacgcgcccgcccggctgctggccccgctcctgctcctctgcgcgcagcagctccgcggcaccagagcgatgaatgacatcggcgactacgtgggctccaacctggagatctcctggctccccaacctggacgggctgatagccggctacgcccgcaacttccggcctggcatcggaggcccccccgtgaatgtggcccttgccctggaggtggccagcatcgaccacatctcagaggccaacatggagtacaccatgacggtgttcctgcaccagagctggcgggacagcaggctctcctacaaccacaccaacgagaccctgggtctggacagccgcttcgtggacaagctgtggctgcccgacaccttcatcgtgaacgccaagtcggcctggttccacgacgtgacggtggagaacaagctcatccggctgcagcccgacggcgtgatcctgtacagcatccgaatcacctccactgtggcctgcgacatggacctggccaaataccccatggacgagcaggagtgcatgctggacctggagagctacggttactcatcggaggacatcgtctactactggtcggagagccaggagcacatccacgggctggacaagctgcagctggcgcagttcaccatcaccagctaccgcttcaccacggagctgatgaacttcaagtccgctggccagttcccacggctcagcctgcacttccacctgcggaggaaccgcggcgtgtacatcatccaatcctacatgccctccgtcctgctggtcgccatgtcctgggtctccttctggatcagccaggcggcggtgcccgccagggtgtctctaggcatcaccacggtgctgacgatgaccacgctcatggtcagtgcccgctcctccctgccacgggcatcagccatcaaggcactggacgtctacttctggatctgctatgtcttcgtgtttgccgccctggtggagtacgcctttgctcatttcaacgccgactacaggaagaagcagaaggccaaggtcaaggtctccaggccgagggcagagatggacgtgaggaacgccattgtcctcttctccctctctgctgccggcgtcacgcaggagctggccatctcccgccggcagcgccgcgtcccggggaacctgatgggctcctacaggtcggtgggggtggagacaggggagacgaagaaggagggggcagcccgctcaggaggccaggggggcatccgtgcccggctcaggcccatcgacgcagacaccattgacatttacgcccgcgctgtgttccctgcggcgtttgcggccgtcaatgtcatctactgggcggcatacgccatgtgagcacaggactcaggccaccctcgcttgtcctggcgcccggcggcagctgcccagaaacttcctgggagaaagagccctcgggctgccttcccctctgcgtgtttcgaagtgggatgacagtcggccacggaaaacaagaggaagcctcggcctccctgagctctgaccccagcctcacccgaaaggccagcctggggctctccggcaggcagcccgagacctgcacagatgaaggagcagaggttctgaccgagaggctgagccaggccggggtctgggcccttcagggagccgcggatttttatgttcagaaagtgatcctggtttctaggtctttgctctgcaggatcgggatcagagcgtgggaggaggtgggggtggacgtccatccggtgaacagtgaaggcgtttgtgaggtctttctggtcccagcatgaaataaagccttggcctgggggccgcttcattc

SEQ ID NO: 136391 - DNA, 3152 bp, Homo sapiens
  Payload ID: 6692
  Gene Symbol: GABRE
  Gene Name: gamma-aminobutyric acid (GABA) A receptor, epsilon
  Uniprot ID: P78334
  ENST ID: ENST00000370328
  CDS Start-End: 55-1575
gccagagcgtgagccgcgacctccgcgcaggtggtcgcgccggtctccgcggaaatgttgtccaaagttcttccagtcctcctaggcatcttattgatcctccagtcgagggtcgagggacctcagactgaatcaaagaatgaagcctcttcccgtgatgttgtctatggcccccagccccagcctctggaaaatcagctcctctctgaggaaacaaagtcaactgagactgagactgggagcagagttggcaaactgccagaagcctctcgcatcctgaacactatcctgagtaattatgaccacaaactgcgccctggcattggagagaagcccactgtggtcactgttgagatctccgtcaacagccttggtcctctctctatcctagacatggaatacaccattgacatcatcttctcccagacctggtacgacgaacgcctctgttacaacgacacctttgagtctcttgttctgaatggcaatgtggtgagccagctatggatcccggacaccttttttaggaattctaagaggacccacgagcatgagatcaccatgcccaaccagatggtccgcatctacaaggatggcaaggtgttgtacacaattaggatgaccattgatgccggatgctcactccacatgctcagatttccaatggattctcactcttgccctctatctttctctagcttttcctatcctgagaatgagatgatctacaagtgggaaaatttcaagcttgaaatcaatgagaagaactcctggaagctcttccagtttgattttacaggagtgagcaacaaaactgaaataatcacaaccccagttggtgacttcatggtcatgacgattttcttcaatgtgagcaggcggtttggctatgttgcctttcaaaactatgtcccttcttccgtgaccacgatgctctcctgggtttccttttggatcaagacagagtctgctccagcccggacctctctagggatcacctctgttctgaccatgaccacgttgggcaccttttctcgtaagaatttcccgcgtgtctcctatatcacagccttggatttctatatcgccatctgcttcgtcttctgcttctgcgctctgttggagtttgctgtgctcaacttcctgatctacaaccagacaaaagcccatgcttctcctaaactccgccatcctcgtatcaatagccgtgcccatgcccgtacccgtgcacgttcccgagcctgtgcccgccaacatcaggaagcttttgtgtgccagattgtcaccactgagggaagtgatggagaggagcgcccgtcttgctcagcccagcagccccctagcccaggtagccctgagggtccccgcagcctctgctccaagctggcctgctgtgagtggtgcaagcgttttaagaagtacttctgcatggtccccgattgtgagggcagtacctggcagcagggccgcctctgcatccatgtctaccgcctggataactactcgagagttgttttcccagtgactttcttcttcttcaatgtgctctactggcttgtttgccttaacttgtaggtaccagctggtaccctgtggggcaacctctccagttccccaggaggtccaagccccttgccaagggagttgggggaaagcagcagcagcagcaggagcgactagagtttttcctgccccattccccaaacagaagcttgcagagggtttgtctttgctgcccctctcccctacctggcccattcactgagtcttctcagcagaccatttcaaattattaataaatgggccacctccctcttcttcaaggagcatccgtgatgctcagtgttcaaaaccacagccacttagtgatcagctccctaaaaccatgcctaagtacaggcggattagctatcttccaacaatgctgaccaccagacaattactgcatttttccagaagcccactattgcctttgtagtgctttcggcccagttctggcctcagcctcaaagtgcaccgactagttgcttgcctatacctggcacctcattaagatgctgggcagcagtataacaggaggaagagatccctctcctttggtcagattattatgttctcagttctctctccctgctacccctttctctgcagatagatagacactggcattatccctttaggaagaggggggggcagcaagagagcctatttgggacagcattcctctctctctgctgctgtgacatctccctctccttgctggctccatctttcgtctgcactaccaattcaatgcccttcatccaatgggtatctatttttgtgtgtgattatagtaactactccctgctttatatgccaccctcttccttctctttgacccctgtgactctttctgtaactttcccagtgacttcccctagccctgacccaggcactaggccttggtgacttcctggggccaagaaactaaggaaactcggctttgcaacaggcattactcgccattgattggtgcccacccagggcacactgtcggagttctatcacttgcttgacccctggacccataaaccagtccactgttatacccggggcactctaaccatcacaatcaatcaatcaaattcccttaaatttgtatggcactggaactttggcaaagcacttttgacaagttgtgtctgattggagcttcatgatagccttgtgacatctttagggcaggattcttatccccattttgcagatgaaaaccctgagtcacagatttctgtgggactgtggatctcactggaagctatccaagagcccactgtcaccttctagaccacatgatagggctagacagctcagttcaccatgattctcttctgtcacctctgctggcacaccagtggcaaggcccagaatggcgacctctctttagctcaatttctgggcctgaggtgctcagactgcccccaagatcaaatctctcctggctgtagtaacccagtggaatgaatttggacatgccccaatgcttctatatgctaagtgaaatctgtgtctgtaatttgttggggggtggatagggtggggtctccatctactttttgtcaccatcatctgaaatggggaaatatgtaaataaatatatcagcaaagca

SEQ ID NO: 136392 - DNA, 1324 bp, Homo sapiens
  Payload ID: 6692
  Gene Symbol: GABRE
  Gene Name: gamma-aminobutyric acid (GABA) A receptor, epsilon
  ENST ID: ENST00000441219
  CDS Start-End: 56-187
ggccagagcgtgagccgcgacctccgcgcaggtggtcgcgccggtctccgcggaaatgttgtccaaagttcttccagtcctcctaggcatcttattgatcctccagtcgagaacatgtatacagagaagtgctcaaatcataagtgtacagctgatgagttgtcagaatatgaccacagcggtgtaaagaaagccaaatcaaggacccgaatgtgagcaggacctcagaagccccctttgtcactgcctcccagcaaaggcagcactatccggacttctaacaccatcgggtcgagggacctcagactgaatcaaagaatgaagcctcttcccgtgatgttgtctatggcccccagccccagcctctggaaaatcagctcctctctgaggaaacaaagtcaactgagactgagactgggagcagagttggcaaactgccagaagcctctcgcatcctgaacactatcctgagtaattatgaccacaaactgcgccctggcattggagagaagcccactgtggtcactgttgagatctccgtcaacagccttggtcctctctctatcctagacatggaatacaccattgacatcatcttctcccagacctggtacgacgaacgcctctgttacaacgacacctttgagtctcttgttctgaatggcaatgtggtgagccagctatggatcccggacaccttttttaggaattctaagaggacccacgagcatgagatcaccatgcccaaccagatggtccgcatctacaaggatggcaaggtgttgtacacaattagtttcctatcctgagaatgagatgatctacaagtgggaaaatttcaagcttgaaatcaatgagaagaactcctggaagctcttccagtttgattttacaggagtgagcaacaaaactgaaataatcacaaccccagttggtgacctgaatgaggagccaagggacctccccagggtagctcccagagcaaccctggaaacactcttcacacatcctgaccaagttcagggcagtgaaggcactgccctcatcgtttccagaatgtggatggagccagtcacccaaccagccatttgtcgtgagaggcatcttgttctgctaccattcaagatcccacggcaagaggacttttgataaatacattctggccagtaggcaagtgcgagggtggtccgtgcagcagctctggaggagttctatcccaaagctatactcaacacacaggtttcccactgacaacaggtcgctcccttgccttcttccagaagaatctgagaagctttgctccttgagtttcagtgctgccaag

SEQ ID NO: 136393 - DNA, 619 bp, Homo sapiens
  Payload ID: 6692
  Gene Symbol: GABRE
  Gene Name: gamma-aminobutyric acid (GABA) A receptor, epsilon
  ENST ID: ENST00000417300
  CDS Start-End: 40-171
gcgacctccgcgcaggtggtcgcgccggtctccgcggaaatgttgtccaaagttcttccagtcctcctaggcatcttattgatcctccagtcgagaacatgtatacagagaagtgctcaaatcataagtgtacagctgatgagttgtcagaatatgaccacagcggtgtaaagaaagccaaatcaaggacccgaatgtgagcaggacctcagaagccccctttgtcactgcctcccagcaaaggcagcactatccggacttctaacaccatcgggtcgagggacctcagactgaatcaaagaatgaagcctcttcccgtgatgttgtctatggcccccagccccagcctctggaaaatcagctcctctctgaggaaacaaagtcaactgagactgagactgggagcagagttggcaaactgccagaagcctctcgcatcctgaacactatcctgagtaattatgaccacaaactgcgccctggcattggaggtgaggagcagaacgacgttcttcccctcctagagggtccaggggttgagggcataggcatggagaatgcacctgggcagtaacagagggtgccatgctcatggacaggaacatctgctattgacctg

SEQ ID NO: 136394 - DNA, 6785 bp, Homo sapiens
  Payload ID: 6693
  Gene Symbol: GABRG1
  Gene Name: gamma-aminobutyric acid (GABA) A receptor, gamma 1
  Uniprot ID: Q8N1C3
  ENST ID: ENST00000295452
  CDS Start-End: 169-1566
attggctccctggctcaattctgctgggagtcgcatcctacctgtttgggaggtgcactgcctttccacactctcccttctgtactcagccagctgctgctgaggtgggaggaaaagtcctggctgggagaattgagctagtgcagcacacgtaaaaaagcgattccgatgggtcctttgaaagcttttctcttctccccttttcttctgcggagtcaaagtagaggggtgaggttggtcttcttgttactgaccctgcatttgggaaactgtgttgataaggcagatgatgaagatgatgaggatttaacggtgaacaaaacctgggtcttggccccaaaaattcatgaaggagatatcacacaaattctgaattcattgcttcaaggctatgacaataaacttcgtccagatataggagtgaggcccacagtaattgaaactgatgtttatgtaaacagcattggaccagttgatccaattaatatggaatatacaatagatataatttttgcccaaacctggtttgacagtcgtttaaaattcaatagtaccatgaaagtgcttatgcttaacagtaatatggttggaaaaatttggattcctgacactttcttcagaaactcaagaaaatctgatgctcactggataacaactcctaatcgtctgcttcgaatttggaatgatggacgagttctgtatactctaagattgacaattaatgcagaatgttatcttcagcttcataactttcccatggatgaacattcctgtccactggaattttcaagctatggataccctaaaaatgaaattgagtataagtggaaaaagccctccgtagaagtggctgatcctaaatactggagattatatcagtttgcatttgtagggttacggaactcaactgaaatcactcacacgatctctggggattatgttatcatgacaattttttttgacctgagcagaagaatgggatatttcactattcagacctacattccatgcattctgacagttgttctttcttgggtgtctttttggatcaataaagatgcagtgcctgcaagaacatcgttgggtatcactacagttctgactatgacaaccctgagtacaattgccaggaagtctttacctaaggtttcttatgtgactgcgatggatctctttgtttctgtttgtttcatttttgtttttgcagccttgatggaatatggaaccttgcattattttaccagcaaccaaaaaggaaagactgctactaaagacagaaagctaaaaaataaagcctcgatgactcctggtctccatcctggatccactctgattccaatgaataatatttctgtgccgcaagaagatgattatgggtatcagtgtttggagggcaaagattgtgccagcttcttctgttgctttgaagactgcagaacaggatcttggagggaaggaaggatacacatacgcattgccaaaattgactcttattctagaatatttttcccaaccgcttttgccctgttcaacttggtttattgggttggctatctttacttataaaatctacttcataagcaaaaatcaaaagaagtctgactaaattcagtagaatcttttgtgcttcagtaacttgaagtttaaatttaaaatgcagagagaccaatggttaaaatgtgaatagtattgtaactattttaaggccttcagaagtaaataaagtagcagctttcaggctaatttacgtgaaactgattagttgcaaaatccagtaggttaaaatactcacatatttttacttaaattttctttaatttacttatatgttattataattttgaatttttaagttctatgattcatgttttaaagatggaataattttaatacatattttgtttaaatataatctataattgttttgtaatgtaagactaattactaatatttatgtagcaacttttgtgccagaaaaaagactgttaatttgttttttcttgcttttcatttgattaccctgcttgaaatacagttagttgataacataaagccatagttttcttggattttcttccaagatattgtattcccaagaagaaattgatttatttttaaactatcagttactgaagacttatgaaaaggtcaatttttacctgtcttttaatccagtccattttctgacacaatattaaacagaacgccagttgcatttactttggtgatttgcaaacttggaatgaagccaccagtcattttttaagaatgcaagatgaaaaaatcaggtaaaatctaaccattttattctctgcttcatagcatttataatgtatgatgaggttaacactgaaatattaaaatctgcaaatgcacattaatgcaaattaaatgcagagagaaatgattatttttttctttatgttttatgaaagtgttgcagtccctaaaataaaaatattgaggaacattgcttgtatttactcacgtggttaaaaaattattacctggcaaactgagttgccggtcatattgaggacaaaatcttaaatatgtgctattagcattgtttttagactagtaatatgcagaaaacagttttaggcctgcgttacatattgcctcttccagctccaaagttttggaccctgtcagttttgcaactacattatacattattataatattcttttttttttctagaaactgggggcagcctcaaaatcatgttaaagagggagttttgttagaggcatctttaatgaacatgaatgtgagtgctctctaaattcttagcatctcactggatgtaaaatctatcagttaatagttttaaaaatgtctcttttgttaagaataaatttaggcttcaatcattataatcctgtaagtagcttgacataccaattgtttataagattcatcacataaatttctggagaaccaccaggtttagcttggaaataacctttaaagattgtttctgttgccaagaccaatgaccatgatgaagagttttatgatcacagcctatcttacttaaggtttgagaggaaacctgtcacctctgcaattgttactctagtttttaatgttataattccgctgcgtggttagtgaatgtctggcatgattatacacgtgtattggaaatatctagttttttaaatttttaattaatttatttataatttactgtgtgttcccagctaactctattttttttttcacttgctcataaacttctggaaaaaaataagcatgaatcaaatggtaatgcccaatatccaccgacactgcttttcttgaatgaacagccaaactaaactttggccatctatatattcatttacagattattcatacattcattttaataacattgagtactgatggatgttttgaaagtgagcattcatttaaggataaataaaaaataaagtagtaataaagaataaaatactttactaaaatattgtatggctattttcatgtttgaagctatagcttactatcatgagacagttttgattttgggactctttcaagtgtatctgagcatgactgtattttaaaatacttaaaagtgcttgatataaatagcttttccttctgaaccacgttctatgtaaaagaaaaaaaatagctttgattttctcactggtgtttcattaacttggttttaaatgttgacaatatttacaagtggaaataaaatttgtaaatatatgaaagatgcctttccttgtatataccatcaagcaagcactttgttttcaaagcaagtggtattttgatcagttttatttaaatgtgtgatcagaaagaatggcgtacaaatcttattatttctaaaaataagaataaaaaggtaaaactacatttagacttctttctcaagaaatcaaatacagctttttttcaaagctgattcagttcatttcctgttcctctattccaagtataagtttcaccaccttgagaaataatttttttaaaaaatcttcctctttctctggggagttatataataatttattgaatttattggaacttgattttcctggatgctttcaatgtttttaatgctaacatagaccccaaaattagatataaagaattgggaaggatacctggagcacaaggaataagatcatttgtaaaaatgtttgtttatatagacctatcctctaaatatgtgacaaggatctagaaattctgagaggggaaaatgtgattttggatttacaatgacagggtaatattttatttatcttcgaattccatggacaaaattaggctcacttaaattaatttttgtaaacccaagtaagttctaaaaaaaagtaaaaaatacatagaatacttgagaatttagcagggacagggaaaaatttcccagtaagtctgaagtcttgatgtaagtgggaattagataactaattggaggcattttattttaagttaaagacagatttctttaataagtttttaaaattgatcaactttaaattaagcacagtaaatgtgtataaatatgaaggcaatcataaggattttttcacttgtgtttccatattctggcattagtatatcatcataaaatagacaatgtttttgtctcaagaacaagaataaaattgaaatctgcattcatgccaattcagcataaaaaagaataggctacagttctctcacaccaagggccccatagttataaatgtgaaattatattccaggtcaaaatttgtgaaaaatacacaaaacactttgattttacaagagaggagctttaaataagatgattttagtagattgaaataaataaccagtatttaagtaaatgtataacgaatgaataaatacatgcataatattttcaaagttctataccagtacctatttttactcttacaaaatttcctgtaaaaaaatactacatttgaaattatttcattggttttagaactggcattgaaggtacccagtagactcttaagcctttactgcttgtctcactagaaacatttatttctgacctaccaagttttcttcacatcatcaaatttattcagcttctcagtgctgtaccgtatgatggcaagacatacttggtatttccatttttgttggtcattctttattgctttttactgctaggaaggtcttgccaggcttctatacagttacaaaaaccattaccaaactttatcaaggactttccaaatggagttttcaaatactattgaccacattgctctagttaatgtaaggtcagctctgactttttgtgtttgcatttcggaagtgaggtaacctcattcaaatatatatgcagcactttctgtgtacaaagtactgttctaaatacaaaagggaatataaagatgactttcaaggaacatataatgtagtcagaaagatgagaggattagttatacaatttaaggaagggaggataactttgggaaggttttgtggaggatatgtgtttagagatgcgagctggggattcaacaggtaagagggagagagatcacaatttccaactgggtaaacagcttgaaaaaagaaacagaagcctgggcacaaatgaaaattccatattaattggaagttaagattcatatagagacaatgaaaggttaggttagaacaataaactgagaagtacgaatgtggacttcaggaggctaggggaaattacgaagtcataaaaagttcacagagatacttgagtacaaaagatacattattaaaatttctgcagaagtttcatcttatttgtgtgtgatggtttggaatataacaagccagttaggcgtataagcttatagtggctaatatgaggatgaaatccgtactcttgtgacacaagtcttcagcggagatgggggatgataggcccaaatagaaagaaaagtggcagacattaagctttgactaacagacaacataactgagagacatggtgtgttgggtggaagggatcctgtagtagatacttgcttgcatgtagatgggtacaaagacaccataaggaaattctgaatgtaatacaaaggcttatttttcctgttgatttatctttttcacacataaaagatgaagaaaaaaataatctgaaatgtaaatcctaaagtgatctgtctagattcttattttttgaaaaatgttcctcactaaaagagttttctattcaaataaccatttccagttttctaactgagacatacatacatatatatatgtataaaattatatatatatttggacaaagagaataagagaattgcaggtagaaatagtctactgtgtgtagacaaatccagaaagttgatttctgttcctcaaacaatttctgaaatatttatgtcagaataaataaaagaattgttattgttggacaatgaaacatacctggaccctttgagtgtgtgaatagtaaaggctgtgataactgaaatgcagctaagcaaaaagggctaattagaagacttttgagacatgatttacctaaatggaaatagtttggttttcaatccttcactgtaataacaattatttgcatctattaagtgtttgtagtcactttgtataataaagttttatggcttgtgattataatggcttctgttattctgctactgcctcattgttttgaggaacatttgtaattttgtggcaaaggtgtctcaatttttcagtgttctttactctcatgatccttagaacaaaaaaaataccagtaacttgttataaataaagagtcacattctcttaaa

SEQ ID NO: 136395 - DNA, 4056 bp, Homo sapiens
  Payload ID: 6694
  Gene Symbol: GABRG2
  Gene Name: gamma-aminobutyric acid (GABA) A receptor, gamma 2
  Uniprot ID: P18507
  ENST ID: ENST00000356592
  CDS Start-End: 461-1888
attttaaatacacacacccacagggctctgccccctgtaaaagaaaaaaaatcaaaacaaacaaataaataaccccaaagagatggacccaggggagaacgcgtaagtgtgaggggcatgagtatacacgagtgtgcgtgtctttccctctcccttatttgtctccgtatgagtctctccttgtaccctccccctgcctcgatgatattactcccccagacttggaagccgctgccagagtgacgctttgatggtatctgcaagcgtttttgctgatcttatctctgccccctgaatattaattccctaatctggtagcaatccatctccccagtgaaggacctactagaggcaggtggggggagccaccatcagatcataagcataagaataatacaaaggggagggattcttctgcaaccaagaggcaagaggcgagagaaggaaaaaaaaaaaagcgatgagttcgccaaatatatggagcacaggaagctcagtctactcgactcctgtattttcacagaaaatgacggtgtggattctgctcctgctgtcgctctaccctggcttcactagccagaaatctgatgatgactatgaagattatgcttctaacaaaacatgggtcttgactccaaaagttcctgagggtgatgtcactgtcatcttaaacaacctgctggaaggatatgacaataaacttcggcctgatataggagtgaagccaacgttaattcacacagacatgtatgtgaatagcattggtccagtgaacgctatcaatatggaatacactattgatatattttttgcgcaaacgtggtatgacagacgtttgaaatttaacagcaccattaaagtcctccgattgaacagcaacatggtggggaaaatctggattccagacactttcttcagaaattccaaaaaagctgatgcacactggatcaccacccccaacaggatgctgagaatttggaatgatggtcgagtgctctacaccctaaggttgacaattgatgctgagtgccaattacaattgcacaactttccaatggatgaacactcctgccccttggagttctccagttatggctatccacgtgaagaaattgtttatcaatggaagcgaagttctgttgaagtgggcgacacaagatcctggaggctttatcaattctcatttgttggtctaagaaataccaccgaagtagtgaagacaacttccggagattatgtggtcatgtctgtctactttgatctgagcagaagaatgggatactttaccatccagacctatatcccctgcacactcattgtcgtcctatcctgggtgtctttctggatcaataaggatgctgttccagccagaacatctttaggtatcaccactgtcctgacaatgaccaccctcagcaccattgcccggaaatcgctccccaaggtctcctatgtcacagcgatggatctctttgtatctgtttgtttcatctttgtcttctctgctctggtggagtatggcaccttgcattattttgtcagcaaccggaaaccaagcaaggacaaagataaaaagaagaaaaaccctcttcttcggatgttttccttcaaggcccctaccattgatatccgcccaagatcagcaaccattcaaatgaataatgctacacaccttcaagagagagatgaagagtacggctatgagtgtctggacggcaaggactgtgccagttttttctgctgttttgaagattgtcgaacaggagcttggagacatgggaggatacatatccgcattgccaaaatggactcctatgctcggatcttcttccccactgccttctgcctgtttaatctggtctattgggtctcctacctctacctgtgaggaggtatgggttttactgatatggttcttattcactgagtctcatggagagatgtctgttctaagtccacttaaataatcctctatgtggttgataatgatctgaatctgtttctatgtccaaacctggtaaattttataatgtcatattgtttgtgcccagccctcctttggttagtgtactttgaacttcgatgtttgctgtgtttcaaacctgcaaggcaaagtaaaattagagcaagaacattcaaaccaaataagatatttttcagctacagcaaataaaacagtgaaagccctgactatttacagtagtggtatccttactagattcataatgcaattagatagaaaaggtccaaaactgtaccctatgttcactccgggtcaagttgtgataaatttgatcccaatagaatacctccctcatttaagaaaaatcataactcactttaaatatgaaagcctagtccagaaatctattacacctttatctcaagataggaagaaaatttcctccacattcatgtacaatgatgtaaatatttcaataacttagaatgcttcaagtttagtgcatgcatctctttagatccaaaataaatggactgaagttatcatcctattgtcttttattttgtgtccttgggctataaaagattcctgaatgtaattataaggatttgggtttggaaatggagggaggaattttcattgccttctccctcatgcatgaagattcgaacagcttattttttccttgtatgacatattacaacactttaagtaaaatatagactggataatcaacatttgccacctctaaatatgcccaatttcataactagagtataaagtaattgtatgtgcttgccgctatttttttcttccttttaggatgatagatcataacagaacttattctccatctcaagatctgcttctagtgattgtgagtgccttgtgggcagaatccttgtcatttcctctttgggtctgtagcaccttgcatagtgcctggcatatagttggtgctcaataaatatggtttgaagtgaattgccctcacatgcttctggcaaatctctgtgctggcctgaaaccagtgactcatcttctcacataggtgttgtcaagtgatatttgattttgtaaaaataaccagtaggatccaaagaactttagctatttatgttcatcttcaaaaaattattttaggcaaagtccatactccttttaaaacaatatttatgtcctatgtttgtgtatagacatgactctactagggcataattagagtttgtgtattatttttccaggtttggggatgagtcagtccttgcccatccacaattttgtttgtgaacttataacaggaataagcaaaattcatacctgactagtgttcagaatgtagcattctgtgcgaaaaagtattgaagattagcttttaaaaactgaaaaaaaaaaatgaatgactcacatagaggttgagccaatgactgtggcctcattagattacattgtagttaaacaaagcaatttctccagacttaaaacatgatgagttgagctctatcttcatgtactcatcctgaatccttatttttctaaaatagcaccctttgttaattatttttatggaaattattactctgtcataattaaatcatagctagtataactttacagataacctaaaaagaatagaaaagaagagagagtggctttgtcagtataaaaccatgtaaagtcatcatcaagtcatctggatgaatcttgaaacacatttagctgccagttttacaaacctttaatatatcagtgctccagtatataacctcaaacaaatgtaaatagaacgaattattttcttgttttgaattgtcaatatattaaatgttgactctttgggagagttgttggcaagtttcaatggtgagaaacattattgtcaacttgaaatgtgttctgtaatggggacactacaaaaagctagctttccaatgtgtgcatagtattggcaatatgaatatatattatatataatctaatacttattataagctgctccctgtctatgtatttggaaaccttttcacaaagggaattgcctaacatgtggacttttacaataaaaatgctgcattctaatccatggtggcatc

SEQ ID NO: 136396 - DNA, 1739 bp, Homo sapiens
  Payload ID: 6694
  Gene Symbol: GABRG2
  Gene Name: gamma-aminobutyric acid (GABA) A receptor, gamma 2
  Uniprot ID: P18507
  ENST ID: ENST00000361925
  CDS Start-End: 221-1624
tgacgctttgatggtatctgcaagcgtttttgctgatcttatctctgccccctgaatattaattccctaatctggtagcaatccatctccccagtgaaggacctactagaggcaggtggggggagccaccatcagatcataagcataagaataatacaaaggggagggattcttctgcaaccaagaggcaagaggcgagagaaggaaaaaaaaaaaagcgatgagttcgccaaatatatggagcacaggaagctcagtctactcgactcctgtattttcacagaaaatgacggtgtggattctgctcctgctgtcgctctaccctggcttcactagccagaaatctgatgatgactatgaagattatgcttctaacaaaacatgggtcttgactccaaaagttcctgagggtgatgtcactgtcatcttaaacaacctgctggaaggatatgacaataaacttcggcctgatataggagtgaagccaacgttaattcacacagacatgtatgtgaatagcattggtccagtgaacgctatcaatatggaatacactattgatatattttttgcgcaaacgtggtatgacagacgtttgaaatttaacagcaccattaaagtcctccgattgaacagcaacatggtggggaaaatctggattccagacactttcttcagaaattccaaaaaagctgatgcacactggatcaccacccccaacaggatgctgagaatttggaatgatggtcgagtgctctacaccctaaggttgacaattgatgctgagtgccaattacaattgcacaactttccaatggatgaacactcctgccccttggagttctccagttatggctatccacgtgaagaaattgtttatcaatggaagcgaagttctgttgaagtgggcgacacaagatcctggaggctttatcaattctcatttgttggtctaagaaataccaccgaagtagtgaagacaacttccggagattatgtggtcatgtctgtctactttgatctgagcagaagaatgggatactttaccatccagacctatatcccctgcacactcattgtcgtcctatcctgggtgtctttctggatcaataaggatgctgttccagccagaacatctttaggtatcaccactgtcctgacaatgaccaccctcagcaccattgcccggaaatcgctccccaaggtctcctatgtcacagcgatggatctctttgtatctgtttgtttcatctttgtcttctctgctctggtggagtatggcaccttgcattattttgtcagcaaccggaaaccaagcaaggacaaagataaaaagaagaaaaaccctgcccctaccattgatatccgcccaagatcagcaaccattcaaatgaataatgctacacaccttcaagagagagatgaagagtacggctatgagtgtctggacggcaaggactgtgccagttttttctgctgttttgaagattgtcgaacaggagcttggagacatgggaggatacatatccgcattgccaaaatggactcctatgctcggatcttcttccccactgccttctgcctgtttaatctggtctattgggtctcctacctctacctgtgaggaggtatgggttttactgatatggttcttattcactgagtctcatggagagatgtctgttctaagtccacttaaataatcctctatgtggttgataatgatctgaatctgtttc

SEQ ID NO: 136397 - DNA, 3927 bp, Homo sapiens
  Payload ID: 6694
  Gene Symbol: GABRG2
  Gene Name: gamma-aminobutyric acid (GABA) A receptor, gamma 2
  Uniprot ID: P18507
  ENST ID: ENST00000414552
  CDS Start-End: 226-1773
cagagtgacgctttgatggtatctgcaagcgtttttgctgatcttatctctgccccctgaatattaattccctaatctggtagcaatccatctccccagtgaaggacctactagaggcaggtggggggagccaccatcagatcataagcataagaataatacaaaggggagggattcttctgcaaccaagaggcaagaggcgagagaaggaaaaaaaaaaaagcgatgagttcgccaaatatatggagcacaggaagctcagtctactcgactcctgtattttcacagaaaatgacggtgtggattctgctcctgctgtcgctctaccctggcttcactagccagaaatctgatgatgactatgaagattatgcttctaacaaaacatgggtcttgactccaaaagttcctgagggtgatgtcactgtcatcttaaacaacctgctggaaggatatgacaataaacttcggcctgatataggagtgaagccaacgttaattcacacagacatgtatgtgaatagcattggtccagtgaacgctatcaatatggaatacactattgatatattttttgcgcaaacgtggtatgacagacgtttgaaatttaacagcaccattaaagtcctccgattgaacagcaacatggtggggaaaatctggattccagacactttcttcagaaattccaaaaaagctgatgcacactggatcaccacccccaacaggatgctgagaatttggaatgatggtcgagtgctctacaccctaaggttgacaattgatgctgagtgccaattacaattgcacaactttccaatggatgaacactcctgccccttggagttctccagttggtctcgttctattgcccaggctggaatgtgcagtggtgtgatctcggctcactacagccttcgcttctggggctcaactgatcctcccaccttggcctccagagtagctgggatttcagatggctatccacgtgaagaaattgtttatcaatggaagcgaagttctgttgaagtgggcgacacaagatcctggaggctttatcaattctcatttgttggtctaagaaataccaccgaagtagtgaagacaacttccggagattatgtggtcatgtctgtctactttgatctgagcagaagaatgggatactttaccatccagacctatatcccctgcacactcattgtcgtcctatcctgggtgtctttctggatcaataaggatgctgttccagccagaacatctttaggtatcaccactgtcctgacaatgaccaccctcagcaccattgcccggaaatcgctccccaaggtctcctatgtcacagcgatggatctctttgtatctgtttgtttcatctttgtcttctctgctctggtggagtatggcaccttgcattattttgtcagcaaccggaaaccaagcaaggacaaagataaaaagaagaaaaaccctcttcttcggatgttttccttcaaggcccctaccattgatatccgcccaagatcagcaaccattcaaatgaataatgctacacaccttcaagagagagatgaagagtacggctatgagtgtctggacggcaaggactgtgccagttttttctgctgttttgaagattgtcgaacaggagcttggagacatgggaggatacatatccgcattgccaaaatggactcctatgctcggatcttcttccccactgccttctgcctgtttaatctggtctattgggtctcctacctctacctgtgaggaggtatgggttttactgatatggttcttattcactgagtctcatggagagatgtctgttctaagtccacttaaataatcctctatgtggttgataatgatctgaatctgtttctatgtccaaacctggtaaattttataatgtcatattgtttgtgcccagccctcctttggttagtgtactttgaacttcgatgtttgctgtgtttcaaacctgcaaggcaaagtaaaattagagcaagaacattcaaaccaaataagatatttttcagctacagcaaataaaacagtgaaagccctgactatttacagtagtggtatccttactagattcataatgcaattagatagaaaaggtccaaaactgtaccctatgttcactccgggtcaagttgtgataaatttgatcccaatagaatacctccctcatttaagaaaaatcataactcactttaaatatgaaagcctagtccagaaatctattacacctttatctcaagataggaagaaaatttcctccacattcatgtacaatgatgtaaatatttcaataacttagaatgcttcaagtttagtgcatgcatctctttagatccaaaataaatggactgaagttatcatcctattgtcttttattttgtgtccttgggctataaaagattcctgaatgtaattataaggatttgggtttggaaatggagggaggaattttcattgccttctccctcatgcatgaagattcgaacagcttattttttccttgtatgacatattacaacactttaagtaaaatatagactggataatcaacatttgccacctctaaatatgcccaatttcataactagagtataaagtaattgtatgtgcttgccgctatttttttcttccttttaggatgatagatcataacagaacttattctccatctcaagatctgcttctagtgattgtgagtgccttgtgggcagaatccttgtcatttcctctttgggtctgtagcaccttgcatagtgcctggcatatagttggtgctcaataaatatggtttgaagtgaattgccctcacatgcttctggcaaatctctgtgctggcctgaaaccagtgactcatcttctcacataggtgttgtcaagtgatatttgattttgtaaaaataaccagtaggatccaaagaactttagctatttatgttcatcttcaaaaaattattttaggcaaagtccatactccttttaaaacaatatttatgtcctatgtttgtgtatagacatgactctactagggcataattagagtttgtgtattatttttccaggtttggggatgagtcagtccttgcccatccacaattttgtttgtgaacttataacaggaataagcaaaattcatacctgactagtgttcagaatgtagcattctgtgcgaaaaagtattgaagattagcttttaaaaactgaaaaaaaaaaatgaatgactcacatagaggttgagccaatgactgtggcctcattagattacattgtagttaaacaaagcaatttctccagacttaaaacatgatgagttgagctctatcttcatgtactcatcctgaatccttatttttctaaaatagcaccctttgttaattatttttatggaaattattactctgtcataattaaatcatagctagtataactttacagataacctaaaaagaatagaaaagaagagagagtggctttgtcagtataaaaccatgtaaagtcatcatcaagtcatctggatgaatcttgaaacacatttagctgccagttttacaaacctttaatatatcagtgctccagtatataacctcaaacaaatgtaaatagaacgaattattttcttgttttgaattgtcaatatattaaatgttgactctttgggagagttgttggcaagtttcaatggtgagaaacattattgtcaacttgaaatgtgttctgtaatggggacactacaaaaagctagctttccaatgtgtgcatagtattggcaatatgaatatatattatatataatctaatacttattataagctgctccctgtctatgtatttggaaaccttttcacaaagggaattgcctaacatgtggacttttacaataaaaatgctgcattctaa

SEQ ID NO: 136398 - DNA, 1961 bp, Homo sapiens
  Payload ID: 6694
  Gene Symbol: GABRG2
  Gene Name: gamma-aminobutyric acid (GABA) A receptor, gamma 2
  ENST ID: ENST00000523372
  CDS Start-End: 1-156
atgagttcgccaaatatatggagcacaggaagctcagtctactcgactcctgtattttcacagaaaatgacggtgtggattctgctcctgctgtcgctctaccctggaagaaaactttcttcttacccacataaattgagatttgaaaatgaatgaagaaaaacattgatagaaataacctcaatatcaagttggagatcctgacagagctaagtcatgttctacattcttcactagccagaaatctgatgatgactatgaagattatgcttctaacaaaacatgggtcttgactccaaaagttcctgagggtgatgtcactgtcatcttaaacaacctgctggaaggatatgacaataaacttcggcctgatataggagtgaagccaacgttaattcacacagacatgtatgtgaatagcattggtccagtgaacgctatcaatatggaatacactattgatatattttttgcgcaaacgtggtatgacagacgtttgaaatttaacagcaccattaaagtcctccgattgaacagcaacatggtggggaaaatctggattccagacactttcttcagaaattccaaaaaagctgatgcacactggatcaccacccccaacaggatgctgagaatttggaatgatggtcgagtgctctacaccctaaggttgacaattgatgctgagtgccaattacaattgcacaactttccaatggatgaacactcctgccccttggagttctccagttatggctatccacgtgaagaaattgtttatcaatggaagcgaagttctgttgaagtgggcgacacaagatcctggaggctttatcaattctcatttgttggtctaagaaataccaccgaagtagtgaagacaacttccggagattatgtggtcatgtctgtctactttgatctgagcagaagaatgggatactttaccatccagacctatatcccctgcacactcattgtcgtcctatcctgggtgtctttctggatcaataaggatgctgttccagccagaacatctttaggtatcaccactgtcctgacaatgaccaccctcagcaccattgcccggaaatcgctccccaaggtctcctatgtcacagcgatggatctctttgtatctgtttgtttcatctttgtcttctctgctctggtggagtatggcaccttgcattattttgtcagcaaccggaaaccaagcaaggacaaagataaaaagaagaaaaaccctgcccctaccattgatatccgcccaagatcagcaaccattcaaatgaataatgctacacaccttcaagagagagatgaagagtacggctatgagtgtctggacggcaaggactgtgccagttttttctgctgttttgaagattgtcgaacaggagcttggagacatgggaggatacatatccgcattgccaaaatggactcctatgctcggatcttcttccccactgccttctgcctgtttaatctggtctattgggtctcctacctctacctgtgaggaggtatgggttttactgatatggttcttattcactgagtctcatggagagatgtctgttctaagtccacttaaataatcctctatgtggttgataatgatctgaatctgtttctatgtccaaacctggtaaattttataatgtcatattgtttgtgcccagccctcctttggttagtgtactttgaacttcgatgtttgctgtgtttcaaacctgcaaggcaaagtaaaattagagcaagaacattcaaaccaaataagatatttttcagctacagcaaataaaacagtgaaagccctgactatttacagtagtggtatccttactagattcataatgcaattagatagaaaaggtccaaaactgtaccctatgttcactccgggtcaagttgtgataaatttgatcccaatagaatacctccctcatttaaga

SEQ ID NO: 136399 - DNA, 843 bp, Homo sapiens
  Payload ID: 6694
  Gene Symbol: GABRG2
  Gene Name: gamma-aminobutyric acid (GABA) A receptor, gamma 2
  ENST ID: ENST00000522053
  CDS Start-End: 177-843
aacagccagagagtaagtagaagctcatgaggctgaatgcttaggcctagcactggcacactcgcttttgtatatatattattagccgaagccaatcagatgatccagcccaaagtcgagaggcagaggaatagccttatccaggagaagtgaagccaacgttaattcacacagacatgtatgtgaatagcattggtccagtgaacgctatcaatatggaatacactattgatatattttttgcgcaaacgtggtatgacagacgtttgaaatttaacagcaccattaaagtcctccgattgaacagcaacatggtggggaaaatctggattccagacactttcttcagaaattccaaaaaagctgatgcacactggatcaccacccccaacaggatgctgagaatttggaatgatggtcgagtgctctacaccctaaggttgacaattgatgctgagtgccaattacaattgcacaactttccaatggatgaacactcctgccccttggagttctccagttatggctatccacgtgaagaaattgtttatcaatggaagcgaagttctgttgaagtgggcgacacaagatcctggaggctttatcaattctcatttgttggtctaagaaataccaccgaagtagtgaagacaacttccggagattatgtggtcatgtctgtctactttgatctgagcagaagaatgggatactttaccatccagacctatatcccctgcacactcattgtcgtcctatcctgggtgtctttctggatcaataaggatgctgttccagccagaacatctttaggtatcaccactgtcctgacaatgaccaccc

SEQ ID NO: 136400 - DNA, 2145 bp, Homo sapiens
  Payload ID: 6694
  Gene Symbol: GABRG2
  Gene Name: gamma-aminobutyric acid (GABA) A receptor, gamma 2
  ENST ID: ENST00000522990
  CDS Start-End: 127-462
tgaaggacctactagaggcaggtggggggagccaccatcagatcataagcataagaataatacaaaggggagggattcttctgcaaccaagaggcaagaggcgagagaaggaaaaaaaaaaaagcgatgagttcgccaaatatatggagcacaggaagctcagtctactcgactcctgtattttcacagaaaatgacggtgtggattctgctcctgctgtcgctctaccctggcttcactagccagaaatctgatgatgactatgaagattatgcttctaacaaaacatgggtcttgactccaaaagttcctgagggtgatgtcactgtcatcttaaacaacctgctggaaggatatgacaataaacttcggcctgatataggagtgaagccaacgttaattcacacagacatgtatgtgaatagcattggtccagtgaacgctatcaatatgcaccattaaagtcctccgattgaacagcaacatggtggggaaaatctggattccagacactttcttcagaaattccaaaaaagctgatgcacactggatcaccacccccaacaggatgctgagaatttggaatgatggtcgagtgctctacaccctaaggttgacaattgatgctgagtgccaattacaattgcacaactttccaatggatgaacactcctgccccttggagttctccagttatggctatccacgtgaagaaattgtttatcaatggaagcgaagttctgttgaagtgggcgacacaagatcctggaggctttatcaattctcatttgttggtctaagaaataccaccgaagtagtgaagacaacttccggagattatgtggtcatgtctgtctactttgatctgagcagaagaatgggatactttaccatccagacctatatcccctgcacactcattgtcgtcctatcctgggtgtctttctggatcaataaggatgctgttccagccagaacatctttaggtatcaccactgtcctgacaatgaccaccctcagcaccattgcccggaaatcgctccccaaggtctcctatgtcacagcgatggatctctttgtatctgtttgtttcatctttgtcttctctgctctggtggagtatggcaccttgcattattttgtcagcaaccggaaaccaagcaaggacaaagataaaaagaagaaaaaccctgcccctaccattgatatccgcccaagatcagcaaccattcaaatgaataatgctacacaccttcaagagagagatgaagagtacggctatgagtgtctggacggcaaggactgtgccagttttttctgctgttttgaagattgtcgaacaggagcttggagacatgggaggatacatatccgcattgccaaaatggactcctatgctcggatcttcttccccactgccttctgcctgtttaatctggtctattgggtctcctacctctacctgtgaggaggtatgggttttactgatatggttcttattcactgagtctcatggagagatgtctgttctaagtccacttaaataatcctctatgtggttgataatgatctgaatctgtttctatgtccaaacctggtaaattttataatgtcatattgtttgtgcccagccctcctttggttagtgtactttgaacttcgatgtttgctgtgtttcaaacctgcaaggcaaagtaaaattagagcaagaacattcaaaccaaataagatatttttcagctacagcaaataaaacagtgaaagccctgactatttacagtagtggtatccttactagattcataatgcaattagatagaaaaggtccaaaactgtaccctatgttcactccgggtcaagttgtgataaatttgatcccaatagaatacctccctcatttaagaaaaatcataactcactttaaatatgaaagcctagtccagaaatctattacacctttatctcaagataggaagaaaatttcctccacattcatgtacaatgatgtaaatatttcaataacttagaatgcttcaagtttagtgcatgcatctctttagatccaaaataaatggactgaagttatcatcctattgtcttttattttgtgtccttgggctataaaagattcctgaatgtaattat

SEQ ID NO: 136401 - DNA, 1235 bp, Homo sapiens
  Payload ID: 6695
  Gene Symbol: GABRG3
  Gene Name: gamma-aminobutyric acid (GABA) A receptor, gamma 3
  ENST ID: ENST00000333743
  CDS Start-End: 269-1135
ggaataccaaattgacatattttttgctcagacctggacagatagtcgccttcgattcaacagcacaatgaaaattcttactctgaacagcaacatggtggggttaatctggatcccagacaccatcttccgcaattctaaaaccgcagaggctcactggatcaccacacccaatcagctcctccggatttggaatgacgggaaaatcctttacactttgaggctcaccatcaatgctgagtgccagctgcagctgcacaacttccccatggacgaacactcctgcccgctgattttctccagctatggctatcccaaagaagaaatgatttatagatggagaaaaaattcagtggaggcagctgaccagaaatcatggcggctttatcagtttgacttcatgggcctcagaaacaccacagaaatcgtgacaacgtctgcaggtgattatgttgtcatgactatatattttgaattgagtagaagaatgggatacttcaccattcagacatacattccctgtatactgactgtggttttatcctgggtgtcattttggatcaaaaaagatgctacgccagcaagaacagcattaggcatcaccacggtgctgaccatgaccaccctgagcaccatcgccaggaagtccttgccacgcgtgtcctacgtgaccgccatggacctttttgtgaccgtgtgcttcctgtttgtcttcgccgcgctgatggagtatgccaccctcaactactattccagctgtagaaaaccaaccaccacgaagaagacaacatcgttactacatccagattcctcaagatggattcctgagcgaataagcctacaagccccttccaactattccctcctggacatgaggccaccaccaactgcgatgatcactttaaacaattccgtttactggcaggaatttgaagatacctgtgtctatgagtgtctggatggcaaagactgtcagagcttcttctgctgctatgaagaatgtaaatcaggatcctggaggaaagggcgtattcacatagacatcttggagctggactcgtactcccgggtctttttccccacgtccttcctgctctttaacctggtctactgggttggatacctgtatctctaagtgttgctcagagtgaagagtgaagagcatttggtacacacttgaccttctgtcgtccccagaccagtagtgaccaatcgggagtagcaaggaaggacac

SEQ ID NO: 136402 - DNA, 717 bp, Homo sapiens
  Payload ID: 6695
  Gene Symbol: GABRG3
  Gene Name: gamma-aminobutyric acid (GABA) A receptor, gamma 3
  ENST ID: ENST00000451330
  CDS Start-End: 1-509
gtgattatgttgtcatgactatatattttgaattgagtagaagaatgggatacttcaccattcagacatacattccctgtatactgactgtggttttatcctgggtgtcattttggatcaaaaaagatgctacgccagcaagaacagcattaggcatcaccacggtgctgaccatgaccaccctgagcaccatcgccaggaagtccttgccacgcgtgtcctacgtgaccgccatggacctttttgtgaccgtgtgcttcctgtttgtcttcgccgcgctgatggagtatgccaccctcaactactattccagctgtagaaaaccaaccaccacgaagaagacaacatcgttactacatccagattcctcaagatggattcctgagcgaataagcctacaagccccttccaagccatcctgctgccctgcctgtggcctccaagggttgccctttagatctctggtgagccatccccgcatcagcagagccttctgcctccccgtctaagtcagaatcttcctgtgtggctgccttaccttgcaaatggccagacttctcctctgtgtctccggtagctcccagttccatccacatagcaagggactacacagaggcatgaagcaacgagtggatgaatgtctggctgatcactgtcaaagcacacgtgtaggaaacctttattgcaattgtttgttaataaaggcagatctttcaa

SEQ ID NO: 136403 - DNA, 342 bp, Homo sapiens
  Payload ID: 6695
  Gene Symbol: GABRG3
  Gene Name: gamma-aminobutyric acid (GABA) A receptor, gamma 3
  ENST ID: ENST00000557596
  CDS Start-End: 1-116
atgctgagtgccagctgcagctgcacaacttccccatggacgaacactcctgcccgctgattttctccagctccaccatcttggccttcagattgtctcttcatgcatatcgctgacgtttaaaagtttcaagcttgatggtgtcttacagatcacctcctcggagactcgcttccattcgtggggaaatgaaggctcagagaggttgcatttgcctccatggggcccacagagctggctggtggttgctgtgaattgggaaatcacattttctgacttctcatcgcgtgttctcactactcaacactgggaggaaccattgaattaaaagttcaaaatcaa

SEQ ID NO: 136404 - DNA, 774 bp, Homo sapiens
  Payload ID: 6695
  Gene Symbol: GABRG3
  Gene Name: gamma-aminobutyric acid (GABA) A receptor, gamma 3
  ENST ID: ENST00000554696
  CDS Start-End: 1-774
gaagctggggtgaggggtacagaagaggatggctgctgggtatgcaacctagagtcagtcagtcagtcacaaacatggcaggaaaataagctgtctgaataccaaattgacatattttttgctcagacctggacagatagtcgccttcgattcaacagcacaatgaaaattcttactctgaacagcaacatggtggggttaatctggatcccagacaccatcttccgcaattctaaaaccgcagaggctcactggatcaccacacccaatcagctcctccggatttggaatgacgggaaaatcctttacactttgaggctcaccatcaatgctgagtgccagctgcagctgcacaacttccccatggacgaacactcctgcccgctgattttctccagctatggctatcccaaagaagaaatgatttatagatggagaaaaaattcagtggaggcagctgaccagaaatcatggcggctttatcagtttgacttcatgggcctcagaaacaccacagaaatcgtgacaacgtctgcaggtgattatgttgtcatgactatatattttgaattgagtagaagaatgggatacttcaccattcagacatacattccctgtatactgactgtggttttatcctgggtgtcattttggatcaaaaaagatgctacgccagcaagaacagcattaggcatcaccacggtgctgaccatgaccaccctgagcaccatcgccaggaagtccttgccacgcgtgtcctacgtgaccgccatg

SEQ ID NO: 136405 - DNA, 1405 bp, Homo sapiens
  Payload ID: 6695
  Gene Symbol: GABRG3
  Gene Name: gamma-aminobutyric acid (GABA) A receptor, gamma 3
  Uniprot ID: Q99928
  ENST ID: ENST00000555083
  CDS Start-End: 144-905
agagtagatacctgtcccgcccgccgcggccagcagcctcggaggaagccagggcaaagagggccggcggagaccaggtccgcgccggaggaagccgcgcccggccgaggccccggaccctgcgccccgagctccacggcaccatggccccgaagctgctgctcctcctctgcctgttctcgggcttgcacgcgcggtccagaaaggtggaagaggatgaatatgaagattcatcatcaaaccaaaagtgggtcttggctccaaaatcccaagacaccgacgtgactcttattctcaacaagttgctaagagaatatgataaaaagctgaggccagatattggaataaaaccgaccgtaattgacgttgacatttatgttaacagcattggtcctgtgtcatcaataaacatggaataccaaattgacatattttttgctcagacctggacagatagtcgccttcgattcaacagcacaatgaaaattcttactctgaacagcaacatggtggggttaatctggatcccagacaccatcttccgcaattctaaaaccgcagaggctcactggatcaccacacccaatcagctcctccggatttggaatgacgggaaaatcctttacactttgaggctcaccatcaatgctgagtgccagctgcagctgcacaacttccccatggacgaacactcctgcccgctgattttctccagctatggctatcccaaagaagaaatgatttatagatggagaaaaaattcagtggaggcagctgaccagaaatcatggcggctttatcagtttgacttcatgggcctcagaaacaccacagaaatcgtgacaacgtctgcaggtaggaatttactgaaagaggcacagctctcaaaagccagagaggcctaaggccatatgtagtcatatccttaatgtacaagccttttgggcaaccatgatacataagtgatatttgagacaaaacaagtgattcaaagtgaaactatgttttcatgttttaattggtatgggagagggatgttagaaataattcatatttttgaatccaggctgtgtttgcataatgtctataaacctagctataaacttaacctaactcattactgaccatatttacataaaccaattttgctgatggggagagttctgcaaatttccacgtacataagaagaatcaaatattattgagaatccacacataaaagaagctggtgtgatatgtcctttgagtttcaattgcttttatttactctaagttttatctttaactttgagtttctttttcaatgattgaaagtaattacctaccaatttgattttatgaagtgatcattatatgcatattcaaaatcctgtaattaaataaaaagagttgttctgcctatgaa

SEQ ID NO: 136406 - DNA, 10768 bp, Homo sapiens
  Payload ID: 6695
  Gene Symbol: GABRG3
  Gene Name: gamma-aminobutyric acid (GABA) A receptor, gamma 3
  Uniprot ID: Q99928
  ENST ID: ENST00000615808
  CDS Start-End: 255-1658
gccgcccggttgcgcggaccggcgctagtgcgcgggtgggggcggcgcgccgcggtggcccggcgtcccgtgtgcgtccagtgtgcgccccgcgggggcgcggccagcgccagagtagatacctgtcccgcccgccgcggccagcagcctcggaggaagccagggcaaagagggccggcggagaccaggtccgcgccggaggaagccgcgcccggccgaggccccggaccctgcgccccgagctccacggcaccatggccccgaagctgctgctcctcctctgcctgttctcgggcttgcacgcgcggtccagaaaggtggaagaggatgaatatgaagattcatcatcaaaccaaaagtgggtcttggctccaaaatcccaagacaccgacgtgactcttattctcaacaagttgctaagagaatatgataaaaagctgaggccagatattggaataaaaccgaccgtaattgacgttgacatttatgttaacagcattggtcctgtgtcatcaataaacatggaataccaaattgacatattttttgctcagacctggacagatagtcgccttcgattcaacagcacaatgaaaattcttactctgaacagcaacatggtggggttaatctggatcccagacaccatcttccgcaattctaaaaccgcagaggctcactggatcaccacacccaatcagctcctccggatttggaatgacgggaaaatcctttacactttgaggctcaccatcaatgctgagtgccagctgcagctgcacaacttccccatggacgaacactcctgcccgctgattttctccagctatggctatcccaaagaagaaatgatttatagatggagaaaaaattcagtggaggcagctgaccagaaatcatggcggctttatcagtttgacttcatgggcctcagaaacaccacagaaatcgtgacaacgtctgcaggtgattatgttgtcatgactatatattttgaattgagtagaagaatgggatacttcaccattcagacatacattccctgtatactgactgtggttttatcctgggtgtcattttggatcaaaaaagatgctacgccagcaagaacagcattaggcatcaccacggtgctgaccatgaccaccctgagcaccatcgccaggaagtccttgccacgcgtgtcctacgtgaccgccatggacctttttgtgaccgtgtgcttcctgtttgtcttcgccgcgctgatggagtatgccaccctcaactactattccagctgtagaaaaccaaccaccacgaagaagacaacatcgttactacatccagattcctcaagatggattcctgagcgaataagcctacaagccccttccaactattccctcctggacatgaggccaccaccaactgcgatgatcactttaaacaattccgtttactggcaggaatttgaagatacctgtgtctatgagtgtctggatggcaaagactgtcagagcttcttctgctgctatgaagaatgtaaatcaggatcctggaggaaagggcgtattcacatagacatcttggagctggactcgtactcccgggtctttttccccacgtccttcctgctctttaacctggtctactgggttggatacctgtatctctaagtgttgctcagagtgaagagtgaagagcatttggtacacacttgaccttctgtcgtccccagaccagtagtgaccaatcgggagtagcaaggaaggacactgcccagtgtatcttgttataaatgacctttcagcaacacaggaagtacccagcaaaggtttctattatgtattttacacacacacatacatacacacacacagctaattgagttttaaagtaatattcttgctaatccctactgaattgtagcttggtgttgtttctgaatggtttttggatattggaagcagccgctgattacccttgcaaagaaatctgtaaaatgtgcacgtgaatgtctgagatgctctctcaggcctctagtccttctgtatctttcctttgcagccctgggtgtagtagcactcaggagtgttgaatcacccctggccgagacccactcctgctggctcagcctgggcatgtgtgtgctccagtgtgaacagcagtgggttccaaccccagtctcctttctctgtggcctctctggctccagcaccatcatcgttagctggcactcctttacctaataacctcgttctaggcctggggagagtacactcgcattgtctacggtttccattggaggagaaaataagattttcaaaatgctcatgttgttggggtcaaagatgattatctctgaacatcagaaggttattactttattccaacttactgagagtcaacaatatttgaactttgggttcttggactagttcaacagcatttcaccttaagagctgtttttcactagaccaacgctcaaccctcgagtatgtgtccagcttatgttatattattatgggttcggtaattgtcattttgcaaagaaaggtatacagtgaacacaacctgttatcttgaagacatacaccggaatgtgaaagacatgtagataaaattttatttttattttatttttttgagacagagtcatgctctgtcacctggccaggctggagtgcagtggcacaatcttagctcactgcaacctctgcctcccatgttcaagcgattttcctgcctcagtttcccaagtggctgggactacaggtgtgcgctaccacacccggctaatttttgtatttttgttttttgttttttgggtttttttagtagagacggggtttcaccatgttggcctggctggtctcgaactcctgacctcaggtgatctgcccgcctcagcctcccaaagtgctaggattacaggcatgagccaccatgcccggccaaaattaaaaaaaaaaaattagtgaatattaattttcaactcaaaccaactttagatgcaaaaaaatgggcaatggtgatcatcaagtacatattttgatgaacaagattattttatactttgaaatatggatacatagcaaaatcccaaagaaaaaatatccccccaaatcaatactcttttgatatttttataatacaaaaccaacttgctgcttgctgttagttctttgttataactggatgccaatgtgaactgcagaagactgttttgaaacttctcctcaccaataggcaaaacacaagtcctaccagttagttaataatgctttggcattgttaaaatttgaaaccagaatctctgtgcttctcatctttctcacatagaaaactgaattaatttgacctagaaaccgtaatttttaaaattatctattgtgcataccataattacccagaaacgtaaaatattttgcagagaaagtatagaaaagtatcaatttcacacaatgtcctggatgtataccagacacagaagaggatgggagcagaagaggccagaaaaagtgaaattagattcatctgcttattcctattaagattgttgcatattaaacggatgcaaagatatagatatgtctgaatttccaaagatggagtctatacagcgtgagacattcaaacccattgtttctctccctgtcaactctctgtcttttggtttggtagttgctacataatccacaagccaattggcttcagtttagcaaattcagttttaaaaataaaagagtatttgtggagaaacaggttgaaaatattgtcttagatgcaatgtctcctctattggagaatttcacactctggtactctagttctgtctctcatgcataagcaacccccgccttggcagaagtattctgcaaggaccctgaccaaaggaatccaagtcacaccacagcactgagcgccaagggaaggtggcccaagggcagtcttaagacacaatgtcaaacgttatgaatgggtaatttctaacaagctgaagaactgcaacctgctacattgtaaacgaagttctggagagaactgaattttctagaaaaattcttattgggaggaaaataacctaaaacaactttttataacatggatttgtttgattttaccttaaaagaattttactgatgccttgtgtttcaaaaccactcaacatttggatattgttagcaaccctcctgaaattttacatgtaggataaatacaccaataacctcagttttctgaatccagccattctcttcttcccaacctcagcagccctcctgatcaaaacagatgagttcagcgctccttttctaggaaggagaaccttcatctcaagaaagtccaatggatttcactaactgagcatcatagtgtggattcctgcatatacagcaggctccccactagggggtctcaataaaaagagctaaagcaccccctaagagcatgtccatgccgggttctccgcaggcttgcataattcaagttctccatatcagtctcaactcctgagatgagccttttcagtccacaatgaggaagagatgggtgtgccttggtgaggtgcagagctcaggggatttttaatcatgtacatgtttactttctagaggaaggagaggagcagtgtggggagagtgggaaggaagtacgctttctttcactaaagactctctttgccaggatgcctgatcaggagggacgtgtgtgggcacgaggtgcaaggctgttccacacagctaagccccagcttgctttgcatgcagaattgggaaatatttggggtggaagttgtctgagtgatctgcattccaaaggtgctactgtgttcctcactttcagaaatactctaagttgaggagatgacagttctgtattttgacatggaatccaaatttctgaccactgtggatcacacttaaaactgtgactgtctgtcttttaagctgcatactgggtggggggaaagcaaagaaaaggcatttcacattaatggaattggagaaaaatgtctcttcagagcctagaaagcttcagcttctgcaaagtcccaacaccacctaccagaacagagactccctacataccagacagagaaggacaaagttagtataatttactctggacccagccaatactgcccccaatttacccaaaacatgccttaaaatgaaacagaaagctcaaataatacacatcttttaagattttccatttcctgcagttagctatatttcatgccaagttttatttatcttttatgaatggatggaaataggatttcatttctttatatgccaaacagtcttacccttaattttacatcaaaccaattaagtacaaagattttgcaggctctttgactgagaaaatgcgtgttctcaagagcaaagcattttcactctacataagggaaattggggccaatctaaaatgtcagcaacacagtcctgatggggatgagtgtctctaatagaaactccgcaccaaatcattttacctggtgatagcttgctgcagtaagtttgcaggcatgttgcttcgttgttctgcaatataaccacactcgaagcaacaggagaggggccggtaacccattctgcattgactccagctccctatgactaggaagcaatgagccactctatctaaagggctagaacacaaaacagacaaaacctcttcttccttgatcatttttatctcagctgccaaaatggaaattttctgtgatttcctttgagacttgaagaattacacctggtctccaaccattattcttatcaccgtatcggttcagtgctctcaaggcacaaagcacttggaattcactccatgatcttgcaactctttttgagtgcttttcctgagcgattttaaactctacccgtaagaaatttcatctgcaatttctgtaaaaaaaaaaaaaaaaaaaaagaatggcttaagctccacataatctgatgtaaatatacattgaaacgttaagttctatttgtactgaaacactgtccaccttagactttagaacactatcatttaacagatattcagaaaggttccggaaatacgggggaaagaaccagactacgaatacattggaaatgttaaatttacaatattctcctgagcccccttccaatttcccaaaattgagaaagtgtgtaatctgtacctattttttttctcaaattggcctggaggaaacattcaggttcagagagtttagcagtgcctctatgtttgtgttctctgtgtaatcacatgaaagaaccaacaaataactcttcaggataaatgacacctgcatcgctgatcccttgttgacttatgttttattataaaaatagatctctatcattatagggataaaacgtgtatgttttgagatgatttggtaagaactcagccattcagtatttctggaagaattaaaaacttggctttctttttcttaatgtctaatagttttgaagactagatattagggcattttctttcctccttttaaaatttctactgattacaagctagcaatttcaggatatcagcttgatctagttgtattaaggccaaaaggcagactttctttatatttatttttattatttatttatttatttatttatttatttatttatttattttgagatgaagttttactcttgttgcccaggctggagtgcagtggcgccatctcggctcactgcaacctccacctcccgggttcaagcaattctcttgcctcagcttcccgagtagctgggattacaggcacccaccaccatgtctggctaattttttatatttttagtagagatgggctttcaccatgttggccaggctggtctcgaactcctgaccttcaggtgatccacccgccttggcctcccaaagtactgggattacaggcgtgagccaccgcgcccaacctgtatttacttttttaatgccacctagctgaataatgctttgggttttactgttgtcaataaaaccccttataccttttattgtcctgcttacttataaaagccaaattttaggcgaacttaaataaatcagtgctgaaaaactagttgaacaatcagtcactgacaagttttcaatgttttgagttaaccaagtgggcttttcagattaggttattcaagagcatgagctagaaaataattaggcagacaaaacatatgttctcacacacacaccacttccaaaacagacatgatttgaatgtagcattcaggttattgaggtgaacgtaaattgctttgcttgaacaattgagataatcacctactttcgccacttcacttttcacatttgtaaacacacacagggtttttccagcccagtgagcaggctacacaatgtgaggatgataatggttcctgcagggaagccagagcctctatgtctgccgaacagtttaaattgaacaggttggaaagaacattgattgccaataattaaatgccccagactgagcaggtagctgctacattttctcttctcttttctagttattcagggttccttctttgattttcatgagaaaggaacatttacacttcctgtgaggggcttagactccgatttctcccagttgcctcacttactgaagttcgatcccagtgaatgatgtgtatgtacccaacacatccaatttgtattttcttaaatatgtgtttcttaggtatctaaggatacatgagcgagcccacagcacaattattgcagtccccaagatgtcagtcttctcaaaatgacaacattgtcactaaccactttttaaaaaagaactgaaattcccattttttgttaaacgtttttccaatacatagcaatgtgtaaaatagactcccaaatctcctttgggaaaggaacctgtggaccctggagctaagttgtcattttagggacatggtgataatcaggactgatgccagtaagtgggaagttcattacggcaaggcagtgggaaggtgccagcatcccctttccacctgagatgggctgaattttcacccggaagtctgaagcctctggaagggcaggtggaatcgctcctggcaagggcatgaccgtgcacaggctgacatgattttccttttgggtggattggagttttacaactggattcattagcacacgtgtgggaacatgtgcctgtgcccacccacagcacttccttggaactctaagctgcttctctaatctaaggaggtctattcgaaaggatagtgcttgactttcaatttataaaagattattggaaacaccttaagtagtcctaacccactgtcagcttccaattttcaggagcaaatgatgactgctttgatttggttaggctttcttacaacaggtttttataaaatattgtttatatttgtaacaggaaggattttcaatgtcaatttcatccatgagtgaagaccccccactgcacagagcagcacttctgtcactctcatggggagatcagggtacccactcctctacgtagcttggcagacccagaccaccctgagccagcctgccacatccgctagtccatgcacctccagggtggccttgggagctacagagaggaaaaaaagaaaaaatgttgcattcttaagcaattaaagactccttccaatgtaattaaaaaataagtaatgtggcaaaagatgcacataacttgctccctcaagttctaaattgtcaccaaatatgaaaggtttttagatgaagtacatctacatcataaccatcatcaccctcattgtcctcttccatgtttctactagtactcagctattgattcaacacaaaggcttagagccttttctgaactataacgaaatcagaacttacatcgtggaaaaagcgaaaaagtttcattagagtttaaacattaagtatacagatcctactccaaaattttgctcgcctaaaacatttccagaactgctgtgttccccagcagtcctgcctgccctgcctcaatcagaatttcaaattactatttagaagaacattccattcaattgttgtttgttgattgctttctctctttttttttccgtttttaccttagttggctattttattccttttcgtaaagataacgtttgaattgtctaacaactatcttttttcactaaaatacatgcatctttggaaactgcaaattttgtgagctcaaaaagacaatcactgtgcttcttatcatctaatttgagtctaggctttgtttccccctaacttatcctggcatttttactttgaatagaaatagtcacaggcaaaatatattcatgaaatgtacagtgcttactattatatgatctctgtttagaataactattttattaaaacagtctaaaagacactgtccatcattcttgacatttgatatgtctaattttgtgctagtgaaccaagtttacctgctcacacgtttgtacaactacacaatgtgttttcctttacgtgcagctccggtactgagcaaaaggttcgttgtttaggagtgaaattttctgtgaaagttttgggagagtaattattttcagggatcagacctatgtgttgttaggagcaagaggccatcttgtgtttacatgcagtggtctgtgtatttgtgtctgtacgtacagtggtaaaactgaaacaacttattaataatgtgtgtcactctacccatcaccccaaatttagctgaaacaagtagaaaggagcgcagttttctagcgatagcgtattagcactaagcctctggttaggataaaaaggagcaagggagagggagaaagagaggacagagggagagagagaaagtggcaatctgtacatttcctgacaaagtgggatcatgttctttccaagaaaaggaaaagaaatccagcttcactacctgatcaggagtccctctggggtccacacaagcctgcctcctttggagagcccttgagcatcactgttgtgaccggggtgcacacctgggcgactccttgatcattcgtgcattctggtcaagttgacccgataagccaaaagtacttttcaagatttagatggcaaacagccatccccacccttgtctaggaagtcgtattcgcaggtcacaggaaggcgtcaggtcaggcttgaagcagccggggtgtgggcagggtcctctctctgtgaagcctgtgtgggaggtgaaactgtcaggggtcctgggagatggcccaggcaggaagggaaggagagaggcgcggactgctctctgttcccatggaatccttcctgcctgtgaagccattgtcctccagatgggaggtaggccgggagattccagaatccgaaaacattttggaatcatcttagagcaccggtgtggatgcgcttggccccgagggggccgcgccctgccccagtgcgtgcgcctcctgccccagcagggacccgccctcaccaagtggcctccagtagcccctgtgtccctgtcgtcccgcgagggattggaggccctggctccgggcggtcccgaggtcccgccgccctcctcccctgcgcagaggacgtggctccccgctatccgtgcggctcgtggtgtcctagtgaaatgagggcgcactggcgcccgacgtgccttggcgacacgggcggcgccgcgccccgcttcgtgcgtcccgtccccgccgtgccctcagctgggcctcgtggctgggccgccctctgtatttgtatttggattcctacgtttgtacttctaatacaaataaatgcacatgttgtcagaaatacctga

SEQ ID NO: 136407 - DNA, 3310 bp, Homo sapiens
  Payload ID: 6696
  Gene Symbol: GABRP
  Gene Name: gamma-aminobutyric acid (GABA) A receptor, pi
  Uniprot ID: O00591
  ENST ID: ENST00000265294
  CDS Start-End: 199-1521
agagccactccatctgagggtggctgcgtgtccacatacgaggggacagggctgaggatgaggagaaccctggggacccagaagaccgtgccttgcctggaagtcctgcctgtaggcctgaaggacttgccctaacagagcctcaacaactacctggtgattcctacttcagccccttggtgtgagcagcttctcaacatgaactacagcctccacttggccttcgtgtgtctgagtctcttcactgagaggatgtgcatccaggggagtcagttcaacgtcgaggtcggcagaagtgacaagctttccctgcctggctttgagaacctcacagcaggatataacaaatttctcaggcccaattttggtggagaacccgtacagatagcgctgactctggacattgcaagtatctctagcatttcagagagtaacatggactacacagccaccatatacctccgacagcgctggatggaccagcggctggtgtttgaaggcaacaagagcttcactctggatgcccgcctcgtggagttcctctgggtgccagatacttacattgtggagtccaagaagtccttcctccatgaagtcactgtgggaaacaggctcatccgcctcttctccaatggcacggtcctgtatgccctcagaatcacgacaactgttgcatgtaacatggatctgtctaaataccccatggacacacagacatgcaagttgcagctggaaagctggggctatgatggaaatgatgtggagttcacctggctgagagggaacgactctgtgcgtggactggaacacctgcggcttgctcagtacaccatagagcggtatttcaccttagtcaccagatcgcagcaggagacaggaaattacactagattggtcttacagtttgagcttcggaggaatgttctgtatttcattttggaaacctacgttccttccactttcctggtggtgttgtcctgggtttcattttggatctctctcgattcagtccctgcaagaacctgcattggagtgacgaccgtgttatcaatgaccacactgatgatcgggtcccgcacttctcttcccaacaccaactgcttcatcaaggccatcgatgtgtacctggggatctgctttagctttgtgtttggggccttgctagaatatgcagttgctcactacagttccttacagcagatggcagccaaagatagggggacaacaaaggaagtagaagaagtcagtattactaatatcatcaacagctccatctccagctttaaacggaagatcagctttgccagcattgaaatttccagcgacaacgttgactacagtgacttgacaatgaaaaccagcgacaagttcaagtttgtcttccgagaaaagatgggcaggattgttgattatttcacaattcaaaaccccagtaatgttgatcactattccaaactactgtttcctttgatttttatgctagccaatgtattttactgggcatactacatgtatttttgagtcaatgttaaatttcttgcatgccataggtcttcaacaggacaagataatgatgtaaatggtattttaggccaagtgtgcacccacatccaatggtgctacaagtgactgaaataatatttgagtctttctgctcaaagaatgaagctccaaccattgttctaagctgtgtagaagtcctagcattataggatcttgtaatagaaacatcagtccattcctctttcatcttaatcaaggacattcccatggagcccaagattacaaatgtactcagggctgtttattcggtggctccctggtttgcatttacctcatataaagaatgggaaggagaccattgggtaaccctcaagtgtcagaagttgtttctaaagtaactatacatgttttttactaaatctctgcagtgcttataaaatacattgttgcctatttagggagtaacattttctagtttttgtttctggttaaaatgaaatatgggcttatgtcaattcattggaagtcaatgcactaactcaataccaagatgagtttttaaataatgaatattatttaataccacaacagaattatccccaatttccaataagtcctatcattgaaaattcaaatataagtgaagaaaaaattagtagatcaacaatctaaacaaatccctcggttctaagatacaatggattccccatactggaaggactctgaggctttattcccccactatgcatatcttatcattttattattatacacacatccatcctaaactatactaaagcccttttcccatgcatggatggaaatggaagatttttttttaacttgttctagaagtcttaatatgggctgttgccatgaaggcttgcagaattgagtccattttctagctgcctttattcacatagtgatggggtactaaaagtactgggttgactcagagagtcgctgtcattctgtcattgctgctactctaacactgagcaacactctcccagtggcagatcccctgtatcattccaagaggagcattcatccctttgctctaatgatcaggaatgatgcttattagaaaacaaactgcttgacccaggaacaagtggcttagcttaagtaaacttggctttgctcagatccctgatccttccagctggtctgctatgagtggcttatcccgcatgagcaggagcgtgctggccctgagtactgaactttctgagtaacaatgagatacgttacagaacctatgttcaggttgcgggtgagctgccctctccaaatccagccagagatgcacattcctcggccagtctcagccaacagtaccaaaagtgatttttgagtgtgccagggtaaaggcttccagttcagcctcagttattttagacaatctcgccatctttaatttcttagcttcctgttctaataaatgcacggctttacctttcctgtcagaaataaaccaaggctctaaaagatgatttcccttctgtaactccctagagccacaggttctcattccttttcccattatacttctcacaattcagtttctatgagtttgatcacctgatttttttaacaaaatatttctaacgggaatgggtgggagtgctggtgaaaagaggtgaaatgtggttgtatgagccaatcatatttgtgattttttaaaaaaagtttaaaaggaaatatctgttctgaaaccccacttaagcattgtttttatataaaaacaatgataaagatgtgaaactgtgaaataaatataccatattagctacccaccaaa

SEQ ID NO: 136408 - DNA, 456 bp, Homo sapiens
  Payload ID: 6696
  Gene Symbol: GABRP
  Gene Name: gamma-aminobutyric acid (GABA) A receptor, pi
  ENST ID: ENST00000521009
  CDS Start-End: 180-456
aatcggacacgatcagcagggagaacacatgtgtttttatgagaattacgctgagataggtaacagatgaggatgaaatttgggcttgactgaagtaatgggggctgtctgtgaagccttgcggcagtacagcccaggtgattcctacttcagccccttggtgtgagcagcttctcaacatgaactacagcctccacttggccttcgtgtgtctgagtctcttcactgagaggatgtgcatccaggggagtcagttcaacgtcgaggtcggcagaagtgacaagctttccctgcctggctttgagaacctcacagcaggatataacaaatttctcaggcccaattttggtggagaacccgtacagatagcgctgactctggacattgcaagtatctctagcatttcagagagtaacatggactacacagccaccatatacctccgacagcgctgga

SEQ ID NO: 136409 - DNA, 721 bp, Homo sapiens
  Payload ID: 6696
  Gene Symbol: GABRP
  Gene Name: gamma-aminobutyric acid (GABA) A receptor, pi
  ENST ID: ENST00000521481
  CDS Start-End: 208-721
aggtgggaaggctaaactgaggaattatgtctgacagaagggaatgacaaggctaaactgaagaattatgtctgacagaagggaagaaatgactgcagtggccttctcagaccctgtaggaaaggactctacttatccggtgaaagtgtctacctagactaagaggtgattcctacttcagccccttggtgtgagcagcttctcaacatgaactacagcctccacttggccttcgtgtgtctgagtctcttcactgagaggatgtgcatccaggggagtcagttcaacgtcgaggtcggcagaagtgacaagctttccctgcctggctttgagaacctcacagcaggatataacaaatttctcaggcccaattttggtggagaacccgtacagatagcgctgactctggacattgcaagtatctctagcatttcagagagtaacatggactacacagccaccatatacctccgacagcgctggatggaccagcggctggtgtttgaaggcaacaagagcttcactctggatgcccgcctcgtggagttcctctgggtgccagatacttacattgtggagtccaagaagtccttcctccatgaagtcactgtgggaaacaggctcatccgcctcttctccaatggcacggtcctgtatgccctcagaatcacgacaactgttgcatgtaacatggatctgtctaaataccccatggacacac

SEQ ID NO: 136410 - DNA, 689 bp, Homo sapiens
  Payload ID: 6696
  Gene Symbol: GABRP
  Gene Name: gamma-aminobutyric acid (GABA) A receptor, pi
  ENST ID: ENST00000519196
  CDS Start-End: 512-689
agacgcgaaggaggctttgggttggggagaagggcagcaatgagatgcggctgcagtccaggaatagtcagggaaacagataatttggttaaaatatctcagcctaataagggaactgggcaggtggggataactaaaaaagagtgcataaaagagtgttgtccaagttggcaccagagtcggggagttttcaggggtttagaagcctggccgtcaatacccacaacagttatggaggcaagggaaacaggcccttgaaaagaaggtaatgtggagtgggtagcctccgtattgactaaggggacggacttaccttccactgtgagagttacccgaagctcggagtccgtgatggtctacggagcttccgaggcgatcgggcagcatcagtcttcagctgctaagccgagaaggagtcagtcagagagccttgggccagagttccaggggctctgggagtggctgccaggtgattcctacttcagccccttggtgtgagcagcttctcaacatgaactacagcctccacttggccttcgtgtgtctgagtctcttcactgagaggatgtgcatccaggggagtcagttcaacgtcgaggtcggcagaagtgacaagctttccctgcctggctttgagaacctcacagcaggatataacaaatttctcaggcccaattttggtggagaac

SEQ ID NO: 136411 - DNA, 582 bp, Homo sapiens
  Payload ID: 6696
  Gene Symbol: GABRP
  Gene Name: gamma-aminobutyric acid (GABA) A receptor, pi
  ENST ID: ENST00000518122
  CDS Start-End: 426-582
tttgctccccttcctttctctctctcccttcccggctcctagactgggtctaggcaggagcttcgccatgatgtcaggagggaaggagatgcctctgggcctcgtaccacagcctcagctctctctctgcccctccatctgagtccctcctggctcccagctccctcagggtgcaaggccaagcctccaaggaatccctccccttacctgcatggctggagccaagaagagccactccatctgagggtggctgcgtgtccacatacgaggggacagggctgaggatgaggagaaccctggggacccagaagaccgtgccttgcctggaagtcctgcctgtaggcctgaaggacttgccctaacagagcctcaacaactacctggtgattcctacttcagccccttggtgtgagcagcttctcaacatgaactacagcctccacttggccttcgtgtgtctgagtctcttcactgagaggatgtgcatccaggggagtcagttcaacgtcgaggtcggcagaagtgacaagctttccctgcctggctttgagaacctcacagcaggatataacaaatttctca

SEQ ID NO: 136412 - DNA, 3576 bp, Homo sapiens
  Payload ID: 6696
  Gene Symbol: GABRP
  Gene Name: gamma-aminobutyric acid (GABA) A receptor, pi
  Uniprot ID: O00591
  ENST ID: ENST00000518525
  CDS Start-End: 465-1787
ctgcccctccatttgctccccttcctttctctctctcccttcccggctcctagactgggtctaggcaggagcttcgccatgatgtcaggagggaaggagatgcctctgggcctcgtaccacagcctcagctctctctctgcccctccatctgagtccctcctggctcccagctccctcagggtgcaaggccaagcctccaaggaatccctccccttacctgcatggctggagccaagacaggtttagcagctccattcttccccagagagccactccatctgagggtggctgcgtgtccacatacgaggggacagggctgaggatgaggagaaccctggggacccagaagaccgtgccttgcctggaagtcctgcctgtaggcctgaaggacttgccctaacagagcctcaacaactacctggtgattcctacttcagccccttggtgtgagcagcttctcaacatgaactacagcctccacttggccttcgtgtgtctgagtctcttcactgagaggatgtgcatccaggggagtcagttcaacgtcgaggtcggcagaagtgacaagctttccctgcctggctttgagaacctcacagcaggatataacaaatttctcaggcccaattttggtggagaacccgtacagatagcgctgactctggacattgcaagtatctctagcatttcagagagtaacatggactacacagccaccatatacctccgacagcgctggatggaccagcggctggtgtttgaaggcaacaagagcttcactctggatgcccgcctcgtggagttcctctgggtgccagatacttacattgtggagtccaagaagtccttcctccatgaagtcactgtgggaaacaggctcatccgcctcttctccaatggcacggtcctgtatgccctcagaatcacgacaactgttgcatgtaacatggatctgtctaaataccccatggacacacagacatgcaagttgcagctggaaagctggggctatgatggaaatgatgtggagttcacctggctgagagggaacgactctgtgcgtggactggaacacctgcggcttgctcagtacaccatagagcggtatttcaccttagtcaccagatcgcagcaggagacaggaaattacactagattggtcttacagtttgagcttcggaggaatgttctgtatttcattttggaaacctacgttccttccactttcctggtggtgttgtcctgggtttcattttggatctctctcgattcagtccctgcaagaacctgcattggagtgacgaccgtgttatcaatgaccacactgatgatcgggtcccgcacttctcttcccaacaccaactgcttcatcaaggccatcgatgtgtacctggggatctgctttagctttgtgtttggggccttgctagaatatgcagttgctcactacagttccttacagcagatggcagccaaagatagggggacaacaaaggaagtagaagaagtcagtattactaatatcatcaacagctccatctccagctttaaacggaagatcagctttgccagcattgaaatttccagcgacaacgttgactacagtgacttgacaatgaaaaccagcgacaagttcaagtttgtcttccgagaaaagatgggcaggattgttgattatttcacaattcaaaaccccagtaatgttgatcactattccaaactactgtttcctttgatttttatgctagccaatgtattttactgggcatactacatgtatttttgagtcaatgttaaatttcttgcatgccataggtcttcaacaggacaagataatgatgtaaatggtattttaggccaagtgtgcacccacatccaatggtgctacaagtgactgaaataatatttgagtctttctgctcaaagaatgaagctccaaccattgttctaagctgtgtagaagtcctagcattataggatcttgtaatagaaacatcagtccattcctctttcatcttaatcaaggacattcccatggagcccaagattacaaatgtactcagggctgtttattcggtggctccctggtttgcatttacctcatataaagaatgggaaggagaccattgggtaaccctcaagtgtcagaagttgtttctaaagtaactatacatgttttttactaaatctctgcagtgcttataaaatacattgttgcctatttagggagtaacattttctagtttttgtttctggttaaaatgaaatatgggcttatgtcaattcattggaagtcaatgcactaactcaataccaagatgagtttttaaataatgaatattatttaataccacaacagaattatccccaatttccaataagtcctatcattgaaaattcaaatataagtgaagaaaaaattagtagatcaacaatctaaacaaatccctcggttctaagatacaatggattccccatactggaaggactctgaggctttattcccccactatgcatatcttatcattttattattatacacacatccatcctaaactatactaaagcccttttcccatgcatggatggaaatggaagatttttttttaacttgttctagaagtcttaatatgggctgttgccatgaaggcttgcagaattgagtccattttctagctgcctttattcacatagtgatggggtactaaaagtactgggttgactcagagagtcgctgtcattctgtcattgctgctactctaacactgagcaacactctcccagtggcagatcccctgtatcattccaagaggagcattcatccctttgctctaatgatcaggaatgatgcttattagaaaacaaactgcttgacccaggaacaagtggcttagcttaagtaaacttggctttgctcagatccctgatccttccagctggtctgctatgagtggcttatcccgcatgagcaggagcgtgctggccctgagtactgaactttctgagtaacaatgagatacgttacagaacctatgttcaggttgcgggtgagctgccctctccaaatccagccagagatgcacattcctcggccagtctcagccaacagtaccaaaagtgatttttgagtgtgccagggtaaaggcttccagttcagcctcagttattttagacaatctcgccatctttaatttcttagcttcctgttctaataaatgcacggctttacctttcctgtcagaaataaaccaaggctctaaaagatgatttcccttctgtaactccctagagccacaggttctcattccttttcccattatacttctcacaattcagtttctatgagtttgatcacctgatttttttaacaaaatatttctaacgggaatgggtgggagtgctggtgaaaagaggtgaaatgtggttgtatgagccaatcatatttgtgattttttaaaaaaagtttaaaaggaaatatctgttctgaaaccccacttaagcattgtttttatataaaaacaatgataaagatgtgaaactgtgaaataaatataccatattagctacccaccaaa

SEQ ID NO: 136413 - DNA, 700 bp, Homo sapiens
  Payload ID: 6696
  Gene Symbol: GABRP
  Gene Name: gamma-aminobutyric acid (GABA) A receptor, pi
  ENST ID: ENST00000522868
  CDS Start-End: 133-700
agtcaaggagtgagggacagggaatgaacatgccatggcacagggcaggacctgctgaaagacagacaggcccagcagcgtagagaagcggtgattcctacttcagccccttggtgtgagcagcttctcaacatgaactacagcctccacttggccttcgtgtgtctgagtctcttcactgagaggatgtgcatccaggggagtcagttcaacgtcgaggtcggcagaagtgacaagctttccctgcctggctttgagaacctcacagcaggatataacaaatttctcaggcccaattttggtggagaacccgtacagatagcgctgactctggacattgcaagtatctctagcatttcagagagtaacatggactacacagccaccatatacctccgacagcgctggatggaccagcggctggtgtttgaaggcaacaagagcttcactctggatgcccgcctcgtggagttcctctgggtgccagatacttacattgtggagtccaagaagtccttcctccatgaagtcactgtgggaaacaggctcatccgcctcttctccaatggcacggtcctgtatgccctcagaatcacgacaactgttgcatgtaacatggatctgtctaaataccccatggacacacagacatgcaagttgcagctggaaagctggggctatgatggaaatgatgtggagt

SEQ ID NO: 136414 - DNA, 1567 bp, Homo sapiens
  Payload ID: 6696
  Gene Symbol: GABRP
  Gene Name: gamma-aminobutyric acid (GABA) A receptor, pi
  ENST ID: ENST00000519385
  CDS Start-End: 193-1062
actccatctgagggtggctgcgtgtccacatacgaggggacagggctgaggatgaggagaaccctggggacccagaagaccgtgccttgcctggaagtcctgcctgtaggcctgaaggacttgccctaacagagcctcaacaactacctggtgattcctacttcagccccttggtgtgagcagcttctcaacatgaactacagcctccacttggccttcgtgtgtctgagtctcttcactgagaggatgtgcatccaggggagtcagttcaacgtcgaggtcggcagaagtgacaagctttccctgcctggctttgagaacctcacagcaggatataacaaatttctcaggcccaattttggtggagaacccgtacagatagcgctgactctggacattgcaagtatctctagcatttcagagagtaacatggactacacagccaccatatacctccgacagcgctggatggaccagcggctggtgtttgaaggcaacaagagcttcactctggatgcccgcctcgtggagttcctctgggtgccagatacttacattgtggagtccaagaagtccttcctccatgaagtcactgtgggaaacaggctcatccgcctcttctccaatggcacggtcctgtatgccctcagaatcacgacaactgttgcatgtaacatggatctgtctaaataccccatggacacacagacatgcaagttgcagctggaaagctggggctatgatggaaatgatgtggagttcacctggctgagagggaacgactctgtgcgtggactggaacacctgcggcttgctcagtacaccatagagcggtatttcaccttagtcaccagatcgcagcaggagacaggaaattacactagattggtcttacagtttgagcttcggaggaatgttctgtatttcattttggaaacctacgttccttccactttcctggtggtgttgtcctgggtttcattttggatctctctcgattcagtccctgcaagaacctgcattggggacaacaaaggaagtagaagaagtcagtattactaatatcatcaacagctccatctccagctttaaacggaagatcagctttgccagcattgaaatttccagcgacaacgttgactacagtgacttgacaatgaaaaccagcgacaagttcaagtttgtcttccgagaaaagatgggcaggattgttgattatttcacaattcaaaaccccagtaatgttgatcactattccaaactactgtttcctttgatttttatgctagccaatgtattttactgggcatactacatgtatttttgagtcaatgttaaatttcttgcatgccataggtcttcaacaggacaagataatgatgtaaatggtattttaggccaagtgtgcacccacatccaatggtgctacaagtgactgaaataatatttgagtctttctgctcaaagaatgaagctccaaccattgttctaagctgtgtagaagtcctagcattataggatcttgtaatagaaacatcagtccattcctctttcatcttaatcaagg

SEQ ID NO: 136415 - DNA, 1284 bp, Homo sapiens
  Payload ID: 6696
  Gene Symbol: GABRP
  Gene Name: gamma-aminobutyric acid (GABA) A receptor, pi
  ENST ID: ENST00000519598
  CDS Start-End: 171-1220
tgtccacatacgaggggacagggctgaggatgaggagaaccctggggacccagaagaccgtgccttgcctggaagtcctgcctgtaggcctgaaggacttgccctaacagagcctcaacaactacctggtgattcctacttcagccccttggtgtgagcagcttctcaacatgaactacagcctccacttggccttcgtgtgtctgagtctcttcactgagaggatgtgcatccaggggagtcagttcaacgtcgaggtcggcagaagtgacaagctttccctgcctggctttgagaacctcacagcaggatataacaaatttctcaggcccaattttggtggagaacccgtacagatagcgctgactctggacattgcaagtatctctagcatttcagagagtaacatggactacacagccaccatatacctccgacagcgctggatggaccagcggctggtgtttgaaggcaacaagagcttcactctggatgcccgcctcgtggagttcctctgggtgccagatacttacattgtggagtccaagaagtccttcctccatgaagtcactgtgggaaacaggctcatccgcctcttctccaatggcacggtcctgtatgccctcagaatcacgacaactgttgcatgtaacatggatctgtctaaataccccatggacacacagacatgcaagttgcagctggaaagctggggctatgatggaaatgatgtggagttcacctggctgagagggaacgactctgtgcgtggactggaacacctgcggcttgctcagtacaccatagagcggtatttcaccttagtcaccagatcgcagcaggagacaggaaattacactagattggtcttacagtttgagcttcggaggaatgttctgtatttcattttggaaacctacgttccttccactttcctggtggtgttgtcctgggtttcattttggatctctctcgattcagtccctgcaagaacctgcattggagtgacgaccgtgttatcaatgaccacactgatgatcgggtcccgcacttctcttcccaacaccaactgcttcatcaaggccatcgatgtgtacctggggatctgctttagctttgtgtttggggccttgctagaatatgcagttgctcactacagttccttacagcagatggcagccaaagataggcagaaaatatgttatctgtatgcagcataaaatcacaaccacaggagcaagcatccatgaagaatccaatatgaaaaaaacatgatcagctgct

SEQ ID NO: 136416 - DNA, 1823 bp, Homo sapiens
  Payload ID: 6697
  Gene Symbol: GABRR1
  Gene Name: gamma-aminobutyric acid (GABA) A receptor, rho 1
  Uniprot ID: P24046
  ENST ID: ENST00000369451
  CDS Start-End: 474-1652
caagatggccgaataggaacagctcccgtctacagctcccagcgtgagcgacgcagaagacggatatttttgatctgcacttggttgaatctacagatgtaaaacccacggatgcagagggctgactgtggctagaaaatgtgctgcagggagcacgtggaaacagctgatgagcacctgcagcccctgtttgggagcagctggggtgtgctgcctgccgttcacccatcagtcaaatcgaggcttcatgaaggcaaaggcagtggcatctcagaatttgacaaacctcctttcatcagtgactggttccatttcaggctggcccaaagtcaaagccccaaagacaaagacgagaagtacatgaagatgcccacaagcaagtcagcccaattctgagacgaagtcctgacatcaccaaatcgcctctgacaaagtcagaacagcttctgaggatagatgaccatgatttcagcatgaggcctggctttggaggccctgccattcctgttggtgtggatgtgcaggtggagagtttggatagcatctcagaggttgacatggactttacgatgaccctctacctgaggcactactggaaggacgagaggctgtcttttccaagcaccaacaacctcagcatgacgtttgacggccggctggtcaagaagatctgggtccctgacatgtttttcgtgcactccaaacgctccttcatccacgacaccaccacagacaacgtcatgttgcgggtccagcctgatgggaaagtgctctatagtctcagggttacagtaactgcaatgtgcaacatggacttcagccgatttcccttggacacacaaacgtgctctcttgaaattgaaagctatgcctatacagaagatgacctcatgctgtactggaaaaagggcaatgactccttaaagacagatgaacggatctcactctcccagttcctcattcaggaattccacaccaccaccaaactggctttctacagcagcacaggctggtacaaccgtctctacattaatttcacgttgcgtcgccacatcttcttcttcttgctccaaacttatttccccgctaccctgatggtcatgctgtcctgggtgtccttctggatcgaccgcagagccgtgcctgccagagtccccttaggtatcacaacggtgctgaccatgtccaccatcatcacgggcgtgaatgcctccatgccgcgcgtctcctacatcaaggccgtggacatctacctctgggtcagctttgtgttcgtgttcctctcggtgctggagtatgcggccgtcaactacctgaccactgtgcaggagaggaaggaacagaagctgcgggagaagcttccctgcaccagcggattacctccgccccgcactgcgatgctggacggcaactacagtgatggggaggtgaatgacctggacaactacatgccagagaatggagagaagcccgacaggatgatggtgcagctgaccctggcctcagagaggagctccccacagaggaaaagtcagagaagcagctatgtgagcatgagaatcgacacccacgccattgataaatactccaggatcatctttccagcagcatacattttattcaatttaatatactggtctattttctcctagatgcttgtaattctacaaatttcacatttccatggcatgcactacagaaataactgtataatgaaaaagtatttaaggatatggttaaaaaaaaatcccaggacccacccatgttttcactatcccttctgcagctttccaaagctacattgacgagacacttactggttt

SEQ ID NO: 136417 - DNA, 3106 bp, Homo sapiens
  Payload ID: 6697
  Gene Symbol: GABRR1
  Gene Name: gamma-aminobutyric acid (GABA) A receptor, rho 1
  Uniprot ID: P24046
  ENST ID: ENST00000435811
  CDS Start-End: 456-1844
taataatggccgtaagcttaaaatagatccagggaggagctcattaacgtgaacatagaaagcagttccgcacctctggccttactcctcttggaaattgctttggtccatttttacttccttttattcgacgcaccagaaaataagacttttaccaacatttttactgcatttgacgatgaactaatttagaccggctaaaataattgttccactgggacacaggaattcaacctcagttcagaaaatccctgacatctgacgtaggaggatttataggtttagtggaaattgctttctcctgctctccagattgcatcctgtgggttgattttttttttgcatgagtaaacatccttctaataatgaacagaccaataatgtcttaagagagaaaaagaacaatcttttcctttttgctgtttctggagagagctgtttgaatttggaaacccatgttggctgtcccaaatatgagatttggcatctttcttttgtggtggggatgggttttggccactgaaagcagaatgcactggcccggaagagaagtccacgagatgtctaagaaaggcagcccaattctgagacgaagtcctgacatcaccaaatcgcctctgacaaagtcagaacagcttctgaggatagatgaccatgatttcagcatgaggcctggctttggaggccctgccattcctgttggtgtggatgtgcaggtggagagtttggatagcatctcagaggttgacatggactttacgatgaccctctacctgaggcactactggaaggacgagaggctgtcttttccaagcaccaacaacctcagcatgacgtttgacggccggctggtcaagaagatctgggtccctgacatgtttttcgtgcactccaaacgctccttcatccacgacaccaccacagacaacgtcatgttgcgggtccagcctgatgggaaagtgctctatagtctcagggttacagtaactgcaatgtgcaacatggacttcagccgatttcccttggacacacaaacgtgctctcttgaaattgaaagctatgcctatacagaagatgacctcatgctgtactggaaaaagggcaatgactccttaaagacagatgaacggatctcactctcccagttcctcattcaggaattccacaccaccaccaaactggctttctacagcagcacaggctggtacaaccgtctctacattaatttcacgttgcgtcgccacatcttcttcttcttgctccaaacttatttccccgctaccctgatggtcatgctgtcctgggtgtccttctggatcgaccgcagagccgtgcctgccagagtccccttaggtatcacaacggtgctgaccatgtccaccatcatcacgggcgtgaatgcctccatgccgcgcgtctcctacatcaaggccgtggacatctacctctgggtcagctttgtgttcgtgttcctctcggtgctggagtatgcggccgtcaactacctgaccactgtgcaggagaggaaggaacagaagctgcgggagaagcttccctgcaccagcggattacctccgccccgcactgcgatgctggacggcaactacagtgatggggaggtgaatgacctggacaactacatgccagagaatggagagaagcccgacaggatgatggtgcagctgaccctggcctcagagaggagctccccacagaggaaaagtcagagaagcagctatgtgagcatgagaatcgacacccacgccattgataaatactccaggatcatctttccagcagcatacattttattcaatttaatatactggtctattttctcctagatgcttgtaattctacaaatttcacatttccatggcatgcactacagaaataactgtataatgaaaaagtatttaaggatatggttaaaaaaaaatcccaggacccacccatgttttcactatcccttctgcagctttccaaagctacattgacgagacacttactggtttaatttgcacttattaaccatctattgaatacacagcattatattaggtgctgcaggaaatacgacactgtagcgactgatgttagttgttacccagatcccctggaaaagcacactaccagtgttgtgggcacatttagttccacccgttagacccttgatgctattcacatgaataatttattttcctcaagtgtcattacattgttcaggctacgtgaacttggaagcacctacaggccatttgcatgaaattcacatgcacctaaatcctcactttgacagaaactcatgcttcagtttataacctattacctattttgtatgcgactccacctccgcatgtttattttaataaaaggcaatgataacattcacattatttttctttatatgctgtggttcacaggctttaccccttcacaagaaaagctctttagattggcgcaattgcttctgattttggtgaaattttccctggtagggaaactttgaagataagagtacacacatgcattttgtctgttgtgtcatagaggtaactaggctagaaaatttgtgtttaaatgttccctattttatataatcaccacttcatgtttcttcttcttggagcatgtccttgttcaaagagaagtgctttctcagtgatgtgatatcttcactgaggaacttgggtagagaatgatttcttctgcataaacacttcaaggaaatacataatttgggactacttgtaactcattagaatgagaaatactcacatggtttcttaagagaaaaagaacatcggaaagcaaaataaatgggaagatatcactggacatctgcatttatactcgaaataccagcattttctatggaccagaaaactgccatcacctagaccacacagcccagataccaggcagacggatggcccaatggcaactgatgtcagggcatggggtaaaggagagggttctaatctggtgtatcacttaaaaacagttatttatattatatatctgctatatagatcaacctccaccaaacttacccaaacagcatttgttttatttgaaactcactttaataaagtgaattatatac

SEQ ID NO: 136418 - DNA, 1994 bp, Homo sapiens
  Payload ID: 6697
  Gene Symbol: GABRR1
  Gene Name: gamma-aminobutyric acid (GABA) A receptor, rho 1
  ENST ID: ENST00000457434
  CDS Start-End: 456-593
taataatggccgtaagcttaaaatagatccagggaggagctcattaacgtgaacatagaaagcagttccgcacctctggccttactcctcttggaaattgctttggtccatttttacttccttttattcgacgcaccagaaaataagacttttaccaacatttttactgcatttgacgatgaactaatttagaccggctaaaataattgttccactgggacacaggaattcaacctcagttcagaaaatccctgacatctgacgtaggaggatttataggtttagtggaaattgctttctcctgctctccagattgcatcctgtgggttgattttttttttgcatgagtaaacatccttctaataatgaacagaccaataatgtcttaagagagaaaaagaacaatcttttcctttttgctgtttctggagagagctgtttgaatttggaaacccatgttggctgtcccaaatatgagatttggcatctttcttttgtggtggggatgggttttggccactgaaagcagaatgcactggcccggaagagaagtccacgagatgtctaagaaaggcagaatcgaggcttcatgaaggcaaaggcagtggcatctcagaatttgacaaacctcctttcatcagtgactggttccatttcaggctggcccaaagtcaaagccccaaagacaaagacgagaagtacatgaagatgcccacaagcaagtcagcccaattctgagacgaagtcctgacatcaccaaatcgcctctgacaaagtcagaacagcttctgaggatagatgaccatgatttcagcatgaggcctggctttggaggccctgccattcctgttggtgtggatgtgcaggtggagagtttggatagcatctcagaggttgacatggactttacgatgaccctctacctgaggcactactggaaggacgagaggctgtcttttccaagcaccaacaacctcagcatgacgtttgacggccggctggtcaagaagatctgggtccctgacatgtttttcgtgcactccaaacgctccttcatccacgacaccaccacagacaacgtcatgttgcgggtccagcctgatgggaaagtgctctatagtctcagggttacagtaactgcaatgtgcaacatggacttcagccgatttcccttggacacacaaacgtgctctcttgaaattgaaagctatgcctatacagaagatgacctcatgctgtactggaaaaagggcaatgactccttaaagacagatgaacggatctcactctcccagttcctcattcaggaattccacaccaccaccaaactggctttctacagcagcacaggctggtacaaccgtctctacattaatttcacgttgcgtcgccacatcttcttcttcttgctccaaacttatttccccgctaccctgatggtcatgctgtcctgggtgtccttctggatcgaccgcagagccgtgcctgccagagtccccttaggtatcacaacggtgctgaccatgtccaccatcatcacgggcgtgaatgcctccatgccgcgcgtctcctacatcaaggccgtggacatctacctctgggtcagctttgtgttcgtgttcctctcggtgctggagtatgcggccgtcaactacctgaccactgtgcaggagaggaaggaacagaagctgcgggagaagcttccctgcaccagcggattacctccgccccgcactgcgatgctggacggcaactacagtgatggggaggtgaatgacctggacaactacatgccagagaatggagagaagcccgacaggatgatggtgcagctgaccctggcctcagagaggagctccccacagaggaaaagtcagagaagcagctatgtgagcatgagaatcgacacccacgccattgataaatactccaggatcatctttccagcagcatacattttattcaatttaatatactggtctattttctcctag

SEQ ID NO: 136419 - DNA, 2820 bp, Homo sapiens
  Payload ID: 6697
  Gene Symbol: GABRR1
  Gene Name: gamma-aminobutyric acid (GABA) A receptor, rho 1
  Uniprot ID: P24046
  ENST ID: ENST00000454853
  CDS Start-End: 112-1551
tgagtaaacatccttctaataatgaacagaccaataatgtcttaagagagaaaaagaacaatcttttcctttttgctgtttctggagagagctgtttgaatttggaaacccatgttggctgtcccaaatatgagatttggcatctttcttttgtggtggggatgggttttggccactgaaagcagaatgcactggcccggaagagaagtccacgagatgtctaagaaaggcaggccccaaagacaaagacgagaagtacatgaagatgcccacaagcaagtcagcccaattctgagacgaagtcctgacatcaccaaatcgcctctgacaaagtcagaacagcttctgaggatagatgaccatgatttcagcatgaggcctggctttggaggccctgccattcctgttggtgtggatgtgcaggtggagagtttggatagcatctcagaggttgacatggactttacgatgaccctctacctgaggcactactggaaggacgagaggctgtcttttccaagcaccaacaacctcagcatgacgtttgacggccggctggtcaagaagatctgggtccctgacatgtttttcgtgcactccaaacgctccttcatccacgacaccaccacagacaacgtcatgttgcgggtccagcctgatgggaaagtgctctatagtctcagggttacagtaactgcaatgtgcaacatggacttcagccgatttcccttggacacacaaacgtgctctcttgaaattgaaagctatgcctatacagaagatgacctcatgctgtactggaaaaagggcaatgactccttaaagacagatgaacggatctcactctcccagttcctcattcaggaattccacaccaccaccaaactggctttctacagcagcacaggctggtacaaccgtctctacattaatttcacgttgcgtcgccacatcttcttcttcttgctccaaacttatttccccgctaccctgatggtcatgctgtcctgggtgtccttctggatcgaccgcagagccgtgcctgccagagtccccttaggtatcacaacggtgctgaccatgtccaccatcatcacgggcgtgaatgcctccatgccgcgcgtctcctacatcaaggccgtggacatctacctctgggtcagctttgtgttcgtgttcctctcggtgctggagtatgcggccgtcaactacctgaccactgtgcaggagaggaaggaacagaagctgcgggagaagcttccctgcaccagcggattacctccgccccgcactgcgatgctggacggcaactacagtgatggggaggtgaatgacctggacaactacatgccagagaatggagagaagcccgacaggatgatggtgcagctgaccctggcctcagagaggagctccccacagaggaaaagtcagagaagcagctatgtgagcatgagaatcgacacccacgccattgataaatactccaggatcatctttccagcagcatacattttattcaatttaatatactggtctattttctcctagatgcttgtaattctacaaatttcacatttccatggcatgcactacagaaataactgtataatgaaaaagtatttaaggatatggttaaaaaaaaatcccaggacccacccatgttttcactatcccttctgcagctttccaaagctacattgacgagacacttactggtttaatttgcacttattaaccatctattgaatacacagcattatattaggtgctgcaggaaatacgacactgtagcgactgatgttagttgttacccagatcccctggaaaagcacactaccagtgttgtgggcacatttagttccacccgttagacccttgatgctattcacatgaataatttattttcctcaagtgtcattacattgttcaggctacgtgaacttggaagcacctacaggccatttgcatgaaattcacatgcacctaaatcctcactttgacagaaactcatgcttcagtttataacctattacctattttgtatgcgactccacctccgcatgtttattttaataaaaggcaatgataacattcacattatttttctttatatgctgtggttcacaggctttaccccttcacaagaaaagctctttagattggcgcaattgcttctgattttggtgaaattttccctggtagggaaactttgaagataagagtacacacatgcattttgtctgttgtgtcatagaggtaactaggctagaaaatttgtgtttaaatgttccctattttatataatcaccacttcatgtttcttcttcttggagcatgtccttgttcaaagagaagtgctttctcagtgatgtgatatcttcactgaggaacttgggtagagaatgatttcttctgcataaacacttcaaggaaatacataatttgggactacttgtaactcattagaatgagaaatactcacatggtttcttaagagaaaaagaacatcggaaagcaaaataaatgggaagatatcactggacatctgcatttatactcgaaataccagcattttctatggaccagaaaactgccatcacctagaccacacagcccagataccaggcagacggatggcccaatggcaactgatgtcagggcatggggtaaaggagagggttctaatctggtgtatcacttaaaaacagttatttatattatatatctgctatatagatcaacctccaccaaacttacccaaacagcatttgttttatttgaaactcactttaataaagtgaattatatacacaataa

SEQ ID NO: 136420 - DNA, 3259 bp, Homo sapiens
  Payload ID: 6697
  Gene Symbol: GABRR1
  Gene Name: gamma-aminobutyric acid (GABA) A receptor, rho 1
  Uniprot ID: P24046
  ENST ID: ENST00000611484
  CDS Start-End: 819-1997
taataatggccgtaagcttaaaatagatccagggaggagctcattaacgtgaacatagaaagcagttccgcacctctggccttactcctcttggaaattgctttggtccatttttacttccttttattcgacgcaccagaaaataagacttttaccaacatttttactgcatttgacgatgaactaatttagaccggctaaaataattgttccactgggacacaggaattcaacctcagttcagaaaatccctgacatctgacgtaggaggatttataggtttagtggaaattgctttctcctgctctccagattgcatcctgtgggttgattttttttttgcatgagtaaacatccttctaataatgaacagaccaataatgtcttaagagagaaaaagaacaatcttttcctttttgctgtttctggagagagctgtttgaatttggaaacccatgttggctgtcccaaatatgagatttggcatctttcttttgtggtggggatgggttttggccactgaaagcagaatgcactggcccggaagagaagtccacgagatgtctaagaaaggcagaatcgaggcttcatgaaggcaaaggcagtggcatctcagaatttgacaaacctcctttcatcagtgactggttccatttcaggctggcccaaagtcaaataggccccaaagacaaagacgagaagtacatgaagatgcccacaagcaagtcagcccaattctgagacgaagtcctgacatcaccaaatcgcctctgacaaagtcagaacagcttctgaggatagatgaccatgatttcagcatgaggcctggctttggaggccctgccattcctgttggtgtggatgtgcaggtggagagtttggatagcatctcagaggttgacatggactttacgatgaccctctacctgaggcactactggaaggacgagaggctgtcttttccaagcaccaacaacctcagcatgacgtttgacggccggctggtcaagaagatctgggtccctgacatgtttttcgtgcactccaaacgctccttcatccacgacaccaccacagacaacgtcatgttgcgggtccagcctgatgggaaagtgctctatagtctcagggttacagtaactgcaatgtgcaacatggacttcagccgatttcccttggacacacaaacgtgctctcttgaaattgaaagctatgcctatacagaagatgacctcatgctgtactggaaaaagggcaatgactccttaaagacagatgaacggatctcactctcccagttcctcattcaggaattccacaccaccaccaaactggctttctacagcagcacaggctggtacaaccgtctctacattaatttcacgttgcgtcgccacatcttcttcttcttgctccaaacttatttccccgctaccctgatggtcatgctgtcctgggtgtccttctggatcgaccgcagagccgtgcctgccagagtccccttaggtatcacaacggtgctgaccatgtccaccatcatcacgggcgtgaatgcctccatgccgcgcgtctcctacatcaaggccgtggacatctacctctgggtcagctttgtgttcgtgttcctctcggtgctggagtatgcggccgtcaactacctgaccactgtgcaggagaggaaggaacagaagctgcgggagaagcttccctgcaccagcggattacctccgccccgcactgcgatgctggacggcaactacagtgatggggaggtgaatgacctggacaactacatgccagagaatggagagaagcccgacaggatgatggtgcagctgaccctggcctcagagaggagctccccacagaggaaaagtcagagaagcagctatgtgagcatgagaatcgacacccacgccattgataaatactccaggatcatctttccagcagcatacattttattcaatttaatatactggtctattttctcctagatgcttgtaattctacaaatttcacatttccatggcatgcactacagaaataactgtataatgaaaaagtatttaaggatatggttaaaaaaaaatcccaggacccacccatgttttcactatcccttctgcagctttccaaagctacattgacgagacacttactggtttaatttgcacttattaaccatctattgaatacacagcattatattaggtgctgcaggaaatacgacactgtagcgactgatgttagttgttacccagatcccctggaaaagcacactaccagtgttgtgggcacatttagttccacccgttagacccttgatgctattcacatgaataatttattttcctcaagtgtcattacattgttcaggctacgtgaacttggaagcacctacaggccatttgcatgaaattcacatgcacctaaatcctcactttgacagaaactcatgcttcagtttataacctattacctattttgtatgcgactccacctccgcatgtttattttaataaaaggcaatgataacattcacattatttttctttatatgctgtggttcacaggctttaccccttcacaagaaaagctctttagattggcgcaattgcttctgattttggtgaaattttccctggtagggaaactttgaagataagagtacacacatgcattttgtctgttgtgtcatagaggtaactaggctagaaaatttgtgtttaaatgttccctattttatataatcaccacttcatgtttcttcttcttggagcatgtccttgttcaaagagaagtgctttctcagtgatgtgatatcttcactgaggaacttgggtagagaatgatttcttctgcataaacacttcaaggaaatacataatttgggactacttgtaactcattagaatgagaaatactcacatggtttcttaagagaaaaagaacatcggaaagcaaaataaatgggaagatatcactggacatctgcatttatactcgaaataccagcattttctatggaccagaaaactgccatcacctagaccacacagcccagataccaggcagacggatggcccaatggcaactgatgtcagggcatggggtaaaggagagggttctaatctggtgtatcacttaaaaacagttatttatattatatatctgctatatagatcaacctccaccaaacttacccaaacagcatttgttttatttgaaactcactttaataaagtgaattatatac

SEQ ID NO: 136421 - DNA, 2857 bp, Homo sapiens
  Payload ID: 6697
  Gene Symbol: GABRR1
  Gene Name: gamma-aminobutyric acid (GABA) A receptor, rho 1
  Uniprot ID: P24046
  ENST ID: ENST00000621627
  CDS Start-End: 417-1595
cagatatttttgatctgcacttggttgaatctacagatgtaaaacccacggatgcagagggctgactgtggctagaaaatgtgctgcagggagcacgtggaaacagctgatgagcacctgcagcccctgtttgggagcagctggggtgtgctgcctgccgttcacccatcagtcaaatcgaggcttcatgaaggcaaaggcagtggcatctcagaatttgacaaacctcctttcatcagtgactggttccatttcaggctggcccaaagtcaaataggccccaaagacaaagacgagaagtacatgaagatgcccacaagcaagtcagcccaattctgagacgaagtcctgacatcaccaaatcgcctctgacaaagtcagaacagcttctgaggatagatgaccatgatttcagcatgaggcctggctttggaggccctgccattcctgttggtgtggatgtgcaggtggagagtttggatagcatctcagaggttgacatggactttacgatgaccctctacctgaggcactactggaaggacgagaggctgtcttttccaagcaccaacaacctcagcatgacgtttgacggccggctggtcaagaagatctgggtccctgacatgtttttcgtgcactccaaacgctccttcatccacgacaccaccacagacaacgtcatgttgcgggtccagcctgatgggaaagtgctctatagtctcagggttacagtaactgcaatgtgcaacatggacttcagccgatttcccttggacacacaaacgtgctctcttgaaattgaaagctatgcctatacagaagatgacctcatgctgtactggaaaaagggcaatgactccttaaagacagatgaacggatctcactctcccagttcctcattcaggaattccacaccaccaccaaactggctttctacagcagcacaggctggtacaaccgtctctacattaatttcacgttgcgtcgccacatcttcttcttcttgctccaaacttatttccccgctaccctgatggtcatgctgtcctgggtgtccttctggatcgaccgcagagccgtgcctgccagagtccccttaggtatcacaacggtgctgaccatgtccaccatcatcacgggcgtgaatgcctccatgccgcgcgtctcctacatcaaggccgtggacatctacctctgggtcagctttgtgttcgtgttcctctcggtgctggagtatgcggccgtcaactacctgaccactgtgcaggagaggaaggaacagaagctgcgggagaagcttccctgcaccagcggattacctccgccccgcactgcgatgctggacggcaactacagtgatggggaggtgaatgacctggacaactacatgccagagaatggagagaagcccgacaggatgatggtgcagctgaccctggcctcagagaggagctccccacagaggaaaagtcagagaagcagctatgtgagcatgagaatcgacacccacgccattgataaatactccaggatcatctttccagcagcatacattttattcaatttaatatactggtctattttctcctagatgcttgtaattctacaaatttcacatttccatggcatgcactacagaaataactgtataatgaaaaagtatttaaggatatggttaaaaaaaaatcccaggacccacccatgttttcactatcccttctgcagctttccaaagctacattgacgagacacttactggtttaatttgcacttattaaccatctattgaatacacagcattatattaggtgctgcaggaaatacgacactgtagcgactgatgttagttgttacccagatcccctggaaaagcacactaccagtgttgtgggcacatttagttccacccgttagacccttgatgctattcacatgaataatttattttcctcaagtgtcattacattgttcaggctacgtgaacttggaagcacctacaggccatttgcatgaaattcacatgcacctaaatcctcactttgacagaaactcatgcttcagtttataacctattacctattttgtatgcgactccacctccgcatgtttattttaataaaaggcaatgataacattcacattatttttctttatatgctgtggttcacaggctttaccccttcacaagaaaagctctttagattggcgcaattgcttctgattttggtgaaattttccctggtagggaaactttgaagataagagtacacacatgcattttgtctgttgtgtcatagaggtaactaggctagaaaatttgtgtttaaatgttccctattttatataatcaccacttcatgtttcttcttcttggagcatgtccttgttcaaagagaagtgctttctcagtgatgtgatatcttcactgaggaacttgggtagagaatgatttcttctgcataaacacttcaaggaaatacataatttgggactacttgtaactcattagaatgagaaatactcacatggtttcttaagagaaaaagaacatcggaaagcaaaataaatgggaagatatcactggacatctgcatttatactcgaaataccagcattttctatggaccagaaaactgccatcacctagaccacacagcccagataccaggcagacggatggcccaatggcaactgatgtcagggcatggggtaaaggagagggttctaatctggtgtatcacttaaaaacagttatttatattatatatctgctatatagatcaacctccaccaaacttacccaaacagcatttgttttatttgaaactcactttaataaagtgaattatatac

SEQ ID NO: 136422 - DNA, 1682 bp, Homo sapiens
  Payload ID: 6698
  Gene Symbol: GABRR2
  Gene Name: gamma-aminobutyric acid (GABA) A receptor, rho 2
  Uniprot ID: P28476
  ENST ID: ENST00000402938
  CDS Start-End: 135-1532
ggccagccttgccctcacagcccctcagagcagcccgtcaggaggcagcagatggatcaatggtcaagccaggggggatttgctctgccacaggctactggaaagcagctttttgcctcacagatgtccacaaaatgccttattttacaagactcattttgttcttgttttgcttgatggttctcgtggagagcagaaaacccaagaggaagcgatggacagggcaggtggaaatgcccaagccaagtcacttatataagaagaaccttgatgtgaccaagatccggaagggaaagcctcagcagcttctcagagtggacgagcacgacttcagcatgagacccgccttcggaggccctgccatcccggtgggcgtggacgtacaggtggagagcctggacagcatctccgaggtggacatggacttcactatgaccctgtacctgcggcattactggaaggatgagaggctagctttctccagcgccagcaacaagagcatgaccttcgatggccggctggtgaagaagatctgggtccctgatgtcttctttgttcactccaaaagatcgttcactcatgacaccaccactgacaacatcatgctgagggtgttcccagatggacacgtgctgtacagcatgaggattacggtcactgccatgtgcaacatggacttcagccactttcccctggactcccagacctgttctttggagctggagagctatgcctatacagatgaagatctaatgctgtactggaagaatggggatgaatccctaaaaacagatgagaagatctccttgtctcagtttctgattcagaaatttcacacaacttccaggctggccttctacagcagcactggctggtacaaccgtctgtacattaacttcacgttgcgtcgccacatcttcttcttcttgctccaaacatatttccctgccactctgatggtcatgctgtcctgggtgtccttctggatcgaccgcagagctgtgcctgccagagtttcactgggtatcacgacggtgctgaccatgaccaccatcatcacgggcgtgaatgcctccatgccgcgcgtctcctacgtcaaggccgtggacatctacctctgggtcagctttgtgttcgtgttcctctcggtgctggagtatgcggctgtcaactacctgaccaccgtgcaggagcgcaaggaacggaagctgcgggagaagttcccgtgcatgtgtggaatgcttcattcaaaaaccatgatgctggatggaagctacagtgagtctgaggccaacagcctggctgggtaccccagaagccatatcctgacagaagaagaaaggcaagacaaaatagtggtccacctgggcctgagtggtgaagccaacgctgccagaaagaaggggcttctgaagggccagacgggttttcgtatcttccagaatacccatgccattgacaaatactctaggttgatattccctgcctcctacatatttttcaacttaatttattggtcagtgttttcctaggggctccaaggctgttcctagaagagggcatagacatcgagggggcctggccagtcattgacagacggacttgttgaccacacgcccctcaccaaacaatgcagcagctactggaccaccctgagcagcactcatctctcagagaagccc

SEQ ID NO: 136423 - DNA, 1416 bp, Homo sapiens
  Payload ID: 6699
  Gene Symbol: GABRR3
  Gene Name: gamma-aminobutyric acid (GABA) A receptor, rho 3 (gene/pseudogene)
  Uniprot ID: A8MPY1
  ENST ID: ENST00000472788
  CDS Start-End: 3-1406
agatggtcctggctttccagttagtctccttcacctacatctggatcatattgaaaccaaatgtttgtgctgcttctaacatcaagatgacacaccagcggtgctcctcttcaatgaaacaaacctgcaaacaagaaactagaatgaagaaagatgacagtaccaaagcgcggcctcagaaatatgagcaacttctccatatagaggacaacgatttcgcaatgagacctggatttggagggtctccagtgccagtaggtatagatgtccatgttgaaagcattgacagcatttcagagactaacatggactttacaatgactttttatctcaggcattactggaaagacgagaggctctcctttcctagcacagcaaacaaaagcatgacatttgatcatagattgaccagaaagatctgggtgcctgatatcttttttgtccactctaaaagatccttcatccatgatacaactatggagaatatcatgctgcgcgtacaccctgatggaaacgtcctcctaagtctcaggataacggtttcggccatgtgctttatggatttcagcaggtttcctcttgacactcaaaattgttctcttgaactggaaagctatgcctacaatgaggatgacctaatgctatactggaaacacggaaacaagtccttaaatactgaagaacatatgtccctttctcagttcttcattgaagacttcagtgcatctagtggattagctttctatagcagcacaggttggtacaataggcttttcatcaactttgtgctaaggaggcatgttttcttctttgtgctgcaaacctatttcccagccatattgatggtgatgctttcatgggtttcattttggattgaccgaagagctgttcctgcaagagtttccctgggaatcaccacagtgctgaccatgtccacaatcatcactgctgtgagcgcctccatgccccaggtgtcctacctcaaggctgtggatgtgtacctgtgggtcagctccctctttgtgttcctgtcagtcattgagtatgcagctgtgaactacctcaccacagtggaagagcggaaacaattcaagaagacaggaaagatttctaggatgtacaatattgatgcagttcaagctatggcctttgatggttgttaccatgacagcgagattgacatggaccagacttccctctctctaaactcagaagacttcatgagaagaaaatcgatatgcagccccagcaccgattcatctcggataaagagaagaaaatccctaggaggacatgttggtagaatcattctggaaaacaaccatgtcattgacacctattctaggattttattccccattgtgtatattttatttaatttgttttactggggtgtatatgtatgaaggggaattt

SEQ ID NO: 136424 - DNA, 1521 bp, Homo sapiens
  Payload ID: 6699
  Gene Symbol: GABRR3
  Gene Name: gamma-aminobutyric acid (GABA) A receptor, rho 3 (gene/pseudogene)
  Uniprot ID: A8MPY1
  ENST ID: ENST00000621172
  CDS Start-End: 118-1521
actgagtatggattgagcatcacactaaaaaccttccccggaaaaagggaccaaaggatgtaaactgaaaattttaaaaatctgctttgttttcctcaaattgctgaagatccagagatggtcctggctttccagttagtctccttcacctacatctggatcatattgaaaccaaatgtttgtgctgcttctaacatcaagatgacacaccagcggtgctcctcttcaatgaaacaaacctgcaaacaagaaactagaatgaagaaagatgacagtaccaaagcgcggcctcagaaatatgagcaacttctccatatagaggacaacgatttcgcaatgagacctggatttggagggtctccagtgccagtaggtatagatgtccatgttgaaagcattgacagcatttcagagactaacatggactttacaatgactttttatctcaggcattactggaaagacgagaggctctcctttcctagcacagcaaacaaaagcatgacatttgatcatagattgaccagaaagatctgggtgcctgatatcttttttgtccactctaaaagatccttcatccatgatacaactatggagaatatcatgctgcgcgtacaccctgatggaaacgtcctcctaagtctcaggataacggtttcggccatgtgctttatggatttcagcaggtttcctcttgacactcaaaattgttctcttgaactggaaagctatgcctacaatgaggatgacctaatgctatactggaaacacggaaacaagtccttaaatactgaagaacatatgtccctttctcagttcttcattgaagacttcagtgcatctagtggattagctttctatagcagcacaggttggtacaataggcttttcatcaactttgtgctaaggaggcatgttttcttctttgtgctgcaaacctatttcccagccatattgatggtgatgctttcatgggtttcattttggattgaccgaagagctgttcctgcaagagtttccctgggaatcaccacagtgctgaccatgtccacaatcatcactgctgtgagcgcctccatgccccaggtgtcctacctcaaggctgtggatgtgtacctgtgggtcagctccctctttgtgttcctgtcagtcattgagtatgcagctgtgaactacctcaccacagtggaagagcggaaacaattcaagaagacaggaaagatttctaggatgtacaatattgatgcagttcaagctatggcctttgatggttgttaccatgacagcgagattgacatggaccagacttccctctctctaaactcagaagacttcatgagaagaaaatcgatatgcagccccagcaccgattcatctcggataaagagaagaaaatccctaggaggacatgttggtagaatcattctggaaaacaaccatgtcattgacacctattctaggattttattccccattgtgtatattttatttaatttgttttactggggtgtatatgtatga

SEQ ID NO: 136425 - DNA, 6172 bp, Homo sapiens
  Payload ID: 6700
  Gene Symbol: GABRQ
  Gene Name: gamma-aminobutyric acid (GABA) A receptor, theta
  Uniprot ID: Q9UN88
  ENST ID: ENST00000598523
  CDS Start-End: 21-1919
gcgcccagaacgccccggccatgggcatccgaggcatgctgcgagccgcagtgatcctgctgctcatcaggacctggctcgcggagggcaactaccccagtcccatcccgaaattccacttcgagttctcctctgctgtgcccgaagtcgtcctgaacctcttcaactgcaaaaattgtgcaaatgaagctgtggttcaaaagattttggacagggtgctgtcaagatacgatgtccgcctgagaccgaattttggaggtgcccctgtgcctgtgagaatatctatttatgtcacgagcattgaacagatctcagaaatgaatatggactacacgatcacgatgttttttcatcagacttggaaagattcacgcttagcatactatgagaccaccctgaacttgaccctggactatcggatgcatgagaagttgtgggtccctgactgctactttctgaacagcaaggatgctttcgtgcatgatgtgactgtggagaatcgcgtgtttcagcttcacccagatggaacggtgcggtacggcatccgactcaccactacagcagcttgttccctggatctgcataaattccctatggacaagcaggcctgcaacctggtggtagagagctatggttacacggttgaagacatcatattattctgggatgacaatgggaacgccatccacatgactgaggagctgcatatccctcagttcactttcctgggaaggacgattactagcaaggaggtgtatttctacacaggttcctacatacgcctgatactgaagttccaggttcagagggaagttaacagctaccttgtgcaagtctactggcctactgtcctcaccactattacctcttggatatcgttttggatgaactatgattcctctgcagccagggtgacaattggcttaacttcaatgctcatcctgaccaccatcgactcacatctgcgggataagctccccaacatttcctgtatcaaggccattgatatctatatcctcgtgtgcttgttctttgtgttcctgtccttgctggagtatgtctacatcaactatcttttctacagtcgaggacctcggcgccagcctaggcgacacaggagaccccgaagagtcattgcccgctaccgctaccagcaagtggtggtaggaaacgtgcaggatggcctgattaacgtggaagacggagtcagctctctccccatcaccccagcgcaggcccccctggcaagcccggaaagcctcggttctttgacgtccacctccgagcaggcccagctggccacctcggaaagcctcagcccactcacttctctctcaggccaggcccccctggccactggagaaagcctgagcgatctcccctccacctcagagcaggcccggcacagctatggtgttcgctttaatggtttccaggctgatgacagtattattcctaccgaaatccgcaaccgtgtcgaagcccatggccatggtgttacccatgaccatgaagattccaatgagagcttgagctcggatgagcgccatggccatggccccagtgggaagcccatgcttcaccatggcgagaagggtgtgcaagaagcaggctgggaccttgatgacaacaatgacaagagcgactgccttgccattaaggagcaattcaagtgtgatactaacagtacctggggccttaatgatgatgagctcatggcccatggccaagagaaggacagtagctcagagtctgaggatagttgccccccaagccctgggtgctccttcactgaagggttctccttcgatctctttaatcctgactacgtcccaaaggtcgacaagtggtcccggttcctcttccctctggcctttgggttgttcaacattgtttactgggtataccatatgtattagtcccccagtgctccagaacagcgggagcactgtgctgtgctcctttcagtttcttttgggtttgtttttccctctttcctttgttccttttattttgtggttatttgggcaatccaataagttcatacttctctttataaacatgaggtggggagtaattggaaagaacatgttctagctggaagggaagggattgaggaggagttggaggtatacagcacatggatttcctttcctgctagaagactctcaccttttcaaagacttgtaacaaggaataagcatagaaaagcccctggaaatgtttagaggacagagaagagccaggttgggggatggggcaaggatctgggccttttgcccacaaacatttctggggggcttttctgtcccccttgaggtgtcaacatttctttttcattacatgttttcttctttttttgtttcctcctagggattatgggtcttgttcaccctctgcttagggctttatagaagaaagtcaagctgggttgggctggggttcatagctaaagggctagccatggcttagaagttcagggaacttcctataggaaacttagggagcatttgtaagtgcctttcccccactgtatggcatttgactgtggtgttttgatgcaagcgtggaaggggaatgtgggtggatggggctgcagagtgagacatcagggtgagagagcacatactcagcttgtggggttggcagagggtggggggtgatgtcaggttggaaattacacagttgagctggcctcttcggagggattggaacttgcctatatttctgcttcagaacgcttggcaatagagactcaatacatctgtctaagtcaggagttagctttccgtcagttgctgagttgatcaccagttacagcacttggtgaataagcactaaggttaggataattcacacttgctattttaccatctgatctagactagcagatgaatatctatcgtaagtctatatactaatcctttctatttgtctagtgcatagtaagtgtcaacaagctccctgacccattacatcactggagcctcacaggagccctgtaagccagggaaggcaaagcacattgtccccagtgttccaaggaaaacgaatggagcttatgccgcatgcttgaggacatgcagccagtgagtggtagatccaccccacttgctctttcttgtctttttcctcctgactgtcccaactgaggcatttccttttcttccctccctaaagagggtgctccagagggcccccaccacatcctctagcacctggggcatctctgcaggaataggctggtgaccagccaatgagcgtgacgtgagcagatggagaacacactctgcccactgagcagggcccctaacggaagtaggattggccagcattccaacttgccaagcagctccacctcactgatggaggttgtgagggagtgaactttgccgagcactcaacatatgccacctcttcctccctatgcagtctctccctcagtcccttacccctctacccactcaccctttaactgtgcttctgtgtttgtgtttctgtatatacctgggtgtatgcatatgcagcagggtgggtgtatgtacatatacaaccatttgagaagctgcatagtgccgtgtctagtggtgtaaatctacattggtgtgtacagaattgtatctacagcatgtggatgcatgcgtgtgtgtgcacatccctgtgaaagtgtggcttatgtatgtgtatgcttgtgtacacatgggtctatgctgagtgcatgtatataagggcatgtctgcatatctatgtttatctgatttgaatgggtgtgaaaggaaatacccctgaaagcatatgtattccctgttggtgacccttctagaaccactataattcccttggcctgctcccatatggtggaggggccctatttggccgggctgcttaactgactgtttctttccaacttcctgttccagggagcagcatctcccagttcccttccactgtttgccctgtccctccatccatctgtgctgtctcctagatagaagactggggaagtgaatgtagtcctaagaagtggtgagctagtgccttgaggtaggaagtggttaatccatggaagaagctgcaagtacagagcatttcactttgtcctagaggaacatgtttcggggtaacaggctggggagtgaggctgaaagaggcattgagaatagacacttgtacagtcacatacacatacacacacacaaatcttgtacgacagttgaaaacaagaaagttaccactggaagagctaaaattgcctctttatttttggataccccatacagagattcaggtggaggggagagcagtgactccatgtctgaagctcccaatgtggctattgaaaggctggcttcctggagcctaagcattggttggttgacgtggatttgggtctccagcaccctggaggtgctttcaaccctgtggtggcaagcagttcatttgggataaagtcataaagggagattggagcagtgtgaagaaaaggagggttttaagatttgtctggaagcaatgcacatgaaggcttcacagcacagaggaagggcagcgaggccagttgtaaatatctctatagatccatatagctagatataatactataccttaaaaaggatatcttgccctgacgtgctgcaatgagagcagttgaactctactgcgactcatactctgtaggttaagtgtcaaaatgaggtggagatttggcagtgacaccctttcgggaacgtgaaccttctgagtttgctatggatttggtcattttagcctgcacgttgccagatctccccttgttgagtcttgtatgtggtctgtcctctgtgtcatttgagtcctcagctgtccccaaccccttcccagcccctccccagcctgcagtcaccccctgtccagcaagctgcctccatcccatccctctcctcacctcacaccaggtaactctggaagtgcagaatgcttggtagtttggagcttgggcagcatctgggatgcaacaacccctattttactcttctacccaccttccatttctttccttcccatcgacttccccgacccaggatcccttctttgccactatcatgggaaggacacccctgtctgtctttctgaagtatcattttattgtggggatgtgtgacacgtttcctaccaagttcttgccagttccatctgccactgtggggtgcctttgcacaggtcatggacgatctgctgggtcttactagagcctgtcaaatgtattcttacaattcatgtcatcttgttaatagcaggacttcaaagtctttgcatatttagagctgagttttgctgagactgtggccattcctaatgaggtttcctcattccatatatataatagctaacccttaaagccattaactaatgaatgcatttattaagctatccactcgcatggtaccctgctgtggtgatgagcagtaactttctagctattccatagcccaacatcaaaggaaatcgtgactcgtcctactagaagtgtagtgtctttgtgtttgttgtgtagtgtcctgtgatcaatataaaatctatattatcagtgttgggttttcaggggagggagggagaggatgttaaagtctctctttgataaacttaaattatgaaatagcccagttgttcagggtcacttctattgactcaatttgtgtgagactttgcactcactatctcgccggccggactgcatgcccagggtcagtagtcagcagagctaaaggtgcccgaatttagcacagctggctgtggtgcctgacatagggcagtaccgggggattcttcagaggtcagccaagtcggtaacattctgtgaagcagattaaatacagtaaaatcaaacaaacggaggtctttggaagtgatgctgggcccaggcagtgaaaatcaagaaaagaggagaaagaccaagacctggatgtcctggacgacctgacccaaaaaggggcacaaagcagcagagcttcaccaggtgactgggtggcttctttgtcctcattaaatgtacatctttgcatgaaaaggaccttgactggtctggactttaacaaagtaaaatatgaagaaacgtaaaattatgcttctgaaaaatatactgaaataaaattttgtaaatagctaaaagaaaaataaataaatataataacaa

SEQ ID NO: 136426 - DNA, 3506 bp, Homo sapiens
  Payload ID: 6701
  Gene Symbol: GABBR1
  Gene Name: gamma-aminobutyric acid (GABA) B receptor, 1
  Uniprot ID: Q9UBS5
  ENST ID: ENST00000355973
  CDS Start-End: 248-2782
ctcctcctcctcccctccgtcggtcagtcagtccgcgaggagagtccgcggtggcggcgacggtggcgagagccgcgggggccgtaggaagccaaccttccctgcttctccggggccctcgccccctcctccccacaaaatcagggatggaggcgcctccccggcaccctcttagcagccctccccaggaaaagtgtcccccctgagctcctaacgctccccaacagctacccctgccccccacgccatggggcccggggccccttttgcccgggtggggtggccactgccgcttctggttgtgatggcggcaggggtggctccggtgtgggcctcccactccccccatctcccgcggcctcactcgcgggtccccccgcacccctcctcagaacggcgcgcagtgtacatcggggcactgtttcccatgagcgggggctggccagggggccaggcctgccagcccgcggtggagatggcgctggaggacgtgaatagccgcagggacatcctgccggactatgagctcaagctcatccaccacgacagcaagtgtgatccaggccaagccaccaagtacctatatgagctgctctacaacgaccctatcaagatcatccttatgcctggctgcagctctgtctccacgctggtggctgaggctgctaggatgtggaacctcattgtgctttcctatggctccagctcaccagccctgtcaaaccggcagcgtttccccactttcttccgaacgcacccatcagccacactccacaaccctacccgcgtgaaactctttgaaaagtggggctggaagaagattgctaccatccagcagaccactgaggtcttcacttcgactctggacgacctggaggaacgagtgaaggaggctggaattgagattactttccgccagagtttcttctcagatccagctgtgcccgtcaaaaacctgaagcgccaggatgcccgaatcatcgtgggacttttctatgagactgaagcccggaaagttttttgtgaggtgtacaaggagcgtctctttgggaagaagtacgtctggttcctcattgggtggtatgctgacaattggttcaagatctacgacccttctatcaactgcacagtggatgagatgactgaggcggtggagggccacatcacaactgagattgtcatgctgaatcctgccaatacccgcagcatttccaacatgacatcccaggaatttgtggagaaactaaccaagcgactgaaaagacaccctgaggagacaggaggcttccaggaggcaccgctggcctatgatgccatctgggccttggcactggccctgaacaagacatctggaggaggcggccgttctggtgtgcgcctggaggacttcaactacaacaaccagaccattaccgaccaaatctaccgggcaatgaactcttcgtcctttgagggtgtctctggccatgtggtgtttgatgccagcggctctcggatggcatggacgcttatcgagcagcttcagggtggcagctacaagaagattggctactatgacagcaccaaggatgatctttcctggtccaaaacagataaatggattggagggtcccccccagctgaccagaccctggtcatcaagacattccgcttcctgtcacagaaactctttatctccgtctcagttctctccagcctgggcattgtcctagctgttgtctgtctgtcctttaacatctacaactcacatgtccgttatatccagaactcacagcccaacctgaacaacctgactgctgtgggctgctcactggctttagctgctgtcttccccctggggctcgatggttaccacattgggaggaaccagtttcctttcgtctgccaggcccgcctctggctcctgggcctgggctttagtctgggctacggttccatgttcaccaagatttggtgggtccacacggtcttcacaaagaaggaagaaaagaaggagtggaggaagactctggaaccctggaagctgtatgccacagtgggcctgctggtgggcatggatgtcctcactctcgccatctggcagatcgtggaccctctgcaccggaccattgagacatttgccaaggaggaacctaaggaagatattgacgtctctattctgccccagctggagcattgcagctccaggaagatgaatacatggcttggcattttctatggttacaaggggctgctgctgctgctgggaatcttccttgcttatgagaccaagagtgtgtccactgagaagatcaatgatcaccgggctgtgggcatggctatctacaatgtggcagtcctgtgcctcatcactgctcctgtcaccatgattctgtccagccagcaggatgcagcctttgcctttgcctctcttgccatagttttctcctcctatatcactcttgttgtgctctttgtgcccaagatgcgcaggctgatcacccgaggggaatggcagtcggaggcgcaggacaccatgaagacagggtcatcgaccaacaacaacgaggaggagaagtcccggctgttggagaaggagaaccgtgaactggaaaagatcattgctgagaaagaggagcgtgtctctgaactgcgccatcaactccagtctcggcagcagctccgctcccggcgccacccaccgacacccccagaaccctctgggggcctgcccaggggaccccctgagccccccgaccggcttagctgtgatgggagtcgagtgcatttgctttataagtgagggtgcatgtccgttccgaggaatgggatttaatgacctttgatgccaacccatatgacagcgtgaaaaaaatcaaagaacatgtccggtctaagaccaaggttcctgtgcaggaccaggttcttttgctgggctccaagatcttaaagccacggagaagcctctcatcttatggcattgacaaagagaagaccatccaccttaccctgaaagtggtgaagcccagtgatgaggagctgcccttgtttcttgtggagtcaggtgatgaggcaaagaggcacctcctccaggtgcgaaggtccagctcagtggcacaagtgaaagcaatgatcgagactaagacgggtataatccctgagacccagattgtgacttgcaatggaaagagactggaagatgggaagatgatggcagattacggcatcagaaagggcaacttactcttcctggcatgttattgtattggagggtgaccaccctgggcatggggtgttggcaggggtcaaaaagcttatttcttttaatctcttactcaacgaacacatcttctgatgatttcccaaaattaatgagaatgagatgagtagagtaagatttgggtgggatgggtaggatgaagtatattgcccaactctatgtttctttgattctaacacaattaattaagtgacatgatttttactaatgtattactgagactagtaaataaatttttaaggcaaaa

SEQ ID NO: 136427 - DNA, 1739 bp, Homo sapiens
  Payload ID: 6701
  Gene Symbol: GABBR1
  Gene Name: gamma-aminobutyric acid (GABA) B receptor, 1
  Uniprot ID: Q9UBS5
  ENST ID: ENST00000376977
  CDS Start-End: 3-1739
agatgttgctgctgctgctactggcgccactcttcctccgccccccgggcgcgggcggggcgcagacccccaacgccacctcagaaggttgccagatcatacacccgccctgggaagggggcatcaggtaccggggcctgactcgggaccaggtgaaggctatcaacttcctgccagtggactatgagattgagtatgtgtgccggggggagcgcgaggtggtggggcccaaggtccgcaagtgcctggccaacggctcctggacagatatggacacacccagccgctgtgtccgaatctgctccaagtcttatttgaccctggaaaatgggaaggttttcctgacgggtggggacctcccagctctggacggagcccgggtggatttccggtgtgaccccgacttccatctggtgggcagctcccggagcatctgtagtcagggccagtggagcacccccaagccccactgccaggtgaatcgaacgccacactcagaacggcgcgcagtgtacatcggggcactgtttcccatgagcgggggctggccagggggccaggcctgccagcccgcggtggagatggcgctggaggacgtgaatagccgcagggacatcctgccggactatgagctcaagctcatccaccacgacagcaagtgtgatccaggccaagccaccaagtacctatatgagctgctctacaacgaccctatcaagatcatccttatgcctggctgcagctctgtctccacgctggtggctgaggctgctaggatgtggaacctcattgtgctttcctatggctccagctcaccagccctgtcaaaccggcagcgtttccccactttcttccgaacgcacccatcagccacactccacaaccctacccgcgtgaaactctttgaaaagtggggctggaagaagattgctaccatccagcagaccactgaggtcttcacttcgactctggacgacctggaggaacgagtgaaggaggctggaattgagattactttccgccagagtttcttctcagatccagctgtgcccgtcaaaaacctgaagcgccaggatgcccgaatcatcgtgggacttttctatgagactgaagcccggaaagttttttgtgaggtgtacaaggagcgtctctttgggaagaagtacgtctggttcctcattgggtggtatgctgacaattggttcaagatctacgacccttctatcaactgcacagtggatgagatgactgaggcggtggagggccacatcacaactgagattgtcatgctgaatcctgccaatacccgcagcatttccaacatgacatcccaggaatttgtggagaaactaaccaagcgactgaaaagacaccctgaggagacaggaggcttccaggaggcaccgctggcctatgatgccatctgggccttggcactggccctgaacaagacatctggaggaggcggccgttctggtgtgcgcctggaggacttcaactacaacaaccagaccattaccgaccaaatctaccgggcaatgaactcttcgtcctttgagggtgtctctggccatgtggtgtttgatgccagcggctctcggatggcatggacgcttatcgagcagcttcagggtggcagctacaagaagattggctactatgacagcaccaaggatgatctttcctggtccaaaacagataaatggattgttatatccagaactcacagcccaacctga

SEQ ID NO: 136428 - DNA, 4104 bp, Homo sapiens
  Payload ID: 6701
  Gene Symbol: GABBR1
  Gene Name: gamma-aminobutyric acid (GABA) B receptor, 1
  Uniprot ID: Q9UBS5
  ENST ID: ENST00000377012
  CDS Start-End: 262-2796
acatctccctcctgctcctcctcctcccctccgtcggtcagtcagtccgcgaggagagtccgcggtggcggcgacggtggcgagagccgcgggggccgtaggaagccaaccttccctgcttctccggggccctcgccccctcctccccacaaaatcagggatggaggcgcctccccggcaccctcttagcagccctccccaggaaaagtgtcccccctgagctcctaacgctccccaacagctacccctgccccccacgccatggggcccggggccccttttgcccgggtggggtggccactgccgcttctggttgtgatggcggcaggggtggctccggtgtgggcctcccactccccccatctcccgcggcctcactcgcgggtccccccgcacccctcctcagaacggcgcgcagtgtacatcggggcactgtttcccatgagcgggggctggccagggggccaggcctgccagcccgcggtggagatggcgctggaggacgtgaatagccgcagggacatcctgccggactatgagctcaagctcatccaccacgacagcaagtgtgatccaggccaagccaccaagtacctatatgagctgctctacaacgaccctatcaagatcatccttatgcctggctgcagctctgtctccacgctggtggctgaggctgctaggatgtggaacctcattgtgctttcctatggctccagctcaccagccctgtcaaaccggcagcgtttccccactttcttccgaacgcacccatcagccacactccacaaccctacccgcgtgaaactctttgaaaagtggggctggaagaagattgctaccatccagcagaccactgaggtcttcacttcgactctggacgacctggaggaacgagtgaaggaggctggaattgagattactttccgccagagtttcttctcagatccagctgtgcccgtcaaaaacctgaagcgccaggatgcccgaatcatcgtgggacttttctatgagactgaagcccggaaagttttttgtgaggtgtacaaggagcgtctctttgggaagaagtacgtctggttcctcattgggtggtatgctgacaattggttcaagatctacgacccttctatcaactgcacagtggatgagatgactgaggcggtggagggccacatcacaactgagattgtcatgctgaatcctgccaatacccgcagcatttccaacatgacatcccaggaatttgtggagaaactaaccaagcgactgaaaagacaccctgaggagacaggaggcttccaggaggcaccgctggcctatgatgccatctgggccttggcactggccctgaacaagacatctggaggaggcggccgttctggtgtgcgcctggaggacttcaactacaacaaccagaccattaccgaccaaatctaccgggcaatgaactcttcgtcctttgagggtgtctctggccatgtggtgtttgatgccagcggctctcggatggcatggacgcttatcgagcagcttcagggtggcagctacaagaagattggctactatgacagcaccaaggatgatctttcctggtccaaaacagataaatggattggagggtcccccccagctgaccagaccctggtcatcaagacattccgcttcctgtcacagaaactctttatctccgtctcagttctctccagcctgggcattgtcctagctgttgtctgtctgtcctttaacatctacaactcacatgtccgttatatccagaactcacagcccaacctgaacaacctgactgctgtgggctgctcactggctttagctgctgtcttccccctggggctcgatggttaccacattgggaggaaccagtttcctttcgtctgccaggcccgcctctggctcctgggcctgggctttagtctgggctacggttccatgttcaccaagatttggtgggtccacacggtcttcacaaagaaggaagaaaagaaggagtggaggaagactctggaaccctggaagctgtatgccacagtgggcctgctggtgggcatggatgtcctcactctcgccatctggcagatcgtggaccctctgcaccggaccattgagacatttgccaaggaggaacctaaggaagatattgacgtctctattctgccccagctggagcattgcagctccaggaagatgaatacatggcttggcattttctatggttacaaggggctgctgctgctgctgggaatcttccttgcttatgagaccaagagtgtgtccactgagaagatcaatgatcaccgggctgtgggcatggctatctacaatgtggcagtcctgtgcctcatcactgctcctgtcaccatgattctgtccagccagcaggatgcagcctttgcctttgcctctcttgccatagttttctcctcctatatcactcttgttgtgctctttgtgcccaagatgcgcaggctgatcacccgaggggaatggcagtcggaggcgcaggacaccatgaagacagggtcatcgaccaacaacaacgaggaggagaagtcccggctgttggagaaggagaaccgtgaactggaaaagatcattgctgagaaagaggagcgtgtctctgaactgcgccatcaactccagtctcggcagcagctccgctcccggcgccacccaccgacacccccagaaccctctgggggcctgcccaggggaccccctgagccccccgaccggcttagctgtgatgggagtcgagtgcatttgctttataagtgagggtagggtgagggaggacaggccagtagggggagggaaagggagaggggaagggcaggggactcaggaagcagggggtccccatccccagctgggaagaacatgctatccaatctcatctcttgtaaatacatgtccccctgtgagttctgggctgatttgggtctctcatacctctgggaaacagacctttttctctcttactgcttcatgtaattttgtatcacctcttcacaatttagttcgtacctggcttgaagctgctcactgctcacacgctgcctcctcagcagcctcactgcatctttctcttcccatgcaacaccctcttctagttaccacggcaacccctgcagctcctctgcctttgtgctctgttcctgtccagcaggggtctcccaacaagtgctctttccaccccaaaggggcctctccttttctccactgtcataatctctttccatcttacttgcccttctatactttctcacatgtggctccccctgaattttgcttcctttgggagctcattcttttcgccaaggctcacatgctccttgcctctgctctgtgcactcacgctcagcacacatgcatcctcccctctcctgcgtgtgcccactgaacatgctcatgtgtacacacgcttttcccgtatgctttcttcatgttcagtcacatgtgctctcgggtgccctgcattcacagctacgtgtgcccctctcatggtcatgggtctgcccttgagcgtgtttgggtaggcatgtgcaatttgtctagcatgctgagtcatgtctttcctatttgcacacgtccatgtttatccatgtactttccctgtgtaccctccatgtaccttgtgtactttcttcccttaaatcatggtattcttctgacagagccatatgtaccctaccctgcacattgttatgcacttttccccaattcatgtttggtggggccatccacaccctctccttgtcacagaatctccatttctgctcagattccccccatctccattgcattcatgtactaccctcagtctacactcacaatcatcttctcccaagactgctcccttttgttttgtgtttttttgaggggaattaaggaaaaataagtgggggcaggtttggagagctgcttccagtggatagttgatgagaatcctgaccaaaggaaggcacccttgactgttgggatagacagatggacctatggggtgggaggtggtgtccctttcacactgtggtgtctcttggggaaggatctccccgaatctcaataaaccagtgaacagtgtga

SEQ ID NO: 136429 - DNA, 4299 bp, Homo sapiens
  Payload ID: 6701
  Gene Symbol: GABBR1
  Gene Name: gamma-aminobutyric acid (GABA) B receptor, 1
  Uniprot ID: Q9UBS5
  ENST ID: ENST00000377016
  CDS Start-End: 287-2986
gcccgggagctctccctggtccccggcgccgcctccttccctcccggctccccgctccccgctcccgtggctgccgccgccccggggaagaagagacaggggtggggtttgggggaagcgagagaggaggggagagaccctggccaggctggagcctggattcgaggggaggagggacgggaggaggagaaaggtggaggagaagggaggggggagcggggaggagcggccgggcctggggccttgaggcccggggagagccggggagccgggcccgcgcgccgagatgttgctgctgctgctactggcgccactcttcctccgccccccgggcgcgggcggggcgcagacccccaacgccacctcagaaggttgccagatcatacacccgccctgggaagggggcatcaggtaccggggcctgactcgggaccaggtgaaggctatcaacttcctgccagtggactatgagattgagtatgtgtgccggggggagcgcgaggtggtggggcccaaggtccgcaagtgcctggccaacggctcctggacagatatggacacacccagccgctgtgtgaatcgaacgccacactcagaacggcgcgcagtgtacatcggggcactgtttcccatgagcgggggctggccagggggccaggcctgccagcccgcggtggagatggcgctggaggacgtgaatagccgcagggacatcctgccggactatgagctcaagctcatccaccacgacagcaagtgtgatccaggccaagccaccaagtacctatatgagctgctctacaacgaccctatcaagatcatccttatgcctggctgcagctctgtctccacgctggtggctgaggctgctaggatgtggaacctcattgtgctttcctatggctccagctcaccagccctgtcaaaccggcagcgtttccccactttcttccgaacgcacccatcagccacactccacaaccctacccgcgtgaaactctttgaaaagtggggctggaagaagattgctaccatccagcagaccactgaggtcttcacttcgactctggacgacctggaggaacgagtgaaggaggctggaattgagattactttccgccagagtttcttctcagatccagctgtgcccgtcaaaaacctgaagcgccaggatgcccgaatcatcgtgggacttttctatgagactgaagcccggaaagttttttgtgaggtgtacaaggagcgtctctttgggaagaagtacgtctggttcctcattgggtggtatgctgacaattggttcaagatctacgacccttctatcaactgcacagtggatgagatgactgaggcggtggagggccacatcacaactgagattgtcatgctgaatcctgccaatacccgcagcatttccaacatgacatcccaggaatttgtggagaaactaaccaagcgactgaaaagacaccctgaggagacaggaggcttccaggaggcaccgctggcctatgatgccatctgggccttggcactggccctgaacaagacatctggaggaggcggccgttctggtgtgcgcctggaggacttcaactacaacaaccagaccattaccgaccaaatctaccgggcaatgaactcttcgtcctttgagggtgtctctggccatgtggtgtttgatgccagcggctctcggatggcatggacgcttatcgagcagcttcagggtggcagctacaagaagattggctactatgacagcaccaaggatgatctttcctggtccaaaacagataaatggattggagggtcccccccagctgaccagaccctggtcatcaagacattccgcttcctgtcacagaaactctttatctccgtctcagttctctccagcctgggcattgtcctagctgttgtctgtctgtcctttaacatctacaactcacatgtccgttatatccagaactcacagcccaacctgaacaacctgactgctgtgggctgctcactggctttagctgctgtcttccccctggggctcgatggttaccacattgggaggaaccagtttcctttcgtctgccaggcccgcctctggctcctgggcctgggctttagtctgggctacggttccatgttcaccaagatttggtgggtccacacggtcttcacaaagaaggaagaaaagaaggagtggaggaagactctggaaccctggaagctgtatgccacagtgggcctgctggtgggcatggatgtcctcactctcgccatctggcagatcgtggaccctctgcaccggaccattgagacatttgccaaggaggaacctaaggaagatattgacgtctctattctgccccagctggagcattgcagctccaggaagatgaatacatggcttggcattttctatggttacaaggggctgctgctgctgctgggaatcttccttgcttatgagaccaagagtgtgtccactgagaagatcaatgatcaccgggctgtgggcatggctatctacaatgtggcagtcctgtgcctcatcactgctcctgtcaccatgattctgtccagccagcaggatgcagcctttgcctttgcctctcttgccatagttttctcctcctatatcactcttgttgtgctctttgtgcccaagatgcgcaggctgatcacccgaggggaatggcagtcggaggcgcaggacaccatgaagacagggtcatcgaccaacaacaacgaggaggagaagtcccggctgttggagaaggagaaccgtgaactggaaaagatcattgctgagaaagaggagcgtgtctctgaactgcgccatcaactccagtctcggcagcagctccgctcccggcgccacccaccgacacccccagaaccctctgggggcctgcccaggggaccccctgagccccccgaccggcttagctgtgatgggagtcgagtgcatttgctttataagtgagggtagggtgagggaggacaggccagtagggggagggaaagggagaggggaagggcaggggactcaggaagcagggggtccccatccccagctgggaagaacatgctatccaatctcatctcttgtaaatacatgtccccctgtgagttctgggctgatttgggtctctcatacctctgggaaacagacctttttctctcttactgcttcatgtaattttgtatcacctcttcacaatttagttcgtacctggcttgaagctgctcactgctcacacgctgcctcctcagcagcctcactgcatctttctcttcccatgcaacaccctcttctagttaccacggcaacccctgcagctcctctgcctttgtgctctgttcctgtccagcaggggtctcccaacaagtgctctttccaccccaaaggggcctctccttttctccactgtcataatctctttccatcttacttgcccttctatactttctcacatgtggctccccctgaattttgcttcctttgggagctcattcttttcgccaaggctcacatgctccttgcctctgctctgtgcactcacgctcagcacacatgcatcctcccctctcctgcgtgtgcccactgaacatgctcatgtgtacacacgcttttcccgtatgctttcttcatgttcagtcacatgtgctctcgggtgccctgcattcacagctacgtgtgcccctctcatggtcatgggtctgcccttgagcgtgtttgggtaggcatgtgcaatttgtctagcatgctgagtcatgtctttcctatttgcacacgtccatgtttatccatgtactttccctgtgtaccctccatgtaccttgtgtactttcttcccttaaatcatggtattcttctgacagagccatatgtaccctaccctgcacattgttatgcacttttccccaattcatgtttggtggggccatccacaccctctccttgtcacagaatctccatttctgctcagattccccccatctccattgcattcatgtactaccctcagtctacactcacaatcatcttctcccaagactgctcccttttgttttgtgtttttttgaggggaattaaggaaaaataagtgggggcaggtttggagagctgcttccagtggatagttgatgagaatcctgaccaaaggaaggcacccttgactgttgggatagacagatggacctatggggtgggaggtggtgtccctttcacactgtggtgtctcttggggaaggatctccccgaatctcaataaaccagtgaacagtgtgactcgg

SEQ ID NO: 136430 - DNA, 4527 bp, Homo sapiens
  Payload ID: 6701
  Gene Symbol: GABBR1
  Gene Name: gamma-aminobutyric acid (GABA) B receptor, 1
  Uniprot ID: Q9UBS5
  ENST ID: ENST00000377034
  CDS Start-End: 337-3222
ccctctcttccccccgccctgccttcccttgcaccctccttcttccctccgcccgggagctctccctggtccccggcgccgcctccttccctcccggctccccgctccccgctcccgtggctgccgccgccccggggaagaagagacaggggtggggtttgggggaagcgagagaggaggggagagaccctggccaggctggagcctggattcgaggggaggagggacgggaggaggagaaaggtggaggagaagggaggggggagcggggaggagcggccgggcctggggccttgaggcccggggagagccggggagccgggcccgcgcgccgagatgttgctgctgctgctactggcgccactcttcctccgccccccgggcgcgggcggggcgcagacccccaacgccacctcagaaggttgccagatcatacacccgccctgggaagggggcatcaggtaccggggcctgactcgggaccaggtgaaggctatcaacttcctgccagtggactatgagattgagtatgtgtgccggggggagcgcgaggtggtggggcccaaggtccgcaagtgcctggccaacggctcctggacagatatggacacacccagccgctgtgtccgaatctgctccaagtcttatttgaccctggaaaatgggaaggttttcctgacgggtggggacctcccagctctggacggagcccgggtggatttccggtgtgaccccgacttccatctggtgggcagctcccggagcatctgtagtcagggccagtggagcacccccaagccccactgccaggtgaatcgaacgccacactcagaacggcgcgcagtgtacatcggggcactgtttcccatgagcgggggctggccagggggccaggcctgccagcccgcggtggagatggcgctggaggacgtgaatagccgcagggacatcctgccggactatgagctcaagctcatccaccacgacagcaagtgtgatccaggccaagccaccaagtacctatatgagctgctctacaacgaccctatcaagatcatccttatgcctggctgcagctctgtctccacgctggtggctgaggctgctaggatgtggaacctcattgtgctttcctatggctccagctcaccagccctgtcaaaccggcagcgtttccccactttcttccgaacgcacccatcagccacactccacaaccctacccgcgtgaaactctttgaaaagtggggctggaagaagattgctaccatccagcagaccactgaggtcttcacttcgactctggacgacctggaggaacgagtgaaggaggctggaattgagattactttccgccagagtttcttctcagatccagctgtgcccgtcaaaaacctgaagcgccaggatgcccgaatcatcgtgggacttttctatgagactgaagcccggaaagttttttgtgaggtgtacaaggagcgtctctttgggaagaagtacgtctggttcctcattgggtggtatgctgacaattggttcaagatctacgacccttctatcaactgcacagtggatgagatgactgaggcggtggagggccacatcacaactgagattgtcatgctgaatcctgccaatacccgcagcatttccaacatgacatcccaggaatttgtggagaaactaaccaagcgactgaaaagacaccctgaggagacaggaggcttccaggaggcaccgctggcctatgatgccatctgggccttggcactggccctgaacaagacatctggaggaggcggccgttctggtgtgcgcctggaggacttcaactacaacaaccagaccattaccgaccaaatctaccgggcaatgaactcttcgtcctttgagggtgtctctggccatgtggtgtttgatgccagcggctctcggatggcatggacgcttatcgagcagcttcagggtggcagctacaagaagattggctactatgacagcaccaaggatgatctttcctggtccaaaacagataaatggattggagggtcccccccagctgaccagaccctggtcatcaagacattccgcttcctgtcacagaaactctttatctccgtctcagttctctccagcctgggcattgtcctagctgttgtctgtctgtcctttaacatctacaactcacatgtccgttatatccagaactcacagcccaacctgaacaacctgactgctgtgggctgctcactggctttagctgctgtcttccccctggggctcgatggttaccacattgggaggaaccagtttcctttcgtctgccaggcccgcctctggctcctgggcctgggctttagtctgggctacggttccatgttcaccaagatttggtgggtccacacggtcttcacaaagaaggaagaaaagaaggagtggaggaagactctggaaccctggaagctgtatgccacagtgggcctgctggtgggcatggatgtcctcactctcgccatctggcagatcgtggaccctctgcaccggaccattgagacatttgccaaggaggaacctaaggaagatattgacgtctctattctgccccagctggagcattgcagctccaggaagatgaatacatggcttggcattttctatggttacaaggggctgctgctgctgctgggaatcttccttgcttatgagaccaagagtgtgtccactgagaagatcaatgatcaccgggctgtgggcatggctatctacaatgtggcagtcctgtgcctcatcactgctcctgtcaccatgattctgtccagccagcaggatgcagcctttgcctttgcctctcttgccatagttttctcctcctatatcactcttgttgtgctctttgtgcccaagatgcgcaggctgatcacccgaggggaatggcagtcggaggcgcaggacaccatgaagacagggtcatcgaccaacaacaacgaggaggagaagtcccggctgttggagaaggagaaccgtgaactggaaaagatcattgctgagaaagaggagcgtgtctctgaactgcgccatcaactccagtctcggcagcagctccgctcccggcgccacccaccgacacccccagaaccctctgggggcctgcccaggggaccccctgagccccccgaccggcttagctgtgatgggagtcgagtgcatttgctttataagtgagggtagggtgagggaggacaggccagtagggggagggaaagggagaggggaagggcaggggactcaggaagcagggggtccccatccccagctgggaagaacatgctatccaatctcatctcttgtaaatacatgtccccctgtgagttctgggctgatttgggtctctcatacctctgggaaacagacctttttctctcttactgcttcatgtaattttgtatcacctcttcacaatttagttcgtacctggcttgaagctgctcactgctcacacgctgcctcctcagcagcctcactgcatctttctcttcccatgcaacaccctcttctagttaccacggcaacccctgcagctcctctgcctttgtgctctgttcctgtccagcaggggtctcccaacaagtgctctttccaccccaaaggggcctctccttttctccactgtcataatctctttccatcttacttgcccttctatactttctcacatgtggctccccctgaattttgcttcctttgggagctcattcttttcgccaaggctcacatgctccttgcctctgctctgtgcactcacgctcagcacacatgcatcctcccctctcctgcgtgtgcccactgaacatgctcatgtgtacacacgcttttcccgtatgctttcttcatgttcagtcacatgtgctctcgggtgccctgcattcacagctacgtgtgcccctctcatggtcatgggtctgcccttgagcgtgtttgggtaggcatgtgcaatttgtctagcatgctgagtcatgtctttcctatttgcacacgtccatgtttatccatgtactttccctgtgtaccctccatgtaccttgtgtactttcttcccttaaatcatggtattcttctgacagagccatatgtaccctaccctgcacattgttatgcacttttccccaattcatgtttggtggggccatccacaccctctccttgtcacagaatctccatttctgctcagattccccccatctccattgcattcatgtactaccctcagtctacactcacaatcatcttctcccaagactgctcccttttgttttgtgtttttttgaggggaattaaggaaaaataagtgggggcaggtttggagagctgcttccagtggatagttgatgagaatcctgaccaaaggaaggcacccttgactgttgggatagacagatggacctatggggtgggaggtggtgtccctttcacactgtggtgtctcttggggaaggatctccccgaatctcaataaaccagtgaacagtg

SEQ ID NO: 136431 - DNA, 4070 bp, Homo sapiens
  Payload ID: 6701
  Gene Symbol: GABBR1
  Gene Name: gamma-aminobutyric acid (GABA) B receptor, 1
  Uniprot ID: Q9UBS5
  ENST ID: ENST00000383537
  CDS Start-End: 223-2757
agtcagtccgcgaggagagtccgcggtggcggcgacggtggcgagagccgcgggggccgtaggaagccaaccttccctgcttctccggggccctcgccccctcctccccacaaaatcagggatggaggcgcctccccggcaccctcttagcagccctccccaggaaaagtgtcccccctgagctcctaacgctccccaacagctacccctgccccccacgccatggggcccggggccccttttgcccgggtggggtggccactgccgcttctggttgtgatggcggcaggggtggctccggtgtgggcctcccactccccccatctcccgcggcctcactcgcgggtccccccgcacccctcctcagaacggcgcgcagtgtacatcggggcactgtttcccatgagcgggggctggccagggggccaggcctgccagcccgcggtggagatggcgctggaggacgtgaatagccgcagggacatcctgccggactatgagctcaagctcatccaccacgacagcaagtgtgatccaggccaagccaccaagtacctatatgagctgctctacaacgaccctatcaagatcatccttatgcctggctgcagctctgtctccacgctggtggctgaggctgctaggatgtggaacctcattgtgctttcctatggctccagctcaccagccctgtcaaaccggcagcgtttccccactttcttccgaacgcacccatcagccacactccacaaccctacccgcgtgaaactctttgaaaagtggggctggaagaagattgctaccatccagcagaccactgaggtcttcacttcgactctggacgacctggaggaacgagtgaaggaggctggaattgagattactttccgccagagtttcttctcagatccagctgtgcccgtcaaaaacctgaagcgccaggatgcccgaatcatcgtgggacttttctatgagactgaagcccggaaagttttttgtgaggtgtacaaggagcgtctctttgggaagaagtacgtctggttcctcattgggtggtatgctgacaattggttcaagatctacgacccttctatcaactgcacagtggatgagatgactgaggcggtggagggccacatcacaactgagattgtcatgctgaatcctgccaatacccgcagcatttccaacatgacatcccaggaatttgtggagaaactaaccaagcgactgaaaagacaccctgaggagacaggaggcttccaggaggcaccgctggcctatgatgccatctgggccttggcactggccctgaacaagacatctggaggaggcggccgttctggtgtgcgcctggaggacttcaactacaacaaccagaccattaccgaccaaatctaccgggcaatgaactcttcgtcctttgagggtgtctctggccatgtggtgtttgatgccagcggctctcggatggcatggacgcttatcgagcagcttcagggtggcagctacaagaagattggctactatgacagcaccaaggatgatctttcctggtccaaaacagataaatggattggagggtcccccccagctgaccagaccctggtcatcaagacattccgcttcctgtcacagaaactctttatctccgtctcagttctctccagcctgggcattgtcctagctgttgtctgtctgtcctttaacatctacaactcacatgtccgttatatccagaactcacagcccaacctgaacaacctgactgctgtgggctgctcactggctttagctgctgtcttccccctggggctcgatggttaccacattgggaggaaccagtttcctttcgtctgccaggcccgcctctggctcctgggcctgggctttagtctgggctacggttccatgttcaccaagatttggtgggtccacacggtcttcacaaagaaggaagaaaagaaggagtggaggaagactctggaaccctggaagctgtatgccacagtgggcctgctggtgggcatggatgtcctcactctcgccatctggcagatcgtggaccctctgcaccggaccattgagacatttgccaaggaggaacctaaggaagatattgacgtctctattctgccccagctggagcattgcagctccaggaagatgaatacatggcttggcattttctatggttacaaggggctgctgctgctgctgggaatcttccttgcttatgagaccaagagtgtgtccactgagaagatcaatgatcaccgggctgtgggcatggctatctacaatgtggcagtcctgtgcctcatcactgctcctgtcaccatgattctgtccagccagcaggatgcagcctttgcctttgcctctcttgccatagttttctcctcctatatcactcttgttgtgctctttgtgcccaagatgcgcaggctgatcacccgaggggaatggcagtcggaggcgcaggacaccatgaagacagggtcatcgaccaacaacaacgaggaggagaagtcccggctgttggagaaggagaaccgtgaactggaaaagatcattgctgagaaagaggagcgtgtctctgaactgcgccatcaactccagtctcggcagcagctccgctcccggcgccacccaccgacacccccagaaccctctgggggcctgcccaggggaccccctgagccccccgaccggcttagctgtgatgggagtcgagtgcatttgctttataagtgagggtagggtgagggaggacaggccagtagggggagggaaagggagaggggaagggcaggggactcaggaagcagggggtccccatccccagctgggaagaacatgctatccaatctcatctcttgtaaatacatgtccccctgtgagttctgggctgatttgggtctctcatacctctgggaaacagacctttttctctcttactgcttcatgtaattttgtatcacctcttcacaatttagttcgtacctggcttgaagctgctcactgctcacacgctgcctcctcagcagcctcactgcatctttctcttcccatgcaacaccctcttctagttaccacggcaacccctgcagctcctctgcctttgtgctctgttcctgtccagcaggggtctcccaacaagtgctctttccaccccaaaggggcctctccttttctccactgtcataatctctttccatcttacttgcccttctatactttctcacatgtggctccccctgaattttgcttcctttgggagctcattcttttcgccaaggctcacatgctccttgcctctgctctgtgcactcacgctcagcacacatgcatcctcccctctcctgcgtgtgcccactgaacatgctcatgtgtacacacgcttttcccgtatgctttcttcatgttcagtcacatgtgctctcgggtgccctgcattcacagctacgtgtgcccctctcatggtcatgggtctgcccttgagcgtgtttgggtaggcatgtgcaatttgtctagcatgctgagtcatgtctttcctatttgcacacgtccatgtttatccatgtactttccctgtgtaccctccatgtaccttgtgtactttcttcccttaaatcatggtattcttctgacagagccatatgtaccctaccctgcacattgttatgcacttttccccaattcatgtttggtggggccatccacaccctctccttgtcacagaatctccatttctgctcagattccccccatctccattgcattcatgtactaccctcagtctacactcacaatcatcttctcccaagactgctcccttttgttttgtgtttttttgaggggaattaaggaaaaataagtgggggcaggtttggagagctgcttccagtggatagttgatgagaatcctgaccaaaggaaggcacccttgactgttgggatagacagatggacctatggggtgggaggtggtgtccctttcacactgtggtgtctcttggggaaggatctccccgaatctcaataaaccagtgaacagtgtgactcgg

SEQ ID NO: 136432 - DNA, 4299 bp, Homo sapiens; identical to SEQ ID NO: 136429
  Payload ID: 6701
  Gene Symbol: GABBR1
  Gene Name: gamma-aminobutyric acid (GABA) B receptor, 1
  Uniprot ID: Q9UBS5
  ENST ID: ENST00000383541
  CDS Start-End: 287-2986

SEQ ID NO: 136433 - DNA, 4510 bp, Homo sapiens
  Payload ID: 6701
  Gene Symbol: GABBR1
  Gene Name: gamma-aminobutyric acid (GABA) B receptor, 1
  Uniprot ID: Q9UBS5
  ENST ID: ENST00000383542
  CDS Start-End: 312-3197
cccttgcaccctccttcttccctccgcccgggagctctccctggtccccggcgccgcctccttccctcccggctccccgctccccgctcccgtggctgccgccgccccggggaagaagagacaggggtggggtttgggggaagcgagagaggaggggagagaccctggccaggctggagcctggattcgaggggaggagggacgggaggaggagaaaggtggaggagaagggaggggggagcggggaggagcggccgggcctggggccttgaggcccggggagagccggggagccgggcccgcgcgccgagatgttgctgctgctgctactggcgccactcttcctccgccccccgggcgcgggcggggcgcagacccccaacgccacctcagaaggttgccagatcatacacccgccctgggaagggggcatcaggtaccggggcctgactcgggaccaggtgaaggctatcaacttcctgccagtggactatgagattgagtatgtgtgccggggggagcgcgaggtggtggggcccaaggtccgcaagtgcctggccaacggctcctggacagatatggacacacccagccgctgtgtccgaatctgctccaagtcttatttgaccctggaaaatgggaaggttttcctgacgggtggggacctcccagctctggacggagcccgggtggatttccggtgtgaccccgacttccatctggtgggcagctcccggagcatctgtagtcagggccagtggagcacccccaagccccactgccaggtgaatcgaacgccacactcagaacggcgcgcagtgtacatcggggcactgtttcccatgagcgggggctggccagggggccaggcctgccagcccgcggtggagatggcgctggaggacgtgaatagccgcagggacatcctgccggactatgagctcaagctcatccaccacgacagcaagtgtgatccaggccaagccaccaagtacctatatgagctgctctacaacgaccctatcaagatcatccttatgcctggctgcagctctgtctccacgctggtggctgaggctgctaggatgtggaacctcattgtgctttcctatggctccagctcaccagccctgtcaaaccggcagcgtttccccactttcttccgaacgcacccatcagccacactccacaaccctacccgcgtgaaactctttgaaaagtggggctggaagaagattgctaccatccagcagaccactgaggtcttcacttcgactctggacgacctggaggaacgagtgaaggaggctggaattgagattactttccgccagagtttcttctcagatccagctgtgcccgtcaaaaacctgaagcgccaggatgcccgaatcatcgtgggacttttctatgagactgaagcccggaaagttttttgtgaggtgtacaaggagcgtctctttgggaagaagtacgtctggttcctcattgggtggtatgctgacaattggttcaagatctacgacccttctatcaactgcacagtggatgagatgactgaggcggtggagggccacatcacaactgagattgtcatgctgaatcctgccaatacccgcagcatttccaacatgacatcccaggaatttgtggagaaactaaccaagcgactgaaaagacaccctgaggagacaggaggcttccaggaggcaccgctggcctatgatgccatctgggccttggcactggccctgaacaagacatctggaggaggcggccgttctggtgtgcgcctggaggacttcaactacaacaaccagaccattaccgaccaaatctaccgggcaatgaactcttcgtcctttgagggtgtctctggccatgtggtgtttgatgccagcggctctcggatggcatggacgcttatcgagcagcttcagggtggcagctacaagaagattggctactatgacagcaccaaggatgatctttcctggtccaaaacagataaatggattggagggtcccccccagctgaccagaccctggtcatcaagacattccgcttcctgtcacagaaactctttatctccgtctcagttctctccagcctgggcattgtcctagctgttgtctgtctgtcctttaacatctacaactcacatgtccgttatatccagaactcacagcccaacctgaacaacctgactgctgtgggctgctcactggctttagctgctgtcttccccctggggctcgatggttaccacattgggaggaaccagtttcctttcgtctgccaggcccgcctctggctcctgggcctgggctttagtctgggctacggttccatgttcaccaagatttggtgggtccacacggtcttcacaaagaaggaagaaaagaaggagtggaggaagactctggaaccctggaagctgtatgccacagtgggcctgctggtgggcatggatgtcctcactctcgccatctggcagatcgtggaccctctgcaccggaccattgagacatttgccaaggaggaacctaaggaagatattgacgtctctattctgccccagctggagcattgcagctccaggaagatgaatacatggcttggcattttctatggttacaaggggctgctgctgctgctgggaatcttccttgcttatgagaccaagagtgtgtccactgagaagatcaatgatcaccgggctgtgggcatggctatctacaatgtggcagtcctgtgcctcatcactgctcctgtcaccatgattctgtccagccagcaggatgcagcctttgcctttgcctctcttgccatagttttctcctcctatatcactcttgttgtgctctttgtgcccaagatgcgcaggctgatcacccgaggggaatggcagtcggaggcgcaggacaccatgaagacagggtcatcgaccaacaacaacgaggaggagaagtcccggctgttggagaaggagaaccgtgaactggaaaagatcattgctgagaaagaggagcgtgtctctgaactgcgccatcaactccagtctcggcagcagctccgctcccggcgccacccaccgacacccccagaaccctctgggggcctgcccaggggaccccctgagccccccgaccggcttagctgtgatgggagtcgagtgcatttgctttataagtgagggtagggtgagggaggacaggccagtagggggagggaaagggagaggggaagggcaggggactcaggaagcagggggtccccatccccagctgggaagaacatgctatccaatctcatctcttgtaaatacatgtccccctgtgagttctgggctgatttgggtctctcatacctctgggaaacagacctttttctctcttactgcttcatgtaattttgtatcacctcttcacaatttagttcgtacctggcttgaagctgctcactgctcacacgctgcctcctcagcagcctcactgcatctttctcttcccatgcaacaccctcttctagttaccacggcaacccctgcagctcctctgcctttgtgctctgttcctgtccagcaggggtctcccaacaagtgctctttccaccccaaaggggcctctccttttctccactgtcataatctctttccatcttacttgcccttctatactttctcacatgtggctccccctgaattttgcttcctttgggagctcattcttttcgccaaggctcacatgctccttgcctctgctctgtgcactcacgctcagcacacatgcatcctcccctctcctgcgtgtgcccactgaacatgctcatgtgtacacacgcttttcccgtatgctttcttcatgttcagtcacatgtgctctcgggtgccctgcattcacagctacgtgtgcccctctcatggtcatgggtctgcccttgagcgtgtttgggtaggcatgtgcaatttgtctagcatgctgagtcatgtctttcctatttgcacacgtccatgtttatccatgtactttccctgtgtaccctccatgtaccttgtgtactttcttcccttaaatcatggtattcttctgacagagccatatgtaccctaccctgcacattgttatgcacttttccccaattcatgtttggtggggccatccacaccctctccttgtcacagaatctccatttctgctcagattccccccatctccattgcattcatgtactaccctcagtctacactcacaatcatcttctcccaagactgctcccttttgttttgtgtttttttgaggggaattaaggaaaaataagtgggggcaggtttggagagctgcttccagtggatagttgatgagaatcctgaccaaaggaaggcacccttgactgttgggatagacagatggacctatggggtgggaggtggtgtccctttcacactgtggtgtctcttggggaaggatctccccgaatctcaataaaccagtgaacagtgtgactcgg

SEQ ID NO: 136434 - DNA, 3523 bp, Homo sapiens
  Payload ID: 6701
  Gene Symbol: GABBR1
  Gene Name: gamma-aminobutyric acid (GABA) B receptor, 1
  Uniprot ID: Q9UBS5
  ENST ID: ENST00000383543
  CDS Start-End: 248-2782
ctcctcctcctcccctccgtcggtcagtcagtccgcgaggagagtccgcggtggcggcgacggtggcgagagccgcgggggccgtaggaagccaaccttccctgcttctccggggccctcgccccctcctccccacaaaatcagggatggaggcgcctccccggcaccctcttagcagccctccccaggaaaagtgtcccccctgagctcctaacgctccccaacagctacccctgccccccacgccatggggcccggggccccttttgcccgggtggggtggccactgccgcttctggttgtgatggcggcaggggtggctccggtgtgggcctcccactccccccatctcccgcggcctcactcgcgggtccccccgcacccctcctcagaacggcgcgcagtgtacatcggggcactgtttcccatgagcgggggctggccagggggccaggcctgccagcccgcggtggagatggcgctggaggacgtgaatagccgcagggacatcctgccggactatgagctcaagctcatccaccacgacagcaagtgtgatccaggccaagccaccaagtacctatatgagctgctctacaacgaccctatcaagatcatccttatgcctggctgcagctctgtctccacgctggtggctgaggctgctaggatgtggaacctcattgtgctttcctatggctccagctcaccagccctgtcaaaccggcagcgtttccccactttcttccgaacgcacccatcagccacactccacaaccctacccgcgtgaaactctttgaaaagtggggctggaagaagattgctaccatccagcagaccactgaggtcttcacttcgactctggacgacctggaggaacgagtgaaggaggctggaattgagattactttccgccagagtttcttctcagatccagctgtgcccgtcaaaaacctgaagcgccaggatgcccgaatcatcgtgggacttttctatgagactgaagcccggaaagttttttgtgaggtgtacaaggagcgtctctttgggaagaagtacgtctggttcctcattgggtggtatgctgacaattggttcaagatctacgacccttctatcaactgcacagtggatgagatgactgaggcggtggagggccacatcacaactgagattgtcatgctgaatcctgccaatacccgcagcatttccaacatgacatcccaggaatttgtggagaaactaaccaagcgactgaaaagacaccctgaggagacaggaggcttccaggaggcaccgctggcctatgatgccatctgggccttggcactggccctgaacaagacatctggaggaggcggccgttctggtgtgcgcctggaggacttcaactacaacaaccagaccattaccgaccaaatctaccgggcaatgaactcttcgtcctttgagggtgtctctggccatgtggtgtttgatgccagcggctctcggatggcatggacgcttatcgagcagcttcagggtggcagctacaagaagattggctactatgacagcaccaaggatgatctttcctggtccaaaacagataaatggattggagggtcccccccagctgaccagaccctggtcatcaagacattccgcttcctgtcacagaaactctttatctccgtctcagttctctccagcctgggcattgtcctagctgttgtctgtctgtcctttaacatctacaactcacatgtccgttatatccagaactcacagcccaacctgaacaacctgactgctgtgggctgctcactggctttagctgctgtcttccccctggggctcgatggttaccacattgggaggaaccagtttcctttcgtctgccaggcccgcctctggctcctgggcctgggctttagtctgggctacggttccatgttcaccaagatttggtgggtccacacggtcttcacaaagaaggaagaaaagaaggagtggaggaagactctggaaccctggaagctgtatgccacagtgggcctgctggtgggcatggatgtcctcactctcgccatctggcagatcgtggaccctctgcaccggaccattgagacatttgccaaggaggaacctaaggaagatattgacgtctctattctgccccagctggagcattgcagctccaggaagatgaatacatggcttggcattttctatggttacaaggggctgctgctgctgctgggaatcttccttgcttatgagaccaagagtgtgtccactgagaagatcaatgatcaccgggctgtgggcatggctatctacaatgtggcagtcctgtgcctcatcactgctcctgtcaccatgattctgtccagccagcaggatgcagcctttgcctttgcctctcttgccatagttttctcctcctatatcactcttgttgtgctctttgtgcccaagatgcgcaggctgatcacccgaggggaatggcagtcggaggcgcaggacaccatgaagacagggtcatcgaccaacaacaacgaggaggagaagtcccggctgttggagaaggagaaccgtgaactggaaaagatcattgctgagaaagaggagcgtgtctctgaactgcgccatcaactccagtctcggcagcagctccgctcccggcgccacccaccgacacccccagaaccctctgggggcctgcccaggggaccccctgagccccccgaccggcttagctgtgatgggagtcgagtgcatttgctttataagtgagggtgcatgtccgttccgaggaatgggatttaatgacctttgatgccaacccatatgacagcgtgaaaaaaatcaaagaacatgtccggtctaagaccaaggttcctgtgcaggaccaggttcttttgctgggctccaagatcttaaagccacggagaagcctctcatcttatggcattgacaaagagaagaccatccaccttaccctgaaagtggtgaagcccagtgatgaggagctgcccttgtttcttgtggagtcaggtgatgaggcaaagaggcacctcctccaggtgcgaaggtccagctcagtggcacaagtgaaagcaatgatcgagactaagacgggtataatccctgagacccagattgtgacttgcaatggaaagagactggaagatgggaagatgatggcagattacggcatcagaaagggcaacttactcttcctggcatcttattgtattggagggtgaccaccctggggatggggtgttggcaggggtcaaaaagcttatttcttttaatctcttactcaacgaacacatcttctgatgatttcccaaaattaatgagaatgagatgagtagagtaagatttgggtgggatgggtaggatgaagtatattgcccaactctatgtttctttgattctaacacaattaattaagtgacatgatttttactaatgtattactgagactagtaaataaatttttaaggcaaaatagagcattcaaagcca

SEQ ID NO: 136435 - DNA, 4070 bp, Homo sapiens
  Payload ID: 6701
  Gene Symbol: GABBR1
  Gene Name: gamma-aminobutyric acid (GABA) B receptor, 1
  Uniprot ID: Q9UBS5
  ENST ID: ENST00000383636
  CDS Start-End: 223-2757
agtcagtccgcgaggagagtccgcggtggcggcgacggtggcgagagccgcgggggccgtaggaagccaaccttccctgcttctccggggccctcgccccctcctccccacaaaatcagggatggaggcgcctccccggcaccctcttagcagccctccccaggaaaagtgtcccccctgagctcctaacgctccccaacagctacccctgccccccacgccatggggcccggggccccttttgcccgggtggggtggccactgccgcttctggttgtgatggcggcaggggtggctccggtgtgggcctcccactccccccatctcccgcggcctcactcgcgggtccccccgcacccctcctcagaacggcgcgcagtgtacatcggggcactgtttcccatgagcgggggctggccagggggccaggcctgccagcccgcggtggagatggcgctggaggacgtgaatagccgcagggacatcctgccggactatgagctcaagctcatccaccacgacagcaagtgtgatccaggccaagccaccaagtacctatatgagctgctctacaacgaccctatcaagatcatccttatgcctggctgcagctctgtctccacgctggtggctgaggctgctaggatgtggaacctcattgtgctttcctatggctccagctcaccagccctgtcaaaccggcagcgtttccccactttcttccgaacgcacccatcagccacactccacaaccctacccgcgtgaaactctttgaaaagtggggctggaagaagattgctaccatccagcagaccactgaggtcttcacttcgactctggacgacctggaggaacgagtgaaggaggctggaattgagattactttccgccagagtttcttctcagatccagctgtgcccgtcaaaaacctgaagcgccaggatgcccgaatcatcgtgggacttttctatgagactgaagcccggaaagttttttgtgaggtgtacaaggagcgtctctttgggaagaagtacgtctggttcctcattgggtggtatgctgacaattggttcaagatctacgacccttctatcaactgcacagtggatgagatgactgaggcggtggagggccacatcacaactgagattgtcatgctgaatcctgccaatacccgcagcatttccaacatgacatcccaggaatttgtggagaaactaaccaagcgactgaaaagacaccctgaggagacaggaggcttccaggaggcaccgctggcctatgatgccatctgggccttggcactggccctgaacaagacatctggaggaggcggccgttctggtgtgcgcctggaggacttcaactacaacaaccagaccattaccgaccaaatctaccgggcaatgaactcttcgtcctttgagggtgtctctggccatgtggtgtttgatgccagcggctctcggatggcatggacgcttatcgagcagcttcagggtggcagctacaagaagattggctactatgacagcaccaaggatgatctttcctggtccaaaacagataaatggattggagggtcccccccagctgaccagaccctggtcatcaagacattccgcttcctgtcacagaaactctttatctccgtctcagttctctccagcctgggcattgtcctagctgttgtctgtctgtcctttaacatctacaactcacatgtccgttatatccagaactcacagcccaacctgaacaacctgactgctgtgggctgctcactggctttagctgctgtcttccccctggggctcgatggttaccacattgggaggaaccagtttcctttcgtctgccaggcccgcctctggctcctgggcctgggctttagtctgggctacggttccatgttcaccaagatttggtgggtccacacggtcttcacaaagaaggaagaaaagaaggagtggaggaagactctggaaccctggaagctgtatgccacagtgggcctgctggtgggcatggatgtcctcactctcgccatctggcagatcgtggaccctctgcaccggaccattgagacatttgccaaggaggaacctaaggaagatattgacgtctctattctgccccagctggagcattgcagctccaggaagatgaatacatggcttggcattttctatggttacaaggggctgctgctgctgctgggaatcttccttgcttatgagaccaagagtgtgtccactgagaagatcaatgatcaccgggctgtgggcatggctatctacaatgtggcagtcctgtgcctcatcactgctcctgtcaccatgattctgtccagccagcaggatgcagcctttgcctttgcctctcttgccatagttttctcctcctatatcactcttgttgtgctctttgtgcccaagatgcgcaggctgatcacccgaggggaatggcagtcggaggcgcaggacaccatgaagacagggtcatcgaccaacaacaacgaggaggagaagtcccggctgttggagaaggagaaccgtgaactggaaaagatcattgctgagaaagaggagcgtgtctctgaactgcgccatcaactccagtctcggcagcagctccgctcccggcgccacccaccgacacccccagaaccctctgggggcctgcccaggggaccccctgagccccccgaccggcttagctgtgatgggagtcgagtgcatttgctttataagtgagggtagggtgagggaggacaggccagtagggggagggaaagggagaggggaagggcaggggactcaggaagcagggggtccccatccccagctgggaagaacatgctatccaatctcatctcttgtaaatacatgtccccctgtgagttctgggctgatttgggtctctcatacctctgggaaacagacctttttctctcttactgcttcatgtaattttgtatcacctcttcacaatttagttcgtacctggcttgaagctgctcactgctcacacactgcctcctcagcagcctcactgcatctttctcttcccatgcaacaccctcttctagttaccacggcaacccctgcagctcctctgcctttgtgctctgttcctgtccagcaggggtctcccaacaagtgctctttccaccccaaaggggcctctccttttctccactgtcataatctctttccatcttacttgcccttctatactttctcacatgtggctccccctgaattttgcttcctttgggagctcattcttttcgccaaggctcacatgctccttgcctctgctctgtgcactcacgctcagcacacatgcatcctcccctctcctgcgtgtgcccactgaacatgctcatgtgtacacacgcttttcccgtatgctttcttcatgttcagtcacatgtgctctcgggtgccctgcattcacagctacgtgtgcccctctcatggtcatgggtctgcccttgagcgtgtttgggtaggcatgtgcaatttgtctagcatgctgagtcatgtctttcctatttgcacacgtccatgtttatccatgtactttccctgtgtaccctccatgtaccttgtgtactttcttcccttaaatcatggtattcttctgacagagccatatgtaccctaccctgcacattgttatgcacttttccccaattcatgtttggtggggccatccacaccctctccttgtcacagaatctccatttctgctcagattccccccatctccattgcattcatgtactaccctcagtctacactcacaatcatcttctcccaagactgctcccttttgttttgtgtttttttgaggggaattaaggaaaaataagtgggggcaggtttggagagctgcttccagtggatagttgatgagaatcctgaccaaaggaaggcacccttgactgttgggatagacagatggacctatggggtgggaggtggtgtccctttcacactgtggtgtctcttggggaaggatctccccgaatctcaataaaccagtgaacagtgtgactcgg

SEQ ID NO: 136436 - DNA, 4299 bp, Homo sapiens
  Payload ID: 6701
  Gene Symbol: GABBR1
  Gene Name: gamma-aminobutyric acid (GABA) B receptor, 1
  Uniprot ID: Q9UBS5
  ENST ID: ENST00000383637
  CDS Start-End: 287-2986
gcccgggagctctccctggtccccggcgccgcctccttccctcccggctccccgctccccgctcccgtggctgccgccgccccggggaagaagagacaggggtggggtttgggggaagcgagagaggaggggagagaccctggccaggctggagcctggattcgaggggaggagggacgggaggaggagaaaggtggaggagaagggaggggggagcggggaggagcggccgggcctggggccttgaggcccggggagagccggggagccgggcccgcgcgccgagatgttgctgctgctgctactggcgccactcttcctccgccccccgggcgcgggcggggcgcagacccccaacgccacctcagaaggttgccagatcatacacccgccctgggaagggggcatcaggtaccggggcctgactcgggaccaggtgaaggctatcaacttcctgccagtggactatgagattgagtatgtgtgccggggggagcgcgaggtggtggggcccaaggtccgcaagtgcctggccaacggctcctggacagatatggacacacccagccgctgtgtgaatcgaacgccacactcagaacggcgcgcagtgtacatcggggcactgtttcccatgagcgggggctggccagggggccaggcctgccagcccgcggtggagatggcgctggaggacgtgaatagccgcagggacatcctgccggactatgagctcaagctcatccaccacgacagcaagtgtgatccaggccaagccaccaagtacctatatgagctgctctacaacgaccctatcaagatcatccttatgcctggctgcagctctgtctccacgctggtggctgaggctgctaggatgtggaacctcattgtgctttcctatggctccagctcaccagccctgtcaaaccggcagcgtttccccactttcttccgaacgcacccatcagccacactccacaaccctacccgcgtgaaactctttgaaaagtggggctggaagaagattgctaccatccagcagaccactgaggtcttcacttcgactctggacgacctggaggaacgagtgaaggaggctggaattgagattactttccgccagagtttcttctcagatccagctgtgcccgtcaaaaacctgaagcgccaggatgcccgaatcatcgtgggacttttctatgagactgaagcccggaaagttttttgtgaggtgtacaaggagcgtctctttgggaagaagtacgtctggttcctcattgggtggtatgctgacaattggttcaagatctacgacccttctatcaactgcacagtggatgagatgactgaggcggtggagggccacatcacaactgagattgtcatgctgaatcctgccaatacccgcagcatttccaacatgacatcccaggaatttgtggagaaactaaccaagcgactgaaaagacaccctgaggagacaggaggcttccaggaggcaccgctggcctatgatgccatctgggccttggcactggccctgaacaagacatctggaggaggcggccgttctggtgtgcgcctggaggacttcaactacaacaaccagaccattaccgaccaaatctaccgggcaatgaactcttcgtcctttgagggtgtctctggccatgtggtgtttgatgccagcggctctcggatggcatggacgcttatcgagcagcttcagggtggcagctacaagaagattggctactatgacagcaccaaggatgatctttcctggtccaaaacagataaatggattggagggtcccccccagctgaccagaccctggtcatcaagacattccgcttcctgtcacagaaactctttatctccgtctcagttctctccagcctgggcattgtcctagctgttgtctgtctgtcctttaacatctacaactcacatgtccgttatatccagaactcacagcccaacctgaacaacctgactgctgtgggctgctcactggctttagctgctgtcttccccctggggctcgatggttaccacattgggaggaaccagtttcctttcgtctgccaggcccgcctctggctcctgggcctgggctttagtctgggctacggttccatgttcaccaagatttggtgggtccacacggtcttcacaaagaaggaagaaaagaaggagtggaggaagactctggaaccctggaagctgtatgccacagtgggcctgctggtgggcatggatgtcctcactctcgccatctggcagatcgtggaccctctgcaccggaccattgagacatttgccaaggaggaacctaaggaagatattgacgtctctattctgccccagctggagcattgcagctccaggaagatgaatacatggcttggcattttctatggttacaaggggctgctgctgctgctgggaatcttccttgcttatgagaccaagagtgtgtccactgagaagatcaatgatcaccgggctgtgggcatggctatctacaatgtggcagtcctgtgcctcatcactgctcctgtcaccatgattctgtccagccagcaggatgcagcctttgcctttgcctctcttgccatagttttctcctcctatatcactcttgttgtgctctttgtgcccaagatgcgcaggctgatcacccgaggggaatggcagtcggaggcgcaggacaccatgaagacagggtcatcgaccaacaacaacgaggaggagaagtcccggctgttggagaaggagaaccgtgaactggaaaagatcattgctgagaaagaggagcgtgtctctgaactgcgccatcaactccagtctcggcagcagctccgctcccggcgccacccaccgacacccccagaaccctctgggggcctgcccaggggaccccctgagccccccgaccggcttagctgtgatgggagtcgagtgcatttgctttataagtgagggtagggtgagggaggacaggccagtagggggagggaaagggagaggggaagggcaggggactcaggaagcagggggtccccatccccagctgggaagaacatgctatccaatctcatctcttgtaaatacatgtccccctgtgagttctgggctgatttgggtctctcatacctctgggaaacagacctttttctctcttactgcttcatgtaattttgtatcacctcttcacaatttagttcgtacctggcttgaagctgctcactgctcacacactgcctcctcagcagcctcactgcatctttctcttcccatgcaacaccctcttctagttaccacggcaacccctgcagctcctctgcctttgtgctctgttcctgtccagcaggggtctcccaacaagtgctctttccaccccaaaggggcctctccttttctccactgtcataatctctttccatcttacttgcccttctatactttctcacatgtggctccccctgaattttgcttcctttgggagctcattcttttcgccaaggctcacatgctccttgcctctgctctgtgcactcacgctcagcacacatgcatcctcccctctcctgcgtgtgcccactgaacatgctcatgtgtacacacgcttttcccgtatgctttcttcatgttcagtcacatgtgctctcgggtgccctgcattcacagctacgtgtgcccctctcatggtcatgggtctgcccttgagcgtgtttgggtaggcatgtgcaatttgtctagcatgctgagtcatgtctttcctatttgcacacgtccatgtttatccatgtactttccctgtgtaccctccatgtaccttgtgtactttcttcccttaaatcatggtattcttctgacagagccatatgtaccctaccctgcacattgttatgcacttttccccaattcatgtttggtggggccatccacaccctctccttgtcacagaatctccatttctgctcagattccccccatctccattgcattcatgtactaccctcagtctacactcacaatcatcttctcccaagactgctcccttttgttttgtgtttttttgaggggaattaaggaaaaataagtgggggcaggtttggagagctgcttccagtggatagttgatgagaatcctgaccaaaggaaggcacccttgactgttgggatagacagatggacctatggggtgggaggtggtgtccctttcacactgtggtgtctcttggggaaggatctccccgaatctcaataaaccagtgaacagtgtgactcgg

SEQ ID NO: 136437 - DNA, 4510 bp, Homo sapiens
  Payload ID: 6701
  Gene Symbol: GABBR1
  Gene Name: gamma-aminobutyric acid (GABA) B receptor, 1
  Uniprot ID: Q9UBS5
  ENST ID: ENST00000383638
  CDS Start-End: 312-3197
cccttgcaccctccttcttccctccgcccgggagctctccctggtccccggcgccgcctccttccctcccggctccccgctccccgctcccgtggctgccgccgccccggggaagaagagacaggggtggggtttgggggaagcgagagaggaggggagagaccctggccaggctggagcctggattcgaggggaggagggacgggaggaggagaaaggtggaggagaagggaggggggagcggggaggagcggccgggcctggggccttgaggcccggggagagccggggagccgggcccgcgcgccgagatgttgctgctgctgctactggcgccactcttcctccgccccccgggcgcgggcggggcgcagacccccaacgccacctcagaaggttgccagatcatacacccgccctgggaagggggcatcaggtaccggggcctgactcgggaccaggtgaaggctatcaacttcctgccagtggactatgagattgagtatgtgtgccggggggagcgcgaggtggtggggcccaaggtccgcaagtgcctggccaacggctcctggacagatatggacacacccagccgctgtgtccgaatctgctccaagtcttatttgaccctggaaaatgggaaggttttcctgacgggtggggacctcccagctctggacggagcccgggtggatttccggtgtgaccccgacttccatctggtgggcagctcccggagcatctgtagtcagggccagtggagcacccccaagccccactgccaggtgaatcgaacgccacactcagaacggcgcgcagtgtacatcggggcactgtttcccatgagcgggggctggccagggggccaggcctgccagcccgcggtggagatggcgctggaggacgtgaatagccgcagggacatcctgccggactatgagctcaagctcatccaccacgacagcaagtgtgatccaggccaagccaccaagtacctatatgagctgctctacaacgaccctatcaagatcatccttatgcctggctgcagctctgtctccacgctggtggctgaggctgctaggatgtggaacctcattgtgctttcctatggctccagctcaccagccctgtcaaaccggcagcgtttccccactttcttccgaacgcacccatcagccacactccacaaccctacccgcgtgaaactctttgaaaagtggggctggaagaagattgctaccatccagcagaccactgaggtcttcacttcgactctggacgacctggaggaacgagtgaaggaggctggaattgagattactttccgccagagtttcttctcagatccagctgtgcccgtcaaaaacctgaagcgccaggatgcccgaatcatcgtgggacttttctatgagactgaagcccggaaagttttttgtgaggtgtacaaggagcgtctctttgggaagaagtacgtctggttcctcattgggtggtatgctgacaattggttcaagatctacgacccttctatcaactgcacagtggatgagatgactgaggcggtggagggccacatcacaactgagattgtcatgctgaatcctgccaatacccgcagcatttccaacatgacatcccaggaatttgtggagaaactaaccaagcgactgaaaagacaccctgaggagacaggaggcttccaggaggcaccgctggcctatgatgccatctgggccttggcactggccctgaacaagacatctggaggaggcggccgttctggtgtgcgcctggaggacttcaactacaacaaccagaccattaccgaccaaatctaccgggcaatgaactcttcgtcctttgagggtgtctctggccatgtggtgtttgatgccagcggctctcggatggcatggacgcttatcgagcagcttcagggtggcagctacaagaagattggctactatgacagcaccaaggatgatctttcctggtccaaaacagataaatggattggagggtcccccccagctgaccagaccctggtcatcaagacattccgcttcctgtcacagaaactctttatctccgtctcagttctctccagcctgggcattgtcctagctgttgtctgtctgtcctttaacatctacaactcacatgtccgttatatccagaactcacagcccaacctgaacaacctgactgctgtgggctgctcactggctttagctgctgtcttccccctggggctcgatggttaccacattgggaggaaccagtttcctttcgtctgccaggcccgcctctggctcctgggcctgggctttagtctgggctacggttccatgttcaccaagatttggtgggtccacacggtcttcacaaagaaggaagaaaagaaggagtggaggaagactctggaaccctggaagctgtatgccacagtgggcctgctggtgggcatggatgtcctcactctcgccatctggcagatcgtggaccctctgcaccggaccattgagacatttgccaaggaggaacctaaggaagatattgacgtctctattctgccccagctggagcattgcagctccaggaagatgaatacatggcttggcattttctatggttacaaggggctgctgctgctgctgggaatcttccttgcttatgagaccaagagtgtgtccactgagaagatcaatgatcaccgggctgtgggcatggctatctacaatgtggcagtcctgtgcctcatcactgctcctgtcaccatgattctgtccagccagcaggatgcagcctttgcctttgcctctcttgccatagttttctcctcctatatcactcttgttgtgctctttgtgcccaagatgcgcaggctgatcacccgaggggaatggcagtcggaggcgcaggacaccatgaagacagggtcatcgaccaacaacaacgaggaggagaagtcccggctgttggagaaggagaaccgtgaactggaaaagatcattgctgagaaagaggagcgtgtctctgaactgcgccatcaactccagtctcggcagcagctccgctcccggcgccacccaccgacacccccagaaccctctgggggcctgcccaggggaccccctgagccccccgaccggcttagctgtgatgggagtcgagtgcatttgctttataagtgagggtagggtgagggaggacaggccagtagggggagggaaagggagaggggaagggcaggggactcaggaagcagggggtccccatccccagctgggaagaacatgctatccaatctcatctcttgtaaatacatgtccccctgtgagttctgggctgatttgggtctctcatacctctgggaaacagacctttttctctcttactgcttcatgtaattttgtatcacctcttcacaatttagttcgtacctggcttgaagctgctcactgctcacacactgcctcctcagcagcctcactgcatctttctcttcccatgcaacaccctcttctagttaccacggcaacccctgcagctcctctgcctttgtgctctgttcctgtccagcaggggtctcccaacaagtgctctttccaccccaaaggggcctctccttttctccactgtcataatctctttccatcttacttgcccttctatactttctcacatgtggctccccctgaattttgcttcctttgggagctcattcttttcgccaaggctcacatgctccttgcctctgctctgtgcactcacgctcagcacacatgcatcctcccctctcctgcgtgtgcccactgaacatgctcatgtgtacacacgcttttcccgtatgctttcttcatgttcagtcacatgtgctctcgggtgccctgcattcacagctacgtgtgcccctctcatggtcatgggtctgcccttgagcgtgtttgggtaggcatgtgcaatttgtctagcatgctgagtcatgtctttcctatttgcacacgtccatgtttatccatgtactttccctgtgtaccctccatgtaccttgtgtactttcttcccttaaatcatggtattcttctgacagagccatatgtaccctaccctgcacattgttatgcacttttccccaattcatgtttggtggggccatccacaccctctccttgtcacagaatctccatttctgctcagattccccccatctccattgcattcatgtactaccctcagtctacactcacaatcatcttctcccaagactgctcccttttgttttgtgtttttttgaggggaattaaggaaaaataagtgggggcaggtttggagagctgcttccagtggatagttgatgagaatcctgaccaaaggaaggcacccttgactgttgggatagacagatggacctatggggtgggaggtggtgtccctttcacactgtggtgtctcttggggaaggatctccccgaatctcaataaaccagtgaacagtgtgactcgg

SEQ ID NO: 136438 - DNA, 3523 bp, Homo sapiens
  Payload ID: 6701
  Gene Symbol: GABBR1
  Gene Name: gamma-aminobutyric acid (GABA) B receptor, 1
  Uniprot ID: Q9UBS5
  ENST ID: ENST00000383639
  CDS Start-End: 248-2782
ctcctcctcctcccctccgtcggtcagtcagtccgcgaggagagtccgcggtggcggcgacggtggcgagagccgcgggggccgtaggaagccaaccttccctgcttctccggggccctcgccccctcctccccacaaaatcagggatggaggcgcctccccggcaccctcttagcagccctccccaggaaaagtgtcccccctgagctcctaacgctccccaacagctacccctgccccccacgccatggggcccggggccccttttgcccgggtggggtggccactgccgcttctggttgtgatggcggcaggggtggctccggtgtgggcctcccactccccccatctcccgcggcctcactcgcgggtccccccgcacccctcctcagaacggcgcgcagtgtacatcggggcactgtttcccatgagcgggggctggccagggggccaggcctgccagcccgcggtggagatggcgctggaggacgtgaatagccgcagggacatcctgccggactatgagctcaagctcatccaccacgacagcaagtgtgatccaggccaagccaccaagtacctatatgagctgctctacaacgaccctatcaagatcatccttatgcctggctgcagctctgtctccacgctggtggctgaggctgctaggatgtggaacctcattgtgctttcctatggctccagctcaccagccctgtcaaaccggcagcgtttccccactttcttccgaacgcacccatcagccacactccacaaccctacccgcgtgaaactctttgaaaagtggggctggaagaagattgctaccatccagcagaccactgaggtcttcacttcgactctggacgacctggaggaacgagtgaaggaggctggaattgagattactttccgccagagtttcttctcagatccagctgtgcccgtcaaaaacctgaagcgccaggatgcccgaatcatcgtgggacttttctatgagactgaagcccggaaagttttttgtgaggtgtacaaggagcgtctctttgggaagaagtacgtctggttcctcattgggtggtatgctgacaattggttcaagatctacgacccttctatcaactgcacagtggatgagatgactgaggcggtggagggccacatcacaactgagattgtcatgctgaatcctgccaatacccgcagcatttccaacatgacatcccaggaatttgtggagaaactaaccaagcgactgaaaagacaccctgaggagacaggaggcttccaggaggcaccgctggcctatgatgccatctgggccttggcactggccctgaacaagacatctggaggaggcggccgttctggtgtgcgcctggaggacttcaactacaacaaccagaccattaccgaccaaatctaccgggcaatgaactcttcgtcctttgagggtgtctctggccatgtggtgtttgatgccagcggctctcggatggcatggacgcttatcgagcagcttcagggtggcagctacaagaagattggctactatgacagcaccaaggatgatctttcctggtccaaaacagataaatggattggagggtcccccccagctgaccagaccctggtcatcaagacattccgcttcctgtcacagaaactctttatctccgtctcagttctctccagcctgggcattgtcctagctgttgtctgtctgtcctttaacatctacaactcacatgtccgttatatccagaactcacagcccaacctgaacaacctgactgctgtgggctgctcactggctttagctgctgtcttccccctggggctcgatggttaccacattgggaggaaccagtttcctttcgtctgccaggcccgcctctggctcctgggcctgggctttagtctgggctacggttccatgttcaccaagatttggtgggtccacacggtcttcacaaagaaggaagaaaagaaggagtggaggaagactctggaaccctggaagctgtatgccacagtgggcctgctggtgggcatggatgtcctcactctcgccatctggcagatcgtggaccctctgcaccggaccattgagacatttgccaaggaggaacctaaggaagatattgacgtctctattctgccccagctggagcattgcagctccaggaagatgaatacatggcttggcattttctatggttacaaggggctgctgctgctgctgggaatcttccttgcttatgagaccaagagtgtgtccactgagaagatcaatgatcaccgggctgtgggcatggctatctacaatgtggcagtcctgtgcctcatcactgctcctgtcaccatgattctgtccagccagcaggatgcagcctttgcctttgcctctcttgccatagttttctcctcctatatcactcttgttgtgctctttgtgcccaagatgcgcaggctgatcacccgaggggaatggcagtcggaggcgcaggacaccatgaagacagggtcatcgaccaacaacaacgaggaggagaagtcccggctgttggagaaggagaaccgtgaactggaaaagatcattgctgagaaagaggagcgtgtctctgaactgcgccatcaactccagtctcggcagcagctccgctcccggcgccacccaccgacacccccagaaccctctgggggcctgcccaggggaccccctgagccccccgaccggcttagctgtgatgggagtcgagtgcatttgctttataagtgagggtgcatgtccgttccgaggaatgggatttaatgacctttgatgccaacccatatgacagcgtgaaaaaaatcaaagaacatgtccggtctaagaccaaggttcctgtgcaggaccaggttcttttgctgggctccaagatcttaaagccacggagaagcctctcatcttatggcactgacaaagagaagaccatccaccttaccctgaaagtggtgaagcccagtgatgaggagctgcccttgtttcttgtggagtcaggtgatgaggcaaagaggcacctcctccaggtgcgaaggtccagctcagtggcacaagtgaaagcaatgatcgagactaagacgggtataatccctgagacccagattgtgacttgcaatggaaagagactggaagatgggaagatgatggcagattacggcatcagaaagggcaacttactcttcctggcatcttattgtattggagggtgaccaccctggggatggggtgttggcaggggtcaaaaagcttatttcttttaatctcttactcaacgaacacatcttctgatgatttcccaaaattaatgagaatgagatgagtagagtaagatttgggtgggatgggtaggatgaagtatattgcccaactctatgtttctttgattctaacacaattaattaagtgacatgatttttactaatgtattactgagactagtaaataaatttttaaggcaaaatagagcattcaaagcca

SEQ ID NO: 136439 - DNA, 4510 bp, Homo sapiens; identical to SEQ ID NO: 136433
  Payload ID: 6701
  Gene Symbol: GABBR1
  Gene Name: gamma-aminobutyric acid (GABA) B receptor, 1
  Uniprot ID: Q9UBS5
  ENST ID: ENST00000423604
  CDS Start-End: 312-3197

SEQ ID NO: 136440 - DNA, 3523 bp, Homo sapiens
  Payload ID: 6701
  Gene Symbol: GABBR1
  Gene Name: gamma-aminobutyric acid (GABA) B receptor, 1
  Uniprot ID: Q9UBS5
  ENST ID: ENST00000417759
  CDS Start-End: 248-2782
ctcctcctcctcccctccgtcggtcagtcagtccgcgaggagagtccgcggtggcggcgacggtggcgagagccgcgggggccgtaggaagccaaccttccctgcttctccggggccctcgccccctcctccccacaaaatcagggatggaggcgcctccccggcaccctcttagcagccctccccaggaaaagtgtcccccctgagctcctaacgctccccaacagctacccctgccccccacgccatggggcccggggccccttttgcccgggtggggtggccactgccgcttctggttgtgatggcggcaggggtggctccggtgtgggcctcccactccccccatctcccgcggcctcactcgcgggtccccccgcacccctcctcagaacggcgcgcagtgtacatcggggcactgtttcccatgagcgggggctggccagggggccaggcctgccagcccgcggtggagatggcgctggaggacgtgaatagccgcagggacatcctgccggactatgagctcaagctcatccaccacgacagcaagtgtgatccaggccaagccaccaagtacctatatgagctgctctacaacgaccctatcaagatcatccttatgcctggctgcagctctgtctccacgctggtggctgaggctgctaggatgtggaacctcattgtgctttcctatggctccagctcaccagccctgtcaaaccggcagcgtttccccactttcttccgaacgcacccatcagccacactccacaaccctacccgcgtgaaactctttgaaaagtggggctggaagaagattgctaccatccagcagaccactgaggtcttcacttcgactctggacgacctggaggaacgagtgaaggaggctggaattgagattactttccgccagagtttcttctcagatccagctgtgcccgtcaaaaacctgaagcgccaggatgcccgaatcatcgtgggacttttctatgagactgaagcccggaaagttttttgtgaggtgtacaaggagcgtctctttgggaagaagtacgtctggttcctcattgggtggtatgctgacaattggttcaagatctacgacccttctatcaactgcacagtggatgagatgactgaggcggtggagggccacatcacaactgagattgtcatgctgaatcctgccaatacccgcagcatttccaacatgacatcccaggaatttgtggagaaactaaccaagcgactgaaaagacaccctgaggagacaggaggcttccaggaggcaccgctggcctatgatgccatctgggccttggcactggccctgaacaagacatctggaggaggcggccgttctggtgtgcgcctggaggacttcaactacaacaaccagaccattaccgaccaaatctaccgggcaatgaactcttcgtcctttgagggtgtctctggccatgtggtgtttgatgccagcggctctcggatggcatggacgcttatcgagcagcttcagggtggcagctacaagaagattggctactatgacagcaccaaggatgatctttcctggtccaaaacagataaatggattggagggtcccccccagctgaccagaccctggtcatcaagacattccgcttcctgtcacagaaactctttatctccgtctcagttctctccagcctgggcattgtcctagctgttgtctgtctgtcctttaacatctacaactcacatgtccgttatatccagaactcacagcccaacctgaacaacctgactgctgtgggctgctcactggctttagctgctgtcttccccctggggctcgatggttaccacattgggaggaaccagtttcctttcgtctgccaggcccgcctctggctcctgggcctgggctttagtctgggctacggttccatgttcaccaagatttggtgggtccacacggtcttcacaaagaaggaagaaaagaaggagtggaggaagactctggaaccctggaagctgtatgccacagtgggcctgctggtgggcatggatgtcctcactctcgccatctggcagatcgtggaccctctgcaccggaccattgagacatttgccaaggaggaacctaaggaagatattgacgtctctattctgccccagctggagcattgcagctccaggaagatgaatacatggcttggcattttctatggttacaaggggctgctgctgctgctgggaatcttccttgcttatgagaccaagagtgtgtccactgagaagatcaatgatcaccgggctgtgggcatggctatctacaatgtggcagtcctgtgcctcatcactgctcctgtcaccatgattctgtccagccagcaggatgcagcctttgcctttgcctctcttgccatagttttctcctcctatatcactcttgttgtgctctttgtgcccaagatgcgcaggctgatcacccgaggggaatggcagtcggaggcgcaggacaccatgaagacagggtcatcgaccaacaacaacgaggaggagaagtcccggctgttggagaaggagaaccgtgaactggaaaagatcattgctgagaaagaggagcgtgtctctgaactgcgccatcaactccagtctcggcagcagctccgctcccggcgccacccaccgacacccccagaaccctctgggggcctgcccaggggaccccctgagccccccgaccggcttagctgtgatgggagtcgagtgcatttgctttataagtgagggtgcatgtccgttccgaggaatgggatttaatgacctttgatgccaacccatatgacagcgtgaaaaaaatcaaagaacatgtccggtctaagaccaaggttcctgtgcaggaccaggttcttttgctgggctccaagatcttaaagccacggagaagcctctcatcttatggcattgacaaagagaagaccatccaccttaccctgaaagtggtgaagcccagtgatgaggagctgcccttgtttcttgtggagtcaggtgatgaggcaaagaggcacctcctccaggtgcgaaggtccagctcagtggcacaagtgaaagcaatgatcgagactaagacgggtataatccctgagacccagattgtgacttgcaatggaaagagactggaagatgggaagatgatggcagattacggcatcagaaagggcaacttactcttcctggcatgttattgtattggagggtgaccaccctgggcatggggtgttggcaggggtcaaaaagcttatttcttttaatctcttactcaacgaacacatcttctgatgatttcccaaaattaatgagaatgagatgagtagagtaagatttgggtgggatgggtaggatgaagtatattgcccaactctatgtttctttgattctaacacaattaattaagtgacatgatttttactaatgtattactgagactagtaaataaatttttaaggcaaaatagagcattcaaagcca

SEQ ID NO: 136441 - DNA, 4070 bp, Homo sapiens; identical to SEQ ID NO: 136431
  Payload ID: 6701
  Gene Symbol: GABBR1
  Gene Name: gamma-aminobutyric acid (GABA) B receptor, 1
  Uniprot ID: Q9UBS5
  ENST ID: ENST00000446436
  CDS Start-End: 223-2757

SEQ ID NO: 136442 - DNA, 4299 bp, Homo sapiens; identical to SEQ ID NO: 136429
  Payload ID: 6701
  Gene Symbol: GABBR1
  Gene Name: gamma-aminobutyric acid (GABA) B receptor, 1
  Uniprot ID: Q9UBS5
  ENST ID: ENST00000443440
  CDS Start-End: 287-2986

SEQ ID NO: 136443 - DNA, 4298 bp, Homo sapiens
  Payload ID: 6701
  Gene Symbol: GABBR1
  Gene Name: gamma-aminobutyric acid (GABA) B receptor, 1
  Uniprot ID: Q9UBS5
  ENST ID: ENST00000419674
  CDS Start-End: 286-2985
gcccgggagctctccctggtccccggcgccgcctccttccctcccggctccccgctccccgctcccgtggctgccgccgccccggggaagaagagacaggggtggggtttgggggaagcgagagaggaggggagagaccctggccaggctggagcctggattcgaggggaggagggacgggaggaggagaaaggtggaggagaagggaggggggagcggggaggagcggccggcctggggccttgaggcccggggagagccggggagccgggcccgcgcgccgagatgttgctgctgctgctactggcgccactcttcctccgccccccgggcgcgggcggggcgcagacccccaacgccacctcagaaggttgccagatcatacacccgccctgggaagggggcatcaggtaccggggcctgactcgggaccaggtgaaggctatcaacttcctgccagtggactatgagattgagtatgtgtgccggggggagcgcgaggtggtggggcccaaggtccgcaagtgcctggccaacggctcctggacagatatggacacacccagccgctgtgtgaatcgaacgccacactcagaacggcgcgcagtgtacatcggggcactgtttcccatgagcgggggctggccagggggccaggcctgccagcccgcggtggagatggcgctggaggacgtgaatagccgcagggacatcctgccggactatgagctcaagctcatccaccacgacagcaagtgtgatccaggccaagccaccaagtacctatatgagctgctctacaacgaccctatcaagatcatccttatgcctggctgcagctctgtctccacgctggtggctgaggctgctaggatgtggaacctcattgtgctttcctatggctccagctcaccagccctgtcaaaccggcagcgtttccccactttcttccgaacgcacccatcagccacactccacaaccctacccgcgtgaaactctttgaaaagtggggctggaagaagattgctaccatccagcagaccactgaggtcttcacttcgactctggacgacctggaggaacgagtgaaggaggctggaattgagattactttccgccagagtttcttctcagatccagctgtgcccgtcaaaaacctgaagcgccaggatgcccgaatcatcgtgggacttttctatgagactgaagcccggaaagttttttgtgaggtgtacaaggagcgtctctttgggaagaagtacgtctggttcctcattgggtggtatgctgacaattggttcaagatctacgacccttctatcaactgcacagtggatgagatgactgaggcggtggagggccacatcacaactgagattgtcatgctgaatcctgccaatacccgcagcatttccaacatgacatcccaggaatttgtggagaaactaaccaagcgactgaaaagacaccctgaggagacaggaggcttccaggaggcaccgctggcctatgatgccatctgggccttggcactggccctgaacaagacatctggaggaggcggccgttctggtgtgcgcctggaggacttcaactacaacaaccagaccattaccgaccaaatctaccgggcaatgaactcttcgtcctttgagggtgtctctggccatgtggtgtttgatgccagcggctctcggatggcatggacgcttatcgagcagcttcagggtggcagctacaagaagattggctactatgacagcaccaaggatgatctttcctggtccaaaacagataaatggattggagggtcccccccagctgaccagaccctggtcatcaagacattccgcttcctgtcacagaaactctttatctccgtctcagttctctccagcctgggcattgtcctagctgttgtctgtctgtcctttaacatctacaactcacatgtccgttatatccagaactcacagcccaacctgaacaacctgactgctgtgggctgctcactggctttagctgctgtcttccccctggggctcgatggttaccacattgggaggaaccagttccctttcgtctgccaggcccgcctctggctcctgggcctgggctttagtctgggctacggttccatgttcaccaagatttggtgggtccacacggtcttcacaaagaaggaagaaaagaaggagtggaggaagactctggaaccctggaagctgtatgccacagtgggcctgctggtgggcatggatgtcctcactctcgccatctggcagatcgtggaccctctgcaccggaccattgagacatttgccaaggaggaacctaaggaagatattgacgtctctattctgccccagctggagcattgcagctccaggaagatgaatacatggcttggcattttctatggttacaaggggctgctgctgctgctgggaatcttccttgcttatgagaccaagagtgtgtccactgagaagatcaatgatcaccgggctgtgggcatggctatctacaatgtggcagtcctgtgcctcatcactgctcctgtcaccatgattctgtccagccagcaggatgcagcctttgcctttgcctctcttgccatagttttctcctcctatatcactcttgttgtgctctttgtgcccaagatgcgcaggctgatcacccgaggggaatggcagtcggaggcgcaggacaccatgaagacagggtcatcgaccaacaacaacgaggaggagaagtcccggctgttggagaaggagaaccgtgaactggaaaagatcattgctgagaaagaggagcgtgtctctgaactgcgccatcaactccagtctcggcagcagctccgctcccggcgccacccaccgacacccccagaaccctctgggggcctgcccaggggaccccctgagccccccgaccggcttagctgtgatgggagtcgagtgcatttgctttataagtgagggtagggtgagggaggacaggccagtagggggagggaaagggagaggggaagggcaggggactcaggaagcagggggtccccatccccagctgggaagaacatgctatccaatctcatctcttgtaaatacatgtccccctgtgagttctgggctgatttgggtctctcatacctctgggaaacagacctttttctctcttactgcttcatgtaattttgtatcacctcttcacaatttagttcgtacctggcttgaagctgctcactgctcacacgctgcctcctcagcagcctcactgcatctttctcttcccatgcaacaccctcttctagttaccacggcaacccctgcagctcctctgcctttgtgctctgttcctgtccagcaggggtctcccaacaagtgctctttccaccccaaaggggcctctccttttctccactgtcataatctctttccatcttacttgcccttccatactttctcacatgtggctccccctgaattttgcttcctttgggagctcattcttttcgccaaggctcacatgctccttgcctctgctctgtgcactcacgctcagcacacatgcatcctcccctctcctgcgtgtgcccactgaacatgctcatgtgtacacacgcttttcccgtatgctttcttcatgttcagtcacatgtgctctcgggtgccctgcattcacagctacgtgtgcccctctcatggtcatgggtctgcccttgagcgtgtttgggtaggcatgtgcaatttgtctagcatgctgagtcatgtctttcctatttgcacacgtccatgtttatccatgtactttccctgtgtaccctccatgtaccttgtgtactttcttcccttaaatcatggtattcttctgacagagccatatgtaccctaccctgcacattgttatgcacttttccccaattcatgtttggtggggccatccacaccctctccttgtcacagaatctccatttctgctcagattccccccatctccattgcattcatgtactaccctcagtctacactcacaatcatcttctcccaagactgctcccttttgttttgtgtttttttgaggggaattaaggaaaaataagtgggggcaggtttggagagctgcttccagtggatagttgatgagaatcctgaccaaaggaaggcacccttgactgttgggatagacagatggacctatggggtgggaggtggtgtccctttcacactgtggtgtctcttggggaaggatctccccgaatctcaataaaccagtgaacagtgtgactcgg

SEQ ID NO: 136444 - DNA, 3523 bp, Homo sapiens
  Payload ID: 6701
  Gene Symbol: GABBR1
  Gene Name: gamma-aminobutyric acid (GABA) B receptor, 1
  Uniprot ID: Q9UBS5
  ENST ID: ENST00000448754
  CDS Start-End: 248-2782
ctcctcctcctcccctccgtcggtcagtcagtccgcgaggagagtccgcggtggcggcgacggtggcgagagccgcgggggccgtaggaagccaaccttccctgcttctccggggccctcgccccctcctccccacaaaatcagggatggaggcgcctccccggcaccctcttagcagccctccccaggaaaagtgtcccccctgagctcctaacgctccccaacagctacccctgccccccacgccatggggcccggggccccttttgcccgggtggggtggccactgccgcttctggttgtgatggcggcaggggtggctccggtgtgggcctcccactccccccatctcccgcggcctcactcgcgggtccccccgcacccctcctcagaacggcgcgcagtgtacatcggggcactgtttcccatgagcgggggctggccagggggccaggcctgccagcccgcggtggagatggcgctggaggacgtgaatagccgcagggacatcctgccggactatgagctcaagctcatccaccacgacagcaagtgtgatccaggccaagccaccaagtacctatatgagctgctctacaacgaccctatcaagatcatccttatgcctggctgcagctctgtctccacgctggtggctgaggctgctaggatgtggaacctcattgtgctttcctatggctccagctcaccagccctgtcaaaccggcagcgtttccccactttcttccgaacgcacccatcagccacactccacaaccctacccgcgtgaaactctttgaaaagtggggctggaagaagattgctaccatccagcagaccactgaggtcttcacttcgactctggacgacctggaggaacgagtgaaggaggctggaattgagattactttccgccagagtttcttctcagatccagctgtgcccgtcaaaaacctgaagcgccaggatgcccgaatcatcgtgggacttttctatgagactgaagcccggaaagttttttgtgaggtgtacaaggagcgtctctttgggaagaagtacgtctggttcctcattgggtggtatgctgacaattggttcaagatctacgacccttctatcaactgcacagtggatgagatgactgaggcggtggagggccacatcacaactgagattgtcatgctgaatcctgccaatacccgcagcatttccaacatgacatcccaggaatttgtggagaaactaaccaagcgactgaaaagacaccctgaggagacaggaggcttccaggaggcaccgctggcctatgatgccatctgggccttggcactggccctgaacaagacatctggaggaggcggccgttccggcgtgcgcctggaggacttcaactacaacaaccagaccattaccgaccaaatctaccgggcaatgaactcctcgtcctttgagggtgtctctggccatgtggtgtttgatgccagcggctctcggatggcatggacgcttatcgagcagcttcagggtggcagctacaagaagattggctactatgacagcaccaaggatgatctttcctggtccaaaacagataaatggattggagggtcccccccagctgaccagaccctggtcatcaagacattccgcttcctgtcacagaaactctttatctccgtctcagttctctccagcctgggcattgtcctagctgttgtctgtctgtcctttaacatctacaactcacatgtccgttatatccagaactcacagcccaacctgaacaacctgactgctgtgggctgctcactggctttagctgctgtcttccccctggggctcgatggttaccacattgggaggaaccagttccctttcgtctgccaggcccgcctctggctcctgggcctgggctttagtctgggctacggttccatgttcaccaagatttggtgggtccacacggtcttcacaaagaaggaagaaaagaaggagtggaggaagactctggaaccctggaagctgtatgccacagtgggcctgctggtgggcatggatgtcctcactctcgccatctggcagatcgtggaccctctgcaccggaccattgagacatttgccaaggaggaacctaaggaagatattgacgtctctattctgccccagctggagcattgcagctccaggaagatgaatacatggcttggcattttctatggttacaaggggctgctgctgctgctgggaatcttccttgcttatgagaccaagagtgtgtccactgagaagatcaatgatcaccgggctgtgggcatggctatctacaatgtggcagtcctgtgcctcatcactgctcctgtcaccatgattctgtccagccagcaggatgcagcctttgcctttgcctctcttgccatagttttctcctcctatatcactcttgttgtgctctttgtgcccaagatgcgcaggctgatcacccgaggggaatggcagtcggaggcgcaggacaccatgaagacagggtcatcgaccaacaacaacgaggaggagaagtcccggctgttggagaaggagaaccgtgaactggaaaagatcattgctgagaaagaggagcgtgtctctgaactgcgccatcaactccagtctcggcagcagctccgctcccggcgccacccaccgacacccccagaaccctctgggggcctgcccaggggaccccctgagccccccgaccggcttagctgtgatgggagtcgagtgcatttgctttataagtgagggtgcatgtccgttccgaggaatgggatttaatgacctttgatgccaacccatatgacagcgtgaaaaaaatcaaagaacatgtccggtctaagaccaaggttcctgtgcaggaccaggttcttttgctgggctccaagatcttaaagccacggagaagcctctcatcttatggcactgacaaagagaagaccatccaccttaccctgaaagtggtgaagcccagtgatgaggagctgcccttgtttcttgtggagtcaggtgatgaggcaaagaggcacctcctccaggtgcgaaggtccagctcagtggcacaagtgaaagcaatgatcgagactaagacgggtataatccctgagacccagattgtgacttgcaatggaaagagactggaagatgggaagatgatggcagattacggcatcagaaagggcaacttactcttcctggcatcttattgtattggagggtgaccaccctggggatggggtgttggcaggggtcaaaaagcttatttcttttaatctcttactcaacgaacacatcttctgatgatttcccaaaattaatgagaatgagatgagtagagtaagatttgggtgggatgggtaggatgaagtatattgcccaactctatgtttctttgattctaacacaattaattaagtgacatgatttttactaatgtattactgagactagtaaataaatttttaaggcaaaatagagcattcaaagcca

SEQ ID NO: 136445 - DNA, 4509 bp, Homo sapiens
  Payload ID: 6701
  Gene Symbol: GABBR1
  Gene Name: gamma-aminobutyric acid (GABA) B receptor, 1
  Uniprot ID: Q9UBS5
  ENST ID: ENST00000439457
  CDS Start-End: 311-3196
cccttgcaccctccttcttccctccgcccgggagctctccctggtccccggcgccgcctccttccctcccggctccccgctccccgctcccgtggctgccgccgccccggggaagaagagacaggggtggggtttgggggaagcgagagaggaggggagagaccctggccaggctggagcctggattcgaggggaggagggacgggaggaggagaaaggtggaggagaagggaggggggagcggggaggagcggccggcctggggccttgaggcccggggagagccggggagccgggcccgcgcgccgagatgttgctgctgctgctactggcgccactcttcctccgccccccgggcgcgggcggggcgcagacccccaacgccacctcagaaggttgccagatcatacacccgccctgggaagggggcatcaggtaccggggcctgactcgggaccaggtgaaggctatcaacttcctgccagtggactatgagattgagtatgtgtgccggggggagcgcgaggtggtggggcccaaggtccgcaagtgcctggccaacggctcctggacagatatggacacacccagccgctgtgtccgaatctgctccaagtcttatttgaccctggaaaatgggaaggttttcctgacgggtggggacctcccagctctggacggagcccgggtggatttccggtgtgaccccgacttccatctggtgggcagctcccggagcatctgtagtcagggccagtggagcacccccaagccccactgccaggtgaatcgaacgccacactcagaacggcgcgcagtgtacatcggggcactgtttcccatgagcgggggctggccagggggccaggcctgccagcccgcggtggagatggcgctggaggacgtgaatagccgcagggacatcctgccggactatgagctcaagctcatccaccacgacagcaagtgtgatccaggccaagccaccaagtacctatatgagctgctctacaacgaccctatcaagatcatccttatgcctggctgcagctctgtctccacgctggtggctgaggctgctaggatgtggaacctcattgtgctttcctatggctccagctcaccagccctgtcaaaccggcagcgtttccccactttcttccgaacgcacccatcagccacactccacaaccctacccgcgtgaaactctttgaaaagtggggctggaagaagattgctaccatccagcagaccactgaggtcttcacttcgactctggacgacctggaggaacgagtgaaggaggctggaattgagattactttccgccagagtttcttctcagatccagctgtgcccgtcaaaaacctgaagcgccaggatgcccgaatcatcgtgggacttttctatgagactgaagcccggaaagttttttgtgaggtgtacaaggagcgtctctttgggaagaagtacgtctggttcctcattgggtggtatgctgacaattggttcaagatctacgacccttctatcaactgcacagtggatgagatgactgaggcggtggagggccacatcacaactgagattgtcatgctgaatcctgccaatacccgcagcatttccaacatgacatcccaggaatttgtggagaaactaaccaagcgactgaaaagacaccctgaggagacaggaggcttccaggaggcaccgctggcctatgatgccatctgggccttggcactggccctgaacaagacatctggaggaggcggccgttctggtgtgcgcctggaggacttcaactacaacaaccagaccattaccgaccaaatctaccgggcaatgaactcttcgtcctttgagggtgtctctggccatgtggtgtttgatgccagcggctctcggatggcatggacgcttatcgagcagcttcagggtggcagctacaagaagattggctactatgacagcaccaaggatgatctttcctggtccaaaacagataaatggattggagggtcccccccagctgaccagaccctggtcatcaagacattccgcttcctgtcacagaaactctttatctccgtctcagttctctccagcctgggcattgtcctagctgttgtctgtctgtcctttaacatctacaactcacatgtccgttatatccagaactcacagcccaacctgaacaacctgactgctgtgggctgctcactggctttagctgctgtcttccccctggggctcgatggttaccacattgggaggaaccagttccctttcgtctgccaggcccgcctctggctcctgggcctgggctttagtctgggctacggttccatgttcaccaagatttggtgggtccacacggtcttcacaaagaaggaagaaaagaaggagtggaggaagactctggaaccctggaagctgtatgccacagtgggcctgctggtgggcatggatgtcctcactctcgccatctggcagatcgtggaccctctgcaccggaccattgagacatttgccaaggaggaacctaaggaagatattgacgtctctattctgccccagctggagcattgcagctccaggaagatgaatacatggcttggcattttctatggttacaaggggctgctgctgctgctgggaatcttccttgcttatgagaccaagagtgtgtccactgagaagatcaatgatcaccgggctgtgggcatggctatctacaatgtggcagtcctgtgcctcatcactgctcctgtcaccatgattctgtccagccagcaggatgcagcctttgcctttgcctctcttgccatagttttctcctcctatatcactcttgttgtgctctttgtgcccaagatgcgcaggctgatcacccgaggggaatggcagtcggaggcgcaggacaccatgaagacagggtcatcgaccaacaacaacgaggaggagaagtcccggctgttggagaaggagaaccgtgaactggaaaagatcattgctgagaaagaggagcgtgtctctgaactgcgccatcaactccagtctcggcagcagctccgctcccggcgccacccaccgacacccccagaaccctctgggggcctgcccaggggaccccctgagccccccgaccggcttagctgtgatgggagtcgagtgcatttgctttataagtgagggtagggtgagggaggacaggccagtagggggagggaaagggagaggggaagggcaggggactcaggaagcagggggtccccatccccagctgggaagaacatgctatccaatctcatctcttgtaaatacatgtccccctgtgagttctgggctgatttgggtctctcatacctctgggaaacagacctttttctctcttactgcttcatgtaattttgtatcacctcttcacaatttagttcgtacctggcttgaagctgctcactgctcacacgctgcctcctcagcagcctcactgcatctttctcttcccatgcaacaccctcttctagttaccacggcaacccctgcagctcctctgcctttgtgctctgttcctgtccagcaggggtctcccaacaagtgctctttccaccccaaaggggcctctccttttctccactgtcataatctctttccatcttacttgcccttccatactttctcacatgtggctccccctgaattttgcttcctttgggagctcattcttttcgccaaggctcacatgctccttgcctctgctctgtgcactcacgctcagcacacatgcatcctcccctctcctgcgtgtgcccactgaacatgctcatgtgtacacacgcttttcccgtatgctttcttcatgttcagtcacatgtgctctcgggtgccctgcattcacagctacgtgtgcccctctcatggtcatgggtctgcccttgagcgtgtttgggtaggcatgtgcaatttgtctagcatgctgagtcatgtctttcctatttgcacacgtccatgtttatccatgtactttccctgtgtaccctccatgtaccttgtgtactttcttcccttaaatcatggtattcttctgacagagccatatgtaccctaccctgcacattgttatgcacttttccccaattcatgtttggtggggccatccacaccctctccttgtcacagaatctccatttctgctcagattccccccatctccattgcattcatgtactaccctcagtctacactcacaatcatcttctcccaagactgctcccttttgttttgtgtttttttgaggggaattaaggaaaaataagtgggggcaggtttggagagctgcttccagtggatagttgatgagaatcctgaccaaaggaaggcacccttgactgttgggatagacagatggacctatggggtgggaggtggtgtccctttcacactgtggtgtctcttggggaaggatctccccgaatctcaataaaccagtgaacagtgtgactcgg

SEQ ID NO: 136446 - DNA, 3523 bp, Homo sapiens
  Payload ID: 6701
  Gene Symbol: GABBR1
  Gene Name: gamma-aminobutyric acid (GABA) B receptor, 1
  Uniprot ID: Q9UBS5
  ENST ID: ENST00000438094
  CDS Start-End: 248-2782
ctcctcctcctcccctccgtcggtcagtcagtccgcgaggagagtccgcggtggcggcgacggtggcgagagccgcgggggccgtaggaagccaaccttccctgcttctccggggccctcgccccctcctccccacaaaatcagggatggaggcgcctccccggcaccctcttagcagccctccccaggaaaagtgtcccccctgagctcctaacgctccccaacagctacccctgccccccacgccatggggcccggggccccttttgcccgggtggggtggccactgccgcttctggttgtgatggcggcaggggtggctccggtgtgggcctcccactccccccatctcccgcggcctcactcgcgggtccccccgcacccctcctcagaacggcgcgcagtgtacatcggggcactgtttcccatgagcgggggctggccagggggccaggcctgccagcccgcggtggagatggcgctggaggacgtgaatagccgcagggacatcctgccggactatgagctcaagctcatccaccacgacagcaagtgtgatccaggccaagccaccaagtacctatatgagctgctctacaacgaccctatcaagatcatccttatgcctggctgcagctctgtctccacgctggtggctgaggctgctaggatgtggaacctcattgtgctttcctatggctccagctcaccagccctgtcaaaccggcagcgtttccccactttcttccgaacgcacccatcagccacactccacaaccctacccgcgtgaaactctttgaaaagtggggctggaagaagattgctaccatccagcagaccactgaggtcttcacttcgactctggacgacctggaggaacgagtgaaggaggctggaattgagattactttccgccagagtttcttctcagatccagctgtgcccgtcaaaaacctgaagcgccaggatgcccgaatcatcgtgggacttttctatgagactgaagcccggaaagttttttgtgaggtgtacaaggagcgtctctttgggaagaagtacgtctggttcctcattgggtggtatgctgacaattggttcaagatctacgacccttctatcaactgcacagtggatgagatgactgaggcggtggagggccacatcacaactgagattgtcatgctgaatcctgccaatacccgcagcatttccaacatgacatcccaggaatttgtggagaaactaaccaagcgactgaaaagacaccctgaggagacaggaggcttccaggaggcaccgctggcctatgatgccatctgggccttggcactggccctgaacaagacatctggaggaggcggccgttctggtgtgcgcctggaggacttcaactacaacaaccagaccattaccgaccaaatctaccgggcaatgaactcttcgtcctttgagggtgtctctggccatgtggtgtttgatgccagcggctctcggatggcatggacgcttatcgagcagcttcagggtggcagctacaagaagattggctactatgacagcaccaaggatgatctttcctggtccaaaacagataaatggattggagggtcccccccagctgaccagaccctggtcatcaagacattccgcttcctgtcacagaaactctttatctccgtctcagttctctccagcctgggcattgtcctagctgttgtctgtctgtcctttaacatctacaactcacatgtccgttatatccagaactcacagcccaacctgaacaacctgactgctgtgggctgctcactggctttagctgctgtcttccccctggggctcgatggttaccacattgggaggaaccagtttcctttcgtctgccaggcccgcctctggctcctgggcctgggctttagtctgggctacggttccatgttcaccaagatttggtgggtccacacggtcttcacaaagaaggaagaaaagaaggagtggaggaagactctggaaccctggaagctgtatgccacagtgggcctgctggtgggcatggatgtcctcactctcgccatctggcagatcgtggaccctctgcaccggaccattgagacatttgccaaggaggaacctaaggaagatattgacgtctctattctgccccagctggagcattgcagctccaggaagatgaatacatggcttggcattttctatggttacaaggggctgctgctgctgctgggaatcttccttgcttatgagaccaagagtgtgtccactgagaagatcaatgatcaccgggctgtgggcatggctatctacaatgtggcagtcctgtgcctcatcactgctcctgtcaccatgattctgtccagccagcaggatgcagcctttgcctttgcctctcttgccatagttttctcctcctatatcactcttgttgtgctctttgtgcccaagatgcgcaggctgatcacccgaggggaatggcagtcggaggcgcaggacaccatgaagacagggtcatcgaccaacaacaacgaggaggagaagtcccggctgttggagaaggagaaccgtgaactggaaaagatcattgctgagaaagaggagcgtgtctctgaactgcgccatcaactccagtctcggcagcagctccgctcccggcgccacccaccgacacccccagaaccctctgggggcctgcccaggggaccccctgagccccccgaccggcttagctgtgatgggagtcgagtgcatttgctttataagtgagggtgcatgtccgttccgaggaatgggatttaatgacctttgatgccaacccatatgacagcgtgaaaaaaatcaaagaacatgtccggtctaagaccaaggttcctgtgcaggaccaggttcttttgctgggctccaagatcttaaagccacggagaagcctctcatcttacggcattgacaaagagaagaccatccaccttaccctgaaagtggtgaagcccagtgatgaggagctgcccttgtttcttgtggagtcaggtgatgaggcaaagaggcacctcctccaggtgcgaaggtccagctcagtggcacaagtgaaagcaatgatcgagactaagacgggtataatccctgagacccagattgtgacttgcaatggaaagagactggaagatgggaagatgatggcagattacggcatcagaaagggcaacttactcttcctggcatcttattgtattggagggtgaccaccctgggcatggggtgttggcaggggtcaaaaagcttatttcttttaatctcttactcaacgaacacatcttctgatgatttcccaaaattaatgagaatgagatgagtagagtaagatttgggtgggatgggtaggatgaagtatattgcccaactctatgtttctttgattctaacacaattaattaagtgacatgatttttactaatgtattactgagactagtaaataaatttttaaggcaaaatagagcattcaaagcca

SEQ ID NO: 136447 - DNA, 4065 bp, Homo sapiens
  Payload ID: 6701
  Gene Symbol: GABBR1
  Gene Name: gamma-aminobutyric acid (GABA) B receptor, 1
  Uniprot ID: Q9UBS5
  ENST ID: ENST00000414980
  CDS Start-End: 223-2757
agtcagtccgcgaggagagtccgcggtggcggcgacggtggcgagagccgcgggggccgtaggaagccaaccttccctgcttctccggggccctcgccccctcctccccacaaaatcagggatggaggcgcctccccggcaccctcttagcagccctccccaggaaaagtgtcccccctgagctcctaacgctccccaacagctacccctgccccccacgccatggggcccggggccccttttgcccgggtggggtggccactgccgcttctggttgtgatggcggcaggggtggctccggtgtgggcctcccactccccccatctcccgcggcctcactcgcgggtccccccgcacccctcctcagaacggcgcgcagtgtacatcggggcactgtttcccatgagcgggggctggccagggggccaggcctgccagcccgcggtggagatggcgctggaggacgtgaatagccgcagggacatcctgccggactatgagctcaagctcatccaccacgacagcaagtgtgatccaggccaagccaccaagtacctatatgagctgctctacaacgaccctatcaagatcatccttatgcctggctgcagctctgtctccacgctggtggctgaggctgctaggatgtggaacctcattgtgctttcctatggctccagctcaccagccctgtcaaaccggcagcgtttccccactttcttccgaacgcacccatcagccacactccacaaccctacccgcgtgaaactctttgaaaagtggggctggaagaagattgctaccatccagcagaccactgaggtcttcacttcgactctggacgacctggaggaacgagtgaaggaggctggaattgagattactttccgccagagtttcttctcagatccagctgtgcccgtcaaaaacctgaagcgccaggatgcccgaatcatcgtgggacttttctatgagactgaagcccggaaagttttttgtgaggtgtacaaggagcgtctctttgggaagaagtacgtctggttcctcattgggtggtatgctgacaattggttcaagatctacgacccttctatcaactgcacagtggatgagatgactgaggcggtggagggccacatcacaactgagattgtcatgctgaatcctgccaatacccgcagcatttccaacatgacatcccaggaatttgtggagaaactaaccaagcgactgaaaagacaccctgaggagacaggaggcttccaggaggcaccgctggcctatgatgccatctgggccttggcactggccctgaacaagacatctggaggaggcggccgttctggtgtgcgcctggaggacttcaactacaacaaccagaccattaccgaccaaatctaccgggcaatgaactcttcgtcctttgagggtgtctctggccatgtggtgtttgatgccagcggctctcggatggcatggacgcttatcgagcagcttcagggtggcagctacaagaagattggctactatgacagcaccaaggatgatctttcctggtccaaaacagataaatggattggagggtcccccccagctgaccagaccctggtcatcaagacattccgcttcctgtcacagaaactctttatctccgtctcagttctctccagcctgggcattgtcctagctgttgtctgtctgtcctttaacatctacaactcacatgtccgttatatccagaactcacagcccaacctgaacaacctgactgctgtgggctgctcactggctttagctgctgtcttccccctggggctcgatggttaccacattgggaggaaccagtttcctttcgtctgccaggcccgcctctggctcctgggcctgggctttagtctgggctacggttccatgttcaccaagatttggtgggtccacacggtcttcacaaagaaggaagaaaagaaggagtggaggaagactctggaaccctggaagctgtatgccacagtgggcctgctggtgggcatggatgtcctcactctcgccatctggcagatcgtggaccctctgcaccggaccattgagacatttgccaaggaggaacctaaggaagatattgacgtctctattctgccccagctggagcattgcagctccaggaagatgaatacatggcttggcattttctatggttacaaggggctgctgctgctgctgggaatcttccttgcttatgagaccaagagtgtgtccactgagaagatcaatgatcaccgggctgtgggcatggctatctacaatgtggcagtcctgtgcctcatcactgctcctgtcaccatgattctgtccagccagcaggatgcagcctttgcctttgcctctcttgccatagttttctcctcctatatcactcttgttgtgctctttgtgcccaagatgcgcaggctgatcacccgaggggaatggcagtcggaggcgcaggacaccatgaagacagggtcatcgaccaacaacaacgaggaggagaagtcccggctgttggagaaggagaaccgtgaactggaaaagatcattgctgagaaagaggagcgtgtctctgaactgcgccatcaactccagtctcggcagcagctccgctcccggcgccacccaccgacacccccagaaccctctgggggcctgcccaggggaccccctgagccccccgaccggcttagctgtgatgggagtcgagtgcatttgctttataagtgagggtagggtgagggaggacaggccagtagggggagggaaagggagaggggaagggcaggggactcaggaagcagggggtccccatccccagctgggaagaacatgctatccaatctcatctcttgtaaatacatgtccccctgtgagttctgggctgatttgggtctctcatacctctgggaaacagacctttttctctcttactgcttcatgtaattttgtatcacctcttcacaatttagttcgtacctggcttgaagctgctcactgctcacacgctgcctcctcagcagcctcactgcatctttctcttcccatgcaacaccctcttctagttaccacggcaacccctgcagctcctctgcctttgtgctctgttcctgtccagcaggggtctcccaacaagtgctctttccaccccaaaggggcctctccttttctccactgtcataatctctttccatcttacttgcccttctatactttctcacatgtggctccccctgaattttgcttcctttgggagctcattcttttcgccaaggctcacatgctccttgcctctgctctgtgcactcacgctcagcacacatgcatcctcccctctcctgcgtgtgcccactgaacatgctcatgtgtacacacgcttttcccgtatgctttcttcatgttcagtcacatgtgctctcgggtgccctgcattcacagctacgtgtgcccctctcatggtcatgggtctgcccttgagcgtgtttgggtaggcatgtgcaatttgtctagcatgctgagtcatgtctttcctatttgcacacgtccatgtttatccatgtactttccctgtgtaccctccatgtaccttgtgtactttcttcccttaaatcatggtattcttctgacagagccatatgtaccctaccctgcacattgttatgcacttttccccaattcatgtttggtggggccatccacaccctctccttgtcacagaatctccatttctgctcagattccccccatctccattgcattcatgtactaccctcagtctacactcacaatcatcttctcccaagactgctcccttttgttttgtgtttttttgaggggaattaaggaaaaataagtgggggcaggtttggagagctgcttccagtggatagttgatgagaatcctgaccaaaggaaggcacccttgactgttgggatagacagatggacctatggggtgggaggtggtgtccctttcacactgtggtgtctcttggggaaggatctccccgaatctcaataaaccagtgaacagtgtga

SEQ ID NO: 136448 - DNA, 4070 bp, Homo sapiens
  Payload ID: 6701
  Gene Symbol: GABBR1
  Gene Name: gamma-aminobutyric acid (GABA) B receptor, 1
  Uniprot ID: Q9UBS5
  ENST ID: ENST00000452300
  CDS Start-End: 223-2757
agtcagtccgcgaggagagtccgcggtggcggcgacggtggcgagagccgcgggggccgtaggaagccaaccttccctgcttctccggggccctcgccccctcctccccacaaaatcagggatggaggcgcctccccggcaccctcttagcagccctccccaggaaaagtgtcccccctgagctcctaacgctccccaacagctacccctgccccccacgccatggggcccggggccccttttgcccgggtggggtggccactgccgcttctggttgtgatggcggcaggggtggctccggtgtgggcctcccactccccccatctcccgcggcctcactcgcgggtccccccgcacccctcctcagaacggcgcgcagtgtacatcggggcactgtttcccatgagcgggggctggccagggggccaggcctgccagcccgcggtggagatggcgctggaggacgtgaatagccgcagggacatcctgccggactatgagctcaagctcatccaccacgacagcaagtgtgatccaggccaagccaccaagtacctatatgagctgctctacaacgaccctatcaagatcatccttatgcctggctgcagctctgtctccacgctggtggctgaggctgctaggatgtggaacctcattgtgctttcctatggctccagctcaccagccctgtcaaaccggcagcgtttccccactttcttccgaacgcacccatcagccacactccacaaccctacccgcgtgaaactctttgaaaagtggggctggaagaagattgctaccatccagcagaccactgaggtcttcacttcgactctggacgacctggaggaacgagtgaaggaggctggaattgagattactttccgccagagtttcttctcagatccagctgtgcccgtcaaaaacctgaagcgccaggatgcccgaatcatcgtgggacttttctatgagactgaagcccggaaagttttttgtgaggtgtacaaggagcgtctctttgggaagaagtacgtctggttcctcattgggtggtatgctgacaattggttcaagatctacgacccttctatcaactgcacagtggatgagatgactgaggcggtggagggccacatcacaactgagattgtcatgctgaatcctgccaatacccgcagcatttccaacatgacatcccaggaatttgtggagaaactaaccaagcgactgaaaagacaccctgaggagacaggaggcttccaggaggcaccgctggcctatgatgccatctgggccttggcactggccctgaacaagacatctggaggaggcggccgttctggtgtgcgcctggaggacttcaactacaacaaccagaccattaccgaccaaatctaccgggcaatgaactcttcgtcctttgagggtgtctctggccatgtggtgtttgatgccagcggctctcggatggcatggacgcttatcgagcagcttcagggtggcagctacaagaagattggctactatgacagcaccaaggatgatctttcctggtccaaaacagataaatggattggagggtcccccccagctgaccagaccctggtcatcaagacattccgcttcctgtcacagaaactctttatctccgtctcagttctctccagcctgggcattgtcctagctgttgtctgtctgtcctttaacatctacaactcacatgtccgttatatccagaactcacagcccaacctgaacaacctgactgctgtgggctgctcactggctttagctgctgtcttccccctggggctcgatggttaccacattgggaggaaccagttccctttcgtctgccaggcccgcctctggctcctgggcctgggctttagtctgggctacggttccatgttcaccaagatttggtgggtccacacggtcttcacaaagaaggaagaaaagaaggagtggaggaagactctggaaccctggaagctgtatgccacagtgggcctgctggtgggcatggatgtcctcactctcgccatctggcagatcgtggaccctctgcaccggaccattgagacatttgccaaggaggaacctaaggaagatattgacgtctctattctgccccagctggagcattgcagctccaggaagatgaatacatggcttggcattttctatggttacaaggggctgctgctgctgctgggaatcttccttgcttatgagaccaagagtgtgtccactgagaagatcaatgatcaccgggctgtgggcatggctatctacaatgtggcagtcctgtgcctcatcactgctcctgtcaccatgattctgtccagccagcaggatgcagcctttgcctttgcctctcttgccatagttttctcctcctatatcactcttgttgtgctctttgtgcccaagatgcgcaggctgatcacccgaggggaatggcagtcggaggcgcaggacaccatgaagacagggtcatcgaccaacaacaacgaggaggagaagtcccggctgttggagaaggagaaccgtgaactggaaaagatcattgctgagaaagaggagcgtgtctctgaactgcgccatcaactccagtctcggcagcagctccgctcccggcgccacccaccgacacccccagaaccctctgggggcctgcccaggggaccccctgagccccccgaccggcttagctgtgatgggagtcgagtgcatttgctttataagtgagggtagggtgagggaggacaggccagtagggggagggaaagggagaggggaagggcaggggactcaggaagcagggggtccccatccccagctgggaagaacatgctatccaatctcatctcttgtaaatacatgtccccctgtgagttctgggctgatttgggtctctcatacctctgggaaacagacctttttctctcttactgcttcatgtaattttgtatcacctcttcacaatttagttcgtacctggcttgaagctgctcactgctcacacgctgcctcctcagcagcctcactgcatctttctcttcccatgcaacaccctcttctagttaccacggcaacccctgcagctcctctgcctttgtgctctgttcctgtccagcaggggtctcccaacaagtgctctttccaccccaaaggggcctctccttttctccactgtcataatctctttccatcttacttgcccttccatactttctcacatgtggctccccctgaattttgcttcctttgggagctcattcttttcgccaaggctcacatgctccttgcctctgctctgtgcactcacgctcagcacacatgcatcctcccctctcctgcgtgtgcccactgaacatgctcatgtgtacacacgcttttcccgtatgctttcttcatgttcagtcacatgtgctctcgggtgccctgcattcacagctacgtgtgcccctctcatggtcatgggtctgcccttgagcgtgtttgggtaggcatgtgcaatttgtctagcatgctgagtcatgtctttcctatttgcacacgtccatgtttatccatgtactttccctgtgtaccctccatgtaccttgtgtactttcttcccttaaatcatggtattcttctgacagagccatatgtaccctaccctgcacattgttatgcacttttccccaattcatgtttggtggggccatccacaccctctccttgtcacagaatctccatttctgctcagattccccccatctccattgcattcatgtactaccctcagtctacactcacaatcatcttctcccaagactgctcccttttgttttgtgtttttttgaggggaattaaggaaaaataagtgggggcaggtttggagagctgcttccagtggatagttgatgagaatcctgaccaaaggaaggcacccttgactgttgggatagacagatggacctatggggtgggaggtggtgtccctttcacactgtggtgtctcttggggaaggatctccccgaatctcaataaaccagtgaacagtgtgactcgg

SEQ ID NO: 136449 - DNA, 3523 bp, Homo sapiens
  Payload ID: 6701
  Gene Symbol: GABBR1
  Gene Name: gamma-aminobutyric acid (GABA) B receptor, 1
  Uniprot ID: Q9UBS5
  ENST ID: ENST00000449163
  CDS Start-End: 248-2782
ctcctcctcctcccctccgtcggtcagtcagtccgcgaggagagtccgcggtggcggcgacggtggcgagagccgcgggggccgtaggaagccaaccttccctgcttctccggggccctcgccccctcctccccacaaaatcagggatggaggcgcctccccggcaccctcttagcagccctccccaggaaaagtgtcccccctgagctcctaacgctccccaacagctacccctgccccccacgccatggggcccggggccccttttgcccgggtggggtggccactgccgcttctggttgtgatggcggcaggggtggctccggtgtgggcctcccactccccccatctcccgcggcctcactcgcgggtccccccgcacccctcctcagaacggcgcgcagtgtacatcggggcactgtttcccatgagcgggggctggccagggggccaggcctgccagcccgcggtggagatggcgctggaggacgtgaatagccgcagggacatcctgccggactatgagctcaagctcatccaccacgacagcaagtgtgatccaggccaagccaccaagtacctatatgagctgctctacaacgaccctatcaagatcatccttatgcctggctgcagctctgtctccacgctggtggctgaggctgctaggatgtggaacctcattgtgctttcctatggctccagctcaccagccctgtcaaaccggcagcgtttccccactttcttccgaacgcacccatcagccacactccacaaccctacccgcgtgaaactctttgaaaagtggggctggaagaagattgctaccatccagcagaccactgaggtcttcacttcgactctggacgacctggaggaacgagtgaaggaggctggaattgagattactttccgccagagtttcttctcagatccagctgtgcccgtcaaaaacctgaagcgccaggatgcccgaatcatcgtgggacttttctatgagactgaagcccggaaagttttttgtgaggtgtacaaggagcgtctctttgggaagaagtacgtctggttcctcattgggtggtatgctgacaattggttcaagatctacgacccttctatcaactgcacagtggatgagatgactgaggcggtggagggccacatcacaactgagattgtcatgctgaatcctgccaatacccgcagcatttccaacatgacatcccaggaatttgtggagaaactaaccaagcgactgaaaagacaccctgaggagacaggaggcttccaggaggcaccgctggcctatgatgccatctgggccttggcactggccctgaacaagacatctggaggaggcggccgttctggtgtgcgcctggaggacttcaactacaacaaccagaccattaccgaccaaatctaccgggcaatgaactcttcgtcctttgagggtgtctctggccatgtggtgtttgatgccagcggctctcggatggcatggacgcttatcgagcagcttcagggtggcagctacaagaagattggctactatgacagcaccaaggatgatctttcctggtccaaaacagataaatggattggagggtcccccccagctgaccagaccctggtcatcaagacattccgcttcctgtcacagaaactctttatctccgtctcagttctctccagcctgggcattgtcctagctgttgtctgtctgtcctttaacatctacaactcacatgtccgttatatccagaactcacagcccaacctgaacaacctgactgctgtgggctgctcactggctttagctgctgtcttccccctggggctcgatggttaccacattgggaggaaccagttccctttcgtctgccaggcccgcctctggctcctgggcctgggctttagtctgggctacggttccatgttcaccaagatttggtgggtccacacggtcttcacaaagaaggaagaaaagaaggagtggaggaagactctggaaccctggaagctgtatgccacagtgggcctgctggtgggcatggatgtcctcactctcgccatctggcagatcgtggaccctctgcaccggaccattgagacatttgccaaggaggaacctaaggaagatattgacgtctctattctgccccagctggagcattgcagctccaggaagatgaatacatggcttggcattttctatggttacaaggggctgctgctgctgctgggaatcttccttgcttatgagaccaagagtgtgtccactgagaagatcaatgatcaccgggctgtgggcatggctatctacaatgtggcagtcctgtgcctcatcactgctcctgtcaccatgattctgtccagccagcaggatgcagcctttgcctttgcctctcttgccatagttttctcctcctatatcactcttgttgtgctctttgtgcccaagatgcgcaggctgatcacccgaggggaatggcagtcggaggcgcaggacaccatgaagacagggtcatcgaccaacaacaacgaggaggagaagtcccggctgttggagaaggagaaccgtgaactggaaaagatcattgctgagaaagaggagcgtgtctctgaactgcgccatcaactccagtctcggcagcagctccgctcccggcgccacccaccgacacccccagaaccctctgggggcctgcccaggggaccccctgagccccccgaccggcttagctgtgatgggagtcgagtgcatttgctttataagtgagggtgcatgtccgttccgaggaatgggatttaatgacctttgatgccaacccatatgacagcgtgaaaaaaatcaaagaacatgtccggtctaagaccaaggttcctgtgcaggaccaggttcttttgctgggctccaagatcttaaagccacggagaagcctctcatcttatggcactgacaaagagaagaccatccaccttaccctgaaagtggtgaagcccagtgatgaggagctgcccttgtttcttgtggagtcaggtgatgaggcaaagaggcacctcctccaggtgcgaaggtccagctcagtggcacaagtgaaagcaatgatcgagactaagacgggtataatccctgagacccagattgtgacttgcaatggaaagagactggaagatgggaagatgatggcagattacggcatcagaaagggcaacttactcttcctggcatcttattgtattggagggtgaccaccctggggatggggtgttggcaggggtcaaaaagcttatttcttttaatctcttactcaacgaacacatcttctgatgatttcccaaaattaatgagaatgagatgagtagagtaagatttgggtgggatgggtaggatgaagtatattgcccaactctatgtttctttgattctaacacaattaattaagtgacatgatttttactaatgtattactgagactagtaaataaatttttaaggcaaaatagagcattcaaagcca

SEQ ID NO: 136450 - DNA, 4510 bp, Homo sapiens; identical to SEQ ID NO: 136433
  Payload ID: 6701
  Gene Symbol: GABBR1
  Gene Name: gamma-aminobutyric acid (GABA) B receptor, 1
  Uniprot ID: Q9UBS5
  ENST ID: ENST00000425097
  CDS Start-End: 312-3197

SEQ ID NO: 136451 - DNA, 4299 bp, Homo sapiens
  Payload ID: 6701
  Gene Symbol: GABBR1
  Gene Name: gamma-aminobutyric acid (GABA) B receptor, 1
  ENST ID: ENST00000440316
  CDS Start-End: 287-2986
gcccgggagctctccctggtccccggcgccgcctccttccctcccggctccccgctccccgctcccgtggctgccgccgccccggggaagaagagacaggggtggggtttgggggaagcgagagaggaggggagagaccctggccaggctggagcctggattcgaggggaggagggacgggaggaggagaaaggtggaggagaagggaggggggagcggggaggagcggccgggcctggggccttgaggcccggggagagccggggagccgggcccgcgcgccgagatgttgctgctgctgctactggcgccactcttcctccgccccccgggcgcgggcggggtgcagacccccaacgccacctcagaaggttgccagatcatacacccgccctgggaagggggcatcaggtaccggggcctgactcgggaccaggtgaaggctatcaacttcctgccagtggactatgagattgagtatgtgtgccggggggagcgcgaggtggtggggcccaaggtccgcaagtgcctggccaacggctcctggacagatatggacacacccagccgctgtgtgaatcgaacgccacactcagaacggcgcgcagtgtacatcggggcactgtttcccatgagcgggggctggccagggggccaggcctgccagcccgcggtggagatggcgctggaggacgtgaatagccgcagggacatcctgccggactatgagctcaagctcatccaccacgacagcaagtgtgatccaggccaagccaccaagtacctatatgagctgctctacaacgaccctatcaagatcatccttatgcctggctgcagctctgtctccacgctggtggctgaggctgctaggatgtggaacctcattgtgctttcctatggctccagctcaccagccctgtcaaaccggcagcgtttccccactttcttccgaacgcacccatcagccacactccacaaccctacccgcgtgaaactctttgaaaagtggggctggaagaagattgctaccatccagcagaccactgaggtcttcacttcgactctggacgacctggaggaacgagtgaaggaggctggaattgagattactttccgccagagtttcttctcagatccagctgtgcccgtcaaaaacctgaagcgccaggatgcccgaatcatcgtgggacttttctatgagactgaagcccggaaagttttttgtgaggtgtacaaggagcgtctctttgggaagaagtacgtctggttcctcattgggtggtatgctgacaattggttcaagatctacgacccttctatcaactgcacagtggatgagatgactgaggcggtggagggccacatcacaactgagattgtcatgctgaatcctgccaatacccgcagcatttccaacatgacatcccaggaatttgtggagaaactaaccaagcgactgaaaagacaccctgaggagacaggaggcttccaggaggcaccgctggcctatgatgccatctgggccttggcactggccctgaacaagacatctggaggaggcggccgttccggcgtgcgcctggaggacttcaactacaacaaccagaccattaccgaccaaatctaccgggcaatgaactcctcgtcctttgagggtgtctctggccatgtggtgtttgatgccagcggctctcggatggcatggacgcttatcgagcagcttcagggtggcagctacaagaagattggctactatgacagcaccaaggatgatctttcctggtccaaaacagataaatggattggagggtcccccccagctgaccagaccctggtcatcaagacattccgcttcctgtcacagaaactctttatctccgtctcagttctctccagcctgggcattgtcctagctgttgtctgtctgtcctttaacatctacaactcacatgtccgttatatccagaactcacagcccaacctgaacaacctgactgctgtgggctgctcactggctttagctgctgtcttccccctggggctcgatggttaccacattgggaggaaccagttccctttcgtctgccaggcccgcctctggctcctgggcctgggctttagtctgggctacggttccatgttcaccaagatttggtgggtccacacggtcttcacaaagaaggaagaaaagaaggagtggaggaagactctggaaccctggaagctgtatgccacagtgggcctgctggtgggcatggatgtcctcactctcgccatctggcagatcgtggaccctctgcaccggaccattgagacatttgccaaggaggaacctaaggaagatattgacgtctctattctgccccagctggagcattgcagctccaggaagatgaatacatggcttggcattttctatggttacaaggggctgctgctgctgctgggaatcttccttgcttatgagaccaagagtgtgtccactgagaagatcaatgatcaccgggctgtgggcatggctatctacaatgtggcagtcctgtgcctcatcactgctcctgtcaccatgattctgtccagccagcaggatgcagcctttgcctttgcctctcttgccatagttttctcctcctatatcactcttgttgtgctctttgtgcccaagatgcgcaggctgatcacccgaggggaatggcagtcggaggcgcaggacaccatgaagacagggtcatcgaccaacaacaacgaggaggagaagtcccggctgttggagaaggagaaccgtgaactggaaaagatcattgctgagaaagaggagcgtgtctctgaactgcgccatcaactccagtctcggcagcagctccgctcccggcgccacccaccgacacccccagaaccctctgggggcctgcccaggggaccccctgagccccccgaccggcttagctgtgatgggagtcgagtgcatttgctttataagtgagggtagggtgagggaggacaggccagtagggggagggaaagggagaggggaagggcaggggactcaggaagcagggggtccccatccccagctgggaagaacatgctatccaatctcatctcttgtaaatacatgtccccctgtgagttctgggctgatttgggtctctcatacctctgggaaacagacctttttctctcttactgcttcatgtaattttgtatcacctcttcacaatttagttcgtacctggcttgaagctgctcactgctcacacgctgcctcctcagcagcctcactgcatctttctcttcccatgcaacaccctcttctagttaccacggcaacccctgcagctcctctgcctttgtgctctgttcctgtccagcaggggtctcccaacaagtgctctttccaccccaaaggggcctctccttttctccactgtcataatctctttccatcttacttgcccttctatactttctcacatgtggctccccctgaattttgcttcctttgggagctcattcttttcgccaaggctcacatgctccttgcctctgctctgtgcactcacgctcagcacacatgcatcctcccctctcctgcgtgtgcccactgaacatgctcatgtgtacacacgcttttcccatatgctttcttcatgttcagtcacatgtgctctcgggtgccctgcattcacagctacgtgtgcccctctcatggtcatgggtctgcccttgagcgtgtttgggtaggcatgtgcaatttgtctagcatgctgagtcatgtctttcctatttgcacacgtccatgtttatccatgtactttccctgtgtaccctccatgtaccttgtgtactttcttcccttaaatcatggtattcttctgacagagccatatgtaccctaccctgcacattgttatgcacttttccccaattcatgtttggtggggccatccacaccctctccttgtcacagaatctccatttctgctcagattccccccatctccattgcattcatgtactaccctcagtctacactcacaatcatcttctcccaagactgctcccttttgttttgtgtttttttgaggggaattaaggaaaaataagtgggggcaggtttggagagctgcttccagtggatagttgatgagaatcctgaccaaaggaaggcacccttgactgttgggatagacagatggacctatggggtgggaggtggtgtccctttcacactgtggtgtctcttggggaaggatctccccgaatctcaataaaccagtgaacagtgtgactcgg

SEQ ID NO: 136452 - DNA, 4299 bp, Homo sapiens; identical to SEQ ID NO: 136429
  Payload ID: 6701
  Gene Symbol: GABBR1
  Gene Name: gamma-aminobutyric acid (GABA) B receptor, 1
  Uniprot ID: Q9UBS5
  ENST ID: ENST00000434660
  CDS Start-End: 287-2986

SEQ ID NO: 136453 - DNA, 4510 bp, Homo sapiens
  Payload ID: 6701
  Gene Symbol: GABBR1
  Gene Name: gamma-aminobutyric acid (GABA) B receptor, 1
  ENST ID: ENST00000418225
  CDS Start-End: 312-3197
cccttgcaccctccttcttccctccgcccgggagctctccctggtccccggcgccgcctccttccctcccggctccccgctccccgctcccgtggctgccgccgccccggggaagaagagacaggggtggggtttgggggaagcgagagaggaggggagagaccctggccaggctggagcctggattcgaggggaggagggacgggaggaggagaaaggtggaggagaagggaggggggagcggggaggagcggccgggcctggggccttgaggcccggggagagccggggagccgggcccgcgcgccgagatgttgctgctgctgctactggcgccactcttcctccgccccccgggcgcgggcggggtgcagacccccaacgccacctcagaaggttgccagatcatacacccgccctgggaagggggcatcaggtaccggggcctgactcgggaccaggtgaaggctatcaacttcctgccagtggactatgagattgagtatgtgtgccggggggagcgcgaggtggtggggcccaaggtccgcaagtgcctggccaacggctcctggacagatatggacacacccagccgctgtgtccgaatctgctccaagtcttatttgaccctggaaaatgggaaggttttcctgacgggtggggacctcccagctctggacggagcccgggtggatttccggtgtgaccccgacttccatctggtgggcagctcccggagcatctgtagtcagggccagtggagcacccccaagccccactgccaggtgaatcgaacgccacactcagaacggcgcgcagtgtacatcggggcactgtttcccatgagcgggggctggccagggggccaggcctgccagcccgcggtggagatggcgctggaggacgtgaatagccgcagggacatcctgccggactatgagctcaagctcatccaccacgacagcaagtgtgatccaggccaagccaccaagtacctatatgagctgctctacaacgaccctatcaagatcatccttatgcctggctgcagctctgtctccacgctggtggctgaggctgctaggatgtggaacctcattgtgctttcctatggctccagctcaccagccctgtcaaaccggcagcgtttccccactttcttccgaacgcacccatcagccacactccacaaccctacccgcgtgaaactctttgaaaagtggggctggaagaagattgctaccatccagcagaccactgaggtcttcacttcgactctggacgacctggaggaacgagtgaaggaggctggaattgagattactttccgccagagtttcttctcagatccagctgtgcccgtcaaaaacctgaagcgccaggatgcccgaatcatcgtgggacttttctatgagactgaagcccggaaagttttttgtgaggtgtacaaggagcgtctctttgggaagaagtacgtctggttcctcattgggtggtatgctgacaattggttcaagatctacgacccttctatcaactgcacagtggatgagatgactgaggcggtggagggccacatcacaactgagattgtcatgctgaatcctgccaatacccgcagcatttccaacatgacatcccaggaatttgtggagaaactaaccaagcgactgaaaagacaccctgaggagacaggaggcttccaggaggcaccgctggcctatgatgccatctgggccttggcactggccctgaacaagacatctggaggaggcggccgttccggcgtgcgcctggaggacttcaactacaacaaccagaccattaccgaccaaatctaccgggcaatgaactcctcgtcctttgagggtgtctctggccatgtggtgtttgatgccagcggctctcggatggcatggacgcttatcgagcagcttcagggtggcagctacaagaagattggctactatgacagcaccaaggatgatctttcctggtccaaaacagataaatggattggagggtcccccccagctgaccagaccctggtcatcaagacattccgcttcctgtcacagaaactctttatctccgtctcagttctctccagcctgggcattgtcctagctgttgtctgtctgtcctttaacatctacaactcacatgtccgttatatccagaactcacagcccaacctgaacaacctgactgctgtgggctgctcactggctttagctgctgtcttccccctggggctcgatggttaccacattgggaggaaccagttccctttcgtctgccaggcccgcctctggctcctgggcctgggctttagtctgggctacggttccatgttcaccaagatttggtgggtccacacggtcttcacaaagaaggaagaaaagaaggagtggaggaagactctggaaccctggaagctgtatgccacagtgggcctgctggtgggcatggatgtcctcactctcgccatctggcagatcgtggaccctctgcaccggaccattgagacatttgccaaggaggaacctaaggaagatattgacgtctctattctgccccagctggagcattgcagctccaggaagatgaatacatggcttggcattttctatggttacaaggggctgctgctgctgctgggaatcttccttgcttatgagaccaagagtgtgtccactgagaagatcaatgatcaccgggctgtgggcatggctatctacaatgtggcagtcctgtgcctcatcactgctcctgtcaccatgattctgtccagccagcaggatgcagcctttgcctttgcctctcttgccatagttttctcctcctatatcactcttgttgtgctctttgtgcccaagatgcgcaggctgatcacccgaggggaatggcagtcggaggcgcaggacaccatgaagacagggtcatcgaccaacaacaacgaggaggagaagtcccggctgttggagaaggagaaccgtgaactggaaaagatcattgctgagaaagaggagcgtgtctctgaactgcgccatcaactccagtctcggcagcagctccgctcccggcgccacccaccgacacccccagaaccctctgggggcctgcccaggggaccccctgagccccccgaccggcttagctgtgatgggagtcgagtgcatttgctttataagtgagggtagggtgagggaggacaggccagtagggggagggaaagggagaggggaagggcaggggactcaggaagcagggggtccccatccccagctgggaagaacatgctatccaatctcatctcttgtaaatacatgtccccctgtgagttctgggctgatttgggtctctcatacctctgggaaacagacctttttctctcttactgcttcatgtaattttgtatcacctcttcacaatttagttcgtacctggcttgaagctgctcactgctcacacgctgcctcctcagcagcctcactgcatctttctcttcccatgcaacaccctcttctagttaccacggcaacccctgcagctcctctgcctttgtgctctgttcctgtccagcaggggtctcccaacaagtgctctttccaccccaaaggggcctctccttttctccactgtcataatctctttccatcttacttgcccttctatactttctcacatgtggctccccctgaattttgcttcctttgggagctcattcttttcgccaaggctcacatgctccttgcctctgctctgtgcactcacgctcagcacacatgcatcctcccctctcctgcgtgtgcccactgaacatgctcatgtgtacacacgcttttcccatatgctttcttcatgttcagtcacatgtgctctcgggtgccctgcattcacagctacgtgtgcccctctcatggtcatgggtctgcccttgagcgtgtttgggtaggcatgtgcaatttgtctagcatgctgagtcatgtctttcctatttgcacacgtccatgtttatccatgtactttccctgtgtaccctccatgtaccttgtgtactttcttcccttaaatcatggtattcttctgacagagccatatgtaccctaccctgcacattgttatgcacttttccccaattcatgtttggtggggccatccacaccctctccttgtcacagaatctccatttctgctcagattccccccatctccattgcattcatgtactaccctcagtctacactcacaatcatcttctcccaagactgctcccttttgttttgtgtttttttgaggggaattaaggaaaaataagtgggggcaggtttggagagctgcttccagtggatagttgatgagaatcctgaccaaaggaaggcacccttgactgttgggatagacagatggacctatggggtgggaggtggtgtccctttcacactgtggtgtctcttggggaaggatctccccgaatctcaataaaccagtgaacagtgtgactcgg

SEQ ID NO: 136454 - DNA, 4070 bp, Homo sapiens
  Payload ID: 6701
  Gene Symbol: GABBR1
  Gene Name: gamma-aminobutyric acid (GABA) B receptor, 1
  Uniprot ID: Q9UBS5
  ENST ID: ENST00000458612
  CDS Start-End: 223-2757
agtcagtccgcgaggagagtccgcggtggcggcgacggtggcgagagccgcgggggccgtaggaagccaaccttccctgcttctccggggccctcgccccctcctccccacaaaatcagggatggaggcgcctccccggcaccctcttagcagccctccccaggaaaagtgtcccccctgagctcctaacgctccccaacagctacccctgccccccacgccatggggcccggggccccttttgcccgggtggggtggccactgccgcttctggttgtgatggcggcaggggtggctccggtgtgggcctcccactccccccatctcccgcggcctcactcgcgggtccccccgcacccctcctcagaacggcgcgcagtgtacatcggggcactgtttcccatgagcgggggctggccagggggccaggcctgccagcccgcggtggagatggcgctggaggacgtgaatagccgcagggacatcctgccggactatgagctcaagctcatccaccacgacagcaagtgtgatccaggccaagccaccaagtacctatatgagctgctctacaacgaccctatcaagatcatccttatgcctggctgcagctctgtctccacgctggtggctgaggctgctaggatgtggaacctcattgtgctttcctatggctccagctcaccagccctgtcaaaccggcagcgtttccccactttcttccgaacgcacccatcagccacactccacaaccctacccgcgtgaaactctttgaaaagtggggctggaagaagattgctaccatccagcagaccactgaggtcttcacttcgactctggacgacctggaggaacgagtgaaggaggctggaattgagattactttccgccagagtttcttctcagatccagctgtgcccgtcaaaaacctgaagcgccaggatgcccgaatcatcgtgggacttttctatgagactgaagcccggaaagttttttgtgaggtgtacaaggagcgtctctttgggaagaagtacgtctggttcctcattgggtggtatgctgacaattggttcaagatctacgacccttctatcaactgcacagtggatgagatgactgaggcggtggagggccacatcacaactgagattgtcatgctgaatcctgccaatacccgcagcatttccaacatgacatcccaggaatttgtggagaaactaaccaagcgactgaaaagacaccctgaggagacaggaggcttccaggaggcaccgctggcctatgatgccatctgggccttggcactggccctgaacaagacatctggaggaggcggccgttccggcgtgcgcctggaggacttcaactacaacaaccagaccattaccgaccaaatctaccgggcaatgaactcctcgtcctttgagggtgtctctggccatgtggtgtttgatgccagcggctctcggatggcatggacgcttatcgagcagcttcagggtggcagctacaagaagattggctactatgacagcaccaaggatgatctttcctggtccaaaacagataaatggattggagggtcccccccagctgaccagaccctggtcatcaagacattccgcttcctgtcacagaaactctttatctccgtctcagttctctccagcctgggcattgtcctagctgttgtctgtctgtcctttaacatctacaactcacatgtccgttatatccagaactcacagcccaacctgaacaacctgactgctgtgggctgctcactggctttagctgctgtcttccccctggggctcgatggttaccacattgggaggaaccagttccctttcgtctgccaggcccgcctctggctcctgggcctgggctttagtctgggctacggttccatgttcaccaagatttggtgggtccacacggtcttcacaaagaaggaagaaaagaaggagtggaggaagactctggaaccctggaagctgtatgccacagtgggcctgctggtgggcatggatgtcctcactctcgccatctggcagatcgtggaccctctgcaccggaccattgagacatttgccaaggaggaacctaaggaagatattgacgtctctattctgccccagctggagcattgcagctccaggaagatgaatacatggcttggcattttctatggttacaaggggctgctgctgctgctgggaatcttccttgcttatgagaccaagagtgtgtccactgagaagatcaatgatcaccgggctgtgggcatggctatctacaatgtggcagtcctgtgcctcatcactgctcctgtcaccatgattctgtccagccagcaggatgcagcctttgcctttgcctctcttgccatagttttctcctcctatatcactcttgttgtgctctttgtgcccaagatgcgcaggctgatcacccgaggggaatggcagtcggaggcgcaggacaccatgaagacagggtcatcgaccaacaacaacgaggaggagaagtcccggctgttggagaaggagaaccgtgaactggaaaagatcattgctgagaaagaggagcgtgtctctgaactgcgccatcaactccagtctcggcagcagctccgctcccggcgccacccaccgacacccccagaaccctctgggggcctgcccaggggaccccctgagccccccgaccggcttagctgtgatgggagtcgagtgcatttgctttataagtgagggtagggtgagggaggacaggccagtagggggagggaaagggagaggggaagggcaggggactcaggaagcagggggtccccatccccagctgggaagaacatgctatccaatctcatctcttgtaaatacatgtccccctgtgagttctgggctgatttgggtctctcatacctctgggaaacagacctttttctctcttactgcttcatgtaattttgtatcacctcttcacaatttagttcgtacctggcttgaagctgctcactgctcacacgctgcctcctcagcagcctcactgcatctttctcttcccatgcaacaccctcttctagttaccacggcaacccctgcagctcctctgcctttgtgctctgttcctgtccagcaggggtctcccaacaagtgctctttccaccccaaaggggcctctccttttctccactgtcataatctctttccatcttacttgcccttctatactttctcacatgtggctccccctgaattttgcttcctttgggagctcattcttttcgccaaggctcacatgctccttgcctctgctctgtgcactcacgctcagcacacatgcatcctcccctctcctgcgtgtgcccactgaacatgctcatgtgtacacacgcttttcccatatgctttcttcatgttcagtcacatgtgctctcgggtgccctgcattcacagctacgtgtgcccctctcatggtcatgggtctgcccttgagcgtgtttgggtaggcatgtgcaatttgtctagcatgctgagtcatgtctttcctatttgcacacgtccatgtttatccatgtactttccctgtgtaccctccatgtaccttgtgtactttcttcccttaaatcatggtattcttctgacagagccatatgtaccctaccctgcacattgttatgcacttttccccaattcatgtttggtggggccatccacaccctctccttgtcacagaatctccatttctgctcagattccccccatctccattgcattcatgtactaccctcagtctacactcacaatcatcttctcccaagactgctcccttttgttttgtgtttttttgaggggaattaaggaaaaataagtgggggcaggtttggagagctgcttccagtggatagttgatgagaatcctgaccaaaggaaggcacccttgactgttgggatagacagatggacctatggggtgggaggtggtgtccctttcacactgtggtgtctcttggggaaggatctccccgaatctcaataaaccagtgaacagtgtgactcgg

SEQ ID NO: 136455 - DNA, 487 bp, Homo sapiens
  Payload ID: 6701
  Gene Symbol: GABBR1
  Gene Name: gamma-aminobutyric acid (GABA) B receptor, 1
  ENST ID: ENST00000476670
  CDS Start-End: 87-487
agtgggcgcagggcccagctgggggaagcggggctgggggagaggaggaaccgcggggatggaatcggggagcgctgaggcggccgatgccgggagcgtggatgttgctgctgctgctactggcgccactcttcctccgccccccgggcgcgggcggggcgcagacccccaacgccacctcagaaggttgccagatcatacacccgccctgggaagggggcatcaggtaccggggcctgactcgggaccaggtgaaggctatcaacttcctgccagtggactatgagattgagtatgtgtgccggggggagcgcgaggtggtggggcccaaggtccgcaagtgcctggccaacggctcctggacagatatggacacacccagccgctgtgtccgaatctgctccaagtcttatttgaccctggaaaatgggaaggttttcctgacgggtggggacctcccagctctggacggagcccgggtggattt

SEQ ID NO: 136456 - DNA, 4212 bp, Homo sapiens
  Payload ID: 6701
  Gene Symbol: GABBR1
  Gene Name: gamma-aminobutyric acid (GABA) B receptor, 1
  ENST ID: ENST00000491829
  CDS Start-End: 86-499
gaagggaggggggagcggggaggagcggccgggcctggggccttgaggcccggggagagccggggagccgggcccgcgcgccgagatgttgctgctgctgctactggcgccactcttcctccgccccccgggcgcgggcggggcgcagacccccaacgccacctcagaaggttgccagatcatacacccgccctgggaagggggcatcaggtaccggggcctgactcgggaccaggtgaaggctatcaacttcctgccagtggactatgagattgagtatgtgtgccggggggagcgcgaggtggtggggcccaaggtccgcaagtgcctggccaacggctcctggacagatatggacacacccagccgctgtgtccgaatctgctccaagtcttatttgaccctggaaaatgggaaggttttcctgacgggtggggacctcccagctctggacggagcccgggtggatttccggtgtgaccccgacttccatctgtgaatcgaacgccacactcagaacggcgcgcagtgtacatcggggcactgtttcccatgagcgggggctggccagggggccaggcctgccagcccgcggtggagatggcgctggaggacgtgaatagccgcagggacatcctgccggactatgagctcaagctcatccaccacgacagcaagtgtgatccaggccaagccaccaagtacctatatgagctgctctacaacgaccctatcaagatcatccttatgcctggctgcagctctgtctccacgctggtggctgaggctgctaggatgtggaacctcattgtgctttcctatggctccagctcaccagccctgtcaaaccggcagcgtttccccactttcttccgaacgcacccatcagccacactccacaaccctacccgcgtgaaactctttgaaaagtggggctggaagaagattgctaccatccagcagaccactgaggtcttcacttcgactctggacgacctggaggaacgagtgaaggaggctggaattgagattactttccgccagagtttcttctcagatccagctgtgcccgtcaaaaacctgaagcgccaggatgcccgaatcatcgtgggacttttctatgagactgaagcccggaaagttttttgtgaggtgtacaaggagcgtctctttgggaagaagtacgtctggttcctcattgggtggtatgctgacaattggttcaagatctacgacccttctatcaactgcacagtggatgagatgactgaggcggtggagggccacatcacaactgagattgtcatgctgaatcctgccaatacccgcagcatttccaacatgacatcccaggaatttgtggagaaactaaccaagcgactgaaaagacaccctgaggagacaggaggcttccaggaggcaccgctggcctatgatgccatctgggccttggcactggccctgaacaagacatctggaggaggcggccgttctggtgtgcgcctggaggacttcaactacaacaaccagaccattaccgaccaaatctaccgggcaatgaactcttcgtcctttgagggtgtctctggccatgtggtgtttgatgccagcggctctcggatggcatggacgcttatcgagcagcttcagggtggcagctacaagaagattggctactatgacagcaccaaggatgatctttcctggtccaaaacagataaatggattggagggtcccccccagctgaccagaccctggtcatcaagacattccgcttcctgtcacagaaactctttatctccgtctcagttctctccagcctgggcattgtcctagctgttgtctgtctgtcctttaacatctacaactcacatgtccgttatatccagaactcacagcccaacctgaacaacctgactgctgtgggctgctcactggctttagctgctgtcttccccctggggctcgatggttaccacattgggaggaaccagtttcctttcgtctgccaggcccgcctctggctcctgggcctgggctttagtctgggctacggttccatgttcaccaagatttggtgggtccacacggtcttcacaaagaaggaagaaaagaaggagtggaggaagactctggaaccctggaagctgtatgccacagtgggcctgctggtgggcatggatgtcctcactctcgccatctggcagatcgtggaccctctgcaccggaccattgagacatttgccaaggaggaacctaaggaagatattgacgtctctattctgccccagctggagcattgcagctccaggaagatgaatacatggcttggcattttctatggttacaaggggctgctgctgctgctgggaatcttccttgcttatgagaccaagagtgtgtccactgagaagatcaatgatcaccgggctgtgggcatggctatctacaatgtggcagtcctgtgcctcatcactgctcctgtcaccatgattctgtccagccagcaggatgcagcctttgcctttgcctctcttgccatagttttctcctcctatatcactcttgttgtgctctttgtgcccaagatgcgcaggctgatcacccgaggggaatggcagtcggaggcgcaggacaccatgaagacagggtcatcgaccaacaacaacgaggaggagaagtcccggctgttggagaaggagaaccgtgaactggaaaagatcattgctgagaaagaggagcgtgtctctgaactgcgccatcaactccagtctcggcagcagctccgctcccggcgccacccaccgacacccccagaaccctctgggggcctgcccaggggaccccctgagccccccgaccggcttagctgtgatgggagtcgagtgcatttgctttataagtgagggtagggtgagggaggacaggccagtagggggagggaaagggagaggggaagggcaggggactcaggaagcagggggtccccatccccagctgggaagaacatgctatccaatctcatctcttgtaaatacatgtccccctgtgagttctgggctgatttgggtctctcatacctctgggaaacagacctttttctctcttactgcttcatgtaattttgtatcacctcttcacaatttagttcgtacctggcttgaagctgctcactgctcacacgctgcctcctcagcagcctcactgcatctttctcttcccatgcaacaccctcttctagttaccacggcaacccctgcagctcctctgcctttgtgctctgttcctgtccagcaggggtctcccaacaagtgctctttccaccccaaaggggcctctccttttctccactgtcataatctctttccatcttacttgcccttctatactttctcacatgtggctccccctgaattttgcttcctttgggagctcattcttttcgccaaggctcacatgctccttgcctctgctctgtgcactcacgctcagcacacatgcatcctcccctctcctgcgtgtgcccactgaacatgctcatgtgtacacacgcttttcccgtatgctttcttcatgttcagtcacatgtgctctcgggtgccctgcattcacagctacgtgtgcccctctcatggtcatgggtctgcccttgagcgtgtttgggtaggcatgtgcaatttgtctagcatgctgagtcatgtctttcctatttgcacacgtccatgtttatccatgtactttccctgtgtaccctccatgtaccttgtgtactttcttcccttaaatcatggtattcttctgacagagccatatgtaccctaccctgcacattgttatgcacttttccccaattcatgtttggtggggccatccacaccctctccttgtcacagaatctccatttctgctcagattccccccatctccattgcattcatgtactaccctcagtctacactcacaatcatcttctcccaagactgctcccttttgttttgtgtttttttgaggggaattaaggaaaaataagtgggggcaggtttggagagctgcttccagtggatagttgatgagaatcctgaccaaaggaaggcacccttgactgttgggatagacagatggacctatggggtgggaggtggtgtccctttcacactgtggtgtctcttggggaaggatctccccgaatctcaataaaccagtgaacagtg

SEQ ID NO: 136457 - DNA, 825 bp, Homo sapiens
  Payload ID: 6701
  Gene Symbol: GABBR1
  Gene Name: gamma-aminobutyric acid (GABA) B receptor, 1
  ENST ID: ENST00000485508
  CDS Start-End: 125-418
ctcttggtccccaggctgagcccggtcggagcctgcgaggcaaccggcaagaggtcgagtagtctccgggtgcgggccgcgccggcggggctcggtccagtcctcatggccgcctctcacttagatgttgctgctgctgctactggcgccactcttcctccgccccccgggcgcgggcggggcgcagacccccaacgccacctcagaaggttgccagatcatacacccgccctgggaagggggcatcaggtaccggggcctgactcgggaccaggtgaaggctatcaacttcctgccagtggactatgagattgagtatgtgtgccggggggagcgcgaggtggtggggcccaaggtccgcaagtgcctggccaacggctcctggacagatatggacacacccagccgctgtgtgtgatccaggccaagccaccaagtacctatatgagctgctctacaacgaccctatcaagatcatccttatgcctggctgcagctctgtctccacgctggtggctgaggctgctaggatgtggaacctcattgtgctttcctatggctccagctcaccagccctgtcaaaccggcagcgtttccccactttcttccgaacgcacccatcagccacactccacaaccctacccgcgtgaaactctttgaaaagtggggctggaagaagattgctaccatccagcagaccactgaggtcttcacttcgactctggacgacctggaggaacgagtgaaggaggctggaattgagattactttccgccagagtttcttctcagatccagctgtgcccgtcaaaaacctgaagcgcc

SEQ ID NO: 136458 - DNA, 2364 bp, Homo sapiens
  Payload ID: 6701
  Gene Symbol: GABBR1
  Gene Name: gamma-aminobutyric acid (GABA) B receptor, 1
  Uniprot ID: Q9UBS5
  ENST ID: ENST00000494877
  CDS Start-End: 1-1737
atgttgctgctgctgctactggcgccactcttcctccgccccccgggcgcgggcggggcgcagacccccaacgccacctcagaaggttgccagatcatacacccgccctgggaagggggcatcaggtaccggggcctgactcgggaccaggtgaaggctatcaacttcctgccagtggactatgagattgagtatgtgtgccggggggagcgcgaggtggtggggcccaaggtccgcaagtgcctggccaacggctcctggacagatatggacacacccagccgctgtgtccgaatctgctccaagtcttatttgaccctggaaaatgggaaggttttcctgacgggtggggacctcccagctctggacggagcccgggtggatttccggtgtgaccccgacttccatctggtgggcagctcccggagcatctgtagtcagggccagtggagcacccccaagccccactgccaggtgaatcgaacgccacactcagaacggcgcgcagtgtacatcggggcactgtttcccatgagcgggggctggccagggggccaggcctgccagcccgcggtggagatggcgctggaggacgtgaatagccgcagggacatcctgccggactatgagctcaagctcatccaccacgacagcaagtgtgatccaggccaagccaccaagtacctatatgagctgctctacaacgaccctatcaagatcatccttatgcctggctgcagctctgtctccacgctggtggctgaggctgctaggatgtggaacctcattgtgctttcctatggctccagctcaccagccctgtcaaaccggcagcgtttccccactttcttccgaacgcacccatcagccacactccacaaccctacccgcgtgaaactctttgaaaagtggggctggaagaagattgctaccatccagcagaccactgaggtcttcacttcgactctggacgacctggaggaacgagtgaaggaggctggaattgagattactttccgccagagtttcttctcagatccagctgtgcccgtcaaaaacctgaagcgccaggatgcccgaatcatcgtgggacttttctatgagactgaagcccggaaagttttttgtgaggtgtacaaggagcgtctctttgggaagaagtacgtctggttcctcattgggtggtatgctgacaattggttcaagatctacgacccttctatcaactgcacagtggatgagatgactgaggcggtggagggccacatcacaactgagattgtcatgctgaatcctgccaatacccgcagcatttccaacatgacatcccaggaatttgtggagaaactaaccaagcgactgaaaagacaccctgaggagacaggaggcttccaggaggcaccgctggcctatgatgccatctgggccttggcactggccctgaacaagacatctggaggaggcggccgttctggtgtgcgcctggaggacttcaactacaacaaccagaccattaccgaccaaatctaccgggcaatgaactcttcgtcctttgagggtgtctctggccatgtggtgtttgatgccagcggctctcggatggcatggacgcttatcgagcagcttcagggtggcagctacaagaagattggctactatgacagcaccaaggatgatctttcctggtccaaaacagataaatggattgttatatccagaactcacagcccaacctgaacaacctgactgctgtgggctgctcactggctttagctgctgtcttccccctggggctcgatggttaccacattgggaggaaccagtttcctttcgtctgccaggcccgcctctggctcctgggcctgggctttagtctgggctacggttccatgttcaccaagatttggtgggtccacacggtcttcacaaagaaggaagaaaagaaggagtggaggaagactctggaaccctggaagctgtatgccacagtgggcctgctggtgggcatggatgtcctcactctcgccatctggcagatcgtggaccctctgcaccggaccattgagacatttgccaaggaggaacctaaggaagatattgacgtctctattctgccccagctggagcattgcagctccaggaagatgaatacatggcttggcattttctatggttacaaggggctgctgctgctgctgggaatcttccttgcttatgagaccaagagtgtgtccactgagaagatcaatgatcaccgggctgtgggcatggctatctacaatgtggcagtcctgtgcctcatcactgctcctgtcaccatgattctgtccagccagcaggatgcagcctttgcctttgcctctc

SEQ ID NO: 136459 - DNA, 4286 bp, Homo sapiens
  Payload ID: 6701
  Gene Symbol: GABBR1
  Gene Name: gamma-aminobutyric acid (GABA) B receptor, 1
  ENST ID: ENST00000472823
  CDS Start-End: 283-678
gggagctctccctggtccccggcgccgcctccttccctcccggctccccgctccccgctcccgtggctgccgccgccccggggaagaagagacaggggtggggtttgggggaagcgagagaggaggggagagaccctggccaggctggagcctggattcgaggggaggagggacgggaggaggagaaaggtggaggagaagggaggggggagcggggaggagcggccgggcctggggccttgaggcccggggagagccggggagccgggcccgcgcgccgagatgttgctgctgctgctactggcgccactcttcctccgccccccgggcgcgggcggggcgcagacccccaacgccacctcagaaggttgccagatcatacacccgccctgggaagggggcatcaggtaccggggcctgactcgggaccaggtgaaggctatcaacttcctgccagtggactatgagattgagtatgtgtgccggggggagcgcgaggtggtggggcccaaggtccgcaagtgcctggccaacggctcctggacagatatggacacacccagccgctgtggcaccctcccctcagaaacgcaggcttctgctctccccggtcttcagcatggacaggtgtgggagggggctggggatcaggccagggaagctgggcgccagtggtaactcttctctgatccccgtctttcctgctgccagtgaatcgaacgccacactcagaacggcgcgcagtgtacatcggggcactgtttcccatgagcgggggctggccagggggccaggcctgccagcccgcggtggagatggcgctggaggacgtgaatagccgcagggacatcctgccggactatgagctcaagctcatccaccacgacagcaagtgtgatccaggccaagccaccaagtacctatatgagctgctctacaacgaccctatcaagatcatccttatgcctggctgcagctctgtctccacgctggtggctgaggctgctaggatgtggaacctcattgtgctttcctatggctccagctcaccagccctgtcaaaccggcagcgtttccccactttcttccgaacgcacccatcagccacactccacaaccctacccgcgtgaaactctttgaaaagtggggctggaagaagattgctaccatccagcagaccactgaggtcttcacttcgactctggacgacctggaggaacgagtgaaggaggctggaattgagattactttccgccagagtttcttctcagatccagctgtgcccgtcaaaaacctgaagcgccaggatgcccgaatcatcgtgggacttttctatgagactgaagcccggaaagttttttgtgaggtgtacaaggagcgtctctttgggaagaagtacgtctggttcctcattgggtggtatgctgacaattggttcaagatctacgacccttctatcaactgcacagtggatgagatgactgaggcggtggagggccacatcacaactgagattgtcatgctgaatcctgccaatacccgcagcatttccaacatgacatcccaggaatttgtggagaaactaaccaagcgactgaaaagacaccctgaggagacaggaggcttccaggaggcaccgctggcctatgatgccatctgggccttggcactggccctgaacaagacatctggaggaggcggccgttctggtgtgcgcctggaggacttcaactacaacaaccagaccattaccgaccaaatctaccgggcaatgaactcttcgtcctttgagggtgtctctggccatgtggtgtttgatgccagcggctctcggatggcatggacgcttatcgagcagcttcagggtggcagctacaagaagattggctactatgacagcaccaaggatgatctttcctggtccaaaacagataaatggattgttatatccagaactcacagcccaacctgaacaacctgactgctgtgggctgctcactggctttagctgctgtcttccccctggggctcgatggttaccacattgggaggaaccagtttcctttcgtctgccaggcccgcctctggctcctgggcctgggctttagtctgggctacggttccatgttcaccaagatttggtgggtccacacggtcttcacaaagaaggaagaaaagaaggagtggaggaagactctggaaccctggaagctgtatgccacagtgggcctgctggtgggcatggatgtcctcactctcgccatctggcagatcgtggaccctctgcaccggaccattgagacatttgccaaggaggaacctaaggaagatattgacgtctctattctgccccagctggagcattgcagctccaggaagatgaatacatggcttggcattttctatggttacaaggggctgctgctgctgctgggaatcttccttgcttatgagaccaagagtgtgtccactgagaagatcaatgatcaccgggctgtgggcatggctatctacaatgtggcagtcctgtgcctcatcactgctcctgtcaccatgattctgtccagccagcaggatgcagcctttgcctttgcctctcttgccatagttttctcctcctatatcactcttgttgtgctctttgtgcccaagatgcgcaggctgatcacccgaggggaatggcagtcggaggcgcaggacaccatgaagacagggtcatcgaccaacaacaacgaggaggagaagtcccggctgttggagaaggagaaccgtgaactggaaaagatcattgctgagaaagaggagcgtgtctctgaactgcgccatcaactccagtctcggcagcagctccgctcccggcgccacccaccgacacccccagaaccctctgggggcctgcccaggggaccccctgagccccccgaccggcttagctgtgatgggagtcgagtgcatttgctttataagtgagggtagggtgagggaggacaggccagtagggggagggaaagggagaggggaagggcaggggactcaggaagcagggggtccccatccccagctgggaagaacatgctatccaatctcatctcttgtaaatacatgtccccctgtgagttctgggctgatttgggtctctcatacctctgggaaacagacctttttctctcttactgcttcatgtaattttgtatcacctcttcacaatttagttcgtacctggcttgaagctgctcactgctcacacgctgcctcctcagcagcctcactgcatctttctcttcccatgcaacaccctcttctagttaccacggcaacccctgcagctcctctgcctttgtgctctgttcctgtccagcaggggtctcccaacaagtgctctttccaccccaaaggggcctctccttttctccactgtcataatctctttccatcttacttgcccttctatactttctcacatgtggctccccctgaattttgcttcctttgggagctcattcttttcgccaaggctcacatgctccttgcctctgctctgtgcactcacgctcagcacacatgcatcctcccctctcctgcgtgtgcccactgaacatgctcatgtgtacacacgcttttcccgtatgctttcttcatgttcagtcacatgtgctctcgggtgccctgcattcacagctacgtgtgcccctctcatggtcatgggtctgcccttgagcgtgtttgggtaggcatgtgcaatttgtctagcatgctgagtcatgtctttcctatttgcacacgtccatgtttatccatgtactttccctgtgtaccctccatgtaccttgtgtactttcttcccttaaatcatggtattcttctgacagagccatatgtaccctaccctgcacattgttatgcacttttccccaattcatgtttggtggggccatccacaccctctccttgtcacagaatctccatttctgctcagattccccccatctccattgcattcatgtactaccctcagtctacactcacaatcatcttctcccaagactgctcccttttgttttgtgtttttttgaggggaattaaggaaaaataagtgggggcaggtttggagagctgcttccagtggatagttgatgagaatcctgaccaaaggaaggcacccttgactgttgggatagacagatggacctatggggtgggaggtggtgtccctttcacactgtggtgtctcttggggaaggatctccccgaatctcaataaaccagtgaacagtgtgactcggca

SEQ ID NO: 136460 - DNA, 609 bp, Homo sapiens
  Payload ID: 6701
  Gene Symbol: GABBR1
  Gene Name: gamma-aminobutyric acid (GABA) B receptor, 1
  ENST ID: ENST00000462632
  CDS Start-End: 140-609
acacacacacccctccacttcaaggtatagccaagagcttctggagccgtcaaaaaggtctgtacctgctgtctttagagcttccagtttgcccttggtcaagaaatactgtttgctaggctctgctggagtacatcagatgttgctgctgctgctactggcgccactcttcctccgccccccgggcgcgggcggggcgcagacccccaacgccacctcagaaggttgccagatcatacacccgccctgggaagggggcatcaggtaccggggcctgactcgggaccaggtgaaggctatcaacttcctgccagtggactatgagattgagtatgtgtgccggggggagcgcgaggtggtggggcccaaggtccgcaagtgcctggccaacggctcctggacagatatggacacacccagccgctgtgtccgaatctgctccaagtcttatttgaccctggaaaatgggaaggttttcctgacgggtggggacctcccagctctggacggagcccgggtggatttccggtgtgaccccgacttccatctggtgggcagctcccggagcatctgtagtcagggccagtggagcacccccaagccccactg

SEQ ID NO: 136461 - DNA, 871 bp, Homo sapiens
  Payload ID: 6701
  Gene Symbol: GABBR1
  Gene Name: gamma-aminobutyric acid (GABA) B receptor, 1
  ENST ID: ENST00000489385
  CDS Start-End: 75-656
gaggtcgagtagtctccgggtgcgggccgcgccggcggggctcggtccagtcctcatggccgcctctcacttagatgttgctgctgctgctactggcgccactcttcctccgccccccgggcgcgggcggggcgcagacccccaacgccacctcagaaggttgccagatcatacacccgccctgggaagggggcatcaggtaccggggcctgactcgggaccaggtgaaggctatcaacttcctgccagtggactatgagattgagtatgtgtgccggggggagcgcgaggtggtggggcccaaggtccgcaagtgcctggccaacggctcctggacagatatggacacacccagccgctgtgtccgaatctgctccaagtcttatttgaccctggaaaatgggaaggttttcctgacgggtggggacctcccagctctggacggagcccgggtggatttccggtgtgaccccgacttccatctggtgggcagctcccggagcatctgtagtcagggccagtggagcacccccaagccccactgccagggcaccctcccctcagaaacgcaggcttctgctctccccggtcttcagcatggacaggtgtgggagggggctggggatcaggccagggaagctgggcgccagtggtaactcttctctgatccccgtctttcctgctgccagtgaatcgaacgccacactcagaacggcgcgcagtgtacatcggggcactgtttcccatgagcgggggctggccagggggccaggcctgccagcccgcggtggagatggcgctggaggacgtgaatagccgcagggacatcctgccggactatgagctcaagctcatccaccacgacagcaag

SEQ ID NO: 136462 - DNA, 1739 bp, Homo sapiens; identical to SEQ ID NO: 136427
  Payload ID: 6701
  Gene Symbol: GABBR1
  Gene Name:: gamma-aminobutyric acid (GABA) B receptor, 1
  Uniprot ID: Q9UBS5
  ENST ID: ENST00000548767
  CDS Start-End: 3-1739

SEQ ID NO: 136463 - DNA, 1739 bp, Homo sapiens; identical to SEQ ID NO: 136427
  Payload ID: 6701
  Gene Symbol: GABBR1
  Gene Name: gamma-aminobutyric acid (GABA) B receptor, 1
  Uniprot ID: Q9UBS5
  ENST ID: ENST00000547410
  CDS Start-End: 3-1739

SEQ ID NO: 136464 - DNA, 1739 bp, Homo sapiens; identical to SEQ ID NO: 136427
  Payload ID: 6701
  Gene Symbol: GABBR1
  Gene Name: gamma-aminobutyric acid (GABA) B receptor, 1
  Uniprot ID: Q9UBS5
  ENST ID: ENST00000551140
  CDS Start-End: 3-1739

SEQ ID NO: 136465 - DNA, 1739 bp, Homo sapiens
  Payload ID: 6701
  Gene Symbol: GABBR1
  Gene Name: gamma-aminobutyric acid (GABA) B receptor, 1
  ENST ID: ENST00000550820
  CDS Start-End: 3-1739
agatgttgctgctgctgctactggcgccactcttcctccgccccccgggcgcgggcggggtgcagacccccaacgccacctcagaaggttgccagatcatacacccgccctgggaagggggcatcaggtaccggggcctgactcgggaccaggtgaaggctatcaacttcctgccagtggactatgagattgagtatgtgtgccggggggagcgcgaggtggtggggcccaaggtccgcaagtgcctggccaacggctcctggacagatatggacacacccagccgctgtgtccgaatctgctccaagtcttatttgaccctggaaaatgggaaggttttcctgacgggtggggacctcccagctctggacggagcccgggtggatttccggtgtgaccccgacttccatctggtgggcagctcccggagcatctgtagtcagggccagtggagcacccccaagccccactgccaggtgaatcgaacgccacactcagaacggcgcgcagtgtacatcggggcactgtttcccatgagcgggggctggccagggggccaggcctgccagcccgcggtggagatggcgctggaggacgtgaatagccgcagggacatcctgccggactatgagctcaagctcatccaccacgacagcaagtgtgatccaggccaagccaccaagtacctatatgagctgctctacaacgaccctatcaagatcatccttatgcctggctgcagctctgtctccacgctggtggctgaggctgctaggatgtggaacctcattgtgctttcctatggctccagctcaccagccctgtcaaaccggcagcgtttccccactttcttccgaacgcacccatcagccacactccacaaccctacccgcgtgaaactctttgaaaagtggggctggaagaagattgctaccatccagcagaccactgaggtcttcacttcgactctggacgacctggaggaacgagtgaaggaggctggaattgagattactttccgccagagtttcttctcagatccagctgtgcccgtcaaaaacctgaagcgccaggatgcccgaatcatcgtgggacttttctatgagactgaagcccggaaagttttttgtgaggtgtacaaggagcgtctctttgggaagaagtacgtctggttcctcattgggtggtatgctgacaattggttcaagatctacgacccttctatcaactgcacagtggatgagatgactgaggcggtggagggccacatcacaactgagattgtcatgctgaatcctgccaatacccgcagcatttccaacatgacatcccaggaatttgtggagaaactaaccaagcgactgaaaagacaccctgaggagacaggaggcttccaggaggcaccgctggcctatgatgccatctgggccttggcactggccctgaacaagacatctggaggaggcggccgttccggcgtgcgcctggaggacttcaactacaacaaccagaccattaccgaccaaatctaccgggcaatgaactcctcgtcctttgagggtgtctctggccatgtggtgtttgatgccagcggctctcggatggcatggacgcttatcgagcagcttcagggtggcagctacaagaagattggctactatgacagcaccaaggatgatctttcctggtccaaaacagataaatggattgttatatccagaactcacagcccaacctga

SEQ ID NO: 136466 - DNA, 4199 bp, Homo sapiens
  Payload ID: 6701
  Gene Symbol: GABBR1
  Gene Name: gamma-aminobutyric acid (GABA) B receptor, 1
  Uniprot ID: Q9UBS5
  ENST ID: ENST00000546913
  CDS Start-End: 1-2886
atgttgctgctgctgctactggcgccactcttcctccgccccccgggcgcgggcggggcgcagacccccaacgccacctcagaaggttgccagatcatacacccgccctgggaagggggcatcaggtaccggggcctgactcgggaccaggtgaaggctatcaacttcctgccagtggactatgagattgagtatgtgtgccggggggagcgcgaggtggtggggcccaaggtccgcaagtgcctggccaacggctcctggacagatatggacacacccagccgctgtgtccgaatctgctccaagtcttatttgaccctggaaaatgggaaggttttcctgacgggtggggacctcccagctctggacggagcccgggtggatttccggtgtgaccccgacttccatctggtgggcagctcccggagcatctgtagtcagggccagtggagcacccccaagccccactgccaggtgaatcgaacgccacactcagaacggcgcgcagtgtacatcggggcactgtttcccatgagcgggggctggccagggggccaggcctgccagcccgcggtggagatggcgctggaggacgtgaatagccgcagggacatcctgccggactatgagctcaagctcatccaccacgacagcaagtgtgatccaggccaagccaccaagtacctatatgagctgctctacaacgaccctatcaagatcatccttatgcctggctgcagctctgtctccacgctggtggctgaggctgctaggatgtggaacctcattgtgctttcctatggctccagctcaccagccctgtcaaaccggcagcgtttccccactttcttccgaacgcacccatcagccacactccacaaccctacccgcgtgaaactctttgaaaagtggggctggaagaagattgctaccatccagcagaccactgaggtcttcacttcgactctggacgacctggaggaacgagtgaaggaggctggaattgagattactttccgccagagtttcttctcagatccagctgtgcccgtcaaaaacctgaagcgccaggatgcccgaatcatcgtgggacttttctatgagactgaagcccggaaagttttttgtgaggtgtacaaggagcgtctctttgggaagaagtacgtctggttcctcattgggtggtatgctgacaattggttcaagatctacgacccttctatcaactgcacagtggatgagatgactgaggcggtggagggccacatcacaactgagattgtcatgctgaatcctgccaatacccgcagcatttccaacatgacatcccaggaatttgtggagaaactaaccaagcgactgaaaagacaccctgaggagacaggaggcttccaggaggcaccgctggcctatgatgccatctgggccttggcactggccctgaacaagacatctggaggaggcggccgttctggtgtgcgcctggaggacttcaactacaacaaccagaccattaccgaccaaatctaccgggcaatgaactcttcgtcctttgagggtgtctctggccatgtggtgtttgatgccagcggctctcggatggcatggacgcttatcgagcagcttcagggtggcagctacaagaagattggctactatgacagcaccaaggatgatctttcctggtccaaaacagataaatggattggagggtcccccccagctgaccagaccctggtcatcaagacattccgcttcctgtcacagaaactctttatctccgtctcagttctctccagcctgggcattgtcctagctgttgtctgtctgtcctttaacatctacaactcacatgtccgttatatccagaactcacagcccaacctgaacaacctgactgctgtgggctgctcactggctttagctgctgtcttccccctggggctcgatggttaccacattgggaggaaccagttccctttcgtctgccaggcccgcctctggctcctgggcctgggctttagtctgggctacggttccatgttcaccaagatttggtgggtccacacggtcttcacaaagaaggaagaaaagaaggagtggaggaagactctggaaccctggaagctgtatgccacagtgggcctgctggtgggcatggatgtcctcactctcgccatctggcagatcgtggaccctctgcaccggaccattgagacatttgccaaggaggaacctaaggaagatattgacgtctctattctgccccagctggagcattgcagctccaggaagatgaatacatggcttggcattttctatggttacaaggggctgctgctgctgctgggaatcttccttgcttatgagaccaagagtgtgtccactgagaagatcaatgatcaccgggctgtgggcatggctatctacaatgtggcagtcctgtgcctcatcactgctcctgtcaccatgattctgtccagccagcaggatgcagcctttgcctttgcctctcttgccatagttttctcctcctatatcactcttgttgtgctctttgtgcccaagatgcgcaggctgatcacccgaggggaatggcagtcggaggcgcaggacaccatgaagacagggtcatcgaccaacaacaacgaggaggagaagtcccggctgttggagaaggagaaccgtgaactggaaaagatcattgctgagaaagaggagcgtgtctctgaactgcgccatcaactccagtctcggcagcagctccgctcccggcgccacccaccgacacccccagaaccctctgggggcctgcccaggggaccccctgagccccccgaccggcttagctgtgatgggagtcgagtgcatttgctttataagtgagggtagggtgagggaggacaggccagtagggggagggaaagggagaggggaagggcaggggactcaggaagcagggggtccccatccccagctgggaagaacatgctatccaatctcatctcttgtaaatacatgtccccctgtgagttctgggctgatttgggtctctcatacctctgggaaacagacctttttctctcttactgcttcatgtaattttgtatcacctcttcacaatttagttcgtacctggcttgaagctgctcactgctcacacgctgcctcctcagcagcctcactgcatctttctcttcccatgcaacaccctcttctagttaccacggcaacccctgcagctcctctgcctttgtgctctgttcctgtccagcaggggtctcccaacaagtgctctttccaccccaaaggggcctctccttttctccactgtcataatctctttccatcttacttgcccttccatactttctcacatgtggctccccctgaattttgcttcctttgggagctcattcttttcgccaaggctcacatgctccttgcctctgctctgtgcactcacgctcagcacacatgcatcctcccctctcctgcgtgtgcccactgaacatgctcatgtgtacacacgcttttcccgtatgctttcttcatgttcagtcacatgtgctctcgggtgccctgcattcacagctacgtgtgcccctctcatggtcatgggtctgcccttgagcgtgtttgggtaggcatgtgcaatttgtctagcatgctgagtcatgtctttcctatttgcacacgtccatgtttatccatgtactttccctgtgtaccctccatgtaccttgtgtactttcttcccttaaatcatggtattcttctgacagagccatatgtaccctaccctgcacattgttatgcacttttccccaattcatgtttggtggggccatccacaccctctccttgtcacagaatctccatttctgctcagattccccccatctccattgcattcatgtactaccctcagtctacactcacaatcatcttctcccaagactgctcccttttgttttgtgtttttttgaggggaattaaggaaaaataagtgggggcaggtttggagagctgcttccagtggatagttgatgagaatcctgaccaaaggaaggcacccttgactgttgggatagacagatggacctatggggtgggaggtggtgtccctttcacactgtggtgtctcttggggaaggatctccccgaatctcaataaaccagtgaacagtgtgactcgg

SEQ ID NO: 136467 - DNA, 1739 bp, Homo sapiens; identical to SEQ ID NO: 136427
  Payload ID: 6701
  Gene Symbol: GABBR1
  Gene Name: gamma-aminobutyric acid (GABA) B receptor, 1
  Uniprot ID: Q9UBS5
  ENST ID: ENST00000551423
  CDS Start-End: 3-1739

SEQ ID NO: 136468 - DNA, 1739 bp, Homo sapiens; identical to SEQ ID NO: 136427
  Payload ID: 6701
  Gene Symbol: GABBR1
  Gene Name: gamma-aminobutyric acid (GABA) B receptor, 1
  Uniprot ID: Q9UBS5
  ENST ID: ENST00000552399
  CDS Start-End: 3-1739

SEQ ID NO: 136469 - DNA, 5788 bp, Homo sapiens
  Payload ID: 6702
  Gene Symbol: GABBR2
  Gene Name: gamma-aminobutyric acid (GABA) B receptor, 2
  Uniprot ID: O75899
  ENST ID: ENST00000259455
  CDS Start-End: 461-3286
gccgcccctgagcagcctcgccttcgcctcccgcgtttcctgccgtccgccctcccccggccgagctccaggggctgccgcctagcagctcccggcgggagagcggttcagagcgcgcacgggggcgggcggaggcggcccggtgcggggcggccgcgctggagagaggcgcgcgcggagacgccggcccccctctccgcgtttgctcgcttgctccccgcctcccgcactccgctcgctcccaccccttcccggcgtgattgatccgtcacgggcgccgccgctgccgccgccgccgccgcggccgttctgagccgagccggaaccctagcccgagacggagccggggcccgggccggcgccattgcgcgggcgccgcgggaagaccttggcgcggggcggcgggccgggccaggccatgcgggccgagtgagccggcgcccgcagcccgcggcgcggcatggcttccccgcggagctccgggcagcccgggccgccgccgccgccgccaccgccgcccgcgcgcctgctactgctactgctgctgccgctgctgctgcctctggcgcccggggcctggggctgggcgcggggcgccccccggccgccgcccagcagcccgccgctctccatcatgggcctcatgccgctcaccaaggaggtggccaagggcagcatcgggcgcggtgtgctccccgccgtggaactggccatcgagcagatccgcaacgagtcactcctgcgcccctacttcctcgacctgcggctctatgacacggagtgcgacaacgcaaaagggttgaaagccttctacgatgcaataaaatacgggcctaaccacttgatggtgtttggaggcgtctgtccatccgtcacatccatcattgcagagtccctccaaggctggaatctggtgcagctttcttttgctgcaaccacgcctgttctagccgataagaaaaaatacccttatttctttcggaccgtcccatcagacaatgcggtgaatccagccattctgaagttgctcaagcactaccagtggaagcgcgtgggcacgctgacgcaagacgttcagaggttctctgaggtgcggaatgacctgactggagttctgtatggcgaggacattgagatttcagacaccgagagcttctccaacgatccctgtaccagtgtcaaaaagctgaaggggaatgatgtgcggatcatccttggccagtttgaccagaatatggcagcaaaagtgttctgttgtgcatacgaggagaacatgtatggtagtaaatatcagtggatcattccgggctggtacgagccttcttggtgggagcaggtgcacacggaagccaactcatcccgctgcctccggaagaatctgcttgctgccatggagggctacattggcgtggatttcgagcccctgagctccaagcagatcaagaccatctcaggaaagactccacagcagtatgagagagagtacaacaacaagcggtcaggcgtggggcccagcaagttccacgggtacgcctacgatggcatctgggtcatcgccaagacactgcagagggccatggagacactgcatgccagcagccggcaccagcggatccaggacttcaactacacggaccacacgctgggcaggatcatcctcaatgccatgaacgagaccaacttcttcggggtcacgggtcaagttgtattccggaatggggagagaatggggaccattaaatttactcaatttcaagacagcagggaggtgaaggtgggagagtacaacgctgtggccgacacactggagatcatcaatgacaccatcaggttccaaggatccgaaccaccaaaagacaagaccatcatcctggagcagctgcggaagatctccctacctctctacagcatcctctctgccctcaccatcctcgggatgatcatggccagtgcttttctcttcttcaacatcaagaaccggaatcagaagctcataaagatgtcgagtccatacatgaacaaccttatcatccttggagggatgctctcctatgcttccatatttctctttggccttgatggatcctttgtctctgaaaagacctttgaaacactttgcaccgtcaggacctggattctcaccgtgggctacacgaccgcttttggggccatgtttgcaaagacctggagagtccacgccatcttcaaaaatgtgaaaatgaagaagaagatcatcaaggaccagaaactgcttgtgatcgtggggggcatgctgctgatcgacctgtgtatcctgatctgctggcaggctgtggaccccctgcgaaggacagtggagaagtacagcatggagccggacccagcaggacgggatatctccatccgccctctcctggagcactgtgagaacacccatatgaccatctggcttggcatcgtctatgcctacaagggacttctcatgttgttcggttgtttcttagcttgggagacccgcaacgtcagcatccccgcactcaacgacagcaagtacatcgggatgagtgtctacaacgtggggatcatgtgcatcatcggggccgctgtctccttcctgacccgggaccagcccaatgtgcagttctgcatcgtggctctggtcatcatcttctgcagcaccatcaccctctgcctggtattcgtgccgaagctcatcaccctgagaacaaacccagatgcagcaacgcagaacaggcgattccagttcactcagaatcagaagaaagaagattctaaaacgtccacctcggtcaccagtgtgaaccaagccagcacatcccgcctggagggcctacagtcagaaaaccatcgcctgcgaatgaagatcacagagctggataaagacttggaagaggtcaccatgcagctgcaggacacaccagaaaagaccacctacattaaacagaaccactaccaagagctcaatgacatcctcaacctgggaaacttcactgagagcacagatggaggaaaggccattttaaaaaatcacctcgatcaaaatccccagctacagtggaacacaacagagccctctcgaacatgcaaagatcctatagaagatataaactctccagaacacatccagcgtcggctgtccctccagctccccatcctccaccacgcctacctcccatccatcggaggcgtggacgccagctgtgtcagcccctgcgtcagccccaccgccagcccccgccacagacatgtgccaccctccttccgagtcatggtctcgggcctgtaagggtgggaggcctgggcccggggcctcccccgtgacagaaccacactgggcagaggggtctgctgcagaaacactgtcggctctggctgcggagaagctgggcaccatggctggcctctcaggaccactcggatggcactcaggtggacaggacggggcagggggagacttggcacctgacctcgagccttatttgtgaagtccttatttcttcacaaagaagaggaacggaaatgggacgtcttccttaacatctgcaaacaaggaggcgctgggatatcaaacttgcaaaaaaaaaaaaaaaaaaaaaaaaacaaaaaaactagacaaggagagaggcactagaactccagctggaagtcacggagtggctcgagcagccttgggaagaggcaaggagcttctgaagaaactgcctctgcacacacatcactggctgtgacccctcaggctagcccttctccactctgggggaggaggtgggaagggccaccaggcccccagctgccaggccagctgaccccagccttcctggaacagggagtctgcaggagcgcagacaggcacagccctggagcaggcaggccgagggctgcggcactggagcaggctgacttacatgctccacatgggacctgtgtcacccaatgagatgtttgttactctggtaaatgccacacgttaacacaataacacccattcctgggaccgtggggatttagggcacgtcactgcagacacgctctgcagcattcaccgacagtctgtcatgcacccaccacgttggccatgtccttgtgttcctatcggatgctcccagtaaccagggggaccacccgagctaatcatggaatgtctgttcccagcaaacacgataaagaaagattgtgcactttaacctctctcatcagggcccaagggctggctgggattttttttttttttttcccactaactttgtttctgaccaaagtgaattggaggcactctgctaaaagacatccccgtagacataggggagagagttgctggctgagggcttcccttggcttccagaaggcagccttccatccagacaagccagtgagctctccccttgggatcactggggtgatcagtcagcagattgattctcattcataagatcattcctccctttaaattgagcccctaagagcactggcctgggagtcagacagacctgggttcaagtcctcagtcccctgcccactccctacgtgactttgatcaggtcactagtgtctctctgagcctcagtttcccctctgtaacttggggttgaactaaaacacctgtcctgcctacctcacaaggtcactctgaggattgaaacttgatcttgtccaggaaagctttgtaccaaacagtgaagccgccctgatccgtgaggtatgagtatgactctgaccttcagccctccctacagccgggggtgtggcccagagaagcttccagcacagccctctacccagaacatccgggctggagggaggctcccagtgacttttctgacattcctagacaggttcattctttgctcaagaaaggcctgaatgacaatgtccaggatgtctgcacaactgagcagctcgctcactccctaaagaaacctattggcagcttcaacaggcaggcaataatctcttcccagaaccactgcagtcaggaataaactgttttctccaccaggctttgacaaaagggcccacaggaatcttaccaatgccaacatttcaaagcaccctatttcacgtagcatagctttctgctccccttccccaaagagaggttatggaggtactgtagcttttagggaaaaaaaaatgttaacacatcacaggtcaagttgaagtcattctctgtttaggcactaaaaatcggtgttgtcactcactgtgtattaccagtatttacttgctttcttgatttcaccaaaaccaaatttaatttaaaggaccacattaatttttcaaagggaaagagacaattaattgtacataatgtatacacacacacaaaaaaaaatacctgtagaaatattattccagcatagcaggaaaacaaacaaaagtattggactgtcggaggtgagcctgtgcgtctgtaaccctttgtgactcctgagcgtgcgctgtcttctaggttaactcacgaagtacattctctgtcttactgatactgtaggttcacccatttttttttaatttcctcgcaaataacaagacccacagaagtgactctagctacttaatggttctgttcttttatatgcagcaaacacaccgtccatttctgaagaggcttcggcctgaaggcattttccaatgatgttagtgcacaaaacgctttaaattagactggaactgccagaatcaaatgtaaatgaggaatttctcgtacccctactgcatggtatcgatttttaataaattgttgcaaatttgtttttatgaataaaaggaaaaaacctgtcgtctttaa

SEQ ID NO: 136470 - DNA, 550 bp, Homo sapiens
  Payload ID: 6702
  Gene Symbol: GABBR2
  Gene Name: gamma-aminobutyric acid (GABA) B receptor, 2
  ENST ID: ENST00000634457
  CDS Start-End: 1-550
gtcaggacctggattctcaccgtgggctacacgaccgcttttggggccatgtttgcaaagacctggagagtccacgccatcttcaaaaatgtgaaaatgaagaagaagatcatcaaggaccagaaactgcttgtgatcgtggggggcatgctgctgatcgacctgtgtatcctgatctgctggcaggctgtggaccccctgcgaaggacagtggagaagtacagcatggagttgttcggttgtttcttagcttgggagacccgcaacgtcagcatccccgcactcaacgacagcaagtacatcgggatgagtgtctacaacgtggggatcatgtgcatcatcggggccgctgtctccttcctgacccgggaccagcccaatgtgcagttctgcatcgtggctctggtcatcatcttctgcagcaccatcaccctctgcctggtattcgtgccgaagctcatcaccctgagaacaaacccagatgcagcaacgcagaacaggcgattccagttcactcagaatcagaagaaagaagattctaaaacgtcca

SEQ ID NO: 136471 - DNA, 7569 bp, Homo sapiens
  Payload ID: 6703
  Gene Symbol: GGCX
  Gene Name: gamma-glutamyl carboxylase
  Uniprot ID: P38435
  ENST ID: ENST00000233838
  CDS Start-End: 82-2358
cggagcctagggaagcaaattctcctggcggcctccgttcagacgcggcagctgtgacccacctgcctcctccgcagagcaatggcggtgtctgccgggtccgcgcggacctcgcccagctcagataaagtacagaaagacaaggctgaactgatctcagggcccaggcaggacagccgaatagggaaactcttgggttttgagtggacagatttgtccagttggcggaggctggtgaccctgctgaatcgaccaacggaccctgcaagcttagctgtctttcgttttctttttgggttcttgatggtgctagacattccccaggagcgggggctcagctctctggaccggaaataccttgatgggctggatgtgtgccgcttccccttgctggatgccctacgcccactgccacttgactggatgtatcttgtctacaccatcatgtttctgggggcactgggcatgatgctgggcctgtgctaccggataagctgtgtgttattcctgctgccatactggtatgtgtttctcctggacaagacatcatggaacaaccactcctatctgtatgggttgttggcctttcagctaacattcatggatgcaaaccactactggtctgtggacggtctgctgaatgcccataggaggaatgcccacgtgcccctttggaactatgcagtgctccgtggccagatcttcattgtgtacttcattgcgggtgtgaaaaagctggatgcagactgggttgaaggctattccatggaatatttgtcccggcactggctcttcagtcccttcaaactgctgttgtctgaggagctgactagcctgctggtcgtgcactggggtgggctgctgcttgacctctcagctggtttcctgctcttttttgatgtctcaagatccattggcctgttctttgtgtcctacttccactgcatgaattcccagcttttcagcattggtatgttctcctacgtcatgctggccagcagccctctcttctgctcccctgagtggcctcggaagctggtgtcctactgcccccgaaggttgcaacaactgttgcccctcaaggcagcccctcagcccagtgtttcctgtgtgtataagaggagccggggcaaaagtggccagaagccagggctgcgccatcagctgggagctgccttcaccctgctctacctcctggagcagctattcctgccctattctcattttctcacccagggctataacaactggacaaatgggctgtatggctattcctgggacatgatggtgcactcccgctcccaccagcacgtgaagatcacctaccgtgatggccgcactggcgaactgggctaccttaaccctggggtatttacacagagtcggcgatggaaggatcatgcagacatgctgaagcaatatgccacttgcctgagccgcctgcttcccaagtataatgtcactgagccccagatctactttgatatttgggtctccatcaatgaccgcttccagcagaggatttttgaccctcgtgtggacatcgtgcaggccgcttggtcaccctttcagcgcacatcctgggtgcaaccactcttgatggacctgtctccctggagggccaagttacaggaaatcaagagcagcctagacaaccacactgaggtggtcttcattgcagatttccctggactgcacttggagaattttgtgagtgaagacctgggcaacactagcatccagctgctgcagggggaagtgactgtggagcttgtggcagaacagaagaaccagactcttcgagagggagaaaaaatgcagttgcctgctggtgagtaccataaggtgtatacgacatcacctagcccttcttgctacatgtacgtctatgtcaacactacagagcttgcactggagcaagacctggcatatctgcaagaattaaaggaaaaggtggagaatggaagtgaaacagggcctctacccccagagctgcagcctctgttggaaggggaagtaaaagggggccctgagccaacacctctggttcagacctttcttagacgccaacaaaggctccaggagattgaacgccggcgaaatactcctttccatgagcgattcttccgcttcttgttgcgaaagctctatgtctttcgccgcagcttcctgatgacttgtatctcacttcgaaatctgatattaggccgtccttccctggagcagctggcccaggaggtgacttatgcaaacttgagaccctttgaggcagttggagaactgaatccctcaaacacggattcttcacattctaatcctcctgagtcaaatcctgatcctgtccactcagagttctgaagggggccagatgttgggtgcagatgtagaagcagccagtcacagacccattctatgcaatggacatttatttgaaaaaaattctcaaaagttttttttttttttttgggggggcggggttctaaagctgtttttaactccgagattacaacttagaggaaccaaggaaataaagcaaataagatttaacaacccaagattaagaggccaggaagaggttagacgcaatgtgaaactgtcctcctaggataaggtttaaagtggctttttgggggctgggtgccgtggctcacgcctgtaatcccagcattttgggaggctgaggtgggcagatcacttgaggccaggagttcgagaccagcctggccaacatggcaaaaccccttctctactaaaaatacaaaaattagccagacgtggtggtgggtgcctgtaatccaactacccaggaggctgaggcatgagaatcgcttgggcccaggaggtggaggttgcagtgagccgagatcgagccactgcactcctgggcaacagagcaagacttcgtctcaaaataaataaataaagtggctcttggggaaaagcaatttaatgtaccacgatgaatagctaactgttcccaagtgtttgctatgtgcaacacaccgcgtgagcagtgttacctgcattattacattaggctgagaggtaaaataatttgcccgaagacatacagctagtgacgaatggactgatggtttgaacttaacgtctatttgacttaaggtcctgcaccctgccacttgtaattttcagaatcactgataatctgaaataatgcagcttaaaacatgttttcttaattaaaagtataattggatggtggtcaggttgtaaatgcacacaaagtaatttatcttcattgcaattttggttccttctttgttcctattatctatatacacccagtgtttcactagcagttatgagagcagtcagaatagcagcatcaaagttaaataaggaaatctagatgattgctagattttctctaaaaataagcttagtatttggtattattctagcctttggtgagcagaaggggaggtaaagtaagaattaactaaatttagtaagggattagggaatgcttagacattttgtaggttggggtatacaagggtaactcaggaagctcctcagttcagtgaaaattcaaagggttggcactgagctaggaagcgagaatgcagggttatgaaaaaggatccctgctttgggagctcatggacttgtagcagagaccggtagtaaattggcagtctcagtaacttctgtaaatgattgcatctctttgcaggcttctcttcccatactctcccccactcctccttggacagtgttccgggggttctttcctaagcaactgctttttcagtatacatacttcagatgattgtgtctactccaggatttccaacgatgctaggtttctttcctgtgccctagacgtataggtctaagttccacctggatatcccacagggctatcaagctcagttcatcctaaacagaacttacattcatccccaactcagacttccttattctttattattgaatggcagctctgtaccttagccaagctgttatctctaggtcatcagccttgactcttcctttttccttgcatttcttaaaattgccaagtcccatcaattttacctcctggatacctcttgaatctatttttttttaaagacagggtttcactctatcacccaggctggagttcagtggcacaatcttggcttactgcagccaccacctcctgggtttaaacgattcttccacttcagcctcccatgtagctgggactacaggtgcccaccaccacgcccaactaatttttgtatttttagtagagacatggtttcccacattggccaggctggtctcaaactcatgaccttaagtatccacctgccttggcctcccaaagggctgggattacaggtgtgagccaccgtgcccagccaaatctgttttcattactacctatatctgtattttcaacctttgtattagcatctagttagggatagaccaggacagggccgacatgttagttgtcaagcagattgccaccctcccccaccactgaggaggccaaatggagtttggtggaaaatctctaattcattcaaggtattatatgggcaagcaatggctgtggcacagggtcccctgattactttgtaagaatgggtgggagggatgctgattttcaatccttttgcagatcttctctcatagtaacacaatagaagatactttgccactatgttgtttgccaaactcactgtacctacttgactggtaacaaaagtcccaagagttacttgggagaagacacttgaaaaagtatttttctaaatatgggcaaggatgctgcccttccccaaactgttagtataccacctctctgaccaattttcccaaggaagatattggggtagggtgaggtgtaaagaaaaagtggtcatgtaaatactggtaataaaagctgttcagtggggtagagttgggttgcaactgtagccattctaaaaatgggctatcaatgtccttttagccaaaagactttagtatacatcctcctcattctaccctcaggatttggatctttgcccctgatgggtatccatcccctttgaaactttagaaaggcaggttatatacagaatgttcaacctaaagacatttccttaagtcatactttcatgctttctaaactataatcacccttatcatcccctgctgttatgctttccctctgctccctgtggcctaatgttcctccaccaccttattaaccttcaggatacttttcccctaggctgggcaggacaacactatccccttggtccacaagctccctcaaggttggggaatctttgtttacttagcaaatactgaacataaccttaaagcggttacttttgaaaacttctcatgctattctaccaacttggaggcacctatccatgctcattcccctaatgtagccaatatggttatctgcaatgtattggcatctaaaaactcccttatgaaactgccagacttgttctggaacatttcaattacatgcaaaattcaggttctcaagttggaacaagtctaattgacacacctgcataggttttaaccttgccctccccctacttcccaacagatttccaagttttttgagaaggaaccttgctctggcccaggctggagtgcaatggcgccatctcggctcactgcaacctctgcctcctgggttcaagtgattctccagcctcctgagtagctgggattacaagcacctgccaccacacccagcttttttgtatttttggtagagacggggtttcagtttgccaggctggtatcaaaccgtgacctcaggtgatccacccgcattagcctcccaaagtgctgggattacaggtgtaagctaccatacccagatttccacggctttttttttaagtctcactctgttaccctggccggagtgtggtggcacgatttcagctcactgcaagctccacctcccgggttcacgccattctcctgcctcggcctcctgagtagctgggactacaggtgcctggctaacttttttatatttttagtagagacagggtttcactgtgttagccaggatggtctcgtgatctgcatgccttggcctcccaaagtgctaggattataggctcacgcctatattactatatagtggcctatattacaggccactccgcctggcctccaaatttccaagtttttaagtctccatgcaaacaggcataagcaagcactccttggctctacatttgcaggacaagctggaccaccattcagatgttggtagaaatgtaatccaagtggctattctctatgcatgtagctcctaggttcaagagcagtgtggtctgcggattttctacacaacctgccataaatgaaatttaagcctttggaaatttatagcattttcagctaatttgcattatttatctctgcaagatattgactagaaatcacgtttcagaacttctcagatgaaaacatcatacaacccttaaaactaagctcataatttaaaaatgtatgcagattaataggcttaaattgccaggactttagatagacattaccacttccaggttaatacttttagcggtttttatgccttcaatggtttgaagccctcaaccttagttgaaaacttaaaaatggcattgaatggctgctgcaataaggacacatgaattttggcttaagtggactaggaggactaaatcttgcttaggcttttaaaaaatgcccacccactgggtctagggattgaggttattttcctgaattatggctaattatggattacaattcaaggttaaagatacacatatagtattctcaggttattcatatgatagcattttttaagagccaaagtctcagtcacccaggctggagtgcagtggcttgataatggttcgctacagcctccaacttctatgttaaagtgatcctcctacctcagcctttcaaagtgttgggattataggcacgtacctatggccccaaagcactttaacaaatgagtaacagacacagttaaggtagaacctagcattttatttagatcttcattaaactgttggaattgagaaccagacatacgtaataaacctccaaaaatagatcctgaaaggcactttctgcttagggcaagcagtcatggaataagcatgtaaacaagctggcttctctgtaccacaccagccaagtcagctttctccatggccagccgcaccagctctgccctcccttctgttaacaccagccagaccccctgtaggtctaacccaaggtttttctgtaggacaccttggcctacctgggaatgctggaaacatgttgttaaaggaatcatggtgttgagagaaaaaaaaaaaatcttttaaaagctgccatctgaggtgatggcttctctgtacttacgccataccccagaatacaataaataagcaattagaaaacgttcaagtatgaagggatttcctcctccccgccaaaagcactgctctctgaaggaagctggtttctctgtagctacaccagctgttcagaaagctcattggacctggttttgaaaataaaacaaagttaaaa

SEQ ID NO: 136472 - DNA, 1339 bp, Homo sapiens
  Payload ID: 6703
  Gene Symbol: GGCX
  Gene Name: gamma-glutamyl carboxylase
  ENST ID: ENST00000423570
  CDS Start-End: 46-417
gttcagacgcggcagctgtgacccacctgcctcctccgcagagcaatggcggtgtctgccgggtccgcgcggacctcgcccagctcagataaagtacagaaagacaaggctgaactgatctcagggcccaggcaggacagccgaatagggaaactcttgggttttgagtggacagatttgtccagttggcggaggctggtgaccctgctgaatcgaccaacggaccctgcaagcttagctgtctttcgttttctttttgggttcttgatggtgctagacattccccaggagcgggggctcagctctctggaccggaaataccttgatgggctggatgtgtgccgcttccccttgctggatgccctacgcccactgccacttgactggatggaaactgggcctgtggtgatctcttgacctcttaatcctctccctacaaatcccaggggcactgggcatgatgctgggcctgtgctaccggataagctgtgtgttattcctgctgccatactggtctgtggacggtctgctgaatgcccataggaggaatgcccacgtgcccctttggaactatgcagtgctccgtggccagatcttcattgtgtacttcattgcgggtgtgaaaaagctggatgcagactgggttgaaggctattccatggaatatttgtcccggcactggctcttcagtcccttcaagtgagtggcagtcatggtggaggcctctttgaggcatgggtacagagcaggtgactcatctctctcagtaatggcacctgttcctactttgcctgaatttgccacatgccttcctttgtccactcatttccctattcagcagaagcagagtcagtggtatcaaaagattgagccctagctgctcttgggagatatatggtatagataggcaagaaaggaaaagaaatttaaaaaggaaaggaaagagccggaactggctgacttggtgagtgagccagtgccctcagcagctgccttggatggtgcctgtgtccttgccttgccactctagcctcccatcagagccctgcagctgatgtactgagaagatgggcactcactgttcaggctctgacaaaaccattattatcacttccacaaaacaaagggtcacctttctgatttgtcttcttcccatttcttctttcctcttgttttactttattctctttcttcttccctgttattttccagttcctgaagtttgacttcattatgatgttagccaagcattcaccttttaaagtgtcctctcactcatgacctccgtggggaacgtcccttccacaacacacacacatctcagtcaaattttgtccta

SEQ ID NO: 136473 - DNA, 533 bp, Homo sapiens
  Payload ID: 6703
  Gene Symbol: GGCX
  Gene Name: gamma-glutamyl carboxylase
  ENST ID: ENST00000428479
  CDS Start-End: 66-287
aaattctcctggcggcctccgttcagacgcggcagctgtgacccacctgcctcctccgcagagcaatggcggtgtctgccgggtccgcgcggacctcgcccagctcagggttcttgatggtgctagacattccccaggagcgggggctcagctctctggaccggaaataccttgatgggctggatgtgtgccgcttccccttgctggatgccctacgcccactgccacttgactggatgtatcttgtctacaccatcatgtttctggggaaactgggcctgtggtgatctcttgacctcttaatcctctccctacaaatcccaggggcactgggcatgatgctgggcctgtgctaccggataagctgtgtgttattcctgctgccatactggtatgtgtttctcctggacaagacatcatggaacaaccactcctatctgtatgggttgttggcctttcagctaacattcatggatgcaaaccactactggtctgtggacggtctgctgaatgcccataggaggaatgcccac

SEQ ID NO: 136474 - DNA, 540 bp, Homo sapiens
  Payload ID: 6703
  Gene Symbol: GGCX
  Gene Name: gamma-glutamyl carboxylase
  ENST ID: ENST00000421496
  CDS Start-End: 66-266
aaattctcctggcggcctccgttcagacgcggcagctgtgacccacctgcctcctccgcagagcaatggcggtgtctgccgggtccgcgcggacctcgcccagctcagggttcttgatggtgctagacattccccaggagcgggggctcagctctctggaccggaaataccttgatgggctggatgtgtgccgcttccccttgctggatgccctacgcccactgccacttgactggatggaaactgggcctgtggtgatctcttgacctcttaatcctctccctacaaatcccaggggcactgggcatgatgctgggcctgtgctaccggataagctgtgtgttattcctgctgccatactggtatgtgtttctcctggacaagacatcatggaacaaccactcctatctgtatgggttgttggcctttcagctaacattcatggatgcaaaccactactggtctgtggacggtctgctgaatgcccataggaggaatgcccacgtgcccctttggaactatgcagtgctccgtggccag

SEQ ID NO: 136475 - DNA, 2314 bp, Homo sapiens
  Payload ID: 6703
  Gene Symbol: GGCX
  Gene Name: gamma-glutamyl carboxylase
  Uniprot ID: P38435
  ENST ID: ENST00000430215
  CDS Start-End: 105-2210
acagccgctgacgcgtcgggaggcggagcctagggaagcaaattctcctggcggcctccgttcagacgcggcagctgtgacccacctgcctcctccgcagagcaatggcggtgtctgccgggtccgcgcggacctcgcccagctcagggttcttgatggtgctagacattccccaggagcgggggctcagctctctggaccggaaataccttgatgggctggatgtgtgccgcttccccttgctggatgccctacgcccactgccacttgactggatgtatcttgtctacaccatcatgtttctgggggcactgggcatgatgctgggcctgtgctaccggataagctgtgtgttattcctgctgccatactggtatgtgtttctcctggacaagacatcatggaacaaccactcctatctgtatgggttgttggcctttcagctaacattcatggatgcaaaccactactggtctgtggacggtctgctgaatgcccataggaggaatgcccacgtgcccctttggaactatgcagtgctccgtggccagatcttcattgtgtacttcattgcgggtgtgaaaaagctggatgcagactgggttgaaggctattccatggaatatttgtcccggcactggctcttcagtcccttcaaactgctgttgtctgaggagctgactagcctgctggtcgtgcactggggtgggctgctgcttgacctctcagctggtttcctgctcttttttgatgtctcaagatccattggcctgttctttgtgtcctacttccactgcatgaattcccagcttttcagcattggtatgttctcctacgtcatgctggccagcagccctctcttctgctcccctgagtggcctcggaagctggtgtcctactgcccccgaaggttgcaacaactgttgcccctcaaggcagcccctcagcccagtgtttcctgtgtgtataagaggagccggggcaaaagtggccagaagccagggctgcgccatcagctgggagctgccttcaccctgctctacctcctggagcagctattcctgccctattctcattttctcacccagggctataacaactggacaaatgggctgtatggctattcctgggacatgatggtgcactcccgctcccaccagcacgtgaagatcacctaccgtgatggccgcactggcgaactgggctaccttaaccctggggtatttacacagagtcggcgatggaaggatcatgcagacatgctgaagcaatatgccacttgcctgagccgcctgcttcccaagtataatgtcactgagccccagatctactttgatatttgggtctccatcaatgaccgcttccagcagaggatttttgaccctcgtgtggacatcgtgcaggccgcttggtcaccctttcagcgcacatcctgggtgcaaccactcttgatggacctgtctccctggagggccaagttacaggaaatcaagagcagcctagacaaccacactgaggtggtcttcattgcagatttccctggactgcacttggagaattttgtgagtgaagacctgggcaacactagcatccagctgctgcagggggaagtgactgtggagcttgtggcagaacagaagaaccagactcttcgagagggagaaaaaatgcagttgcctgctggtgagtaccataaggtgtatacgacatcacctagcccttcttgctacatgtacgtctatgtcaacactacagagcttgcactggagcaagacctggcatatctgcaagaattaaaggaaaaggtggagaatggaagtgaaacagggcctctacccccagagctgcagcctctgttggaaggggaagtaaaagggggccctgagccaacacctctggttcagacctttcttagacgccaacaaaggctccaggagattgaacgccggcgaaatactcctttccatgagcgattcttccgcttcttgttgcgaaagctctatgtctttcgccgcagcttcctgatgacttgtatctcacttcgaaatctgatattaggccgtccttccctggagcagctggcccaggaggtgacttatgcaaacttgagaccctttgaggcagttggagaactgaatccctcaaacacggattcttcacattctaatcctcctgagtcaaatcctgatcctgtccactcagagttctgaagggggccagatgttgggtgcagatgtagaagcagccagtcacagacccattctatgcaatggacatttatttgaaaaaaattctcaaaagttttttttttttt

SEQ ID NO: 136476 - DNA, 1607 bp, Homo sapiens
  Payload ID: 6704
  Gene Symbol: GGH
  Gene Name: gamma-glutamyl hydrolase (conjugase, folylpolygammaglutamyl hydrolase)
  Uniprot ID: Q92820
  ENST ID: ENST00000260118
  CDS Start-End: 404-1360
tcccctctcgaggacctgggttggccagcccagctttgtacgggtgactgaagtccacatcgacgtaacagttgaaagggaaggacgcggagaccacccggtacccgccccaggcgtttccagagtctccgcttaggcggcccgtgggggtcggggtcgcggtcgcggtcgcggaccggggacagagcaatggggcgggcgcgcagcgccggctgcactcccagagcctcccaccgccgccccacggccgcctagcgcgcgccgggactgcatttcccataggcccacgctgcggagcaccgcccacccgagtctcacgcgagtgcgctgccgcgaggtgtccctgccgcagcccccgcccgcccgcagagcttttgaaaggcggcgggaggcggcgagcgccatggccagtccgggctgcctgctgtgcgtgctgggcctgctactctgcggggcggcgagcctcgagctgtctagaccccacggcgacaccgccaagaagcccatcatcggaatattaatgcaaaaatgccgtaataaagtcatgaaaaactatggaagatactatattgctgcgtcctatgtaaagtacttggagtctgcaggtgcgagagttgtaccagtaaggctggatcttacagagaaagactatgaaatacttttcaaatctattaatggaatccttttccctggaggaagtgttgacctcagacgctcagattatgctaaagtggccaaaatattttataacttgtccatacagagttttgatgatggagactattttcctgtgtggggcacatgccttggatttgaagagctttcactgctgattagtggagagtgcttattaactgccacagatactgttgacgtggcaatgccgctgaacttcactggaggtcaattgcacagcagaatgttccagaattttcctactgagttgttgctgtcattagcagtagaacctctgactgccaatttccataagtggagcctctccgtgaagaattttacaatgaatgaaaagttaaagaagtttttcaatgtcttaactacaaatacagatggcaagattgagtttatttcaacaatggaaggatataagtatccagtatatggtgtccagtggcatccagagaaagcaccttatgagtggaagaatttggatggcatttcccatgcacctaatgctgtgaaaaccgcattttatttagcagagttttttgttaatgaagctcggaaaaacaaccatcattttaaatctgaatctgaagaggagaaagcattgatttatcagttcagtccaatttatactggaaatatttcttcatttcagcaatgttacatatttgattgaaagtcttcaatttgttaacagagcaaatttgaataattccatgattaaactgttagaataacttgctactcatggcaagattaggaagtcacagattcttttctataatgtgcctggctctgattcttcattctgtatgtgactatttatataacattagataattaaatagtgagacataaatagagtgtttttcatggaaaagccttcttatatctgaagattgaaaaaaataaatttactgaaa

SEQ ID NO: 136477 - DNA, 2804 bp, Homo sapiens
  Payload ID: 6705
  Gene Symbol: GGACT
  Gene Name: gamma-glutamylamine cyclotransferase
  Uniprot ID: Q9BVM4
  ENST ID: ENST00000376250
  CDS Start-End: 396-857
gactgaaaactggatatttggtccccatggactttctggtcaccctgtgaagtggacttaactttttcttgaatcatgtggaaggattctgaagtcaaaagtttttaagactctcaggcttactgtggatctggattctaaggcaacacttccttgaagaaacaagcttacagtctgtggcccagacccaggcaagtggtaaatatttaccttcacgctggagccaagatcgctgcggggagtcccgtgaagcaccactgccctctaagaccttggaaggggaaacaccagaaggtgtgggtgctgagctccgctgcgtcagactgccaggacctgagtggaactcagtgctgaaacctgggttctcactgcagctggatagcagctctgcccggatggccctagtcttcgtgtacggcaccctgaagcggggtcagcccaaccacagggtcctgcgggacggcgcccacggctccgcagcctttcgggcgcgcggccgcacgctggagccctacccgttggtgatcgcgggggagcacaacatcccgtggctgctgcacctgcccggctcggggcgcctcgtggagggcgaggtctacgcggtagacgagcggatgctgcgctttctggatgacttcgagagttgcccggccctgtaccagcgcacggtgctgcgggtacagctgctggaggaccgggccccgggcgcagaggagccgccagcgcccaccgcggtgcagtgcttcgtgtacagcagggccaccttcccgccggagtgggcccagctcccgcaccatgacagctacgactccgaggggccgcacgggctgcgctacaacccccgggagaacagataagggggacgggcagggtgggcctaggtttgagagccctggggctccaagatgcgcccagcccatgctgggtgaaggcggaagccgaacagggccctttccaatgaatctgccggaaaggaaccaatctttcagtggcagctgattttacaaataatgttgagatacgaatagcaaggtgcttccctcccatctttctacctggtaagaaaaatttaggattttaactcccctaaatgacatttagagaactcgtgttatgcctaattcttcttcctcctcgtgttgtttctgctgttggctctgctttgagctcaagataataataaatatttaggatcagtgtaaagacttggtgttgccgctagattttagcagccctactatactgattctggcctgtaacccctgagaaagccgattttacacggctgggtagaatttgtagaaaagatccacagggcaagcatgctgtatatcagagtgcgtatagcaccattcttcctaattttcagatcaagcttcacagcaaatattaaagattatttaaatttgaagtcgatgttttgggaaatcagatataaaagtgttggtactgtgtttgacccccacgttttttggtatacttatttggtagaaggttctttacattctgatctagcaaaataatgaacacccacttgctggtagacacagctgagcgcccggacttcaagtggaagtttatctgagcccagatctcagtagccagaccccgtccctgccccctgaagggagagcatttgggggtgagtcctttcaaagaagagccaatgcattagtaatttgttcttcaggcctgacagaagcttagcttccaaatacaaacagcacttaaaataattttagcaaggcacgaagtaccaattactacccacctccatctgataattgtcagcatcgattcaactcggtgcacggctcttgcttctgcttcccagcaaagtctgaaatgtattccaaggatttcagaaccaaatgaaaatgcagctgctgtgatctttagtaacctcattctctgttgggagagctcacttactcttcaacttaatggcagactgtgatcgctaactgcatctggcacaaaaacatgatcattatttttagcttcttttgcttaattggaaacttgcttcacaaaaaacacaaaaaggctacgctgggtctcagctgatgagctcgtggcggccctgtgcttgatgagggcggtgaggcagcccaagctccttgtgactgccctggcttgtgcaatggggaagggaccaggcagcgcgctcatcctcaaaacaaacaaaaacagtggagacagcacccccggccaaccaggaagcttcagggtgacctccaggggagtcagccaccaacagtacacccacatagagacacagcaggaaagggattgccaaaatctgcatttgcagtctctggtccttaggaagttttgaaaatcagcaccaggagtgagggcctcacttctagaagtagtaaggcaatcagatgaaaaaatggcaagtgctaatttaataaagcaaggcagagaactgactgacatttatatcaatctcttaaaaggatcacaaagaaatgctggtagtctactggcagagcctgtcgcctatgtgtacattgtcttcattcaaagaaagggcaaactaatatttagacaaatgctcagttttattgatttaattttgacactagggaatctcacagcagaagtacaaatcatatgtacaagtatttatatcaatgaaaatttccattggtgattttttggcagaatattggtcttgactctgtggaataaatgacgacgtaaacgtagctgcacaggggtgttcctgtataatgcttgaatcaattgtgtgtgaaagcatcatgcaaatggctaattaaattgggtgatgactg

SEQ ID NO: 136478 - DNA, 2678 bp, Homo sapiens
  Payload ID: 6705
  Gene Symbol: GGACT
  Gene Name: gamma-glutamylamine cyclotransferase
  Uniprot ID: Q9BVM4
  ENST ID: ENST00000455100
  CDS Start-End: 251-712
acaaatcacttctgtctttatgtaacagtctgtggcccagacccaggcaagtggtaaatatttaccttcacgctggagccaagatcgctgcggggagtcccgtgaagcaccactgccctctaagaccttggaaggggaaacaccagaaggtgtgggtgctgagctccgctgcgtcagactgccaggacctgagtggaactcagtgctgaaacctgggttctcactgcagctggatagcagctctgcccggatggccctagtcttcgtgtacggcaccctgaagcggggtcagcccaaccacagggtcctgcgggacggcgcccacggctccgcagcctttcgggcgcgcggccgcacgctggagccctacccgttggtgatcgcgggggagcacaacatcccgtggctgctgcacctgcccggctcggggcgcctcgtggagggcgaggtctacgcggtagacgagcggatgctgcgctttctggatgacttcgagagttgcccggccctgtaccagcgcacggtgctgcgggtacagctgctggaggaccgggccccgggcgcagaggagccgccagcgcccaccgcggtgcagtgcttcgtgtacagcagggccaccttcccgccggagtgggcccagctcccgcaccatgacagctacgactccgaggggccgcacgggctgcgctacaacccccgggagaacagataagggggacgggcagggtgggcctaggtttgagagccctggggctccaagatgcgcccagcccatgctgggtgaaggcggaagccgaacagggccctttccaatgaatctgccggaaaggaaccaatctttcagtggcagctgattttacaaataatgttgagatacgaatagcaaggtgcttccctcccatctttctacctggtaagaaaaatttaggattttaactcccctaaatgacatttagagaactcgtgttatgcctaattcttcttcctcctcgtgttgtttctgctgttggctctgctttgagctcaagataataataaatatttaggatcagtgtaaagacttggtgttgccgctagattttagcagccctactatactgattctggcctgtaacccctgagaaagccgattttacacggctgggtagaatttgtagaaaagatccacagggcaagcatgctgtatatcagagtgcgtatagcaccattcttcctaattttcagatcaagcttcacagcaaatattaaagattatttaaatttgaagtcgatgttttgggaaatcagatataaaagtgttggtactgtgtttgacccccacgttttttggtatacttatttggtagaaggttctttacattctgatctagcaaaataatgaacacccacttgctggtagacacagctgagcgcccggacttcaagtggaagtttatctgagcccagatctcagtagccagaccccgtccctgccccctgaagggagagcatttgggggtgagtcctttcaaagaagagccaatgcattagtaatttgttcttcaggcctgacagaagcttagcttccaaatacaaacagcacttaaaataattttagcaaggcacgaagtaccaattactacccacctccatctgataattgtcagcatcgattcaactcggtgcacggctcttgcttctgcttcccagcaaagtctgaaatgtattccaaggatttcagaaccaaatgaaaatgcagctgctgtgatctttagtaacctcattctctgttgggagagctcacttactcttcaacttaatggcagactgtgatcgctaactgcatctggcacaaaaacatgatcattatttttagcttcttttgcttaattggaaacttgcttcacaaaaaacacaaaaaggctacgctgggtctcagctgatgagctcgtggcggccctgtgcttgatgagggcggtgaggcagcccaagctccttgtgactgccctggcttgtgcaatggggaagggaccaggcagcgcgctcatcctcaaaacaaacaaaaacagtggagacagcacccccggccaaccaggaagcttcagggtgacctccaggggagtcagccaccaacagtacacccacatagagacacagcaggaaagggattgccaaaatctgcatttgcagtctctggtccttaggaagttttgaaaatcagcaccaggagtgagggcctcacttctagaagtagtaaggcaatcagatgaaaaaatggcaagtgctaatttaataaagcaaggcagagaactgactgacatttatatcaatctcttaaaaggatcacaaagaaatgctggtagtctactggcagagcctgtcgcctatgtgtacattgtcttcattcaaagaaagggcaaactaatatttagacaaatgctcagttttattgatttaattttgacactagggaatctcacagcagaagtacaaatcatatgtacaagtatttatatcaatgaaaatttccattggtgattttttggcagaatattggtcttgactctgtggaataaatgacgacgtaaacgtagctgcacaggggtgttcctgtataatgcttgaatcaattgtgtgtgaaagcatcatgcaaatggctaattaaattgggtgatgactgaaaggttataaatccttca

SEQ ID NO: 136479 - DNA, 455 bp, Homo sapiens
  Payload ID: 6705
  Gene Symbol: GGACT
  Gene Name: gamma-glutamylamine cyclotransferase
  ENST ID: ENST00000464500
  CDS Start-End: 378-455
gtgtgggtgctgagctccgctgcgtcagactgccaggacctgagtggaactcagtgctgaaacctgggttctcactgcagctggatagcaggtggttacaaaattatatgtatttttagggttatttctaatttttctttaatagttattggcaattttcaaagtcctttaagaaacactgaaaactgctcaagaaaatggcagttctgcagggctcaggtagcagggcaggctgttgggacaggtttgacagactgtcctaatacaaggagcgccttttcccagatcagcagctctagagggtggcggccttgcctggaacctccgcaacctccgcgcccaccacacaagggctgagaacagtaagctctgcccggatggccctagtcttcgtgtacggcaccctgaagcggggtcagcccaaccacagggtcctgcgggacggcgcccacggc

SEQ ID NO: 136480 - DNA, 498 bp, Homo sapiens
  Payload ID: 6705
  Gene Symbol: GGACT
  Gene Name: gamma-glutamylamine cyclotransferase
  ENST ID: ENST00000492399
  CDS Start-End: 402-498
gagacagaagtgtcactctctccatagctgtaccattcctaccacctggcccccaagtggcattgctttaacccattgtctctagggaaaatgttctctttcgattttggttctcagtcctataatttctggggcttaaattagtcctggagctagggaagaggtgatgtcatccttccattgtctccttcggccacagtttcattttaagagtattggactgaaaactggatatttggtccccatggactttctggtcaccctgtgaagtggacttaactttttcttgaatcatgtggaaggattctgaagtcaaaagtttttaagactctcaggcttactgtggatctggattctaaggcaacacttccttgaagaaacaagcttacagctctgcccggatggccctagtcttcgtgtacggcaccctgaagcggggtcagcccaaccacagggtcctgcgggacggcgcccacggctccgcagcctttcgggcgc

SEQ ID NO: 136481 - DNA, 393 bp, Homo sapiens
  Payload ID: 6705
  Gene Symbol: GGACT
  Gene Name: gamma-glutamylamine cyclotransferase
  ENST ID: ENST00000471912
  CDS Start-End: 316-393
tgagcccgggcgggggtcggggctgcgcctgctccgccccccaggcggggtgtcctggcgcccgcgggaacctggggcgtcgctccctgcgcggcgtccgggtcgaggccgcagcactcggcgtccccgcgggactgaaaactggatatttggtccccatggactttctggtcaccctgtgaagtggacttaactttttcttgaatcatgtggaaggattctgaagtcaaaagtttttaagactctcaggcttactgtggatctggattctaaggcaacacttccttgaagaaacaagcttacagctctgcccggatggccctagtcttcgtgtacggcaccctgaagcggggtcagcccaaccacagggtcctgcgggacggcgcccacggc

SEQ ID NO: 136482 - DNA, 296 bp, Homo sapiens
  Payload ID: 6705
  Gene Symbol: GGACT
  Gene Name: gamma-glutamylamine cyclotransferase
  ENST ID: ENST00000467518
  CDS Start-End: 200-296
ggggaaacaccagaaggtgtgggtgctgagctccgctgcgtcagactgccaggacctgagtggaactcagtgctgaaacctgggttctcactgcagctggatagcagatcagcagctctagagggtggcggccttgcctggaacctccgcaacctccgcgcccaccacacaagggctgagaacagtaagctctgcccggatggccctagtcttcgtgtacggcaccctgaagcggggtcagcccaaccacagggtcctgcgggacggcgcccacggctccgcagcctttcgggcgc

SEQ ID NO: 136483 - DNA, 1032 bp, Homo sapiens
  Payload ID: 6706
  Gene Symbol: GGCT
  Gene Name: gamma-glutamylcyclotransferase
  Uniprot ID: O75223
  ENST ID: ENST00000005374
  CDS Start-End: 133-477
cttcccgccagtcccctaaccctgaggctgccgcgcggcggtcactgcgccggggtagtgggccccagtgttgcgctctctggccgttccttacactctgcttcaggctccagtgcaggggcgtagtgggatatggccaactcgggctgcaaggacgtcacgggtccagatgaggagagttttctgtactttgcctacggcagcaacctgctgacagagaggatccacctccgaaacccctcggcggcgttcttctgtgtggcccgcctgcaggattttaagcttgactttggcaattcccaaggcaaaacaagtcaaacttggcatggagggatagccaccatttttcagagtcctggcgatgaagtgtggggagtagtatggaaaatgaacaaaagcaatttaaattctctggatgaattatttgcatgggtgcaaaagaaaatggtttgccgctggagtatcaagagaagttaaaagcaatagaaccaaatgactatacaggaaaggtctcagaagaaattgaagacatcatcaaaaagggggaaacacaaactctttagaacataacagaatatatctaagggtattctatgtgctaatataaaatatttttaacacttgagaacagggatctgggggatctccacgtttgatccattttcagcagtgctctgaaggagtatcttacttgggtgattccttgtttttagactataaaaagaaactgggataggagttagacaatttaaaaggggtgtatgagggcctgaaatatgtgacaaatgaatgtgagtaccccttctgtgaacactgaaagctattctcttgaattgatcttaagtgtctccttgctctggtaaaagatagatttgtagctcacttgatgatggtgctggtgaattgctctgctctgtctgagatttttaaaaatcagcttaatgagagtaatctgcagacaattgataataacattttgaaaattggaaagatggtatactgtttttagaggaataaacgtatttgtggttt

SEQ ID NO: 136484 - DNA, 1173 bp, Homo sapiens
  Payload ID: 6706
  Gene Symbol: GGCT
  Gene Name: gamma-glutamylcyclotransferase
  Uniprot ID: O75223
  ENST ID: ENST00000275428
  CDS Start-End: 136-702
acgcttcccgccagtcccctaaccctgaggctgccgcgcggcggtcactgcgccggggtagtgggccccagtgttgcgctctctggccgttccttacactctgcttcaggctccagtgcaggggcgtagtgggatatggccaactcgggctgcaaggacgtcacgggtccagatgaggagagttttctgtactttgcctacggcagcaacctgctgacagagaggatccacctccgaaacccctcggcggcgttcttctgtgtggcccgcctgcaggattttaagcttgactttggcaattcccaaggcaaaacaagtcaaacttggcatggagggatagccaccatttttcagagtcctggcgatgaagtgtggggagtagtatggaaaatgaacaaaagcaatttaaattctctggatgagcaagaaggggttaaaagtggaatgtatgttgtaatagaagttaaagttgcaactcaagaaggaaaagaaataacctgtcgaagttatctgatgacaaattacgaaagtgctcccccatccccacagtataaaaagattatttgcatgggtgcaaaagaaaatggtttgccgctggagtatcaagagaagttaaaagcaatagaaccaaatgactatacaggaaaggtctcagaagaaattgaagacatcatcaaaaagggggaaacacaaactctttagaacataacagaatatatctaagggtattctatgtgctaatataaaatatttttaacacttgagaacagggatctgggggatctccacgtttgatccattttcagcagtgctctgaaggagtatcttacttgggtgattccttgtttttagactataaaaagaaactgggataggagttagacaatttaaaaggggtgtatgagggcctgaaatatgtgacaaatgaatgtgagtaccccttctgtgaacactgaaagctattctcttgaattgatcttaagtgtctccttgctctggtaaaagatagatttgtagctcacttgatgatggtgctggtgaattgctctgctctgtctgagatttttaaaaatcagcttaatgagagtaatctgcagacaattgataataacattttgaaaattggaaagatggtatactgtttttagaggaataaacgtatttgtggtttaa

SEQ ID NO: 136485 - DNA, 836 bp, Homo sapiens
  Payload ID: 6706
  Gene Symbol: GGCT
  Gene Name: gamma-glutamylcyclotransferase
  Uniprot ID: O75223
  ENST ID: ENST00000409144
  CDS Start-End: 93-377
gtcactgcgccggggtagtgggccccagtgttgcgctctctggccgttccttacactctgcttcaggctccagtgcaggggcgtagtgggatatggccaactcgggctgcaaggacgtcacgggtccagatgaggagagttttctgtactttgcctacggcagcaacctgctgacagagaggatccacctccgaaacccctcggcggcgttcttctgtgtggcccgcctgcagattatttgcatgggtgcaaaagaaaatggtttgccgctggagtatcaagagaagttaaaagcaatagaaccaaatgactatacaggaaaggtctcagaagaaattgaagacatcatcaaaaagggggaaacacaaactctttagaacataacagaatatatctaagggtattctatgtgctaatataaaatatttttaacacttgagaacagggatctgggggatctccacgtttgatccattttcagcagtgctctgaaggagtatcttacttgggtgattccttgtttttagactataaaaagaaactgggataggagttagacaatttaaaaggggtgtatgagggcctgaaatatgtgacaaatgaatgtgagtaccccttctgtgaacactgaaagctattctcttgaattgatcttaagtgtctccttgctctggtaaaagatagatttgtagctcacttgatgatggtgctggtgaattgctctgctctgtctgagatttttaaaaatcagcttaatgagagtaatctgcagacaattgataataacattttgaaaattggaaagatggtatactgtttttagaggaataaacgta

SEQ ID NO: 136486 - DNA, 954 bp, Homo sapiens
  Payload ID: 6706
  Gene Symbol: GGCT
  Gene Name: gamma-glutamylcyclotransferase
  ENST ID: ENST00000409436
  CDS Start-End: 108-608
ggctgccgcgcggcggtcactgcgccggggtagtgggccccagtgttgcgctctctggccgttccttacactctgcttcaggctccagtgcaggggcgtagtgggatatggccaactcgggctgcaaggacgtcacgggtccagatgaggagagttttctgtactttgcctacggcagcaacctgctgacagagaggatccacctccgaaacccctcggcggcgttcttctgtgtggcccgcctgcaggattttaagcttgactttggcaattcccaaggcaaaacaagtcaaacttggcatggagggatagccaccatttttcagagtcctggcgatgaagtgtggggagtagtatggaaaatgaacaaaagcaatttaaattctctggatgagcaagaaggggttaaaagtggaatgtatgttgtaatagaagttaaagttgcaactcaagaaggaaaagaaataacctgtcgaagttatctgatgacaaattacgaaagtgctcccccatccccacagtataaaaaggtggagaaagaaacgtcacactgcctttcagaatcagggaaatcacccttgcaagcacaagacaagaatgtgggatagagaccccaaaattcctgttcagaacctaagcttagctctctgttggcaggcccaatcaggtcatggcacctgtaataggtaatctggttcctaggcctcgtttggaattttttagtatgaaacctagagaaattagcctggtatagattatgaaagtaccgctaaacacagttgccatttattcccccatgtccaattcagagcaagggtaacctctggcgttgtaaccgaaactgctctctgtaaactttaaattttttttgaagaatggtattttttttcttaaaaggtcatataaattttatatagatatgtttgtcttaatattaaaatatttaaaatcata

SEQ ID NO: 136487 - DNA, 767 bp, Homo sapiens
  Payload ID: 6706
  Gene Symbol: GGCT
  Gene Name: gamma-glutamylcyclotransferase
  Uniprot ID: O75223
  ENST ID: ENST00000409390
  CDS Start-End: 91-591
cactgcgccggggtagtgggccccagtgttgcgctctctggccgttccttacactctgcttcaggctccagtgcaggggcgtagtgggatatggccaactcgggctgcaaggacgtcacgggtccagatgaggagagttttctgtactttgcctacggcagcaacctgctgacagagaggatccacctccgaaacccctcggcggcgttcttctgtgtggcccgcctgcaggattttaagcttgactttggcaattcccaaggcaaaacaagtcaaacttggcatggagggatagccaccatttttcagagtcctggcgatgaagtgtggggagtagtatggaaaatgaacaaaagcaatttaaattctctggatgagtggagaaagaaacgtcacactgcctttcagaatcagggaaatcacccttgcaagcacaagacaagaatgtgggatagagaccccaaaattcctgttcagaacctaagcttagctctctgttggcaggcccaatcaggtcatggcacctgtaatagattatttgcatgggtgcaaaagaaaatggtttgccgctggagtatcaagagaagttaaaagcaatagaaccaaatgactatacaggaaaggtctcagaagaaattgaagacatcatcaaaaagggggaaacacaaactctttagaacataacagaatatatctaagggtattctatgtgctaatataaaatatttttaacacttgagaacagggatctgggggatctccacgtt

SEQ ID NO: 136488 - DNA, 784 bp, Homo sapiens
  Payload ID: 6706
  Gene Symbol: GGCT
  Gene Name: gamma-glutamylcyclotransferase
  ENST ID: ENST00000447901
  CDS Start-End: 93-248
gtcactgcgccggggtagtgggccccagtgttgcgctctctggccgttccttacactctgcttcaggctccagtgcaggggcgtagtgggatatggccaactcgggctgcaaggacgtcacgggtccagatgaggagagttttctgtactttgcctacggcagcaacctgctgacagagaggatccacctccgaaacccctcggcggcgttcttctgtgtggcccgcctgcaggcaagaaggggttaaaagtggaatgtatgttgtaatagaagttaaagttgcaactcaagaaggaaaagaaataacctgtcgaagttatctgatgacaaattacgaaagtgctcccccatccccacagtataaaaaggtggagaaagaaacgtcacactgcctttcagaatcagggaaatcacccttgcaagcacaagacaagaatgtgggatagagaccccaaaattcctgttcagaacctaagcttagctctctgttggcaggcccaatcaggtcatggcacctgtaatagattatttgcatgggtgcaaaagaaaatggtttgccgctggagtatcaagagaagttaaaagcaatagaaccaaatgactatacaggaaaggtctcagaagaaattgaagacatcatcaaaaagggggaaacacaaactctttagaacataacagaatatatctaagggtattctatgtgctaatataaaatatttttaacacttgagaacagggatctgggggatctccacgtttgatccattttcagcagtgctctga

SEQ ID NO: 136489 - DNA, 889 bp, Homo sapiens
  Payload ID: 6706
  Gene Symbol: GGCT
  Gene Name: gamma-glutamylcyclotransferase
  ENST ID: ENST00000426081
  CDS Start-End: 1-359
attttaagcttgactttggcaattcccaaggcaaaacaagtcaaacttggcatggagggatagccaccatttttcagagtcctggcgatgaagtgtggggagtagtatggaaaatgaacaaaagcaatttaaattctctggatgagcaagaaggggttaaaagtggaatgtatgttgtaatagaagttaaagttgcaactcaagaaggaaaagaaataacctgtcgaagttatctgatgacaaattacgaaagtgctcccccatccccacagtataaaaaggtggagaaagaaacgtcacactgcctttcagaatcagggaaatcacccttgcaagcacaagacaagaatgtgggatagagaccccaaaattcctgttcagaacctaagcttagctctctgttggcaggcccaatcaggtcatggcacctgtaatagattatttgcatgggtgcaaaagaaaatggtttgccgctggagtatcaagagaagttaaaagcaatagaaccaaatgactatacaggaaaggtctcagaagaaattgaagacatcatcaaaaagggggaaacacaaactctttagaacataacagaatatatctaagggtattctatgtgctaatataaaatatttttaacacttgagaacagggatctgggggatctccacgtttgatccattttcagcagtgctctgaaggagtatcttacttgggtgattccttgtttttagactataaaaagaaactgggataggagttagacaatttaaaaggggtgtatgagggcctgaaatatgtgacaaatgaatgtgagtaccccttctgtgaacactgaaagctattctcttgaattgatcttaagtgtctccttgctctggtaaaagataga

SEQ ID NO: 136490 - DNA, 1012 bp, Homo sapiens
  Payload ID: 6706
  Gene Symbol: GGCT
  Gene Name: gamma-glutamylcyclotransferase
  ENST ID: ENST00000440082
  CDS Start-End: 121-276
cccctaaccctgaggctgccgcgcggcggtcactgcgccggggtagtgggccccagtgttgcgctctctggccgttccttacactctgcttcaggctccagtgcaggggcgtagtgggatatggccaactcgggctgcaaggacgtcacgggtccagatgaggagagttttctgtactttgcctacggcagcaacctgctgacagagaggatccacctccgaaacccctcggcggcgttcttctgtgtggcccgcctgcaggcaagaaggggttaaaagtggaatgtatgttgtaatagaagttaaagttgcaactcaagaaggaaaagaaataacctgtcgaagttatctgatgacaaattacgaaagtgctcccccatccccacagtataaaaagattatttgcatgggtgcaaaagaaaatggtttgccgctggagtatcaagagaagttaaaagcaatagaaccaaatgactatacaggaaaggtctcagaagaaattgaagacatcatcaaaaagggggaaacacaaactctttagaacataacagaatatatctaagggtattctatgtgctaatataaaatatttttaacacttgagaacagggatctgggggatctccacgtttgatccattttcagcagtgctctgaaggagtatcttacttgggtgattccttgtttttagactataaaaagaaactgggataggagttagacaatttaaaaggggtgtatgagggcctgaaatatgtgacaaatgaatgtgagtaccccttctgtgaacactgaaagctattctcttgaattgatcttaagtgtctccttgctctggtaaaagatagatttgtagctcacttgatgatggtgctggtgaattgctctgctctgtctgagatttttaaaaatcagcttaatgagagtaatctgcagacaattgataataacattttgaaaattggaaagatggtatactgtttttagaggaataaacgtatttgtggtttaa

SEQ ID NO: 136491 - DNA, 2326 bp, Homo sapiens
  Payload ID: 6707
  Gene Symbol: GGT1
  Gene Name: gamma-glutamyltransferase 1
  Uniprot ID: P19440
  ENST ID: ENST00000248923
  CDS Start-End: 488-2197
gcctggattctcccagagattgcctggaacaccagctcgggtcctcgcacaccatcctgcgggtgcagcccagaactgtcttctgaggaagaggtgctctcctgggcccccactgtccccaggcctcagcaaggcaagtgaggtgctgccgtcatccaggctggacagttcagtgatttgcctgaggccccacagcagagttcaactggagacagagaaaccagctagaggcagagggaggtaacacggagtcccccagaaaggtctgggctgcgcgtgcttcaggtaacctcccttgaccttcaggagaacgagaaggctgcctgatcagagagtccctgaagaagattctgtggctacaggcttcagcagagtgtgagggagaccccggttatttcctcagctatttccaccaaatcctcctgtctttcgtggccaacaccccaggcaaggcttggggcccccgtctgctgctggacgcagagccatgaagaagaagttagtggtgctgggcctgctggccgtggtcctggtgctggtcattgtcggcctctgtctctggctgccctcagcctccaaggaacctgacaaccatgtgtacaccagggctgccgtggccgcggatgccaagcagtgctcgaagattgggagggatgcactgcgggacggtggctctgcggtggatgcagccattgcagccctgttgtgtgtggggctcatgaatgcccacagcatgggcatcgggggtggcctcttcctcaccatctacaacagcaccacacgaaaagctgaggtcatcaacgcccgcgaggtggcccccaggctggcctttgccaccatgttcaacagctcggagcagtcccagaagggggggctgtcggtggcggtgcctggggagatccgaggctatgagctggcacaccagcggcatgggcggctgccctgggctcgcctcttccagcccagcatccagctggcccgccagggcttccccgtgggcaagggcttggcggcagccctggaaaacaagcggaccgtcatcgagcagcagcctgtcttgtgtgaggtgttctgccgggatagaaaggtgcttcgggagggggagagactgaccctgccgcagctggctgacacctacgagacgctggccatcgagggtgcccaggccttctacaacggcagcctcacggcccagattgtgaaggacatccaggcggccgggggcattgtgacagctgaggacctgaacaactaccgtgctgagctgatcgagcacccgctgaacatcagcctgggagacgtggtgctgtacatgcccagtgcgccgctcagcgggcccgtgctggccctcatcctcaacatcctcaaagggtacaacttctcccgggagagcgtggagagccccgagcagaagggcctgacgtaccaccgcatcgtagaggctttccggtttgcctacgccaagaggaccctgcttggggaccccaagtttgtggatgtgactgaggtggtccgcaacatgacctccgagttcttcgctgcccagctccgggcccagatctctgacgacaccactcacccgatctcctactacaagcccgagttctacacgccggatgacgggggcactgctcacctgtctgtcgtcgcagaggacggcagtgctgtgtccgccaccagcaccatcaacctctactttggctccaaggtccgctccccggtcagcgggatcctgttcaataatgaaatggacgacttcagctctcccagcatcaccaacgagtttggggtacccccctcacctgccaatttcatccagccagggaagcagccgctctcgtccatgtgcccgacgatcatggtgggccaggacggccaggtccggatggtggtgggagctgctgggggcacacagatcaccacggccactgcactggccatcatctacaacctctggttcggctatgacgtgaagcgggccgtggaggagccccggctgcacaaccagcttctgcccaacgtcacgacagtggagagaaacattgaccaggcagtgactgcagccctggagacccggcaccatcacacccagatcgcgtccaccttcatcgctgtggtgcaagccatcgtccgcacggctggtggctgggcagctgcctcggactccaggaaaggcggggagcctgccggctactgagtgctccaggaggacaaggctgacaagcaatccagggacaagatactcaccaggaccaggaaggggactctgggggaccggcttcccctgtgagcagcagagcagcacaataaatgaggccactgtgcc

SEQ ID NO: 136492 - DNA, 2540 bp, Homo sapiens
  Payload ID: 6707
  Gene Symbol: GGT1
  Gene Name: gamma-glutamyltransferase 1
  Uniprot ID: P19440
  ENST ID: ENST00000400380
  CDS Start-End: 669-2378
cagaccgggcgtcgggtgagcccagaagtgagagcagttggctgtgccccagtgctgtgtgacccagaggcgccgctcaccctctctgagctggtggacatcatagcgggtgcagcccagaactgtcttctgaggaagaggtgctctcctgggcccccactgtccccaggcctcagatgctgcatattgctggcccagctcctgaggctctttggacctccaggaatcggtgtctctatcaggaacccttaaccctgacccggactcccagctgggacccggggtgtcggagtggcaagagcgctgtcaggcctggtgaagggtgtgagctgtccaacggggcagggaggaggcagggcctgttctgcagttggacagacagagccctctagctgctttctggaagactgaagggcagcaaggcaagtgaggtgctgccgtcatccaggctggacagttcagtgatttgcctgaggccccacagcaggagaacgagaaggctgcctgatcagagagtccctgaagaagattctgtggctacaggcttcagcagagtgtgagggagaccccggttatttcctcagctatttccaccaaatcctcctgtctttcgtggccaacaccccaggcaaggcttggggcccccgtctgctgctggacgcagagccatgaagaagaagttagtggtgctgggcctgctggccgtggtcctggtgctggtcattgtcggcctctgtctctggctgccctcagcctccaaggaacctgacaaccatgtgtacaccagggctgccgtggccgcggatgccaagcagtgctcgaagattgggagggatgcactgcgggacggtggctctgcggtggatgcagccattgcagccctgttgtgtgtggggctcatgaatgcccacagcatgggcatcgggggtggcctcttcctcaccatctacaacagcaccacacgaaaagctgaggtcatcaacgcccgcgaggtggcccccaggctggcctttgccaccatgttcaacagctcggagcagtcccagaagggggggctgtcggtggcggtgcctggggagatccgaggctatgagctggcacaccagcggcatgggcggctgccctgggctcgcctcttccagcccagcatccagctggcccgccagggcttccccgtgggcaagggcttggcggcagccctggaaaacaagcggaccgtcatcgagcagcagcctgtcttgtgtgaggtgttctgccgggatagaaaggtgcttcgggagggggagagactgaccctgccgcagctggctgacacctacgagacgctggccatcgagggtgcccaggccttctacaacggcagcctcacggcccagattgtgaaggacatccaggcggccgggggcattgtgacagctgaggacctgaacaactaccgtgctgagctgatcgagcacccgctgaacatcagcctgggagacgtggtgctgtacatgcccagtgcgccgctcagcgggcccgtgctggccctcatcctcaacatcctcaaagggtacaacttctcccgggagagcgtggagagccccgagcagaagggcctgacgtaccaccgcatcgtagaggctttccggtttgcctacgccaagaggaccctgcttggggaccccaagtttgtggatgtgactgaggtggtccgcaacatgacctccgagttcttcgctgcccagctccgggcccagatctctgacgacaccactcacccgatctcctactacaagcccgagttctacacgccggatgacgggggcactgctcacctgtctgtcgtcgcagaggacggcagtgctgtgtccgccaccagcaccatcaacctctactttggctccaaggtccgctccccggtcagcgggatcctgttcaataatgaaatggacgacttcagctctcccagcatcaccaacgagtttggggtacccccctcacctgccaatttcatccagccagggaagcagccgctctcgtccatgtgcccgacgatcatggtgggccaggacggccaggtccggatggtggtgggagctgctgggggcacacagatcaccacggccactgcactggccatcatctacaacctctggttcggctatgacgtgaagcgggccgtggaggagccccggctgcacaaccagcttctgcccaacgtcacgacagtggagagaaacattgaccaggcagtgactgcagccctggagacccggcaccatcacacccagatcgcgtccaccttcatcgctgtggtgcaagccatcgtccgcacggctggtggctgggcagctgcctcggactccaggaaaggcggggagcctgccggctactgagtgctccaggaggacaaggctgacaagcaatccagggacaagatactcaccaggaccaggaaggggactctgggggaccggcttcccctgtgagcagcagagcagcacaataaatgaggccactgtgccaggctccaggtggcctccctggcctgtctcccc

SEQ ID NO: 136493 - DNA, 2628 bp, Homo sapiens
  Payload ID: 6707
  Gene Symbol: GGT1
  Gene Name: gamma-glutamyltransferase 1
  Uniprot ID: P19440
  ENST ID: ENST00000400382
  CDS Start-End: 756-2465
gtgctgctggatgaccagaccgggcgtcgggtgagcccagaagtgagagcagttggctgtgccccagtgctgtgtgacccagaggcgccgctcaccctctctgagctggtggacatcataggtggggaagctcaggtcagggcactcccatgagtgtctggaggcctgagtcccattctcagctctgccatatgcttgctgcgctctagaggagttcctcttcctctccaagcctcggtttatgtacccgtgcagtgggagtgagttgcacttcggggtgaagggggcaagacttgtgtgggcgcatcctgcagaaggatcccacagcgggtgcagcccagaactgtcttctgaggaagaggtgctctcctgggcccccactgtccccaggcctcagcaaggcaagtgaggtgctgccgtcatccaggctggacagttcagtgatttgcctgaggccccacagcagagttcaactggagacagagaaaccagctagaggcagagggaggtaacacggagtcccccagaaaggtctgggctgcgcgtgcttcaggtaacctcccttgaccttcaggagaacgagaaggctgcctgatcagagagtccctgaagaagattctgtggctacaggcttcagcagagtgtgagggagaccccggttatttcctcagctatttccaccaaatcctcctgtctttcgtggccaacaccccaggcaaggcttggggcccccgtctgctgctggacgcagagccatgaagaagaagttagtggtgctgggcctgctggccgtggtcctggtgctggtcattgtcggcctctgtctctggctgccctcagcctccaaggaacctgacaaccatgtgtacaccagggctgccgtggccgcggatgccaagcagtgctcgaagattgggagggatgcactgcgggacggtggctctgcggtggatgcagccattgcagccctgttgtgtgtggggctcatgaatgcccacagcatgggcatcgggggtggcctcttcctcaccatctacaacagcaccacacgaaaagctgaggtcatcaacgcccgcgaggtggcccccaggctggcctttgccaccatgttcaacagctcggagcagtcccagaagggggggctgtcggtggcggtgcctggggagatccgaggctatgagctggcacaccagcggcatgggcggctgccctgggctcgcctcttccagcccagcatccagctggcccgccagggcttccccgtgggcaagggcttggcggcagccctggaaaacaagcggaccgtcatcgagcagcagcctgtcttgtgtgaggtgttctgccgggatagaaaggtgcttcgggagggggagagactgaccctgccgcagctggctgacacctacgagacgctggccatcgagggtgcccaggccttctacaacggcagcctcacggcccagattgtgaaggacatccaggcggccgggggcattgtgacagctgaggacctgaacaactaccgtgctgagctgatcgagcacccgctgaacatcagcctgggagacgtggtgctgtacatgcccagtgcgccgctcagcgggcccgtgctggccctcatcctcaacatcctcaaagggtacaacttctcccgggagagcgtggagagccccgagcagaagggcctgacgtaccaccgcatcgtagaggctttccggtttgcctacgccaagaggaccctgcttggggaccccaagtttgtggatgtgactgaggtggtccgcaacatgacctccgagttcttcgctgcccagctccgggcccagatctctgacgacaccactcacccgatctcctactacaagcccgagttctacacgccggatgacgggggcactgctcacctgtctgtcgtcgcagaggacggcagtgctgtgtccgccaccagcaccatcaacctctactttggctccaaggtccgctccccggtcagcgggatcctgttcaataatgaaatggacgacttcagctctcccagcatcaccaacgagtttggggtacccccctcacctgccaatttcatccagccagggaagcagccgctctcgtccatgtgcccgacgatcatggtgggccaggacggccaggtccggatggtggtgggagctgctgggggcacacagatcaccacggccactgcactggccatcatctacaacctctggttcggctatgacgtgaagcgggccgtggaggagccccggctgcacaaccagcttctgcccaacgtcacgacagtggagagaaacattgaccaggcagtgactgcagccctggagacccggcaccatcacacccagatcgcgtccaccttcatcgctgtggtgcaagccatcgtccgcacggctggtggctgggcagctgcctcggactccaggaaaggcggggagcctgccggctactgagtgctccaggaggacaaggctgacaagcaatccagggacaagatactcaccaggaccaggaaggggactctgggggaccggcttcccctgtgagcagcagagcagcacaataaatgaggccactgtgccaggctccaggtggcctccctggcctgtctcccca

SEQ ID NO: 136494 - DNA, 968 bp, Homo sapiens
  Payload ID: 6707
  Gene Symbol: GGT1
  Gene Name: gamma-glutamyltransferase 1
  Uniprot ID: P19440
  ENST ID: ENST00000401885
  CDS Start-End: 134-811
attgaatgcagcaagggtctggaggctgaggaccaggcagacagacattcagagttgctggaacgcgacagagacagggagtcagactggtcatgcaaggccagctctggggtctcggcaggtggtccgcaacatgacctccgagttcttcgctgcccagctccgggcccagatctctgacgacaccactcacccgatctcctactacaagcccgagttctacacgccggatgacgggggcactgctcacctgtctgtcgtcgcagaggacggcagtgctgtgtccgccaccagcaccatcaacctctactttggctccaaggtccgctccccggtcagcgggatcctgttcaataatgaaatggacgacttcagctctcccagcatcaccaacgagtttggggtacccccctcacctgccaatttcatccagccagggaagcagccgctctcgtccatgtgcccgacgatcatggtgggccaggacggccaggtccggatggtggtgggagctgctgggggcacacagatcaccacggccactgcactggccatcatctacaacctctggttcggctatgacgtgaagcgggccgtggaggagccccggctgcacaaccagcttctgcccaacgtcacgacagtggagagaaacattgaccaggcagtgactgcagccctggagacccggcaccatcacacccagatcgcgtccaccttcatcgctgtggtgcaagccatcgtccgcacggctggtggctgggcagctgcctcggactccaggaaaggcggggagcctgccggctactgagtgctccaggaggacaaggctgacaagcaatccagggacaagatactcaccaggaccaggaaggggactctgggggaccggcttcccctgtgagcagcagagcagcacaataaatgaggccactgtgccaggctccaggtggcctccctggcctgtc

SEQ ID NO: 136495 - DNA, 1033 bp, Homo sapiens
  Payload ID: 6707
  Gene Symbol: GGT1
  Gene Name: gamma-glutamyltransferase 1
  Uniprot ID: P19440
  ENST ID: ENST00000403838
  CDS Start-End: 190-867
agggagtcagactggtcatgcaaggtcctgggcctgcccttgggtcctggggagccacggaaggttgtgggtgccagagggttgcggtcagagtcacagtcaagggccttctgagacctgtgccccctccccaccctccctccccacctcctcaggccagctctggggtctcggcaggtggtccgcaacatgacctccgagttcttcgctgcccagctccgggcccagatctctgacgacaccactcacccgatctcctactacaagcccgagttctacacgccggatgacgggggcactgctcacctgtctgtcgtcgcagaggacggcagtgctgtgtccgccaccagcaccatcaacctctactttggctccaaggtccgctccccggtcagcgggatcctgttcaataatgaaatggacgacttcagctctcccagcatcaccaacgagtttggggtacccccctcacctgccaatttcatccagccagggaagcagccgctctcgtccatgtgcccgacgatcatggtgggccaggacggccaggtccggatggtggtgggagctgctgggggcacacagatcaccacggccactgcactggccatcatctacaacctctggttcggctatgacgtgaagcgggccgtggaggagccccggctgcacaaccagcttctgcccaacgtcacgacagtggagagaaacattgaccaggcagtgactgcagccctggagacccggcaccatcacacccagatcgcgtccaccttcatcgctgtggtgcaagccatcgtccgcacggctggtggctgggcagctgcctcggactccaggaaaggcggggagcctgccggctactgagtgctccaggaggacaaggctgacaagcaatccagggacaagatactcaccaggaccaggaaggggactctgggggaccggcttcccctgtgagcagcagagcagcacaataaatgaggccactgtgccaggctccaggtggcctccctggcctgtctccccactc

SEQ ID NO: 136496 - DNA, 657 bp, Homo sapiens
  Payload ID: 6707
  Gene Symbol: GGT1
  Gene Name: gamma-glutamyltransferase 1
  ENST ID: ENST00000404920
  CDS Start-End: 1-657
atgacctccgagttcttcgctgcccagctccgggcccagatctctgacgacaccactcacccgatctcctactacaagcccgagttctacacgccggatgacgggggcactgctcacctgtctgtcgtcgcagaggacggcagtgctgtgtccgccaccagcaccatcaacctctactttggctccaaggtccgctccccggtcagcgggatcctgttcaataatgaaatggacgacttcagctctcccagcatcaccaacgagtttggggtacccccctcacctgccaatttcatccagccagggaagcagccgctctcgtccatgtgcccgacgatcatggtgggccaggacggccagcccccaagccatgctgatcacactcccatgccccaggccatcatctacaacctctggttcggctatgacgtgaagcgggccgtggaggagccccggctgcacaaccagcttctgcccaacgtcacgacagtggagagaaacattgaccaggcagtgactgcagccctggagacccggcaccatcacacccagatcgcgtccaccttcatcgctgtggtgcaagccatcgtccgcacggctggtggctgggcagctgcctcggactccaggaaaggcggggagcctgccggctactga

SEQ ID NO: 136497 - DNA, 952 bp, Homo sapiens
  Payload ID: 6707
  Gene Symbol: GGT1
  Gene Name: gamma-glutamyltransferase 1
  ENST ID: ENST00000404223
  CDS Start-End: 37-795
aggccagctctggggtctcggcaggtggtccgcaacatgacctccgagttcttcgctgcccagctccgggcccagatctctgacgacaccactcacccgatctcctactacaagcccgagttctacacgccggatgacgggggcactgctcacctgtctgtcgtcgcagaggacggcagtgctgtgtccgccaccagcaccatcaacctctactttggctccaaggtccgctccccggtcagcgggatcctgttcaataatgaaatggacgacttcagctctcccagcatcaccaacgagtttggggtacccccctcacctgccaatttcatccagccagggaagcagccgctctcgtccatgtgcccgacgatcatggtgggccaggacggccaggtccggatggtggtgggagctgctgggggcacacagatcaccacggccactgcactggtatgtgtcacaccttttctccctggccgtgcccaccctgcacagcccccaagccatgctgatcacactcccatgccccaggccatcatctacaacctctggttcggctatgacgtgaagcgggccgtggaggagccccggctgcacaaccagcttctgcccaacgtcacgacagtggagagaaacattgaccaggcagtgactgcagccctggagacccggcaccatcacacccagatcgcgtccaccttcatcgctgtggtgcaagccatcgtccgcacggctggtggctgggcagctgcctcggactccaggaaaggcggggagcctgccggctactgagtgctccaggaggacaaggctgacaagcaatccagggacaagatactcaccaggaccaggaaggggactctgggggaccggcttcccctgtgagcagcagagcagcacaataaatgaggccactgtgccaggctccaggtggcctccctggcctgtc

SEQ ID NO: 136498 - DNA, 853 bp, Homo sapiens
  Payload ID: 6707
  Gene Symbol: GGT1
  Gene Name: gamma-glutamyltransferase 1
  Uniprot ID: P19440
  ENST ID: ENST00000404532
  CDS Start-End: 40-717
gacagggagtcagactggtcatgcaaggtggtccgcaacatgacctccgagttcttcgctgcccagctccgggcccagatctctgacgacaccactcacccgatctcctactacaagcccgagttctacacgccggatgacgggggcactgctcacctgtctgtcgtcgcagaggacggcagtgctgtgtccgccaccagcaccatcaacctctactttggctccaaggtccgctccccggtcagcgggatcctgttcaataatgaaatggacgacttcagctctcccagcatcaccaacgagtttggggtacccccctcacctgccaatttcatccagccagggaagcagccgctctcgtccatgtgcccgacgatcatggtgggccaggacggccaggtccggatggtggtgggagctgctgggggcacacagatcaccacggccactgcactggccatcatctacaacctctggttcggctatgacgtgaagcgggccgtggaggagccccggctgcacaaccagcttctgcccaacgtcacgacagtggagagaaacattgaccaggcagtgactgcagccctggagacccggcaccatcacacccagatcgcgtccaccttcatcgctgtggtgcaagccatcgtccgcacggctggtggctgggcagctgcctcggactccaggaaaggcggggagcctgccggctactgagtgctccaggaggacaaggctgacaagcaatccagggacaagatactcaccaggaccaggaaggggactctgggggaccggcttcccctgtgagcagcagagcagcacaataaatgaggccactgtgccaggctcc

SEQ ID NO: 136499 - DNA, 2632 bp, Homo sapiens
  Payload ID: 6707
  Gene Symbol: GGT1
  Gene Name: gamma-glutamyltransferase 1
  Uniprot ID: P19440
  ENST ID: ENST00000425895
  CDS Start-End: 744-1844
ggcccaccaagcctggggaggtggccacccttccatgatggcatttggatgttccctgtgtgtggggagggcacagggactccattcgtagaccacctctgggacagtgtgtctgcctctgaggtcagacgctctgcactgggacagggtggagtggagggaaatccagcttggggctcattggaggggcttgctggcagacaccgccctttgtgggaaactgactgtgggagaggggaaccccaacctctgtcaccacatccctcttccctgttgtcacacctgtcacctgctgccatagccatgagacttcccaagggtcactgctgccactcactgcacagcctggaagggagtccacaggggacatacagtgagcaagagacctgtgccactcaggcctcctgggggtgtccccagtgcagccatgatgataatcacagctaccattcaccaagccctgcccacagtctaacctactctattcacaacactcccagcagcaaggcaagtgaggtgctgccgtcatccaggctggacagttcagtgatttgcctgaggccccacagcagagttcaactggagacagagaaaccagctagaggcagagggaggtaacacggagtcccccagaaaggtctgggctgcgcgtgcttcagctatttccaccaaatcctcctgtctttcgtggccaacaccccaggcaaggcttggggcccccgtctgctgctggacgcagagccatgaagaagaagttagtggtgctgggcctgctggccgtggtcctggtgctggtcattgtcggcctctgtctctggctgccctcagcctccaaggaacctgacaaccatgtgtacaccagggctgccgtggccgcggatgccaagcagtgctcgaagattgggagggatgcactgcgggacggtggctctgcggtggatgcagccattgcagccctgttgtgtgtggggctcatgaatgcccacagcatgggcatcgggggtggcctcttcctcaccatctacaacagcaccacacgaaaagctgaggtcatcaacgcccgcgaggtggcccccaggctggcctttgccaccatgttcaacagctcggagcagtcccagaagggggggctgtcggtggcggtgcctggggagatccgaggctatgagctggcacaccagcggcatgggcggctgccctgggctcgcctcttccagcccagcatccagctggcccgccagggcttccccgtgggcaagggcttggcggcagccctggaaaacaagcggaccgtcatcgagcagcagcctgtcttgtgtgaggtgttctgccgggatagaaaggtgcttcgggagggggagagactgaccctgccgcagctggctgacacctacgagacgctggccatcgagggtgcccaggccttctacaacggcagcctcacggcccagattgtgaaggacatccaggcggccgggggcattgtgacagctgaggacctgaacaactaccgtgctgagctgatcgagcacccgctgaacatcagcctgggagacgtggtgctgtacatgcccagtgcgccgctcagcgggcccgtgctggccctcatcctcaacatcctcaaagggtacaacttctcccgggagagcgtggagagccccgagcagaagggcctgacgtaccaccgcatcgtagaggctttccggtttgcctacgccaagaggaccctgcttggggaccccaagtttgtggatgtgactgaggccagctctggggtctcggcaggtggtccgcaacatgacctccgagttcttcgctgcccagctccgggcccagatctctgacgacaccactcacccgatctcctactacaagcccgagttctacacgccggatgacgggggcactgctcacctgtctgtcgtcgcagaggacggcagtgctgtgtccgccaccagcaccatcaacctctactttggctccaaggtccgctccccggtcagcgggatcctgttcaataatgaaatggacgacttcagctctcccagcatcaccaacgagtttggggtacccccctcacctgccaatttcatccagccagggaagcagccgctctcgtccatgtgcccgacgatcatggtgggccaggacggccaggtccggatggtggtgggagctgctgggggcacacagatcaccacggccactgcactggccatcatctacaacctctggttcggctatgacgtgaagcgggccgtggaggagccccggctgcacaaccagcttctgcccaacgtcacgacagtggagagaaacattgaccaggcagtgactgcagccctggagacccggcaccatcacacccagatcgcgtccaccttcatcgctgtggtgcaagccatcgtccgcacggctggtggctgggcagctgcctcggactccaggaaaggcggggagcctgccggctactgagtgctccaggaggacaaggctgacaagcaatccagggacaagatactcaccaggaccaggaaggggactctgggggaccggcttcccctgtgagcagcagagcagcacaataaatgaggccactgtgccaggctccaggtggcctccctggcctgtc

SEQ ID NO: 136500 - DNA, 853 bp, Homo sapiens
  Payload ID: 6707
  Gene Symbol: GGT1
  Gene Name: gamma-glutamyltransferase 1
  ENST ID: ENST00000451366
  CDS Start-End: 506-853
cctgcaccctgtgcagatgcctcccactgtccgccggggctgctgggcacgccctggctggtctcttggactagcgggtgcagcccagaactgtcttctgaggaagaggtgctctcctgggcccccactgtccccaggcctcagcagcaaggcaagtgaggtgctgccgtcatccaggctggacagttcagtgatttgcctgaggccccacagcagagttcaactggagacagagaaaccagctagaggcagagggaggtaacacggagtcccccagaaaggtctgggctgcgcgtgcttcaggtaacctcccttgaccttcaggagaacgagaaggctgcctgatcagagagtccctgaagaagattctgtggctacaggcttcagcagagtgtgagggagaccccggttatttcctcagctatttccaccaaatcctcctgtctttcgtggccaacaccccaggcaaggcttggggcccccgtctgctgctggacgcagagccatgaagaagaagttagtggtgctgggcctgctggccgtggtcctggtgctggtcattgtcggcctctgtctctggctgccctcagcctccaaggaacctgacaaccatgtgtacaccagggctgccgtggccgcggatgccaagcagtgctcgaagattgggagggatgcactgcgggacggtggctctgcggtggatgcagccattgcagccctgttgtgtgtggggctcatgaatgcccacagcatgggcatcgggggtggcctcttcctcaccatctacaacagcaccacacgaaaagctgaggtcatcaacgcccgcgaggtggcccccaggctggcctttgcc

SEQ ID NO: 136501 - DNA, 758 bp, Homo sapiens
  Payload ID: 6707
  Gene Symbol: GGT1
  Gene Name: gamma-glutamyltransferase 1
  ENST ID: ENST00000411974
  CDS Start-End: 397-758
ggtcagagctttaagctgcagctctgatgccccagggacctctcagacccccctgcccagagcaggcagcccgcgggtgcagcccagaactgtcttctgaggaagaggtgctctcctgggcccccactgtccccaggcctcagcagcaaggcaagtgaggtgctgccgtcatccaggctggacagttcagtgatttgcctgaggccccacagcaggagaacgagaaggctgcctgatcagagagtccctgaagaagattctgtggctacaggcttcagcagagtgtgagggagaccccggttatttcctcagctatttccaccaaatcctcctgtctttcgtggccaacaccccaggcaaggcttggggcccccgtctgctgctggacgcagagccatgaagaagaagttagtggtgctgggcctgctggccgtggtcctggtgctggtcattgtcggcctctgtctctggctgccctcagcctccaaggaacctgacaaccatgtgtacaccagggctgccgtggccgcggatgccaagcagtgctcgaagattgggagggatgcactgcgggacggtggctctgcggtggatgcagccattgcagccctgttgtgtgtggggctcatgaatgcccacagcatgggcatcgggggtggcctcttcctcaccatctacaacagcaccacacgaaaagctgaggtcatcaacgcccgcgaggtggcccccaggctggcctttgccaccatgttcaacag

SEQ ID NO: 136502 - DNA, 606 bp, Homo sapiens
  Payload ID: 6707
  Gene Symbol: GGT1
  Gene Name: gamma-glutamyltransferase 1
  ENST ID: ENST00000445029
  CDS Start-End: 404-606
cttagcttggttttggtgtgctgctggatgaccagaccgggcgtcgggtgagcccagaagtgagagcagttggctgtgccccagtgctgtgtgacccagaggcgccgctcaccctctctgagctggtggacatcataggtggggaagctcagcgggtgcagcccagaactgtcttctgaggaagaggtgctctcctgggcccccactgtccccaggcctcaggagaacgagaaggctgcctgatcagagagtccctgaagaagattctgtggctacaggcttcagcagagtgtgagggagaccccggttatttcctcagctatttccaccaaatcctcctgtctttcgtggccaacaccccaggcaaggcttggggcccccgtctgctgctggacgcagagccatgaagaagaagttagtggtgctgggcctgctggccgtggtcctggtgctggtcattgtcggcctctgtctctggctgccctcagcctccaaggaacctgacaaccatgtgtacaccagggctgccgtggccgcggatgccaagcagtgctcgaagattgggagggatgcactgcgggacggtggctctgcggtggatgcagc

SEQ ID NO: 136503 - DNA, 2091 bp, Homo sapiens
  Payload ID: 6707
  Gene Symbol: GGT1
  Gene Name: gamma-glutamyltransferase 1
  ENST ID: ENST00000412658
  CDS Start-End: 702-2091
aggggagggaaggaggagctgggtcacagcagggaatcttagcttggttttggtgtgctgctggatgaccagaccgggcgtcgggtgagcccagaagtgagagcagttggctgtgccccagtgctgtgtgacccagaggcgccgctcaccctctctgagctggtggacatcataggtggggaagctcaggtcagggcactcccatgagtgtctggaggcctgagtcccattctcagctctgccatatgcttgctgcgctctagaggagttcctcttcctctccaagcctcggtttatgtacccgtgcagtgggagtgagttgcacttcggggtgaagggggcaagacttgtgtgggcgcatcctgcagaaggatcccacagcgggtgcagcccagaactgtcttctgaggaagaggtgctctcctgggcccccactgtccccaggcctcagcaaggcaagtgaggtgctgccgtcatccaggctggacagttcagtgatttgcctgaggccccacagcaggagaacgagaaggctgcctgatcagagagtccctgaagaagattctgtggctacaggcttcagcagagtgtgagggagaccccggttatttcctcagctatttccaccaaatcctcctgtctttcgtggccaacaccccaggcaaggcttggggcccccgtctgctgctggacgcagagccatgaagaagaagttagtggtgctgggcctgctggccgtggtcctggtgctggtcattgtcggcctctgtctctggctgccctcagcctccaaggaacctgacaaccatgtgtacaccagggctgccgtggccgcggatgccaagcagtgctcgaagattgggagggatgcactgcgggacggtggctctgcggtggatgcagccattgcagccctgttgtgtgtggggctcatgaatgcccacagcatgggcatcgggggtggcctcttcctcaccatctacaacagcaccacacgaaaagctgaggtcatcaacgcccgcgaggtggcccccaggctggcctttgccaccatgttcaacagctcggagcagtcccagaagggggggctgtcggtggcggtgcctggggagatccgaggctatgagctggcacaccagcggcatgggcggctgccctgggctcgcctcttccagcccagcatccagctggcccgccagggcttccccgtgggcaagggcttggcggcagccctggaaaacaagcggaccgtcatcgagcagcagcctgtcttgtgtgaggtgttctgccgggatagaaaggtgcttcgggagggggagagactgaccctgccgcagctggctgacacctacgagacgctggccatcgagggtgcccaggccttctacaacggcagcctcacggcccagattgtgaaggacatccaggcggccgggggcattgtgacagctgaggacctgaacaactaccgtgctgagctgatcgagcacccgctgaacatcagcctgggagacgtggtgctgtacatgcccagtgcgccgctcagcgggcccgtgctggccctcatcctcaacatcctcaaagggtacaacttctcccgggagagcgtggagagccccgagcagaagggcctgacgtaccaccgcatcgtagaggctttccggtttgcctacgccaagaggaccctgcttggggaccccaagtttgtggatgtgactgaggtggtccgcaacatgacctccgagttcttcgctgcccagctccgggcccagatctctgacgacaccactcacccgatctcctactacaagcccgagttctacacgccggatgacgggggcactgctcacctgtctgtcgtcgcagaggacggcagtgctgtgtccgccaccagcaccatcaacctctactttggctccaaggtccgctccccggtcagcgggatcctgttcaataatgaaatggacgacttcagctctcccagcatcaccaacgagtttggggtacccccctcacctgccaatttcatccagccagggaagcagccgctctcgtccatgtgcccgacgatcatggtgggccaggacggcc

SEQ ID NO: 136504 - DNA, 1078 bp, Homo sapiens
  Payload ID: 6707
  Gene Symbol: GGT1
  Gene Name: gamma-glutamyltransferase 1
  ENST ID: ENST00000419133
  CDS Start-End: 556-1078
ggtgtgctgctggatgaccagaccgggcgtcgggtgagcccagaagtgagagcagttggctgtgccccagtgctgtgtgacccagaggcgccgctcaccctctctgagctggtggacatcatagcgggtgcagcccagaactgtcttctgaggaagaggtgctctcctgggcccccactgtccccaggcctcagcagcaaggcaagtgaggtgctgccgtcatccaggctggacagttcagtgatttgcctgaggccccacagcagagttcaactggagacagagaaaccagctagaggcagagggaggtaacacggagtcccccagaaaggtctgggctgcgcgtgcttcaggtaacctcccttgaccttcaggagaacgagaaggctgcctgatcagagagtccctgaagaagattctgtggctacaggcttcagcagagtgtgagggagaccccggttatttcctcagctatttccaccaaatcctcctgtctttcgtggccaacaccccaggcaaggcttggggcccccgtctgctgctggacgcagagccatgaagaagaagttagtggtgctgggcctgctggccgtggtcctggtgctggtcattgtcggcctctgtctctggctgccctcagcctccaaggaacctgacaaccatgtgtacaccagggctgccgtggccgcggatgccaagcagtgctcgaagattgggagggatgcactgcgggacggtggctctgcggtggatgcagccattgcagccctgttgtgtgtggggctcatgaatgcccacagcatgggcatcgggggtggcctcttcctcaccatctacaacagcaccacacgaaaagctgaggtcatcaacgcccgcgaggtggcccccaggctggcctttgccaccatgttcaacagctcggagcagtcccagaagggggggctgtcggtggcggtgcctggggagatccgaggctatgagctggcacaccagcggcatgggcggctgccctgggctcgcctcttccagcccagcatccagctggcccgccagggcttccccgtgggcaagggcttgg

SEQ ID NO: 136505 - DNA, 747 bp, Homo sapiens
  Payload ID: 6707
  Gene Symbol: GGT1
  Gene Name: gamma-glutamyltransferase 1
  ENST ID: ENST00000432867
  CDS Start-End: 415-747
tccgtgagaggcctgcctgtcctgcaccctgtgcagatgcctcccactgtccgccggggctgctgggcacgccctggctggtctcttggactagcgggtgcagcccagaactgtcttctgaggaagaggtgctctcctgggcccccactgtccccaggcctcagcaaggcaagtgaggtgctgccgtcatccaggctggacagttcagtgatttgcctgaggccccacagcaggagaacgagaaggctgcctgatcagagagtccctgaagaagattctgtggctacaggcttcagcagagtgtgagggagaccccggttatttcctcagctatttccaccaaatcctcctgtctttcgtggccaacaccccaggcaaggcttggggcccccgtctgctgctggacgcagagccatgaagaagaagttagtggtgctgggcctgctggccgtggtcctggtgctggtcattgtcggcctctgtctctggctgccctcagcctccaaggaacctgacaaccatgtgtacaccagggctgccgtggccgcggatgccaagcagtgctcgaagattgggagggatgcactgcgggacggtggctctgcggtggatgcagccattgcagccctgttgtgtgtggggctcatgaatgcccacagcatgggcatcgggggtggcctcttcctcaccatctacaacagcaccacacgaaaagctgaggtcatcaacgcccgcgaggtggccccc

SEQ ID NO: 136506 - DNA, 743 bp, Homo sapiens
  Payload ID: 6707
  Gene Symbol: GGT1
  Gene Name: gamma-glutamyltransferase 1
  ENST ID: ENST00000447416
  CDS Start-End: 364-743
tcccagccaggctggacctccgtgagaggcctgcctgtcctgcaccctgtgcagatgcctcccactgtccgccggggctgctgggcacgccctggctggtctcttggactagcgggtgcagcccagaactgtcttctgaggaagaggtgctctcctgggcccccactgtccccaggcctcaggagaacgagaaggctgcctgatcagagagtccctgaagaagattctgtggctacaggcttcagcagagtgtgagggagaccccggttatttcctcagctatttccaccaaatcctcctgtctttcgtggccaacaccccaggcaaggcttggggcccccgtctgctgctggacgcagagccatgaagaagaagttagtggtgctgggcctgctggccgtggtcctggtgctggtcattgtcggcctctgtctctggctgccctcagcctccaaggaacctgacaaccatgtgtacaccagggctgccgtggccgcggatgccaagcagtgctcgaagattgggagggatgcactgcgggacggtggctctgcggtggatgcagccattgcagccctgttgtgtgtggggctcatgaatgcccacagcatgggcatcgggggtggcctcttcctcaccatctacaacagcaccacacgaaaagctgaggtcatcaacgcccgcgaggtggcccccaggctggcctttgccaccatgttcaacagctcggagcagtcccagaa

SEQ ID NO: 136507 - DNA, 537 bp, Homo sapiens
  Payload ID: 6707
  Gene Symbol: GGT1
  Gene Name: gamma-glutamyltransferase 1
  ENST ID: ENST00000438643
  CDS Start-End: 427-537
gaccagaccgggcgtcgggtgagcccagaagtgagagcagttggctgtgccccagtgctgtgtgacccagaggcgccgctcaccctctctgagctggtggacatcatagcgggtgcagcccagaactgtcttctgaggaagaggtgctctcctgggcccccactgtccccaggcctcagcaaggcaagtgaggtgctgccgtcatccaggctggacagttcagtgatttgcctgaggccccacagcaggagaacgagaaggctgcctgatcagagagtccctgaagaagattctgtggctacaggcttcagcagagtgtgagggagaccccggttatttcctcagctatttccaccaaatcctcctgtctttcgtggccaacaccccaggcaaggcttggggcccccgtctgctgctggacgagccatgaagaagaagttagtggtgctgggcctgctggccgtggtcctggtgctggtcattgtcggcctctgtctctggctgccctcagcctccaaggaacctgacaaccatgtg

SEQ ID NO: 136508 - DNA, 831 bp, Homo sapiens
  Payload ID: 6707
  Gene Symbol: GGT1
  Gene Name: gamma-glutamyltransferase 1
  ENST ID: ENST00000412898
  CDS Start-End: 592-831
ccagaccgggcgtcgggtgagcccagaagtgagagcagttggctgtgccccagtgctgtgtgacccagaggcgccgctcaccctctctgagctggtggacatcataggtggggaagctcaggtcagggcactcccatgagtgtctggaggcctgagtcccattctcagctctgccatatgcttgctgcgctctagaggagttcctcttcctctccaagcctcggtttatgtacccgtgcagtgggagtgagttgcacttcggggtgaagggggcaagacttgtgtgggcgcatcctgcagaaggatcccacagcaaggcaagtgaggtgctgccgtcatccaggctggacagttcagtgatttgcctgaggccccacagcagagttcaactggagacagagaaaccagctagaggcagagggaggtaacacggagtcccccagaaaggtctgggctgcgcgtgcttcaggcttcagcagagtgtgagggagaccccggttatttcctcagctatttccaccaaatcctcctgtctttcgtggccaacaccccaggcaaggcttggggcccccgtctgctgctggacgagccatgaagaagaagttagtggtgctgggcctgctggccgtggtcctggtgctggtcattgtcggcctctgtctctggctgccctcagcctccaaggaacctgacaaccatgtgtacaccagggctgccgtggccgcggatgccaagcagtgctcgaagattgggagggatgcactgcgggacggtggctctgcggtggatgcagccattgcagccctgttgtgtgtggggctcatgaatgcc

SEQ ID NO: 136509 - DNA, 579 bp, Homo sapiens
  Payload ID: 6707
  Gene Symbol: GGT1
  Gene Name: gamma-glutamyltransferase 1
  ENST ID: ENST00000455483
  CDS Start-End: 287-579
agaccgggcgtcgggtgagcccagaagtgagagcagttggctgtgccccagtgctgtgtgacccagaggcgccgctcaccctctctgagctggtggacatcataggagaacgagaaggctgcctgatcagagagtccctgaagaagattctgtggctacaggcttcagcagagtgtgagggagaccccggttatttcctcagctatttccaccaaatcctcctgtctttcgtggccaacaccccaggcaaggcttggggcccccgtctgctgctggacgcagagccatgaagaagaagttagtggtgctgggcctgctggccgtggtcctggtgctggtcattgtcggcctctgtctctggctgccctcagcctccaaggaacctgacaaccatgtgtacaccagggctgccgtggccgcggatgccaagcagtgctcgaagattgggagggatgcactgcgggacggtggctctgcggtggatgcagccattgcagccctgttgtgtgtggggctcatgaatgcccacagcatgggcatcgggggtggcctcttcctcaccatctacaacagcaccac

SEQ ID NO: 136510 - DNA, 874 bp, Homo sapiens
  Payload ID: 6707
  Gene Symbol: GGT1
  Gene Name: gamma-glutamyltransferase 1
  ENST ID: ENST00000428855
  CDS Start-End: 495-874
accctgtgcagatgcctcccactgtccgccggggctgctgggcacgccctggctggtctcttggactagcgggtgcagcccagaactgtcttctgaggaagaggtgctctcctgggcccccactgtccccaggcctcagcaaggcaagtgaggtgctgccgtcatccaggctggacagttcagtgatttgcctgaggccccacagcagagttcaactggagacagagaaaccagctagaggcagagggaggtaacacggagtcccccagaaaggtctgggctgcgcgtgcttcaggtaacctcccttgaccttcaggagaacgagaaggctgcctgatcagagagtccctgaagaagattctgtggctacaggcttcagcagagtgtgagggagaccccggttatttcctcagctatttccaccaaatcctcctgtctttcgtggccaacaccccaggcaaggcttggggcccccgtctgctgctggacgagccatgaagaagaagttagtggtgctgggcctgctggccgtggtcctggtgctggtcattgtcggcctctgtctctggctgccctcagcctccaaggaacctgacaaccatgtgtacaccagggctgccgtggccgcggatgccaagcagtgctcgaagattgggagggatgcactgcgggacggtggctctgcggtggatgcagccattgcagccctgttgtgtgtggggctcatgaatgcccacagcatgggcatcgggggtggcctcttcctcaccatctacaacagcaccacacgaaaagctgaggtcatcaacgcccgcgaggtggcccccaggctggcctttgccaccatgttcaacagctcggagcagtcccagaa

SEQ ID NO: 136511 - DNA, 597 bp, Homo sapiens
  Payload ID: 6707
  Gene Symbol: GGT1
  Gene Name: gamma-glutamyltransferase 1
  ENST ID: ENST00000456869
  CDS Start-End: 508-597
cccggtcagagctttaagctgcagctctgatgccccagggacctctcagacccccctgcccagagcaggcagcccgcgggtgcagcccagaactgtcttctgaggaagaggtgctctcctgggcccccactgtccccaggcctcagcagcaaggcaagtgaggtgctgccgtcatccaggctggacagttcagtgatttgcctgaggccccacagcagagttcaactggagacagagaaaccagctagaggcagagggaggtaacacggagtcccccagaaaggtctgggctgcgcgtgcttcaggtaacctcccttgaccttcaggagaacgagaaggctgcctgatcagagagtccctgaagaagattctgtggctacaggcttcagcagagtgtgagggagaccccggttatttcctcagctatttccaccaaatcctcctgtctttcgtggccaacaccccaggcaaggcttggggcccccgtctgctgctggacgcagagccatgaagaagaagttagtggtgctgggcctgctggccgtggtcctggtgctggtcattgtcggcctctgtctctggctgccctcagcctcc

SEQ ID NO: 136512 - DNA, 811 bp, Homo sapiens
  Payload ID: 6707
  Gene Symbol: GGT1
  Gene Name: gamma-glutamyltransferase 1
  ENST ID: ENST00000452551
  CDS Start-End: 430-811
gaccagaccgggcgtcgggtgagcccagaagtgagagcagttggctgtgccccagtgctgtgtgacccagaggcgccgctcaccctctctgagctggtggacatcatagcgggtgcagcccagaactgtcttctgaggaagaggtgctctcctgggcccccactgtccccaggcctcagcaaggcaagtgaggtgctgccgtcatccaggctggacagttcagtgatttgcctgaggccccacagcaggagaacgagaaggctgcctgatcagagagtccctgaagaagattctgtggctacaggcttcagcagagtgtgagggagaccccggttatttcctcagctatttccaccaaatcctcctgtctttcgtggccaacaccccaggcaaggcttggggcccccgtctgctgctggacgcagagccatgaagaagaagttagtggtgctgggcctgctggccgtggtcctggtgctggtcattgtcggcctctgtctctggctgccctcagcctccaaggaacctgacaaccatgtgtacaccagggctgccgtggccgcggatgccaagcagtgctcgaagattgggagggatgcactgcgggacggtggctctgcggtggatgcagccattgcagccctgttgtgtgtggggctcatgaatgcccacagcatgggcatcgggggtggcctcttcctcaccatctacaacagcaccacacgaaaagctgaggtcatcaacgcccgcgaggtggcccccaggctggcctttgccaccatgttcaacagctcggagcagtcccagaagg

SEQ ID NO: 136513 - DNA, 929 bp, Homo sapiens
  Payload ID: 6707
  Gene Symbol: GGT1
  Gene Name: gamma-glutamyltransferase 1
  ENST ID: ENST00000430289
  CDS Start-End: 604-929
gcccagaagtgagagcagttggctgtgccccagtgctgtgtgacccagaggcgccgctcaccctctctgagctggtggacatcataggtggggaagctcaggtcagggcactcccatgagtgtctggaggcctgagtcccattctcagctctgccatatgcttgctgcgctctagaggagttcctcttcctctccaagcctcggtttatgtacccgtgcagtgggagtgagttgcacttcggggtgaagggggcaagacttgtgtgggcgcatcctgcagaaggatcccacagcgggtgcagcccagaactgtcttctgaggaagaggtgctctcctgggcccccactgtccccaggcctcagcaaggcaagtgaggtgctgccgtcatccaggctggacagttcagtgatttgcctgaggccccacagcagagttcaactggagacagagaaaccagctagaggcagagggaggtaacacggagtcccccagaaaggtctgggctgcgcgtgcttcagctatttccaccaaatcctcctgtctttcgtggccaacaccccaggcaaggcttggggcccccgtctgctgctggacgcagagccatgaagaagaagttagtggtgctgggcctgctggccgtggtcctggtgctggtcattgtcggcctctgtctctggctgccctcagcctccaaggaacctgacaaccatgtgtacaccagggctgccgtggccgcggatgccaagcagtgctcgaagattgggagggatgcactgcgggacggtggctctgcggtggatgcagccattgcagccctgttgtgtgtggggctcatgaatgcccacagcatgggcatcgggggtggcctcttcctcaccatctacaacagcaccacacgaaaagctgaggtcatcaacgcccgcgaggt

SEQ ID NO: 136514 - DNA, 1845 bp, Homo sapiens
  Payload ID: 6708
  Gene Symbol: GGT2
  Gene Name: gamma-glutamyltransferase 2
  ENST ID: ENST00000405188
  CDS Start-End: 1-1680
atgaagaagaagttagtggtgctgggcctgctggccgtggtcctggtgctggtcattgtcggcctctgtctctggctgccctcggcctccaaggaacctgacaaccatgtgtacaccagggctgccatggccgcggatgccaagcagtgcttggagattgggagggacacactgcgggacggtggctctgcagtggatgcagccattgcagccctgttgtgtgtggggctcatgaatgcccacagcatgggcatcggggttggcctcttcctcaccatctacaacagcaccactcgaaaagctgaggtcatcaatgcccgcgaggtggcccccaggctggcctttgccagcatgttcaacagctcggagcagtcccagaagggagggctgtcggtggcggtgcctggggagatccgaggctatgagctggcacaccagcggcatgggcggctgccctgggctcgcctcttccagcccagcatccagctggcccgccagggcttccctgtgggcaagggcttggcggcagtcctggaaaacaagcggactgtcatcgagcagcagcctgtcttgtggtatgtgttctgccgggatagaaaggtgcttcgggagggggagagactgaccctgccgcggctggctgacacctatgagatgctggccatcgagggtgcccaggccttctacaacggcagcctcatggcccagattgtgaaggacatccaggcggctgggggcattgtgacagctgaggacctgaacaactaccgtgctgagctgatcgagcacccgctgaacatcagcctgggagacgcggtgctgtacatgcccagtgcgcggctcagcgggcccgtgctggccctcatcctcaacatcctcaaagggtacaacttctcccgggagagcgtggagacccccgagcagaagggcctgacgtaccaccgcatcgtagaggctttccggtttgcctacgccaagaggaccctgcttggggaccccaagtttgtggatgtgactgaggtggtccgcaacatgacctctgagttcttcgctgcccagctccggtcccagatctctgaccacaccactcacccgatctcctactacaagcccgagttctacacgccggatgacgggggcactgctcacctgtctgtcgtcgcagaggacggcagtgctgtgtccgccaccagcaccatcaacctctatgggatcctgttcaataatgaatggacgacttcagctctcccagcattcaccaatgagtttggggcacccccctcacctgccaatttcatccagccagggaagcagccgctcttgtccatgtgcctgacgatcatggtgggccaggacggccaggtccggatggtggtgggagctgctgggggcacgcagatcaccacagacactgcactggccatcatctacaacctctggttcggctatgacgtgaagagggccgtggaggagccccggctgcacaacaagcttctgcccaacgtcacgacagtggagagaaacattgaccaggcagtgactgcagccctggagacccggcaccatcacacccagatcgcgtccaccttcatcgctgtggtgcaagccatcgtccgcacggctggtggctgggcagctgcctcggactccaggaaaggcggggaacctgctggctactgattgctccaggcagacaaggctgacaagcaatccagggacaagatactcaccaggatgaggaagaggactttgggggacgggcttcccctgtgagcagcagagcagcataataaatgaggccactgtgccaggctccaggtggcctccctggcctgtctccccact

SEQ ID NO: 136515 - DNA, 2366 bp, Homo sapiens
  Payload ID: 6708
  Gene Symbol: GGT2
  Gene Name: gamma-glutamyltransferase 2
  Uniprot ID: P36268
  ENST ID: ENST00000401924
  CDS Start-End: 493-2202
atgctgcatattgctggcccagctcctgaggctctttggacctccaggaatcggtgtctctaccaggaacccttaaccctgacccggactcccggctgggacccggggtgttggagtggcaagagcgctgtcaggcctggtgaagggtgtgagctgtccaacagggcagggaggaggcagggcctgttctgcagttggacagacagagccctctagctgctttctggaagactgaagggcagcaaggcaagtgaggtgctgccgtcatccaggctggacagttcagtgatttgcctgaggccccacagcaggagaacgagaaggctgcctgatcagagagtctctgaagaagattctgtggctacaggcttcagcagagtgtgagggagaccccggttatttcctcagctgtttccaccaaatcctcctgtctttcgtggccaacaccccaggcaaggcttggggcccccgtctgctgctggacgcagagccatgaagaagaagttagtggtgctgggcctgctggccgtggtcctggtgctggtcattgtcggcctctgtctctggctgccctcggcctccaaggaacctgacaaccatgtgtacaccagggctgccatggccgcggatgccaagcagtgcttggagattgggagggacacactgcgggacggtggctctgcagtggatgcagccattgcagccctgttgtgtgtggggctcatgaatgcccacagcatgggcatcggggttggcctcttcctcaccatctacaacagcaccactcgaaaagctgaggtcatcaatgcccgcgaggtggcccccaggctggcctttgccagcatgttcaacagctcggagcagtcccagaagggagggctgtcggtggcggtgcctggggagatccgaggctatgagctggcacaccagcggcatgggcggctgccctgggctcgcctcttccagcccagcatccagctggcccgccagggcttccctgtgggcaagggcttggcggcagtcctggaaaacaagcggactgtcatcgagcagcagcctgtcttgtggtatgtgttctgccgggatagaaaggtgcttcgggagggggagagactgaccctgccgcggctggctgacacctatgagatgctggccatcgagggtgcccaggccttctacaacggcagcctcatggcccagattgtgaaggacatccaggcggctgggggcattgtgacagctgaggacctgaacaactaccgtgctgagctgatcgagcacccgctgaacatcagcctgggagacgcggtgctgtacatgcccagtgcgcggctcagcgggcccgtgctggccctcatcctcaacatcctcaaagggtacaacttctcccgggagagcgtggagacccccgagcagaagggcctgacgtaccaccgcatcgtagaggctttccggtttgcctacgccaagaggaccctgcttggggaccccaagtttgtggatgtgactgaggtggtccgcaacatgacctctgagttcttcgctgcccagctccggtcccagatctctgaccacaccactcacccgatctcctactacaagcccgagttctacacgccggatgacgggggcactgctcacctgtctgtcgtcgcagaggacggcagtgctgtgtccgccaccagcaccatcaacctctactttggctccaaggtctgctccccggtcagtgggatcctgttcaataatgaatggacgacttcagctctcccagcattcaccaatgagtttggggcacccccctcacctgccaatttcatccagccagggaagcagccgctcttgtccatgtgcctgacgatcatggtgggccaggacggccaggtccggatggtggtgggagctgctgggggcacgcagatcaccacagacactgcactggccatcatctacaacctctggttcggctatgacgtgaagagggccgtggaggagccccggctgcacaacaagcttctgcccaacgtcacgacagtggagagaaacattgaccaggcagtgactgcagccctggagacccggcaccatcacacccagatcgcgtccaccttcatcgctgtggtgcaagccatcgtccgcacggctggtggctgggcagctgcctcggactccaggaaaggcggggaacctgctggctactgattgctccaggcagacaaggctgacaagcaatccagggacaagatactcaccaggatgaggaagaggactttgggggacgggcttcccctgtgagcagcagagcagcataataaatgaggccactgtgccaggctccaggtggcctccctggcctgtctccccac

SEQ ID NO: 136516 - DNA, 1871 bp, Homo sapiens
  Payload ID: 6708
  Gene Symbol: GGT2
  Gene Name: gamma-glutamyltransferase 2
  Uniprot ID: P36268
  ENST ID: ENST00000424627
  CDS Start-End: 63-1772
tctttcgtggccaacaccccaggcaaggcttggggcccccgtctgctgctggacgcagagccatgaagaagaagttagtggtgctgggcctgctggccgtggtcctggtgctggtcattgtcggcctctgtctctggctgccctcggcctccaaggaacctgacaaccatgtgtacaccagggctgccatggccgcggatgccaagcagtgcttggagattgggagggacacactgcgggacggtggctctgcagtggatgcagccattgcagccctgttgtgtgtggggctcatgaatgcccacagcatgggcatcggggttggcctcttcctcaccatctacaacagcaccactcgaaaagctgaggtcatcaatgcccgcgaggtggcccccaggctggcctttgccagcatgttcaacagctcggagcagtcccagaagggagggctgtcggtggcggtgcctggggagatccgaggctatgagctggcacaccagcggcatgggcggctgccctgggctcgcctcttccagcccagcatccagctggcccgccagggcttccctgtgggcaagggcttggcggcagtcctggaaaacaagcggactgtcatcgagcagcagcctgtcttgtggtatgtgttctgccgggatagaaaggtgcttcgggagggggagagactgaccctgccgcggctggctgacacctatgagatgctggccatcgagggtgcccaggccttctacaacggcagcctcatggcccagattgtgaaggacatccaggcggctgggggcattgtgacagctgaggacctgaacaactaccgtgctgagctgatcgagcacccgctgaacatcagcctgggagacgcggtgctgtacatgcccagtgcgcggctcagcgggcccgtgctggccctcatcctcaacatcctcaaagggtacaacttctcccgggagagcgtggagacccccgagcagaagggcctgacgtaccaccgcatcgtagaggctttccggtttgcctacgccaagaggaccctgcttggggaccccaagtttgtggatgtgactgaggtggtccgcaacatgacctctgagttcttcgctgcccagctccggtcccagatctctgaccacaccactcacccgatctcctactacaagcccgagttctacacgccggatgacgggggcactgctcacctgtctgtcgtcgcagaggacggcagtgctgtgtccgccaccagcaccatcaacctctactttggctccaaggtctgctccccggtcagtgggatcctgttcaataatgaatggacgacttcagctctcccagcattcaccaatgagtttggggcacccccctcacctgccaatttcatccagccagggaagcagccgctcttgtccatgtgcctgacgatcatggtgggccaggacggccaggtccggatggtggtgggagctgctgggggcacgcagatcaccacagacactgcactggccatcatctacaacctctggttcggctatgacgtgaagagggccgtggaggagccccggctgcacaacaagcttctgcccaacgtcacgacagtggagagaaacattgaccaggcagtgactgcagccctggagacccggcaccatcacacccagatcgcgtccaccttcatcgctgtggtgcaagccatcgtccgcacggctggtggctgggcagctgcctcggactccaggaaaggcggggaacctgctggctactgattgctccaggcagacaaggctgacaagcaatccagggacaagatactcaccaggatgaggaagaggactttgggggacgggcttcccctgtgagcagca

SEQ ID NO: 136517 - DNA, 2334 bp, Homo sapiens
  Payload ID: 6709
  Gene Symbol: GGT5
  Gene Name: gamma-glutamyltransferase 5
  Uniprot ID: P36269
  ENST ID: ENST00000263112
  CDS Start-End: 354-2018
actccgtagtgtgcacttggtgagggcagcagctcgccacagctgccagccatctgtccattcacccatctgtccatctggcagcccgctgttcagacctgtctgtctgtccgcccatctgtaagcccatctctgtcccattgtctatctgaccatctttctcttactgtcctctttgtctagctatctggcctatctgtcgatccatcttcgtgtctgtcttcagcccccacctgtttgtccatctgtccaattacctgtgactctgtgcatcttcttgtccattcatctgcccacccatccgtccctccgtctgcccaccagccgcccctctcctcctgggctgcagagccatggcccggggctacggggccacggtcagcctagtcctgctgggtctggggctggcgctggctgtcattgtgctggctgtggtcctctctcgacaccaggccccatgtggcccccaggcctttgcccacgctgctgttgccgccgactccaaggtctgctcggatattggacgagccatcctccagcagcagggctcacccgtggatgccaccatcgcggctctggtctgcaccagcgtcgtcaaccctcagagcatgggcctgggcggaggggtcatcttcaccatctacaatgtgacaacaggggcccagtggatcggggtgcccggggagctccgtggctatgccgaggcccaccgccgccatggccgcctgccctgggcgcagctgttccagcccaccatcgcgctgctccgaggggggcatgtggtggcccctgtcctcagccgtttcctgcacaacagcatcctgcggccttccttgcaggcgtcaaccctgcgccagctcttcttcaacgggacagaacccctgaggcctcaggacccactcccatggcctgcactggccaccaccctggagaccgtggccacagagggcgtggaggtcttctacacggggaggctgggccagatgctggtggaggacattgccaaggaagggagccagctgacgctgcaggacctggccaagttccagcccgaggtggtggatgccctggaggtgcccctgggggactataccctgtactcaccaccgccgcctgcagggggtgccattctcagctttatcctcaacgtgctaagagggttcaacttctcaacagagtctatggccaggcctgaagggagggtgaacgtgtaccaccaccttgtagagacgctcaagtttgccaaggggcagaggtggaggctgggggaccctcgaagccacccgaagctccagaatgcctcccgggacctgctgggggagaccctggcccagctcatccgccaacagatcgatggccggggggaccaccagctcagccactacagcttggccgaggcctggggccacgggacaggcacgtcccatgtgtctgtgctgggggaggatggcagcgccgtggctgccaccagcaccatcaacacaccctttggagcgatggtgtattcaccacggacaggcatcatcctcaacaacgagctcctggacttatgcgagcgatgcccccggggttccggcaccaccccctcacctgtgagtggagacagggtgggtggagctcccggaaggtgctggcccccagttccaggcgagcgttccccatcctccatggtgccctccatcttgatcaacaaagcccaggggtcgaagctagtgattggcggggctggcggggagctcatcatctctgctgtggcccaggccatcatgagcaagctgtggcttggctttgacctgagagcggccattgcagcccccatcctgcatgtcaacagcaagggctgtgtggagtacgagcccaacttcagccaggaggtgcagaggggactccaagaccgtggccagaaccagacccagaggcccttcttcctgaacgtggtccaggctgtgtcccaggagggggcctgtgtgtacgccgtctcggacctgaggaagagtggggaggccgcaggctactaagacactgctctgcccagagctgaagtctggccccaccatgagtcctgtgtccaggccggacatggctgggggaccaactactctggcaggatctggacccctggcaggggagtccagctgagagtggaagaggtggcggggaccagctgggcagatgagaggctgagcctcatccctaaccccctttcccagagcccctggtggtcctgaaccggcccctctatccctccgcaggcctcttgcctggggccactctcccaccctctcgatctgtatatcctccagtccaagattaaagaggcggactgtggcctga

SEQ ID NO: 136518 - DNA, 2494 bp, Homo sapiens
  Payload ID: 6709
  Gene Symbol: GGT5
  Gene Name: gamma-glutamyltransferase 5
  Uniprot ID: P36269
  ENST ID: ENST00000327365
  CDS Start-End: 418-2178
tgcctggcctcctgccagcaacaagcaggagctgaaaaccagaagttgaggcgtgagtttggccactccgtagtgtgcacttggtgagggcagcagctcgccacagctgccagccatctgtccattcacccatctgtccatctggcagcccgctgttcagacctgtctgtctgtccgcccatctgtaagcccatctctgtcccattgtctatctgaccatctttctcttactgtcctctttgtctagctatctggcctatctgtcgatccatcttcgtgtctgtcttcagcccccacctgtttgtccatctgtccaattacctgtgactctgtgcatcttcttgtccattcatctgcccacccatccgtccctccgtctgcccaccagccgcccctctcctcctgggctgcagagccatggcccggggctacggggccacggtcagcctagtcctgctgggtctggggctggcgctggctgtcattgtgctggctgtggtcctctctcgacaccaggccccatgtggcccccaggcctttgcccacgctgctgttgccgccgactccaaggtctgctcggatattggacgagccatcctccagcagcagggctcacccgtggatgccaccatcgcggctctggtctgcaccagcgtcgtcaaccctcagagcatgggcctgggcggaggggtcatcttcaccatctacaatgtgacaacagggaaggtggaggtcatcaatgcccgggagacggtgccggccagccacgccccgagcctgctggaccagtgtgcacaggctctgccactgggcacaggggcccagtggatcggggtgcccggggagctccgtggctatgccgaggcccaccgccgccatggccgcctgccctgggcgcagctgttccagcccaccatcgcgctgctccgaggggggcatgtggtggcccctgtcctcagccgtttcctgcacaacagcatcctgcggccttccttgcaggcgtcaaccctgcgccagctcttcttcaacgggacagaacccctgaggcctcaggacccactcccatggcctgcactggccaccaccctggagaccgtggccacagagggcgtggaggtcttctacacggggaggctgggccagatgctggtggaggacattgccaaggaagggagccagctgacgctgcaggacctggccaagttccagcccgaggtggtggatgccctggaggtgcccctgggggactataccctgtactcaccaccgccgcctgcagggggtgccattctcagctttatcctcaacgtgctaagagggttcaacttctcaacagagtctatggccaggcctgaagggagggtgaacgtgtaccaccaccttgtagagacgctcaagtttgccaaggggcagaggtggaggctgggggaccctcgaagccacccgaagctccagaatgcctcccgggacctgctgggggagaccctggcccagctcatccgccaacagatcgatggccggggggaccaccagctcagccactacagcttggccgaggcctggggccacgggacaggcacgtcccatgtgtctgtgctgggggaggatggcagcgccgtggctgccaccagcaccatcaacacaccctttggagcgatggtgtattcaccacggacaggcatcatcctcaacaacgagctcctggacttatgcgagcgatgcccccggggttccggcaccaccccctcacctgtgagtggagacagggtgggtggagctcccggaaggtgctggcccccagttccaggcgagcgttccccatcctccatggtgccctccatcttgatcaacaaagcccaggggtcgaagctagtgattggcggggctggcggggagctcatcatctctgctgtggcccaggccatcatgagcaagctgtggcttggctttgacctgagagcggccattgcagcccccatcctgcatgtcaacagcaagggctgtgtggagtacgagcccaacttcagccaggaggtgcagaggggactccaagaccgtggccagaaccagacccagaggcccttcttcctgaacgtggtccaggctgtgtcccaggagggggcctgtgtgtacgccgtctcggacctgaggaagagtggggaggccgcaggctactaagacactgctctgcccagagctgaagtctggccccaccatgagtcctgtgtccaggccggacatggctgggggaccaactactctggcaggatctggacccctggcaggggagtccagctgagagtggaagaggtggcggggaccagctgggcagatgagaggctgagcctcatccctaaccccctttcccagagcccctggtggtcctgaaccggcccctctatccctccgcaggcctcttgcctggggccactctcccaccctctcgatctgtatatcctccagtccaagattaaagaggcggactgtggcctga

SEQ ID NO: 136519 - DNA, 2408 bp, Homo sapiens
  Payload ID: 6709
  Gene Symbol: GGT5
  Gene Name: gamma-glutamyltransferase 5
  Uniprot ID: P36269
  ENST ID: ENST00000398292
  CDS Start-End: 335-2098
gtgagggcagcagctcgccacagctgccagccatctgtccattcacccatctgtccatctggcagcccgctgttcagacctgtctgtctgtccgcccatctgtaagcccatctctgtcccattgtctatctgaccatctttctcttactgtcctctttgtctagctatctggcctatctgtcgatccatcttcgtgtctgtcttcagcccccacctgtttgtccatctgtccaattacctgtgactctgtgcatcttcttgtccattcatctgcccacccatccgtccctccgtctgcccaccagccgcccctctcctcctgggctgcagagccatggcccggggctacggggccacggtcagcctagtcctgctgggtctggggctggcgctggctgtcattgtgctggctgtggtcctctctcgacaccaggccccatgtggcccccaggcctttgcccacgctgctgttgccgccgactccaaggtctgctcggatattggacgagccatcctccagcagcagggctcacccgtggatgccaccatcgcggctctggtctgcaccagcgtcgtcaaccctcagagcatgggcctgggcggaggggtcatcttcaccatctacaatgtgacaacagggaaggtggaggtcatcaatgcccgggagacggtgccggccagccacgccccgagcctgctggaccagtgtgcacaggctctgccactgggcacaggggcccagtggatcggggtgcccggggagctccgtggctatgccgaggcccaccgccgccatggccgcctgccctgggcgcagctgttccagcccaccatcgcgctgctccgaggggggcatgtggtggcccctgtcctcagccgtttcctgcacaacagcatcctgcggccttccttgcaggcgtcaaccctgcgccagctcttcttcaacgggacagaacccctgaggcctcaggacccactcccatggcctgcactggccaccaccctggagaccgtggccacagagggcgtggaggtcttctacacggggaggctgggccagatgctggtggaggacattgccaaggaagggagccagctgacgctgcaggacctggccaagttccagcccgaggtggtggatgccctggaggtgcccctgggggactataccctgtactcaccaccgccgcctgcagggggtgccattctcagctttatcctcaacgtgctaagagggttcaacttctcaacagagtctatggccaggcctgaagggagggtgaacgtgtaccaccaccttgtagagacgctcaagtttgccaaggggcagaggtggaggctgggggaccctcgaagccacccgaagctccagaatgcctcccgggacctgctgggggagaccctggcccagctcatccgccaacagatcgatggccggggggaccaccagctcagccactacagcttggccgaggcctggggccacgggacaggcacgtcccatgtgtctgtgctgggggaggatggcagcgccgtggctgccaccagcaccatcaacacaccctttggagcgatggtgtattcaccacggacaggcatcatcctcaacaacgagctcctggacttatgcgagcgatgcccccggggttccggcaccaccccctcacctgcagtgagtggagacagggtgggtggagctcccggaaggtgctggcccccagttccaggcgagcgttccccatcctccatggtgccctccatcttgatcaacaaagcccaggggtcgaagctagtgattggcggggctggcggggagctcatcatctctgctgtggcccaggccatcatgagcaagctgtggcttggctttgacctgagagcggccattgcagcccccatcctgcatgtcaacagcaagggctgtgtggagtacgagcccaacttcagccaggaggtgcagaggggactccaagaccgtggccagaaccagacccagaggcccttcttcctgaacgtggtccaggctgtgtcccaggagggggcctgtgtgtacgccgtctcggacctgaggaagagtggggaggccgcaggctactaagacactgctctgcccagagctgaagtctggccccaccatgagtcctgtgtccaggccggacatggctgggggaccaactactctggcaggatctggacccctggcaggggagtccagctgagagtggaagaggtggcggggaccagctgggcagatgagaggctgagcctcatccctaaccccctttcccagagcccctggtggtcctgaaccggcccctctatccctccgcaggcctcttgcctggggccactctcccaccctctcgatctgtatatcctccagtccaagattaaagaggcggactgtg

SEQ ID NO: 136520 - DNA, 972 bp, Homo sapiens
  Payload ID: 6709
  Gene Symbol: GGT5
  Gene Name: gamma-glutamyltransferase 5
  ENST ID: ENST00000425408
  CDS Start-End: 1-662
gcagcgccgtggctgccaccagcaccatcaacacaccctttggagcgatggtgtattcaccacggacaggcatcatcctcaacaacgagctcctggacttatgcgagcgatgcccccggggttccggcaccaccccctcacctgtgagtggagacagggtgggtggagctcccggaaggtgctggcccccagttccaggcgagcgttccccatcctccatggtgccctccatcttgatcaacaaagcccaggggtcgaagctagtgattggcggggctggcggggagctcatcatctctgctgtggcccaggccatcatgagcaagctgtggcttggctttgacctgagagcggccattgcagcccccatcctgcatgtcaacagcaagggctgtgtggagtacgagcccaacttcagccagaaacaggatcttgctgcattgcccaggctggtctcaaactcctggcctcaagtgatcctccttcctcagcctcccaaattgctggcattacaggaggtgcagaggggactccaagaccgtggccagaaccagacccagaggcccttcttcctgaacgtggtccaggctgtgtcccaggagggggcctgtgtgtacgccgtctcggacctgaggaagagtggggaggccgcaggctactaagacactgctctgcccagagctgaagtctggccccaccatgagtcctgtgtccaggccggacatggctgggggaccaactactctggcaggatctggacccctggcaggggagtccagctgagagtggaagaggtggcggggaccagctgggcagatgagaggctgagcctcatccctaaccccctttcccagagcccctggtggtcctgaaccggcccctctatccctccgcaggcctcttgcctggggccactctcccaccctctcgatctgtatatcctccagtccaagattaaagaggcggactgtg

SEQ ID NO: 136521 - DNA, 576 bp, Homo sapiens
  Payload ID: 6709
  Gene Symbol: GGT5
  Gene Name: gamma-glutamyltransferase 5
  ENST ID: ENST00000424217
  CDS Start-End: 358-576
ggccactccgtagtgtgcacttggtgagggcagcagctcgccacagctgccagccatctgtccattcacccatctgtccatctggcagcccgctgttcagacctgtctgtctgtccgcccatctgtaagcccatctctgtcccattgtctatctgaccatctttctcttactgtcctctttgtctagctatctggcctatctgtcgatccatcttcgtgtctgtcttcagcccccacctgtttgtccatctgtccaattacctgtgactctgtgcatcttcttgtccattcatctgcccacccatccgtccctccgtctgcccaccagccgcccctctcctcctgggctgcagagccatggcccggggctacggggccacggtcagcctagtcctgctgggtctggggctggcgctggctgtcattgtgctggctgtggtcctctctcgacaccaggccccatgtggcccccaggcctttgcccacgctgctgttgccgccgactccaaggtctgctcggatattggacggggcccagtggatcggggtgcccggggagctccgtggctatgccga

SEQ ID NO: 136522 - DNA, 2534 bp, Homo sapiens
  Payload ID: 6710
  Gene Symbol: GGT6
  Gene Name: gamma-glutamyltransferase 6
  Uniprot ID: Q6P531
  ENST ID: ENST00000301395
  CDS Start-End: 61-1446
ctctgagacacagccggaaaggctggcaggcaggagggctggggcgagcactggggggccatggagcgggcagaagagcccgtggtctatcagaagctgctgccctgggagccaagcttggagtcggaggaggaagtggaggaggaggagacatcagaggcgctggttctaaacccccggaggcaccaggactcttccaggaacaaggctggcgggctgcccggaacctgggcccgtgtagtggcagccctgctgctgctggctgttggctgctccctggctgtgaggcagctccagaatcagggcaggtcgacaggaagcttgggctctgtggcccctccacccggcggacactcccacggccctggcgtataccaccacggtgccatcatcagccctgcaggtgccatgttttggggcctcttccacgatagctcctcaggcaattccacggccctgacatcaggcccagcacagaccctggcccccggcctggggctgcccgcggctctgcccaccctgcacctgctgcatgcacgcttcggccgcctgccctggccacgcctgctagtgggccccaccacgctggctcaggagggcttcctggtggacacacccctggcaagggctctggtggctcggggcacagaaggcctctgtccactactttgccatgctgatgggacacccctgggcgctggggcccgagccaccaacccacaactggcagctgtgcttcgcagcgcagccctcgctcccacctcagaccttgctggggatgctctactgagtctactggcgggagacctgggggtggaggtgccctcggctgtgcccaggcccactttggaaccagcagagcagctacctgtgccccagggcatcctgttcaccacccccagtccctcagctggcccagaactgctggcactgttggaggcagccctgcgctccggggcgcccatccctgacccctgcccaccgttcctgcagactgctgtgagccccgagagcagtgccctggccgccgtggacagcagcggctctgtgctccttctcacctcctcgctcaactgctcctttggctctgcacacctgtccccaagcactggggttctgctcagcaacctggtggccaagtctaccactagtgcctgggcctgccccctcatcctccgtggcagcctggatgacacagaggctgatgtgttggggcttgtggcttcagggacccctgatgtggccagggccatgactcacaccctactcaggcatctggcagcaaggccccctacccaggcccagcaccagcatcagggtcagcaagaaccaacagagcatcccagcacttgtggccaagggaccctgctccaggtggcagcccacacagagcacgcccatgtctccagtgtcccccatgcctgctgccccttccaggggttctaacaggatgggggtgggtctggcagaaggcagagttatctgaagcatgggggcaggagcagagcagacacagcagcaatggagtgtgcacccgcagggtgtggtgcctcacacctgtaatctcagcactttgggtggtcaaggcaggaagatacctcgaggccaggagtttgaaactagcctagacaacaaagcaagatctcatctgtactaaaaatttaaaaatttgccaggggcggtggcacatgcctgttgtcccagctgcttgggaggctgaggcaggaagctcgcttgagctcaggagttcaaggctgcagagagctaggatcacaccactgcactccagcctggacaacagagtgagaacctgtctttaaaataataataataataataaaaaaatagctgggtgcggtggctcatgcctgtaatcccagcactttgggaggccaaggcaggtggatcacctgaggctaggagttcgagaccagcttgggcaacatggcgaaaccccgtctctactaaaaatacaaaaaattagctgggcatggtggcgggcacctgtaatcccagctacttgggaggctgaggcaggagaatcacttgaacccgagaggtggaggttgcagtgaaccaagatcgcaccattgcaaccccacctgggcaacaagagggaaaccctgtctaaaaaaaaaaaaaaaaaaaaggatttattatgtgctcactgctggctcaggccccaacctctggccttttaagttacctagacttgagttctggcatccagagctaacaatcattcttcagatcacccacaccggatggaatctctagctattttatcagctaagaaaatcagggtaataacgaaaaagcagtagggcctggggctagcactgagttcagatccagctttcaggaggacagtggaaagagtgcagagcctctgcctaggccctgggccccacgaagcaggacaggcagagcccagggtactgttggcatctctgtccttcccttcaggacaccccttacctatctgcctcaaccagactgggtacaaaataaagatcaagtctcccggaaaccaa

SEQ ID NO: 136523 - DNA, 2145 bp, Homo sapiens
  Payload ID: 6710
  Gene Symbol: GGT6
  Gene Name: gamma-glutamyltransferase 6
  ENST ID: ENST00000381550
  CDS Start-End: 56-1555
agacacagccggaaaggctggcaggcaggagggctggggcgagcactggggggccatggagcgggcagaagagcccgtggtctatcagaagctgctgccctgggagccaagcttggagtcggaggaggaagtggaggaggaggagacatcagaggcgctggttctaaacccccggaggcaccaggactcttccaggaacaaggctggcgggctgcccggaacctgggcccgtgtagtggcagccctgctgctgctggctgttggctgctccctggctgtgaggcagctccagaatcagggcaggtcgacaggaagcttgggctctgtggcccctccacccggcggacactcccacggccctggcgtataccaccacggtgccatcatcagccctgcagccacatgctcccacctaggccgagagctgcttgttgccgggggcaacgtcgtggatgctggagttggagctgcattgtgcctggcagtggtgcatcctcatgccacggggctaggtgccatgttttggggcctcttccacgatagctcctcaggcaattccacggccctgacatcaggcccagcacagaccctggcccccggcctggggctgcccgcggctctgcccaccctgcacctgctgcatgcacgcttcggccgcctgccctggccacgcctgctagtgggccccaccacgctggctcaggagggcttcctggtggacacacccctggcaagggctctggtggctcggggcacagaaggcctctgtccactactttgccatgctgatgggacacccctgggcgctggggcccgagccaccaacccacaactggcagctgtgcttcgcagcgcagccctcgctcccacctcagaccttgctggggatgctctactgagtctactggcgggagacctgggggtggaggtgccctcggctgtgcccaggcccactttggaaccagcagagcagctacctgtgccccagggcatcctgttcaccacccccagtccctcagctggcccagaactgctggcactgttggaggcagccctgcgctccggggcgcccatccctgacccctgcccaccgttcctgcagactgctgtgagccccgagagcagtgccctggccgccgtggacagcagcggctctgtgctccttctcacctcctcgctcaactgctcctttggctctgcacacctgtccccaagcactggggttctgctcagcaacctggtggccaagtctaccactagtgcctgggcctgccccctcatcctccgtggcagcctggatgacacagaggctgatgtgttggggcttgtggcttcagggacccctgatgtggccagggccatgactcacaccctactcaggcatctggcagcaaggccccctacccaggcccagcaccagcatcagggtcagcaagaaccaacagagcatcccagcacttgtggccaagggaccctgctccaggtggcagcccacacagagcacgcccatgtctccagtgtcccccatgcctgctgccccttccaggggttctaacaggatgggggtgggtctggcagaaggcagagttatctgaagcatgggggcaggagcagagcagacacagcagcaatggagtgtgcacccgcagggtgtggtgcctcacacctgtaatctcagcactttgggtggtcaaggcaggaagatacctcgaggccaggagtttgaaactagcctagacaacaaagcaagatctcatctgtactaaaaatttaaaaatttgccaggggcggtggcacatgcctgttgtcccagctgcttgggaggctgaggcaggaagctcgcttgagctcaggagttcaaggctgcagagagctaggatcacaccactgcactccagcctggacaacagagtgagaacctgtctttaaaataataataataataataaaaaaatagctgggtgcggtggctcatgcctgtaatcccagcactttgggaggccaaggcaggtggatcacctgaggctaggagttcgagaccagcttgggcaacatggcgaaaccccgtctctactaaaaatacaaaaaattagctgggcatggtggcgggcacctgtaatcccagctacttgggaggctgaggca

SEQ ID NO: 136524 - DNA, 2482 bp, Homo sapiens
  Payload ID: 6710
  Gene Symbol: GGT6
  Gene Name: gamma-glutamyltransferase 6
  Uniprot ID: Q6P531
  ENST ID: ENST00000574154
  CDS Start-End: 298-1779
agtatcaaggttgtggcattaaggctgaactccttctcgacctcactgagctgtggccccttacaggcagtcaccccgggaaccctgtcgcgagagctcctcgggccttgtgtcctaatggggcaggctcacatgcagcctccttggccccgtgccctgcccagacctgttctggattccacccccacccttccccaaggtcgctgccacctcccacctgccaggcttgggcagggcctctgagacacagccggaaaggctggcaggcaggagggctggggcgagcactggggggccatggagcgggcagaagagcccgtggtctatcagaagctgctgccctgggagccaagcttggagtcggaggaggaagtggaggaggaggagacatcagaggcgctggttctaaacccccggaggcaccaggactcttccaggaacaaggctggcgggctgcccggaacctgggcccgtgtagtggcagccctgctgctgctggctgttggctgctccctggctgtgaggcagctccagaatcagggcaggtcgacaggaagcttgggctctgtggcccctccacccggcggacactcccacggccctggcgtataccaccacggtgccatcatcagccctgcaggccgagagctgcttgttgccgggggcaacgtcgtggatgctggagttggagctgcattgtgcctggcagtggtgcatcctcatgccacggggctaggtgccatgttttggggcctcttccacgatagctcctcaggcaattccacggccctgacatcaggcccagcacagaccctggcccccggcctggggctgcccgcggctctgcccaccctgcacctgctgcatgcacgcttcggccgcctgccctggccacgcctgctagtgggccccaccacgctggctcaggagggcttcctggtggacacacccctggcaagggctctggtggctcggggcacagaaggcctctgtccactactttgccatgctgatgggacacccctgggcgctggggcccgagccaccaacccacaactggcagctgtgcttcgcagcgcagccctcgctcccacctcagaccttgctggggatgctctactgagtctactggcgggagacctgggggtggaggtgccctcggctgtgcccaggcccactttggaaccagcagagcagctacctgtgccccagggcatcctgttcaccacccccagtccctcagctggcccagaactgctggcactgttggaggcagccctgcgctccggggcgcccatccctgacccctgcccaccgttcctgcagactgctgtgagccccgagagcagtgccctggccgccgtggacagcagcggctctgtgctccttctcacctcctcgctcaactgctcctttggctctgcacacctgtccccaagcactggggttctgctcagcaacctggtggccaagtctaccactagtgcctgggcctgccccctcatcctccgtggcagcctggatgacacagaggctgatgtgttggggcttgtggcttcagggacccctgatgtggccagggccatgactcacaccctactcaggcatctggcagcaaggccccctacccaggcccagcaccagcatcagggtcagcaagaaccaacagagcatcccagcacttgtggccaagggaccctgctccaggtggcagcccacacagagcacgcccatgtctccagtgtcccccatgcctgctgccccttccaggggttctaacaggatgggggtgggtctggcagaaggcagagttatctgaagcatgggggcaggagcagagcagacacagcagcaatggagtgtgcacccgcagggtgtggtgcctcacacctgtaatctcagcactttgggtggtcaaggcaggaagatacctcgaggccaggagtttgaaactagcctagacaacaaagcaagatctcatctgtactaaaaatttaaaaatttgccaggggcggtggcacatgcctgttgtcccagctgcttgggaggctgaggcaggaagctcgcttgagctcaggagttcaaggctgcagagagctaggatcacaccactgcactccagcctggacaacagagtgagaacctgtctttaaaataataataataataataaaaaaatagctgggtgcggtggctcatgcctgtaatcccagcactttgggaggccaaggcaggtggatcacctgaggctaggagttcgagaccagcttgggcaacatggcgaaaccccgtctctactaaaaatacaaaaaattagctgggcatggtggcgggcacctgtaatcccagctacttgggaggctgaggcaggagaatcacttgaacccgagaggtggaggttgcagtgaaccaagatcgcaccattgcaaccccacctgggcaacaagagggaaaccctgtctaaaaaaaaaaaaaaaaaaaa

SEQ ID NO: 136525 - DNA, 583 bp, Homo sapiens
  Payload ID: 6710
  Gene Symbol: GGT6
  Gene Name: gamma-glutamyltransferase 6
  ENST ID: ENST00000574584
  CDS Start-End: 44-583
aaaggctggcaggcaggagggctggggcgagcactggggggccatggagcgggcagaagagcccgtggtctatcagaagctgctgccctgggagccaagcttggagtcggaggaggaagtggaggaggaggagacatcagaggcgctggttctaaacccccggaggcaccaggactcttccaggaacaaggctggcgggctgcccggaacctgggcccgtgtagtggcagccctgctgctgctggctgttggctgctccctggctgtgaggcagctccagaatcagggcaggtcgacaggaagcttgggctctgtggcccctccacccggcggacactcccacggccctggcgtataccaccacggtgccatcatcagccctgcaggccgagagctgcttgttgccgggggcaacgtcgtggatgctggagttggagctgcattgtgcctggcagtggtgcatcctcatgccacggggctagactgctgtgagccccgagagcagtgccctggccgccgtggacagcagcggctctgtgctccttctcacctcctcgctcaactgctcctttggctctgcaca

SEQ ID NO: 136526 - DNA, 1730 bp, Homo sapiens
  Payload ID: 6710
  Gene Symbol: GGT6
  Gene Name: gamma-glutamyltransferase 6
  ENST ID: ENST00000573591
  CDS Start-End: 498-1535
tttcccatccccatgtctgcccaagatgcacccgctgccaagaagccctttctccttggctgacttgtgctcctcttgctaaatcaaaccttttgggaaatattccctggggtctcttggggtccttgggcatccctctgtcccagccgtggctcaggacaccccccctctgcaggaacaaggctggcgggctgcccggaacctgggcccgtgtagtggcagccctgctgctgctggctgttggctgctccctggctgtgaggcagctccagaatcagggcaggtcgacaggaagcttgggctctgtggcccctccacccggcggacactcccacggccctggcgtataccaccacggtgccatcatcagccctgcagccacatgctcccacctaggccgagagctgcttgttgccgggggcaacgtcgtggatgctggagttggagctgcattgtgcctggcagtggtgcatcctcatgccacggggctaggtgccatgttttggggcctcttccacgatagctcctcaggcaattccacggccctgacatcaggcccagcacagaccctggcccccggcctggggctgcccgcggctctgcccaccctgcacctgctgcatgcacgcttcggccgcctgccctggccacgcctgctagtgggccccaccacgctggctcaggagggcttcctggtggacacacccctggcaagggctctggtggctcggggcacagaaggcctctgtccactactttgccatgctgatgggacacccctgggcgctggggcccgagccaccaacccacaactggcagctgtgcttcgcagcgcagccctcgctcccacctcagaccttgctggggatgctctactgagtctactggcgggagacctgggggtggaggtgccctcggctgtgcccaggcccactttggaaccagcagagcagctacctgtgccccagggcatcctgttcaccacccccagtccctcagctggcccagaactgctggcactgttggaggcagccctgcgctccggggcgcccatccctgacccctgcccaccgttcctgcagactgctgtgagccccgagagcagtgccctggccgccgtggacagcagcggctctgtgctccttctcacctcctcgctcaactgctcctttggctctgcacacctgtccccaagcactggggttctgctcagcaacctggtggccaagtctaccactagtgcctgggcctgccccctcatcctccgtggcagcctggatgacacagaggctgatgtgttggggcttgtggcttcagggacccctgatgtggccagggccatgactcacaccctactcaggcatctggcagcaaggccccctacccaggcccagcaccagcatcagggtcagcaagaaccaacagagcatcccagcacttgtggccaagggaccctgctccaggtggcagcccacacagagcacgcccatgtctccagtgtcccccatgcctgctgccccttccaggggttctaacaggatgggggtgggtctggcagaaggcagagttatctgaagcatgggggcaggagcagagcagacacagcagcaatggagtgtgcacccgcagggtgtggtgcctcacacctgtaatctcagcactttgggtggtcaaggcaggaagatacctcgaggccaggagtttgaaactagcctagacaacaaagcaag

SEQ ID NO: 136527 - DNA, 2642 bp, Homo sapiens
  Payload ID: 6711
  Gene Symbol: GGT7
  Gene Name: gamma-glutamyltransferase 7
  Uniprot ID: Q9UJ14
  ENST ID: ENST00000336431
  CDS Start-End: 46-2034
agccacttccggcaggcgctgcgctgctggggggcgcgggcgaggatggcggcggagaacgaggccagccaggagagcgccctgggcgcctactcgccagtggactacatgagcatcaccagcttcccgcggctgcccgaggacgagccggcgcccgcggccccgctgaggggccgcaaggacgaggacgcctttctgggagaccccgacaccgacccggactccttcctgaagtctgcacggctgcagcggctgccatcgtcgtcgtcggagatgggcagccaagacgggtcgccgctacgcgagacgcgcaaagacccgttctccgccgcagcggccgagtgctcctgccgccaggatgggctcacggtcatcgtcacggcctgtctcaccttcgctaccggtgtcaccgtggcgctggtcatgcagatctacttcggggacccccagatcttccagcagggtgccgtggtgaccgatgctgcccgctgcacttcactgggcatcgaggtgctcagtaaacagggatcttctgtggacgcagcggtggcagcagccttgtgtttgggtatcgtggctccacacagttctggcctgggcggtgggggcgtgatgctggtacatgacatccgacgaaatgagagccacctaattgatttccgggagtccgcaccaggggccctcagggaagagaccctgcaaagatcctgggagaccaagcctgggctcttggtgggggttcccggaatggtgaaggggctacatgaagctcaccagctctatggcaggctgccatggtcccaagtcctggcctttgcagcagctgtggcccaagatggcttcaacgtgactcatgatctagcccgtgccctggctgaacagctgccacccaacatgtccgagcgcttccgggagacgttcctgccatcgggccgcccgccactacctggctcgttgctgcatcggcccgacctggctgaggtgctggatgtacttggcacctccggcccggctgccttctacgcaggtggcaacctcacactggagatggtggccgaggctcagcacgcagggggtgtcataaccgaagaggacttcagcaattacagcgcccttgtggagaagcctgtgtgtggcgtgtacagaggccacctggttcttagtcccccacctccgcacacgggccctgccctcatcagtgctctcaacatcctggagggcttcaatctcaccagcctggtatcccgagaacaggctcttcactgggtggcagagaccctgaagattgcattagccctggccagcagactgggagatcccgtctatgattctaccatcactgagagcatggatgacatgctcagcaaggtggaggccgcctacctccggggccatatcaatgactcccaggcagcccctgccccactcctgcctgtctatgaactagacggagctcccacggctgcccaggtgctgatcatgggacctgatgacttcattgtggccatggttagctccctgaaccagccctttggcagcggccttatcaccccctcggggatcctgctcaacagccagatgctggacttctcctggcccaaccggacagctaaccactctgcacccagcctggagaattcagtgcagccagggaagcggccactctctttcctgctgcccacagtggtccgacccgcggaggggctctgtggaacctacctcgctctgggggccaatggagctgcgcggggcctcagcggcctgacacaggttctgctgaatgtcctgaccttgaaccggaacctgagtgacagcctggcccgcggccgcctacacccggacctgcagtccaacctcctgcaggtggacagtgagttcacagaggaagagattgagttcctggaagccaggggtcaccacgtggagaaagtagatgtcttatcctgggtccatggcagccgaaggaccaacaacttcatcatcgctgttaaggaccctcggagcccagatgcagctggagccaccatcctgtagagcagcggggtggggcggggtctctgctcccccactttgcatgttcccagagtccctccttctcccaggtttggtctcagggggaccccagggatgccccagatcaggggccagaggggatgcttagcaaacccaatcccagagtaactggaaaattctccatcaggaggcctgtggtggtggtggtggtggtggtggtggtggtggtggtggtgagtgtcagcatctacagtacagccaggcaggcaggaccttgaggaatcagactatctgtctgtgtgtcacctctcctccttcagccatgctggccccgagcttagggatgtgcttgcaaacccttctcaagggtctcacaaccccaacatcttcagactggcctgacctgggccttgtcttccagttcctttctcccattcccagcctcatttcttaaatgactaggaattttttaatggaccatcatagggagggggtgctcctcttttcccaccaggttgaggtgggggccttgcatcgggggtccccagggtatggggtaggggtgggggtgggcaccagctcaggggcttccatttgcaaagggaaattaaagaaagaatgttgcttaa

SEQ ID NO: 136528 - DNA, 615 bp, Homo sapiens
  Payload ID: 6711
  Gene Symbol: GGT7
  Gene Name: gamma-glutamyltransferase 7
  ENST ID: ENST00000427420
  CDS Start-End: 8-615
ggcgaggatggcggcggagaacgaggccagccaggagagcgccctgggcgcctactcgccagtggactacatgagcatcaccagcttcccgcggctgcccgaggacgagccggcgcccgcggccccgctgaggggccgcaaggacgaggacgcctttctgggagaccccgacaccgccgggcaccgttgccccgcctgtcctggggtgcacgcgaaaatgaggaaagacccggactccttcctgaagtctgcacggctgcagcggctgccatcgtcgtcgtcggagatgggcagccaagacgggtcgccgctacgcgagacgcgcaaagacccgttctccgccgcagcggccgagtgctcctgccgccaggatgggctcacggtcatcgtcacggcctgtctcaccttcgctaccggtgtcaccgtggcgctggtcatgcagatctacttcggggacccccagatcttccagcagggtgccgtggtgaccgatgctgcccgctgcacttcactgggcatcgaggtgctcagtaaacagggatcttctgtggacgcagcggtggcagcagccttgtgtttgggtatcgtggctccacacagttctggcctgggcgg

SEQ ID NO: 136529 - DNA, 427 bp, Homo sapiens
  Payload ID: 6711
  Gene Symbol: GGT7
  Gene Name: gamma-glutamyltransferase 7
  ENST ID: ENST00000470952
  CDS Start-End: 1-265
ctccctgaaccagccctttggcagcggccttatcaccccctcggggatcctgctcaacagccagatgctggacttctcctggcccaaccggacagctaaccactctgcacccagcctggagaattcagtgcagccagggaagcggccactctctttcctgctgcccacagtggtccgacccgcggaggggctctgtggaacctacctcgctctgggggccaatggagctgcgcggggcctcagcggcctgacacagggctgttaggaggctcagatgacacccggtgtaagaattctcaagactaaggagcctggaccaagggtgagagctgaggaatcctggaccatcacccctgggacagccctgatttttctgtaccttggctaccacaggttctgctgaatgtcctgaccttgaaccggaacc

SEQ ID NO: 136530 - DNA, 1064 bp, Homo sapiens
  Payload ID: 6711
  Gene Symbol: GGT7
  Gene Name: gamma-glutamyltransferase 7
  ENST ID: ENST00000469018
  CDS Start-End: 1-454
cccactcctgcctgtctatgaactagacggagctcccacggctgcccaggtgctgatcatgggacctgatgacttcattgtggccatggttagctccctgaaccagccctttggcagcggccttatcaccccctcggggatcctgctcaacagccagatgctggacttctcctggcccaaccggacagctaaccactctgcacccagcctggagaattcagtgcagccagggaagcggccactctctttcctgctgcccacagtggtccgacccgcggaggggctctgtggaacctacctcgctctgggggccaatggagctgcgcggggcctcagcggcctgacacagcatctgaatagacaaccagccctctttagggtgggatttgaaaggaagggcctgcttttctccagaacacctcagaatggctccatgaatgtcttgagaacctgatatatatgccaggcacctattttggcaggtggttctgctgaatgtcctgaccttgaaccggaacctgagtgacagcctggcccgcggccgcctacacccggacctgcagtccaacctcctgcaggtggacagtgagttcacagaggaagagattgagttcctggaagccaggggtcaccacgtggagaaagtagatgtcttatcctgggtccatggcagccgaaggaccaacaacttcatcatcgctgttaaggaccctcggagcccagatgcagctggagccaccatcctgtagagcagcggggtggggcggggtctctgctcccccactttgcatgttcccagagtccctccttctcccaggtttggtctcagggggaccccagggatgccccagatcaggggccagaggggatgcttagcaaacccaatcccagagtaactggaaaattctccatcaggaggcctgtggtggtggtggtggtggtggtggtggtggtggtggtggtgagtgtcagcatctacagtacagccaggcaggcaggaccttgaggaatcagactatctgtctgtgtgtcacctctcctccttcagccatgctggccccgag

SEQ ID NO: 136531 - DNA, 974 bp, Homo sapiens
  Payload ID: 6712
  Gene Symbol: GGTLC1
  Gene Name: gamma-glutamyltransferase light chain 1
  Uniprot ID: Q9BX51
  ENST ID: ENST00000278765
  CDS Start-End: 134-811
attgaatgcagcaagggtctggaggctgaggaccaggcagacaaacattcagagttgctggaatgcgacagagacagggagtcagactggtcatgcaaggccagctctggggtctcggcaggtggtccgcgacatgacctccgagttcttctctgcccagctccgggcccagatctctgacgacaccactcacccgatctcctactacaagcccgagttctacatgccggatgacgggggcactgctcacctgtctgtggtcgcagaggacggcagtgctgtgtccgccaccagcaccatcaacctctactttggctccaaggtgcgctccccagtcagcgggatcctgctcaataatgaaatggatgacttcagctctaccagcatcaccaacgagtttggggtacccccctcacctgccaatttcatccagccagggaagcagccgctctcgtccatgtgcccgacgatcatggtgggccaggacggccaggtccggatggtggtgggagctgccgggggcacgcagatcaccatggccactgcactggccatcatctacaacctctggttcggctatgacgtgaagtgggccgtggaggagccccggctgcacaaccagcttctgcccaacgtcacgacagtggagagaaacattgaccaggaagtgactgcagccctggagacccggcaccatcacacccagatcacgtccaccttcattgctgtggtgcaagccatcgtccgcatggctggtggctgggcagctgcctcggactccaggaaaggtggggaacctgctggctactgattgctccaggcggacaaggctgacaagcaatccaggaacaaaatactcaccaggacgaggaagaggactttgggggacaggcttctcctgtgagcagcagagcagcacaataaatgaggccactgtgccaggctccaggtggcctccctggcctgtctcccca

SEQ ID NO: 136532 - DNA, 1028 bp, Homo sapiens
  Payload ID: 6712
  Gene Symbol: GGTLC1
  Gene Name: gamma-glutamyltransferase light chain 1
  Uniprot ID: Q9BX51
  ENST ID: ENST00000286890
  CDS Start-End: 185-862
gtcagactggtcatgcaaggtcctgggcctgcccttgggtcctggggagccacggaaggttgtgggtgccagagggttgtggtcagagccacagtcaggggccttctgagacctgtgccccctccccaccctccctccccacctccctaggccagctctggggtctcggcaggtggtccgcgacatgacctccgagttcttctctgcccagctccgggcccagatctctgacgacaccactcacccgatctcctactacaagcccgagttctacatgccggatgacgggggcactgctcacctgtctgtggtcgcagaggacggcagtgctgtgtccgccaccagcaccatcaacctctactttggctccaaggtgcgctccccagtcagcgggatcctgctcaataatgaaatggatgacttcagctctaccagcatcaccaacgagtttggggtacccccctcacctgccaatttcatccagccagggaagcagccgctctcgtccatgtgcccgacgatcatggtgggccaggacggccaggtccggatggtggtgggagctgccgggggcacgcagatcaccatggccactgcactggccatcatctacaacctctggttcggctatgacgtgaagtgggccgtggaggagccccggctgcacaaccagcttctgcccaacgtcacgacagtggagagaaacattgaccaggaagtgactgcagccctggagacccggcaccatcacacccagatcacgtccaccttcattgctgtggtgcaagccatcgtccgcatggctggtggctgggcagctgcctcggactccaggaaaggtggggaacctgctggctactgattgctccaggcggacaaggctgacaagcaatccaggaacaaaatactcaccaggacgaggaagaggactttgggggacaggcttctcctgtgagcagcagagcagcacaataaatgaggccactgtgccaggctccaggtggcctccctggcctgtctccccactc

SEQ ID NO: 136533 - DNA, 1046 bp, Homo sapiens
  Payload ID: 6712
  Gene Symbol: GGTLC1
  Gene Name: gamma-glutamyltransferase light chain 1
  Uniprot ID: Q9BX51
  ENST ID: ENST00000335694
  CDS Start-End: 206-883
ctcgagagctgggctctgcgtcctcgtccagccgccaactcggccaaaggcgaagccagcagtttcttctgctgccgggcaacgcgccttttaaacctgagggagtgggcgcgtgagcacttaatggcgccggtgacagagtgagcttaacggattaataagcgcagccaggccagctctggggtctcggcaggtggtccgcgacatgacctccgagttcttctctgcccagctccgggcccagatctctgacgacaccactcacccgatctcctactacaagcccgagttctacatgccggatgacgggggcactgctcacctgtctgtggtcgcagaggacggcagtgctgtgtccgccaccagcaccatcaacctctactttggctccaaggtgcgctccccagtcagcgggatcctgctcaataatgaaatggatgacttcagctctaccagcatcaccaacgagtttggggtacccccctcacctgccaatttcatccagccagggaagcagccgctctcgtccatgtgcccgacgatcatggtgggccaggacggccaggtccggatggtggtgggagctgccgggggcacgcagatcaccatggccactgcactggccatcatctacaacctctggttcggctatgacgtgaagtgggccgtggaggagccccggctgcacaaccagcttctgcccaacgtcacgacagtggagagaaacattgaccaggaagtgactgcagccctggagacccggcaccatcacacccagatcacgtccaccttcattgctgtggtgcaagccatcgtccgcatggctggtggctgggcagctgcctcggactccaggaaaggtggggaacctgctggctactgattgctccaggcggacaaggctgacaagcaatccaggaacaaaatactcaccaggacgaggaagaggactttgggggacaggcttctcctgtgagcagcagagcagcacaataaatgaggccactgtgccaggctccaggtggcctccctggcctgtctcccca

SEQ ID NO: 136534 - DNA, 678 bp, Homo sapiens
  Payload ID: 6713
  Gene Symbol: GGTLC2
  Gene Name: gamma-glutamyltransferase light chain 2
  ENST ID: ENST00000448514
  CDS Start-End: 1-678
atgacctctgagttcttcgctgcccagctccgggcccagatctctgacgacaccactcacccgatctcctactacaagcccgagttctacacgccggttgatgggggcactgctcacctgtctgtcgtcgcagaggacggcagtgctgtgtccgccaccagcaccatcaacctctactttggctccaaggtccgctccccggtcagcgagatcctgttcaatgatgaaatggatgacttcagctctcccaacatcaccaacgagtttggggtgcccccctcacctgccaatttcatccagccagggaagcagccgctctcgtcaatgtgcccgacgatcatggtgggccaggacggccaggtccggatggtggtgggagctgctgggggcacacagatcaccacagccactgcactggccatcatctacaacctctggttcggctatgacgtgaagcgggccgtggaggagccccggctgcacaaccagcttctgcccaacgtcacgacagtggagagaaacattgaccaggcagtgactgcagccctggagacccggcaccatcacacccagatcgcgtccaccttcatcgctgtggtgcaagccatcgtccgcacggctggtggctgggcagctgcctcggactccaggaaaggcggggagcctgccggctactga

SEQ ID NO: 136535 - DNA, 657 bp, Homo sapiens
  Payload ID: 6713
  Gene Symbol: GGTLC2
  Gene Name: gamma-glutamyltransferase light chain 2
  Uniprot ID: Q14390
  ENST ID: ENST00000480559
  CDS Start-End: 1-657
atgacctctgagttcttcgctgcccagctccgggcccagatctctgacgacaccactcacccgatctcctactacaagcccgagttctacacgccggttgatgggggcactgctcacctgtctgtcgtcgcagaggacggcagtgctgtgtccgccaccagcaccatcaacctctactttggctccaaggtccgctccccggtcagcgagatcctgttcaatgatgaaatggatgacttcagctctcccaacatcaccaacgagtttggggtgcccccctcacctgccaatttcatccagccagggaagcagccgctctcgtcaatgtgcccgacgatcatggtgggccaggacggccagcccccaagccatgctgatcacactcccatgccccaggccatcatctacaacctctggttcggctatgacgtgaagcgggccgtggaggagccccggctgcacaaccagcttctgcccaacgtcacgacagtggagagaaacattgaccaggcagtgactgcagccctggagacccggcaccatcacacccagatcgcgtccaccttcatcgctgtggtgcaagccatcgtccgcacggctggtggctgggcagctgcctcggactccaggaaaggcggggagcctgccggctactga

SEQ ID NO: 136536 - DNA, 973 bp, Homo sapiens
  Payload ID: 6713
  Gene Symbol: GGTLC2
  Gene Name: gamma-glutamyltransferase light chain 2
  ENST ID: ENST00000613850
  CDS Start-End: 134-811
attgaatgcagcaagggtctggaggctgaggaccaggcagacagacattcagagttgctggaatgcgacagagacagggagtcagactggtcatgcaaggccagctctggggtctcggcaggtggtccacaacatgacctctgagttcttcgctgcccagctccgggcccagatctctgacgacaccactcacccgatctcctactacaagcccgagttctacacgccggttgatgggggcactgctcacctgtctgtcgtcgcagaggacggcagtgctgtgtccgccaccagcaccatcaacctctactttggctccaaggtccgctccccggtcagcgagatcctgttcaatgatgaaatggatgacttcagctctcccaacatcaccaacgagtttggggtgcccccctcacctgccaatttcatccagccagggaagcagccgctctcgtcaatgtgcccgacgatcatggtgggccaggacggccaggtccggatggtggtgggagctgctgggggcacacagatcaccacagccactgcactggccatcatctacaacctctggttcggctatgacgtgaagcgggccgtggaggagccccggctgcacaaccagcttctgcccaacgtcacgacagtggagagaaacattgaccaggcagtgactgcagccctggagacccggcaccatcacacccagatcgcgtccaccttcatcgctgtggtgcaagccatcgtccgcacggctggtggctgggcagctgcctcggactccaggaaaggcggggagcctgccggctactgagtgctccaggaggacaaggctgacaagcaatccagggacaagatactcaccaggaccaggaaggggactctgggggactggcttcccctgtgagcagcagagcagcacaataaatgaggccactgtgccaggctccaggtggcctccctgccctgtctcccc

SEQ ID NO: 136537 - DNA, 1047 bp, Homo sapiens
  Payload ID: 6713
  Gene Symbol: GGTLC2
  Gene Name: gamma-glutamyltransferase light chain 2
  ENST ID: ENST00000618722
  CDS Start-End: 208-885
ctcgagagctgggctctgagcgtcctcgtccagccgccaactcggccaacggctaagccagcagtttcttctgttgccgggcaacgcgccttttaaacctgagggagcgggcgcgtgagcacatcacggcgcccgtgacagagcgagcttaacggattaataagcgcagccaggccagctctggggtctcggcaggtggtccacaacatgacctctgagttcttcgctgcccagctccgggcccagatctctgacgacaccactcacccgatctcctactacaagcccgagttctacacgccggttgatgggggcactgctcacctgtctgtcgtcgcagaggacggcagtgctgtgtccgccaccagcaccatcaacctctactttggctccaaggtccgctccccggtcagcgagatcctgttcaatgatgaaatggatgacttcagctctcccaacatcaccaacgagtttggggtgcccccctcacctgccaatttcatccagccagggaagcagccgctctcgtcaatgtgcccgacgatcatggtgggccaggacggccaggtccggatggtggtgggagctgctgggggcacacagatcaccacagccactgcactggccatcatctacaacctctggttcggctatgacgtgaagcgggccgtggaggagccccggctgcacaaccagcttctgcccaacgtcacgacagtggagagaaacattgaccaggcagtgactgcagccctggagacccggcaccatcacacccagatcgcgtccaccttcatcgctgtggtgcaagccatcgtccgcacggctggtggctgggcagctgcctcggactccaggaaaggcggggagcctgccggctactgagtgctccaggaggacaaggctgacaagcaatccagggacaagatactcaccaggaccaggaaggggactctgggggactggcttcccctgtgagcagcagagcagcacaataaatgaggccactgtgccaggctccaggtggcctccctgccctgtctcccc

SEQ ID NO: 136538 - DNA, 968 bp, Homo sapiens
  Payload ID: 6714
  Gene Symbol: GGTLC3
  Gene Name: gamma-glutamyltransferase light chain 3
  Uniprot ID: B5MD39
  ENST ID: ENST00000619998
  CDS Start-End: 134-811
attgaatgcggcaagggtctggaggctgaggaccaggcagacagacattcagagttgctggaacgcgacagagacagggagtcagactggtcatgcaaggccagctctggggtctcagcaggtggtccgcaacatgacctctgagttcttcgctgcccagctccggtcccagatctctgaccacaccactcacccgatctcctactacaagcccgagttctacacgccggatgacgggggcactgctcacctgtctgtcgtcgcagaggacggcagtgctgtgtccgccaccagcaccatcaacctctactttggctccaaggtctgctccccggtcagtgggatcctgttcaataatgaatggacgacttcagctctcccagcattcaccaatgagtttggggcacccccctcacctgccaatttcatccagccagggaagcagccgctcttgtccatgtgcccgacgatcatggtgggccaggacggccaggtccggatggtggtgggagctgctgggggcacgcagatcaccacagacactgcactggccatcatctacaacctctggttcggctatgacgtgaagagggccgtggaggagccccggctgcacaacaagcttctgcccaacgtcacgacagtggagagaaacattgaccaggcagtgactgcagccctggagacccggcaccatcacacccagatcgcatccaccttcatcgctgtggtgcaagccatcgtccgcacggctggtggctgggcagctgcctcggactccaggaaaggcggggaacctgctggctactgattgctccaggcagacaaggctgacaagcaatccagggacaagatactcaccaggatgaggaagaggactttgggggacgggcttcccctgtgagcagcagagcagcataataaatgaggccactgtgccaggctccaggtggcctccctggcctgtc

SEQ ID NO: 136539 - DNA, 3251 bp, Homo sapiens
  Payload ID: 6715
  Gene Symbol: GSAP
  Gene Name: gamma-secretase activating protein
  Uniprot ID: A4D1B5
  ENST ID: ENST00000257626
  CDS Start-End: 80-2644
cgagggcgaggcggccacgcggggccgggaatgcccgcggtgcggggccccagagccgcccggtggtcgtgtccgggcgatggctcttcgcctggtcgccgacttcgacctcgggaaggacgtgctcccgtggttgcgggcgcagcgggcagtgtcggaggccagcggggccggaagcggcggcgcagatgttttagaaaacgattatgagagcttacatgtattaaatgttgaaagaaatggaaatattatttatacctataaggatgataagggaaatgtcgtctttggattatatgattgtcaaaccagacaaaatgagcttctatatacctttgagaaagacttgcaagttttcagttgctctgtcaacagtgaaaggactttgcttgctgcaagtttagttcagtctactaaagaaggaaaaaggaacgaacttcaaccaggatcaaagtgcttgactttgttggttgaaatccaccctgttaacaatgtgaaggttctaaaggctgtggatagctatatttgggttcagtttctctacccacatattgaaagtcatcctcttccagagaaccatctgttactgatttcagaagagaaatatattgaacaatttcgtatccatgtcgcccaagaagatggaaatagagtggtgattaaaaattctggccatctcccaagagacagaatagctgaggatttcgtttgggctcagtgggatatgtcagaacagagattatattacattgacctgaagaaatcaaggagtatcttaaaatgtatccagttttatgctgatgagagctataacttaatgtttgaagtacccttggacatatcattaagcaactcaggatttaaacttgtcaactttggatgtgattatcatcaataccgagataaattttccaaacacctgactctgtgtgtttttaccaaccatacaggaagtttgtgtgtatgttacagcccgaagtgtgcctcttggggacaaatcacatattcagtgttttacattcataaaggacacagcaagaccttcaccacttctcttgagaatgttgggtcacacatgacaaagggcattacttttctcaaccttgactattatgtggctgtttacttacctggtcatttcttccacctacttaatgttcaacatccagacctgatctgccacaatctctttctgacaggaaataatgaaatgattgatatgctacctcattgccctttacagtcattgtcagggtccctggtattggattgttgttctggaaagctctatagagcactgctcagccagtcgtctttattacagcttctgcagaacacttgcttagactgtgagaagatggctgcgttgcactgcgcgctctactgcggtcaaggtgcgcagttcctggaagcccagattattcagtggatttctgagaatgtctctgcctgccattcatttgacctcattcaggaatttataattgcttcttcatactggagtgtatattcagagacaagtaacatggacaaactattgccacattcctcagtgctcacttggaatacagaaattcctggaataactcttgtgacagaagacattgcattgcctcttatgaaggtgctcagctttaagggctactgggaaaaactgaactccaacctagaatatgttaagtacgccaagccacacttccactataacaacagtgtggtcaggagagagtggcacaacctgatctctgaagagaaaacaggaaaaagaaggtctgcggcatacgtgaggaatattcttgataatgcagtaaaggtgatttctaacctagaagcaagaaatttggggccaagattaacacccctcctgcaggaggaagacagccaccagcggctgctcatggggctgatggtgtctgagctaaaagaccattttttgagacacctacagggtgtagaaaagaagaaaattgaacagatggttctggactacatttcaaaactgctggatctcatttgccacatcgtagaaaccaattggaggaaacataatcttcattcctgggttctccacttcaatagtcgtggcagtgctgctgaatttgcagtttttcacatcatgaccaggattctggaagctacaaacagtttgtttttacctctgcctcctggttttcatactctgcacaccatcctcggggtccagtgtctccctttgcataacctgctgcattgcattgacagtggagtgttgcttctcactgaaacagctgtcataaggctcatgaaagatctggataatacagagaaaaatgaaaaactgaaattcagtatcattgtgcggcttcctccgcttattgggcagaagatttgtagactttgggatcatcctatgagttctaacatcatttcgcggaaccacgtgacgcgactgcttcagaactataagaaacagcctcggaattctatgattaacaagtcatcgttcagtgtagaatttctgcctctgaactacttcattgaaattctgacagatatagagtcctccaatcaagccctgtatccttttgaaggacatgacaatgtggatgcagaatttgtagaggaagcagctctgaaacacaccgcgatgcttttaggcttatgaaaaagaaaacgcaattggatctgctgctgccattttaatcttgctcattaaccttactcctttgagaattctttaacaatatttaaaattggtaacaaaaatagtttagccataattgtttagccatgtgagtttcaggttggtacacgttcagacagaactgctgtatcacattccaattttgaatagccagtgagcaatcaagtgtagagaaatgataaatggcctaagaaggcatacagtggcataaacgatgctcttcctagtagcttaataggccacaagctagtttctgttgcactctgaaataaaatatgctttaaaaatgtagggaacagtgcttagaaaagcaaaaactaggtgtgtcattgaaataataggcataaaaattaaatgttacataagaacactatttggaaagagggtccttttaaaaactgaatttgtactaaatcagatttgccatgtccagtacagaataatttgtacttagtatttgcagcagggtttgtctttgtgaattcagatgaaacatatttatttttttttatttataaaaggttgatttaggaatattttgtcagtcattaaaaaacctgaaaacata

SEQ ID NO: 136540 - DNA, 564 bp, Homo sapiens
  Payload ID: 6715
  Gene Symbol: GSAP
  Gene Name: gamma-secretase activating protein
  ENST ID: ENST00000415112
  CDS Start-End: 1-564
gtgctcagctttaagggctactgggaaaaactgaactccaacctagaatatgttaagtacgccaagccacacttccactataacaacagtgtggtcaggagagagtggcacaacctgatctctgaagagaaaacaggaaaaagaaggtctgcggcatacgtgaggaatattcttgataatgcagtaaaggtgatttctaacctagaagcaagaaatttggggccaagattaacacccctcctgcaggaggaagacagccaccagcggctgctcatggggctgctggatctcatttgccacatcgtagaaaccaattggaggaaacataatcttcattcctgggttctccacttcaatagtcgtggcagtgctgctgaatttgcagtttttcacatcatgaccaggattctggaagctacaaacagtttgtttttacctctgcctcctggttttcatactctgcacaccatcctcggggtccagtgtctccctttgcataacctgctgcattgcattgacagtggagtgttgcttctcactgaaacagctgtcataaggctcatg

SEQ ID NO: 136541 - DNA, 600 bp, Homo sapiens
  Payload ID: 6715
  Gene Symbol: GSAP
  Gene Name: gamma-secretase activating protein
  ENST ID: ENST00000430584
  CDS Start-End: 401-577
gcatcccacctcccggggggttcatcggcagcgcaggggctttgccaagacaggagtgctcctggaagcttcacgttttgagaaagaatccgtgaccaccaagcaaaccaccctatacctaacggtggaacagtttgtccccacatttgcgagacgtgtttatgtgtctgttgaaccgtgtccgtggctcaggggacatgggcctcggcggtgaggcgcaagagggcaggggccgcctccaggctgcgcgcggcggggcgagagcccccagccgcccccgagctccgcacctgtgcaggctggggctgcgcgcgagatgctcggctcccggccctgccactccgggctttttgatgatttgatgttttagaaaacgattatgagagcttacatgtattaaatgttgaaagaaatggaaatattatttatacctataaggatgataagggaaatgtcgtctttggattatatgattgtcaaaccagacaaaatgagcttctatatacctttgagaaagacttgcaagttttcagttgctctgtcaacagtgaaaggactttgcttgctgcaagtttagttcagtctactaaagaaggaaaa

SEQ ID NO: 136542 - DNA, 737 bp, Homo sapiens
  Payload ID: 6715
  Gene Symbol: GSAP
  Gene Name: gamma-secretase activating protein
  ENST ID: ENST00000441833
  CDS Start-End: 175-702
aggaagacagccaccagcggctgctcatggggctgatggtgtctgagctaaaagaccattttttgagacacctacagggtgtagaaaagaagaaaattgaacagatggttctggactacatttcaaaactgcaatagtcgtggcagtgctgctgaatttgcagtttttcacatcatgaccaggattctggaagctacaaacagtttgtttttacctctgcctcctggttttcatactctgcacaccatcctcggggtccagtgtctccctttgcataacctgctgcattgcattgacagtggagtgttgcttctcactgaaacagctgtcataaggctcatgaaagatctggataatacagagaaaaatgaaaaactgaaattcagtatcattgtgcggcttcctccgcttattgggcagaagatttgtagactttgggatcatcctatgagttctaacatcatttcgcggaaccacgtgacgcgactgcttcagaactataagaaacagcctcggaattctatgattaacaagtcatcgttcagtgtagaatttctgcctctgaactacttcattgaaattctgacagatatagagtcctccaatcaagccctgtatccttttgaaggacatgacaatgtggatgcagaatttgtagaggaagcagctctgaaacacaccgcgatgcttttaggcttatgaaaaagaaaacgcaattggatctgctgctgccattt

SEQ ID NO: 136543 - DNA, 3666 bp, Homo sapiens
  Payload ID: 6716
  Gene Symbol: GDAP1
  Gene Name: ganglioside induced differentiation associated protein 1
  Uniprot ID: Q8TB36
  ENST ID: ENST00000220822
  CDS Start-End: 81-1157
ggaaacgccttgcggggcagtgtgggagggagaagtccagggcggacaggctgggcgcacccgtgctcgcgcaccccaagatggctgagaggcaggaagagcagagagggagcccgcccttgagggcggaaggcaaggccgacgcggaggttaagctcattctgtaccattggacgcattccttcagctctcaaaaggtgcgcttggtaattgctgaaaaggcattgaagtgcgaggaacatgatgtaagtctgcccttgagtgagcacaatgagccttggtttatgcgtttgaactcaactggagaagtgcctgtccttatccacggggaaaacataatttgtgaggccactcagatcattgattatcttgaacagactttcctggatgaaagaacacccaggttaatgcctgataaagaaagcatgtattacccacgggtacaacattaccgagagctgcttgactccttgccaatggatgcctatacacatggctgcattttacatcctgagttaactgtggactccatgatcccggcttatgcaactacaaggattcgtagccaaattggaaacacagagtctgagctgaagaaacttgctgaagaaaacccagatttacaagaagcatacattgcaaaacagaaacgacttaaatcaaagctgcttgatcatgacaatgtcaagtatttgaagaaaattcttgatgagttggagaaagtcttggatcaggttgaaactgaattgcaaagaagaaatgaagaaaccccagaagagggccagcaaccttggctctgcggtgaatccttcaccctggcagacgtctcactcgctgtcacattgcatcgactgaagttcctggggtttgcaaggagaaactggggaaacggaaagcgaccaaacttggaaacctattacgagcgtgtcttgaagagaaaaacatttaacaaggttttaggacatgtcaacaatatattaatctctgcagtgctgccaacagcattccgggtggccaagaaaagggccccaaaagttcttggcacgacccttgtggttggtttgcttgcaggagtgggatattttgcttttatgcttttcagaaagaggcttggcagcatgatattagcatttagacccagaccaaattatttctaggtttgttgggatcttgtcgtggcagctcatccaagcatttagctagaccctgtgattgcccgtggctctctgagtctgtcttattgagtagttagcagtattttttcctaaaattcagaagtcatctttgttacacaacacaggggttcaggtagcaataggacacaaaattgctttattctacaactgccagctccaggcagaaataggaaggcaaagagataagagaaggaaaaatgagagaatgaagtctgtatagggtagagcaatagaaagtaagcttcgggtgcctccaacgttcatggctgcctgtctcattggtaaacctcacatttagttacttgtggctactgcccacacatacacttctgtaattgagaactcttaggagaggactagggaatcactggggatagtgggctggagagaaccccaggctttatatgtatactttgacctcagtgttaattttaaatgcttatgaatcacacacattgctttagtaagattaagtgcttatatactagaaatttgatgctcattggaacacatctgcctagcatttctgtaaaagtcttaagtgatattaagatgattccttaccatttcagatggtccgcaatttgaattaccaagtggtaatggttccttactgttttagatggtgcctgtgagataccattcctctggatggtcatgtccagtcagtgggaggtagaaagggtggcatctgtagccctcttcatacacataagtggcatttaggtgaatgtcccagctaatcactagcatgtctaggtattggctgggtagtgggtattttgatgatctgggagcaccaaatatgttcattcttcgtttggggaggctggtctgtaaacacaaaaattgttgtccagatctttcatctgtttatgatcatcaacaaagacttgttagaaaggtctagtcttagcacttggcagttaatctagggaagatgaattaaatgggtagatagtgatgcatacctgtattcactgatgtatgtttaagggatttgggggggatacctcagttcatgtggaagggacagtctcggtgtgtcccatgaataaccttggaactgcaacaaatggtttgtgctcagaaaaagtctttcatggtgacaggaagacagtttccctggagctggccatgaaggccttagaagccatttctggtgtctggtgggtagcaggcatagagatgatgtgccgaggtcccagtgaacaacagtagccaaagaatgtactaactttatcattaataggaaagtcatacctaggaaacaatgactttttgatggcaaaatgattttttaattctattttgatgctgtaattccatttcatgacctagttgtattagaaaaccttgatgaactatatgttcccgatttacaaaaaaattaataaaacctccagagtaaactcagtcaaacaataattgagtagcagcttttataacatttaaaatttgcacatgagtgtgttgtcatatggagtgtctgaatctgttgctgggacataccaatccatgtattcattagagccatagaagttattattcattagttcatagtgtttgagttctttatgtcactctgttagaaacaagaactgagtcgtgaagaaataagaattggatttttataaaaacctctgaaggatatttacctatgaaaaagttgttaagaataaaaattagaagtccatggttaacttttccttcaatttatattattcctgaatcatagggaatctttctagaatgtgtttataatttccttgtacagtttctttggaaatacgttaaagatagtggcaatttcatatatttcatggatacttgagtttgtgcttttaaggtgtttgtttagggatacaatgaccactagatgtcgctgtttatccagtagactaagattgagtgttctttttgttcagcaactcttctaaaatgtttcaagcaaagatagtaatgacctcagtttctgaaataagggcatcttcatcagattattcttctgttttaaaaaaaagcttgaggcaaatgtgagtgatttccagtgctttgaaagggattacagtatcacacaatgtcaagctagagttaaacacagtattagctaaataggcacttatgtgtattttctttttcatgattatcggtgactggtcagtgtactcatcaatttccaaaatttgtataaatatcacaattagaaaaatgcctgaggtactaaagttatgttggctttttgtgtcttaacacacataaatactattgttattgcagcagatgccttttgaatccattttccataattgcggatagtcataaattgcttgctcaatttttagtaattattgctgttgacaccagcgttgtagatttttggtgttgttgaatgcagtagagagaccaagacactattctgtaagatcaataaaagtaattggaaaataaatatgaaccctaaaacaaa

SEQ ID NO: 136544 - DNA, 1228 bp, Homo sapiens
  Payload ID: 6716
  Gene Symbol: GDAP1
  Gene Name: ganglioside induced differentiation associated protein 1
  Uniprot ID: Q8TB36
  ENST ID: ENST00000434412
  CDS Start-End: 119-991
ccagggcggacaggctgggcgcacccgtgctcgcgcaccccaagatggctgagaggcattgaagtgcgaggaacatgatgtaagtctgcccttgagtgagcacaatgagccttggtttatgcgtttgaactcaactggagaagtgcctgtccttatccacggggaaaacataatttgtgaggccactcagatcattgattatcttgaacagactttcctggatgaaagaacacccaggttaatgcctgataaagaaagcatgtattacccacgggtacaacattaccgagagctgcttgactccttgccaatggatgcctatacacatggctgcattttacatcctgagttaactgtggactccatgatcccggcttatgcaactacaaggattcgtagccaaattggaaacacagagtctgagctgaagaaacttgctgaagaaaacccagatttacaagaagcatacattgcaaaacagaaacgacttaaatcaaagctgcttgatcatgacaatgtcaagtatttgaagaaaattcttgatgagttggagaaagtcttggatcaggttgaaactgaattgcaaagaagaaatgaagaaaccccagaagagggccagcaaccttggctctgcggtgaatccttcaccctggcagacgtctcactcgctgtcacattgcatcgactgaagttcctggggtttgcaaggagaaactggggaaacggaaagcgaccaaacttggaaacctattacgagcgtgtcttgaagagaaaaacatttaacaaggttttaggacatgtcaacaatatattaatctctgcagtgctgccaacagcattccgggtggccaagaaaagggccccaaaagttcttggcacgacccttgtggttggtttgcttgcaggagtgggatattttgcttttatgcttttcagaaagaggcttggcagcatgatattagcatttagacccagaccaaattatttctaggtttgttgggatcttgtcgtggcagctcatccaagcatttagctagaccctgtgattgcccgtggctctctgagtctgtcttattgagtagttagcagtattttttcctaaaattcagaagtcatctttgttacacaacacaggggttcaggtagcaataggacacaaaattgctttattctacaactgccagctccaggcagaaataggaaggcaaagagataagagaaggaaaaa

SEQ ID NO: 136545 - DNA, 1324 bp, Homo sapiens
  Payload ID: 6716
  Gene Symbol: GDAP1
  Gene Name: ganglioside induced differentiation associated protein 1
  ENST ID: ENST00000522568
  CDS Start-End: 19-201
gtgctcgcgcaccccaagatggctgagaggcaggaagagcagagagggagcccgcccttgagggcggaaggcaaggccgacgcggaggttaagctcattctgtaccattggacgcattccttcagctctcaaaaggtgcgcttggtaattgctgaaaaggcattgaagtgcgaggaacatgataaagaacacccaggttaatgcctgataaagaaagcatgtattacccacgggtacaacattaccgagagctgcttgactccttgccaatggatgcctatacacatggctgcattttacatcctgagttaactgtggactccatgatcccggcttatgcaactacaaggattcgtagccaaattggaaacacagagtctgagctgaagaaacttgctgaagaaaacccagatttacaagaagcatacattgcaaaacagaaacgacttaaatcaaagctgcttgatcatgacaatgtcaagtatttgaagaaaattcttgatgagttggagaaagtcttggatcaggttgaaactgaattgcaaagaagaaatgaagaaaccccagaagagggccagcaaccttggctctgcggtgaatccttcaccctggcagacgtctcactcgctgtcacattgcatcgactgaagttcctggggtttgcaaggagaaactggggaaacggaaagcgaccaaacttggaaacctattacgagcgtgtcttgaagagaaaaacatttaacaaggttttaggacatgtcaacaatatattaatctctgcagtgctgccaacagcattccgggtggccaagaaaagggccccaaaagttcttggcacgacccttgtggttggtttgcttgcaggagtgggatattttgcttttatgcttttcagaaagaggcttggcagcatgatattagcatttagacccagaccaaattatttctaggtttgttgggatcttgtcgtggcagctcatccaagcatttagctagaccctgtgattgcccgtggctctctgagtctgtcttattgagtagttagcagtattttttcctaaaattcagaagtcatctttgttacacaacacaggggttcaggtagcaataggacacaaaattgctttattctacaactgccagctccaggcagaaataggaaggcaaagagataagagaaggaaaaatgagagaatgaagtctgtatagggtagagcaatagaaagtaagcttcgggtgcctccaacgttcatggctgcctgtctcattggtaaacctcacatttagttacttgtggctactgcccacacatacacttctgtaa

SEQ ID NO: 136546 - DNA, 2265 bp, Homo sapiens
  Payload ID: 6717
  Gene Symbol: GDAP1L1
  Gene Name: ganglioside induced differentiation associated protein 1-like 1
  Uniprot ID: Q96MZ0
  ENST ID: ENST00000342560
  CDS Start-End: 89-1192
gcaggctcggcgaggccatgtgatgctgggcgagagagagccgccgcgccggagcctccttctttcctgcctctgattccgggctgtcatggcgacccccaacaatctgacccccaccaactgcagctggtggcccatctccgcgctggagagcgatgcggccaagccagcggaggcccccgacgctcccgaggcggccagccccgcccattggcccagggagagcctggttctgtaccactggacccagtccttcagctcgcagaaggtgcggctggtgatcgccgagaagggcctggtgtgcgaggagcgggacgtgagcctgccacagagcgagcacaaggagccctggttcatgcggctcaacctgggcgaggaggtgcccgtcatcatccaccgcgacaacatcatcagtgactatgaccagatcattgactatgtggagcgcaccttcacaggagagcacgtggtggccctgatgcccgaggtgggcagcctgcagcacgcacgggtgctgcagtaccgggagctgctggacgcactgcccatggatgcctacacgcatggctgcatcctgcatcccgagctcaccaccgactccatgatccccaagtacgccacggccgagatccgcagacatttagccaatgccaccacggacctcatgaaactggaccatgaagaggagccccagctctccgagccctacctttctaaacaaaagaagctcatggccaagatcttggagcatgatgatgtgagctacctgaagaagatcctcggggaactggccatggtgctggaccagattgaggcggagctggagaagaggaagctggagaacgaggggcagaaatgcgagctgtggctctgtggctgtgccttcaccctcgctgatgtcctcctgggagccaccctgcaccgcctcaagttcctgggactgtccaagaaatactgggaagatggcagccggcccaacctgcagtccttctttgagagggtccagagacgctttgccttccggaaagtcctgggtgacatccacaccaccctgctgtcggccgtcatccccaatgctttccggctggtcaagaggaaacccccatccttcttcggggcgtccttcctcatgggctccctgggtgggatgggctactttgcctactggtacctcaagaaaaaatacatctagggccaggcctggggcttggtgtctgactgtcggtgtctctgtgctgtgtgattccccgtgagctctcagtaactcactgtctcatgaacacttggacagccctccccgcccttcgttctgagtaataataccgtcagtgtgaaaacattccgtagtttagaagtagacgttgccaatgctgtgactcaaggccacggctctactaaaagagagagaggaagcgagagagagagagaaaaaacaaaaaacagaaaacacgaatgccttttctatcgattcaaggtctcaagatggaactgtggagactggttaggatctgaggtgagtcccaggatgtttcgtccaccagggcccagattctgggaggtgctggggactcagagggcctgacccctcacctccccttccctcttgcccagggaactcttccacaggacaaagccgacatcaagactcaactcctctaaccggtacctctgaatggggctggataaccggagaccccatgggaggtccctgaagatcagaaggggcttcacgcttctcctggacatggactagcttgagccaaggcagtggcacccaaaaaccaggctgcagtggggacggataccatgagcacaccctctcattgtccttctgatttggtccatgtgttgggtttggccttagtagaaatctctgaaggcagcagccatcatcctcttcctaccttgagtttttctaccctgtgaggtgggactttcagtaaaagccatgttgaccctctctcagaaggtcagtccagcccaagtgcaggggcggatctggaggtggacaaacctaggtccccctcctagcctctgtccaagccatctccttcaatatcccccccttcctgtcactcccggggctgtccctgtactacacggtgccatggagccggggagagcggggaagtctctgcatccatgccacccaccccagtcgggtctcactttcctgtgccttttgcatgttgggaaagggtcttggtgtcactgccgctcatgcatagaaaccaccaaaagccccaataaagcatccaggaggaa

SEQ ID NO: 136547 - DNA, 722 bp, Homo sapiens
  Payload ID: 6717
  Gene Symbol: GDAP1L1
  Gene Name: ganglioside induced differentiation associated protein 1-like 1
  Uniprot ID: Q96MZ0
  ENST ID: ENST00000372952
  CDS Start-End: 3-446
tcatggcgacccccaacaatctgacccccaccaactgcagctggtggcccatctccgcgctggagagcgatgcggccaagccagcggaggcccccgacgctcccgaggcggccagccccgcccattggcccagggagagcctggttctgtaccactggacccagtccttcagctcgcagaaggtgcggctggtgatcgccgagaagggcctggtgtgcgaggagcgggacgtgagcctgccacagagcgagcacaaggagccctggttcatgcggctcaacctgggcgaggaggtgcccgtcatcatccaccgcgacaacatcatcagtgactatgaccagatcattgactatgtggagcgcaccttcacaggaggaccccgcctggcagcaagtctggagctgagaggagctaaccctcggggacagcttggcagagcccagtgaggagagatggccgggccaccactagaatcccctgtccgccagcagccaagcccgagcatgggggtgcccagggcctctgggcagagacatcttggggctcagggatgccgggggcaggtggccggggcaggtgcccctctggcttccctgcccagcccctggcggtgcccacagagcacgtggtggccctgatgcccgaggtgggcagcctgcagcacgcacgggtgctgcagtaccgggagctgctggacgcactgcccatggatgcctacacgc

SEQ ID NO: 136548 - DNA, 538 bp, Homo sapiens
  Payload ID: 6717
  Gene Symbol: GDAP1L1
  Gene Name: ganglioside induced differentiation associated protein 1-like 1
  ENST ID: ENST00000447658
  CDS Start-End: 1-372
ttggagcatgatgatgtgagctacctgaagaagatcctcggggaactggccatggtgctggaccagattgaggcggagctggagaagaggaagctggagaacgaggggcagaaatgcgagctgtggctctgtggctgtgccttcaccctcgctgatgtcctcctgggagccaccctgcaccgcctcaagttcctgggactgtccaagaaatactgggaagatggcagccggcccaacctgcagtccttctttgagagggtccagagacgctttgccttccggaaagtctcaagatggaactgtggagactggttaggatctgagggaactcttccacaggacaaagccgacatcaagactcaactcctctaaccggtacctctgaatggggctggataaccggagaccccatgggaggtccctgaagatcagaaggggcttcacgcttctcctggacatggactagcttgagccaaggcagtggcacccaaaaaccaggctgcagtggggacggataccatgagcacaccctctcatt

SEQ ID NO: 136549 - DNA, 880 bp, Homo sapiens
  Payload ID: 6717
  Gene Symbol: GDAP1L1
  Gene Name: ganglioside induced differentiation associated protein 1-like 1
  ENST ID: ENST00000438466
  CDS Start-End: 16-880
tgattccgggctgtcatggcgacccccaacaatctgacccccaccaactgcagctggtggcccatctccgcgctggagagcgatgcggccaagccagcggaggcccccgacgctcccgaggcggccagccccgcccattggcccagggagagcctggttctgtaccactggacccagtccttcagctcgcagaaggtgcggctggtgatcgccgagaagggcctggtgtgcgaggagcgggacgtgagcctgccacagagcgagcacaaggagccctggttcatgcggctcaacctgggcgaggaggtgcccgtcatcatccaccgcgacaacatcatcagtgactatgaccagatcattgactatgtggagcgcaccttcacaggaggacatttagccaatgccaccacggacctcatgaaactggaccatgaagaggagccccagctctccgagccctacctttctaaacaaaagaagctcatggccaagatcttggagcatgatgatgtgagctacctgaagaagatcctcggggaactggccatggtgctggaccagattgaggcggagctggagaagaggaagctggagaacgaggggcagaaatgcgagctgtggctctgtggctgtgccttcaccctcgctgatgtcctcctgggagccaccctgcaccgcctcaagttcctgggactgtccaagaaatactgggaagatggcagccggcccaacctgcagtccttctttgagagggtccagagacgctttgccttccggaaagtcctgggtgacatccacaccaccctgctgtcggccgtcatccccaatgctttccggctggtcaagaggaaacccccatccttcttcggggcgtccttcc

SEQ ID NO: 136550 - DNA, 826 bp, Homo sapiens
  Payload ID: 6717
  Gene Symbol: GDAP1L1
  Gene Name: ganglioside induced differentiation associated protein 1-like 1
  ENST ID: ENST00000445952
  CDS Start-End: 1-754
gtccttcagctcgcagaaggtgcggctggtgatcgccgagaagggcctggtgtgcgaggagcgggacgtgagcctgccacagagcgagcacaaggagccctggttcatgcggctcaacctgggcgaggaggtgcccgtcatcatccaccgcgacaacatcatcagtgactatgaccagatcattgactatgtggagcgcaccttcacaggagagcacgtggtggccctgatgcccgaggtgggcagcctgcagcacgcacgggtgctgcagtaccgggagctgctggacgcactgcccatggatgcctacacgcatggctgcatcctgcatcccgagctcaccaccgactccatgatccccaagtacgccacggccgagatccgcagacatttagccaatgccaccacggacctcatgaaactggaccatgaagaggagccccagctctccgagccctacctttctaaacaaaagaagctcatggccaagatcttggagcatgatgatgtgagctacctgaagaagatcctcggggaactggccatggtgctggaccagattgaggcggagctggagaagaggaagctggagaacgagggtgggtgccagccctgggggaggtgggggctgcagcccacccagcctactcttcccctgcccagtctcagcctcttttttccgcaaaagtctcagaggacctcccaggtggttaagaggatgggctatggagtcagactaaggttcaagtcataacttggccacttcctagcttagtaaatgtggtcaggttctcccctctctgaaattcagtttcccatctataaa

SEQ ID NO: 136551 - DNA, 2855 bp, Homo sapiens
  Payload ID: 6717
  Gene Symbol: GDAP1L1
  Gene Name: ganglioside induced differentiation associated protein 1-like 1
  Uniprot ID: Q96MZ0
  ENST ID: ENST00000537864
  CDS Start-End: 78-1238
gaggccatgtgatgctgggcgagagagagccgccgcgccggagcctccttctttcctgcctctgattccgggctgtcatggcgacccccaacaatctgacccccaccaactgcagctggtggcccatctccgcgctggagagcgatgcggccaagccagcggaggcccccgacgctcccgaggcggccagccccgcccattggcccagggagagcctggttctgtaccactggacccagtccttcagctcgcagaaggtgcggctggtgatcgccgagaagggcctggtgtgcgaggagcgggacgtgagcctgccacagagcgagcacaaggagccctggttcatgcggctcaacctgggcgaggaggtgcccgtcatcatccaccgcgacaacatcatcagtgactatgaccagatcattgactatgtggagcgcaccttcacaggaggtggccggggcaggtgcccctctggcttccctgcccagcccctggcggtgcccacagagcacgtggtggccctgatgcccgaggtgggcagcctgcagcacgcacgggtgctgcagtaccgggagctgctggacgcactgcccatggatgcctacacgcatggctgcatcctgcatcccgagctcaccaccgactccatgatccccaagtacgccacggccgagatccgcagacatttagccaatgccaccacggacctcatgaaactggaccatgaagaggagccccagctctccgagccctacctttctaaacaaaagaagctcatggccaagatcttggagcatgatgatgtgagctacctgaagaagatcctcggggaactggccatggtgctggaccagattgaggcggagctggagaagaggaagctggagaacgaggggcagaaatgcgagctgtggctctgtggctgtgccttcaccctcgctgatgtcctcctgggagccaccctgcaccgcctcaagttcctgggactgtccaagaaatactgggaagatggcagccggcccaacctgcagtccttctttgagagggtccagagacgctttgccttccggaaagtcctgggtgacatccacaccaccctgctgtcggccgtcatccccaatgctttccggctggtcaagaggaaacccccatccttcttcggggcgtccttcctcatgggctccctgggtgggatgggctactttgcctactggtacctcaagaaaaaatacatctagggccaggcctggggcttggtgtctgactgtcggtgtctctgtgctgtgtgattccccgtgagctctcagtaactcactgtctcatgaacacttggacagccctccccgcccttcgttctgagtaataataccgtcagtgtgaaaacattccgtagtttagaagtagacgttgccaatgctgtgactcaaggccacggctctactaaaagagagagaggaagcgagagagagagagaaaaaacaaaaaacagaaaacacgaatgccttttctatcgattcaaggtctcaagatggaactgtggagactggttaggatctgaggtgagtcccaggatgtttcgtccaccagggcccagattctgggaggtgctggggactcagagggcctgacccctcacctccccttccctcttgcccagggaactcttccacaggacaaagccgacatcaagactcaactcctctaaccggtacctctgaatggggctggataaccggagaccccatgggaggtccctgaagatcagaaggggcttcacgcttctcctggacatggactagcttgagccaaggcagtggcacccaaaaaccaggctgcagtggggacggataccatgagcacaccctctcattgtccttctgatttggtccatgtgttgggtttggccttagtagaaatctctgaaggcagcagccatcatcctcttcctaccttgagtttttctaccctgtgaggtgggactttcagtaaaagccatgttgaccctctctcagaaggtcagtccagcccaagtgcaggggcggatctggaggtggacaaacctaggtccccctcctagcctctgtccaagccatctccttcaatatcccccccttcctgtcactcccggggctgtccctgtactacacggtgccatggagccggggagagcggggaagtctctgcatccatgccacccaccccagtcgggtctcactttcctgtgccttttgcatgttgggaaagggtcttggtgtcactgccgctcatgcatagaaaccaccaaaagccccaataaagcatccaggaggaacagttgcttttcatttctaaacctgtgctgtccatctagttctcattgccaagtgctggagccagaagggtagagatgtgaggtttcagtctcagttcttcacaagagcaagcaagagttgactgcctgtctcaagttgctgggtctggggctggcttccagactgactttccagggctctgaccttaacatcaacccagctcatttaggctcagccctttacaggttacagggcatgtgtacaaccctttgttctcattaacctgtgcaagggccaggtgtagtgactcatatttataatcccagtgctttgggaggccaaggcgggagaattgctccaggccaggagttcaagacaagcctgggcaatatagcgagaccccatctctagaaaataaaataaaataaacctatatatggacctcagggggcacccagggcacatgccccccaccccaatttcccagagggaaaaatgtatttaaaatgcccaaagaacattaaatcaggagtataatgtgtagaatataaggcatggttttac

SEQ ID NO: 136552 - DNA, 2645 bp, Homo sapiens
  Payload ID: 6717
  Gene Symbol: GDAP1L1
  Gene Name: ganglioside induced differentiation associated protein 1-like 1
  ENST ID: ENST00000617075
  CDS Start-End: 192-1028
gcagggagcctgacactgagggctggcggcttttctggcgcgggccagggggaggaggagaaaggagctcccgggatcccctcgccccctcccccaactgcccggtgcggctggtgatcgccgagaagggcctggtgtgcgaggagcgggacgtgagcctgccacagagcgagcacaaggagccctggttcatgcggctcaacctgggcgaggaggtgcccgtcatcatccaccgcgacaacatcatcagtgactatgaccagatcattgactatgtggagcgcaccttcacaggagagcacgtggtggccctgatgcccgaggtgggcagcctgcagcacgcacgggtgctgcagtaccgggagctgctggacgcactgcccatggatgcctacacgcatggctgcatcctgcatcccgagctcaccaccgactccatgatccccaagtacgccacggccgagatccgcagacatttagccaatgccaccacggacctcatgaaactggaccatgaagaggagccccagctctccgagccctacctttctaaacaaaagaagctcatggccaagatcttggagcatgatgatgtgagctacctgaagaagatcctcggggaactggccatggtgctggaccagattgaggcggagctggagaagaggaagctggagaacgaggggcagaaatgcgagctgtggctctgtggctgtgccttcaccctcgctgatgtcctcctgggagccaccctgcaccgcctcaagttcctgggactgtccaagaaatactgggaagatggcagccggcccaacctgcagtccttctttgagagggtccagagacgctttgccttccggaaagtcctgggtgacatccacaccaccctgctgtcggccgtcatccccaatgctttccggctggtcaagaggaaacccccatccttcttcggggcgtccttcctcatgggctccctgggtgggatgggctactttgcctactggtacctcaagaaaaaatacatctagggccaggcctggggcttggtgtctgactgtcggtgtctctgtgctgtgtgattccccgtgagctctcagtaactcactgtctcatgaacacttggacagccctccccgcccttcgttctgagtaataataccgtcagtgtgaaaacattccgtagtttagaagtagacgttgccaatgctgtgactcaaggccacggctctactaaaagagagagaggaagcgagagagagagagaaaaaacaaaaaacagaaaacacgaatgccttttctatcgattcaaggtctcaagatggaactgtggagactggttaggatctgaggtgagtcccaggatgtttcgtccaccagggcccagattctgggaggtgctggggactcagagggcctgacccctcacctccccttccctcttgcccagggaactcttccacaggacaaagccgacatcaagactcaactcctctaaccggtacctctgaatggggctggataaccggagaccccatgggaggtccctgaagatcagaaggggcttcacgcttctcctggacatggactagcttgagccaaggcagtggcacccaaaaaccaggctgcagtggggacggataccatgagcacaccctctcattgtccttctgatttggtccatgtgttgggtttggccttagtagaaatctctgaaggcagcagccatcatcctcttcctaccttgagtttttctaccctgtgaggtgggactttcagtaaaagccatgttgaccctctctcagaaggtcagtccagcccaagtgcaggggcggatctggaggtggacaaacctaggtccccctcctagcctctgtccaagccatctccttcaatatcccccccttcctgtcactcccggggctgtccctgtactacacggtgccatggagccggggagagcggggaagtctctgcatccatgccacccaccccagtcgggtctcactttcctgtgccttttgcatgttgggaaagggtcttggtgtcactgccgctcatgcatagaaaccaccaaaagccccaataaagcatccaggaggaacagttgcttttcatttctaaacctgtgctgtccatctagttctcattgccaagtgctggagccagaagggtagagatgtgaggtttcagtctcagttcttcacaagagcaagcaagagttgactgcctgtctcaagttgctgggtctggggctggcttccagactgactttccagggctctgaccttaacatcaacccagctcatttaggctcagccctttacaggttacagggcatgtgtacaaccctttgttctcattaacctgtgcaagggccaggtgtagtgactcatatttataatcccagtgctttgggaggccaaggcgggagaattgctccaggccaggagttcaagacaagcctgggcaatatagcgagaccccatctctagaaaataaaataaaataaacctatatatggacctcagggggcacccagggcacatgccccccaccccaatttcccagagggaaaaatgtatttaaaatgcccaaagaacattaaatcaggagtataatgtgtagaatataaggcatggttttac

SEQ ID NO: 136553 - DNA, 2585 bp, Homo sapiens
  Payload ID: 6717
  Gene Symbol: GDAP1L1
  Gene Name: ganglioside induced differentiation associated protein 1-like 1
  ENST ID: ENST00000612599
  CDS Start-End: 78-968
gaggccatgtgatgctgggcgagagagagccgccgcgccggagcctccttctttcctgcctctgattccgggctgtcatggcgacccccaacaatctgacccccaccaactgcagctggtggcccatctccgcgctggagagcgatgcggccaagccagcggaggcccccgacgctcccgaggcggccagccccgcccattggcccagggagagcctggttctgtaccactggacccagtccttcagctcgcagaaggtgcggctggtgatcgccgagaagggcctggtgtgcgaggagcgggacgtgagcctgccacagagcgagcacaaggagccctggttcatgcggctcaacctgggcgaggaggtgcccgtcatcatccaccgcgacaacatcatcagtgactatgaccagatcattgactatgtggagcgcaccttcacaggagagcacgtggtggccctgatgcccgaggtgggcagcctgcagcacgcacgggtgctgcagtaccgggagctgctggacgcactgcccatggatgcctacacgcatggctgcatcctgcatcccgagctcaccaccgactccatgatccccaagtacgccacggccgagatccgcaggcagaaatgcgagctgtggctctgtggctgtgccttcaccctcgctgatgtcctcctgggagccaccctgcaccgcctcaagttcctgggactgtccaagaaatactgggaagatggcagccggcccaacctgcagtccttctttgagagggtccagagacgctttgccttccggaaagtcctgggtgacatccacaccaccctgctgtcggccgtcatccccaatgctttccggctggtcaagaggaaacccccatccttcttcggggcgtccttcctcatgggctccctgggtgggatgggctactttgcctactggtacctcaagaaaaaatacatctagggccaggcctggggcttggtgtctgactgtcggtgtctctgtgctgtgtgattccccgtgagctctcagtaactcactgtctcatgaacacttggacagccctccccgcccttcgttctgagtaataataccgtcagtgtgaaaacattccgtagtttagaagtagacgttgccaatgctgtgactcaaggccacggctctactaaaagagagagaggaagcgagagagagagagaaaaaacaaaaaacagaaaacacgaatgccttttctatcgattcaaggtctcaagatggaactgtggagactggttaggatctgaggtgagtcccaggatgtttcgtccaccagggcccagattctgggaggtgctggggactcagagggcctgacccctcacctccccttccctcttgcccagggaactcttccacaggacaaagccgacatcaagactcaactcctctaaccggtacctctgaatggggctggataaccggagaccccatgggaggtccctgaagatcagaaggggcttcacgcttctcctggacatggactagcttgagccaaggcagtggcacccaaaaaccaggctgcagtggggacggataccatgagcacaccctctcattgtccttctgatttggtccatgtgttgggtttggccttagtagaaatctctgaaggcagcagccatcatcctcttcctaccttgagtttttctaccctgtgaggtgggactttcagtaaaagccatgttgaccctctctcagaaggtcagtccagcccaagtgcaggggcggatctggaggtggacaaacctaggtccccctcctagcctctgtccaagccatctccttcaatatcccccccttcctgtcactcccggggctgtccctgtactacacggtgccatggagccggggagagcggggaagtctctgcatccatgccacccaccccagtcgggtctcactttcctgtgccttttgcatgttgggaaagggtcttggtgtcactgccgctcatgcatagaaaccaccaaaagccccaataaagcatccaggaggaacagttgcttttcatttctaaacctgtgctgtccatctagttctcattgccaagtgctggagccagaagggtagagatgtgaggtttcagtctcagttcttcacaagagcaagcaagagttgactgcctgtctcaagttgctgggtctggggctggcttccagactgactttccagggctctgaccttaacatcaacccagctcatttaggctcagccctttacaggttacagggcatgtgtacaaccctttgttctcattaacctgtgcaagggccaggtgtagtgactcatatttataatcccagtgctttgggaggccaaggcgggagaattgctccaggccaggagttcaagacaagcctgggcaatatagcgagaccccatctctagaaaataaaataaaataaacctatatatggacctcagggggcacccagggcacatgccccccaccccaatttcccagagggaaaaatgtatttaaaatgcccaaagaacattaaatcaggagtataatgtgtagaatataaggcatggttttac

SEQ ID NO: 136554 - DNA, 1136 bp, Homo sapiens
  Payload ID: 6717
  Gene Symbol: GDAP1L1
  Gene Name: ganglioside induced differentiation associated protein 1-like 1
  ENST ID: ENST00000616372
  CDS Start-End: 17-1111
ctgattccgggctgtcatggcgacccccaacaatctgacccccaccaactgcagctggtggcccatctccgcgctggagagcgatggccaagccagcggaggcccccgacgctcccgaggcggccagcccgcccattggcccagggagagcctggttctgtaccactggacccagtccttcagctcgcagaaggtgcggctggtgatcgccgagaagggcctggtgtgcgaggagcgggacgtgagcctgccacagagcgagcacaaggagccctggttcatgcggctcaacctgggcgaggaggtgcccgtcatcatccaccgcgacaacatcatcagtgactatgaccagatcattgactatgtggagcgcaccttcacaggagagcacgtggtggccctgatgcccgaggtgggcagcctggcacgcacgggtgctgcagtaccggagctgctggacgcactgcccatggatgcctacacgcatggctgcatcctgcatcccgagctcaccaccgactccatgatccccaagtacgccacggccgagatccgcagacatttagccaatgccaccacggacctcatgaaactggaccatgaagaggagccccagctctccgagccctacctttctaaacaaaagaagctcatggccaagatcttggagcatgatgatgtgagctacctgaagaagatcctcggggaactggccatggtgctggaccagattgagggagctggagaagaggaagctggagaacgaggggcagaaatgcgagctgtggctctgtggctgtgccttcacctcgctgatgtcctcctgggagccaccctgcaccgcctcaagttcctgggactgtccaagaaatactgggaagatggcagccggcccaacctgcagtccttctttgagagggtccagagacgctttgccttccggaaagtcctgggtgacatccacaccaccctgctgtcggccgtcatccccaatgctttccggctggtcaagaggaaacccccatccttcttcggggcgtccttcctcatgggctccctgggtgggatgggctactttgcctactggtacctcaagaaaaaatacatctagggccaggcctggggcttggtgtctg

SEQ ID NO: 136555 - DNA, 2436 bp, Homo sapiens
  Payload ID: 6718
  Gene Symbol: GDAP2
  Gene Name: ganglioside induced differentiation associated protein 2
  Uniprot ID: Q9NXN4
  ENST ID: ENST00000369442
  CDS Start-End: 204-1694
actccagtctcctgggactttgactcgccgtactcggcgcgctcctgctgagggtcgccggagatgtcgctcggccgccttctaccaggagcctgatccgtgccgcccgccgcccggatgggaccaccagagtgctctaaagtctccagtgaatattgaattgctgaggattttgggaaaagacaaatcaaagttcccattccatggatcccttaggtgcaccttcccagtttgtggatgtggatacactaccaagctggggtgactcatgccaagatgaattaaattcctctgatactacagctgaaatatttcaggaagacactgttcgatcaccttttctttataataaggacgtcaatggaaaagtggttctttggaaaggagatgtggcattactgaactgtacagccattgtgaataccagcaatgaaagtctcacagataagaatcctgtgtcagaaagtatcttcatgcttgcagggcctgatttgaaggaagatctccagaaacttaaagggtgccgaacaggtgaagcaaaattgacaaaaggattcaatctagctgcccggttcatcattcacacagtgggacctaaatataaaagccgctatcgcacagcagctgagagttccctttatagctgctacagaaacgtacttcaactagcaaaagagcagtcaatgtcttctgttggcttctgtgtcatcaattctgcaaaacgtggttatcctttagaggatgcaacacacatagcacttcgcactgtaagaagattcctagagattcatggggaaaccattgaaaaagtagtatttgctgtctctgatcttgaagagggtacttaccaaaagctgctacctctctacttcccaaggtcattaaaagaggagaatcgatcattgccctacctacctgcagatattggaaatgcagaaggggagcctgtggtacctgaacgacagattagaataagtgagaaacctggtgctccagaagataaccaagaagaggaggatgaaggcttgggagttgatctctctttcattggctctcatgcttttgctcgaatggaaggagatattgacaagcaaagaaaactgatccttcagggacaattatcagaggcagctctgcagaagcagcatcaaagaaattataatcgctggttatgtcaagcaagatctgaggatctgtctgatattgcttctctaaaagccttataccaaacaggtgttgataactgtggtcgaacagtgatggtggtagttggaagaaacattcctgtaacattaatagatatggacaaggctctcttatatttcattcatgtaatggatcacattgctgtgaaggagtatgtattagtgtattttcacaccctgaccagcgaatacaatcacctggactccgacttcctgaagaaactctacgatgttgttgatgtcaagtacaagaggaatttgaaggctgtttattttgtacatcccacatttcgttcaaaggtgtcaacatggttttttaccaccttttctgtctcaggactgaaggacaaaatccaccatgtggacagcctccaccagctgttttctgccatatcaccagaacagattgactttcctccttttgtccttgaatatgatgccagggtaagaagtaccagaagttctccctcacctggtatggtatattaactgttctatagagcagcacttacgagcacaacatcctgtcattaccagatattaatgtaaattagtgagtcttaataaacttggtaatatcatttaacatactttccctatgataactttaggaaaaggatttgtcccaagagaggcattttctccagataaacgtttcagtgggagatctctctgctgtgagttcagaaccaattttcgtttgtattgtaagttttctaccatatttaaaacagatacctctgcctaattttcttaagattgaatggctttccatctacacagagccagaagaatttattggtgatcacttttagaattaattgcaaatcatgtggcctatctcagtagtctttaccctgctaaaagtttcatttatctaaaaggttgtataatgtttttaagagcatcatctgataatattattgttgttatttatagatgcgtttatggatctgttacataagcactagtcacaggactactcgtgaatttcatcaatttattctattgtgtttattcatgatatcaccttagtaatttttgaaaaaaaaaaagtaacacacttggccaaaagctcatcaagctgattgtttaactgttgctgattgcttatctttatattgtatgaaccaggggatagatttgaaagttatattaagtttgaaatgaattattcttccctaattattgtgcagtgtttatacagcaaaataaaaattctgcaacacaa

SEQ ID NO: 136556 - DNA, 8828 bp, Homo sapiens
  Payload ID: 6718
  Gene Symbol: GDAP2
  Gene Name: ganglioside induced differentiation associated protein 2
  Uniprot ID: Q9NXN4
  ENST ID: ENST00000369443
  CDS Start-End: 251-1744
aggagcggaagccggtgtttcgcagcccagagcatttgcagctggtcactccagtctcctgggactttgactcgccgtactcggcgcgctcctgctgagggtcgccggagatgtcgctcggccgccttctaccaggagcctgatccgtgccgcccgccgcccggatgggaccaccagagtgctctaaagtctccagtgaatattgaattgctgaggattttgggaaaagacaaatcaaagttcccattccatggatcccttaggtgcaccttcccagtttgtggatgtggatacactaccaagctggggtgactcatgccaagatgaattaaattcctctgatactacagctgaaatatttcaggaagacactgttcgatcaccttttctttataataaggacgtcaatggaaaagtggttctttggaaaggagatgtggcattactgaactgtacagccattgtgaataccagcaatgaaagtctcacagataagaatcctgtgtcagaaagtatcttcatgcttgcagggcctgatttgaaggaagatctccagaaacttaaagggtgccgaacaggtgaagcaaaattgacaaaaggattcaatctagctgcccggttcatcattcacacagtgggacctaaatataaaagccgctatcgcacagcagctgagagttccctttatagctgctacagaaacgtacttcaactagcaaaagagcagtcaatgtcttctgttggcttctgtgtcatcaattctgcaaaacgtggttatcctttagaggatgcaacacacatagcacttcgcactgtaagaagattcctagagattcatggggaaaccattgaaaaagtagtatttgctgtctctgatcttgaagagggtacttaccaaaagctgctacctctctacttcccaaggtcattaaaagaggagaatcgatcattgccctacctacctgcagatattggaaatgcagaaggggagcctgtggtacctgaacgacagattagaataagtgagaaacctggtgctccagaagataaccaagaagaggaggatgaaggcttgggagttgatctctctttcattggctctcatgcttttgctcgaatggaaggagatattgacaagcaaagaaaactgatccttcagggacaattatcagaggcagctctgcagaagcagcatcaaagaaattataatcgctggttatgtcaagcaagatctgaggatctgtctgatattgcttctctaaaagccttataccaaacaggtgttgataactgtggtcgaacagtgatggtggtagttggaagaaacattcctgtaacattaatagatatggacaaggctctcttatatttcattcatgtaatggatcacattgctgtgaaggagtatgtattagtgtattttcacaccctgaccagcgaatacaatcacctggactccgacttcctgaagaaactctacgatgttgttgatgtcaagtacaagaggaatttgaaggctgtttattttgtacatcccacatttcgttcaaaggtgtcaacatggttttttaccaccttttctgtctcaggactgaaggacaaaatccaccatgtggacagcctccaccagctgttttctgccatatcaccagaacagattgactttcctccttttgtccttgaatatgatgccagggaaaacgggccttactatacatcatatcccccatcaccagatttgtgacctgccatctttcagtgcttcttggttcccaggatgccacttcctccacgaatagctacctgttgaagtgatattcattgttgctgtacagatccagagagccttttgtccccacctctctggtatttttttattgactgtatattttctggcacataagcaatctaaaaatggtaggccattctgaactgcacacattttaaatttgtatatttatatgaaatggaaatgttcatttttagattgttaatagaaattggggagcaacttttgagtatctttagtttcctgaaggacaccgaattctccattagataaaccaccaagactgttcacatcatctctctaacattgcacgcttcctttgtgtacttaagtgattctcgaaatatacagaaccaatgtatgctaaccagatgcattgtttgcttcagatccatggtgttaataccatgtatattttataaagataatttggctgtgttaaaagagaattacctgagtccaagaatgtggaaatgtatctgacaaaaaacatcaaaatcattagcaaaacataggacttagaatgttaatgtacaagttaagactaaagtttaaggactaaggttccttggattatatgacttgttaagattgccacagttccgatctcaacagtgtggggtgaaacaagaagactgtatcttcagcctttttcctataatcatggatgatttggtcttattcaaaaggaccgcacatattagtactcttaagagcatcttccaagactccagcagtgagcatttagagagtgtgttgtcttccagagtcatgaatgattttgtttagctatcaggtctactacctctaaggacatttcatagcagcatctcttgagttgcctgcatcagtgtggaggaagtgtgtcacagtgaacaaatccagggagctgataattggcaaaagaccacttttaccactcaggctctatttgtgccttagcttggttatgagtaaaaattagaattatgctgcctacctcacagaggtatcatgaagatagcatttagaaagggctttgttgtggtggggtatcttcagttagtttttaaatgggaataaatatatatgagggaatgctacacagcactcctcttgtccttgataccatttgagtgatttttctttttgtgtggcaatacctgttagtgtaaaattccaaccctgatgacctccttcctcttttgtccagaatctcttctggcctgctcatcccctgatgctatacttcaataagaggcatctgttggccattttaaacatttcttcttgaattaaggtcaaaccattattattcccatctgggtagctttgtactttttttgattcctacagccacctccccacagccccatcttcctcaccccatcacgtacattggcagttcagagaaaaaaaaaagcagaacctttctgttctatcatgtgctccagatcagtgcttccaagggtcccattcttttctgcccaaactaattcttcattggagatcaaagaaacatattctcttcatttatgatagggaaatgcccctatagtgcattaaattcatcctgtattttcccatataaacaagaagagactttacattttttagataaaggttcttatcttttgcatgtattgaacacattttctttgtgtcagacctcaaaattacttgatccttatatatacatctatgttaagattttctcttatgtcccctaggtcatcacatccaggcagccagtcagatgtcggatgttaagctttctctcaaacagtactttttttttaaccccttgggcactgtaccttaaaagtctgcaactttaacttcatcttctacagtcaatcgtgagatcatatttgaggtatcttcttcacaaggagcagctatgaaagtctgccaacttttctttgttaaaggggaacttggctacctcaagaacctggcccaaaccattttctgtagagataatagaggccgtaagctactttgccaatttgaaaggaagcaaatttatatatacaatttcttacaggcaatgattttgaaaggatgttcctttgctatattcataccagtatattaatgtttagtaacacaagcaggattctacatatgctgagattttagtacaattgatgtcctagggtataaaggtgatacagaactatatacatatcaactgtgttttataattcaatgatgactaaagaaagataaggaccactcttctcactgaaactaaatttgatgtgggaccaagttcatgcttttatagatgtctaaagtgttatagaatgaagttgcttcaaagtaccaaatcctagaggagaaatataatgaccttgatattgaaatgattaagcaacatttggtataccaatctgcctttgtgaaaaggtttagcctgaataatacatgccattttcaaggacatattagaggataaaggggatactggatggagatgaccaccagcatctgatgttaattcaaagcaccaccaagtctttaatttaattaaactttggtcatgccaaatgctaattgaattgttgaagacacaagttataaaatattaatttattaatcatgcaaggcataatatgatttttaaaacaagtacacttcttgcttccacgtgtatttgggttcttaattcatctatatccaagtttcttgatagtgaaaattacctcttaaaaaaggttcagcctttattagactcgtgagggcaaatggtacatattttaaagacgttttctcctttaatgtatattatgtttcattggcggatgctttatatttcctttttctttttcttttttttttggagacagtcttactctgtcacccaagctggagtgcaatggtgtgatctcggctcactgcagcctcggcctcccaggtttaagtggttctcctgcctcagcctccctagtagctgggactacaggtgcctgccaccatgcctggctaatttttttttttttttttttttttttcagtagagacagggtttcaccatgttggccagactggtctcaaactcctgacctcaagtgatcttcctgcctcggcctcccaaagtgttgggcttaccagtatgagccaccgtgcccatcctgtatttcctttttcaaaggaatacatctgcagtattttgagagtaattagcagagggttttttgagtatttttggtaggaaaaatagatgtagttttttaatcaaatttctgaaattgaaaatatcacttctttttaaagagggataagtatagtcactctagtagaaaaacatggcttgcctatttcctcttcttttctgtttgcttggatattgtttaatgaattcaaactgtaggtttagtcttgtctttataacagttaatggagaagtgataaaattaagtattcagcataaactaaagatcactctttgtatttccccgatacattgacagtatgtatgtatatagagtttaaattgcttaatatatgcacagaaatgattagaatttgaagtactatatagaggagagttacatggttctagtggcagtggattgattgtattaaggaccaaaagaactgcaggataatataaaaacaccttgaaaactggagttagttaggtttctttttctttttcttttttttttttaaagggccttactgtactttttttttttttttggtcacccaggctggagtgcaatggcacgatctcggctcactgtaatctctgtctcctgggttcaagagattctcctgtctcagcctccccagtaagtgagattatagacatgcaccaccatgcccggctaatttttgtatttttagtagagacggggtttcaccatgttggccaggctgctctcgaattcctgacctcaggtgatctgcccaccttggcttctcaaagtgccagattacaggcataagccactgtgcctggccaggtttctgattatagttttcttaagttgtaatcatcataattaacgtgcgctagagtgttttaactgtgctggcactaatgcttcttggcatataattaactcttgttttgcaaaaagaccatgaagaatgaaaggagggctttaccttaccttagtcattttgggtgaataccgtaaactgggtggcgtaacaaaacacatttatttctcacagttggaggctgagaaaccccaagatcaaagtgccatccagcgcaattcctgatgagggccctcttctggcttcttgctgtattctcacttggcagagagagagagacatcgttactttcctgtctcttcttataagggcactaatctcattcatgagggctccaccctcatgacatgattaccacccagaggccccacctccaaatgccatcactttgtatgttagggcttcaacatatgaatttgcagacgaggaggagaacataagcattcagttcataacatacctataatctaggtcatatcataaacccagagatgataaggattgcctggtaggcctaaccatatatacatatacatgcatgcacacacacatatatgcataatctgccttgttttacattctttgagtcggacttctgtggtccatatgtagagaacatagagcaataaataacctagttcaatctttgagtcttactgaactagtccttaaacagatggtatcaagatcattttagatattagtgactctcttgtatattagttattttttacacttttaagaacagcatctttgaatcttttcaagtacagtatgccttaaatgtataggaccactgagttcaggaagaaaagcataggtattctgtaggtgaattacactaacaaaatcacaactgcagaatgtgatctgatacttttgttggacagtaaagctaatacattttatatacacagtcataccttttttttttgtaatgtgtttcgttaacgtaagcacacagtcatcacagactgagacaggactttgttagaccagatcttgtgagctaaatatttaagagcttaacatatataaatgattttaattggtattgggcgaaggaaacctaaaaatgcttaaattgacagatcttacaatttgcttactgaaaattcagaaagcttttatgaaaactttgtattttaaaatattttttgctcattctgaattagaagttagatcccttttaaagagggtctcactctatacaaatatagcctatgaagaatcaatagtgaaataatagtgtttatattgaaccccaggatgggacattattttttgaccatttacatgaggtctttctctaattaccaaagttaaccttaagagtagttaaaaactcagtgaattttagtcaacattctctgtggagacctggactagtgtttcccaaactttcatgtgcatgtatcaaatcagctgaggatattattaaatggagattcagattcaatagttctggggtggcctctgggattatcagtttctaacaagctcttaggtgttatcaattctcctggtccccagaccatagttagagtaaaagagtatagactgcatttagcttccagattttctctttcaaggaaaggagacagaactgtcattgtaattcttcctgtggtccaggcactctaacgttcatcgtctcttctaatgctcttacaaatcctgtgaggttggtgataatagaagttacctcctgaagacgacattcacaagcaggaccgaccgtgtagaccagttttctcaaactgaataatgtacttcactttttaataaggaaaaaaatctcttagctcctcagtttttgcttaatttatatttattataatgttatctaaatatatataaacataaaactaggtataaatgctttatgtttatatgtcttgcacaagtataaaaccaaaacaagtttatgggttaacacaagcaaaactataaaactaataaaatttaaaatagtattaaatagtgatgttttgacaaaatgaaattgtcacttgtaatgtgattatggtactgagtgctacagtacaggctcttttcagttcaacaggcatgtactgccatgtactatgtgatgacccaattcaccctgttttctcctattcagactattactttaatttgttcagcacatagtgatgttatttggtcctcatctagcctgaatccatcattcccctattaaaacagcctctgttctccataagccttccaccactaatgtagaactgggccttaacagggaagtcaatacaaatacaaacctaagcactgagatggttctgccaatatttggttttaatacaattatccaaataattcagagcatgaatattattttaaaatgtttcatcaacatgaataatgcataattctcatagtaagttcatgggcactttcctacacccaacacatatatactccacaaggattttgcatggaccccagtttaagaagcaacaatttagtggtcagtagcattggcgctttggcttctgacacactcagaccttgggcctgtttctcaactttttctgaacctcagtgtttttgtgtattcaacagggataatattaattgaataattaggaggaacaaatgcaataatgtacataaagcatgcatagtagtgtttataaatagcagccaccactgctttgattagaaataataacagctaacatttgaggatttactgtgtgccttgaacgctgctaagctctttatatatattacatattgagtggtagaatcaggattcaaatccagatctgactccaaagcgcatgcttttataaaacataatttaaatatagaatatcaatgtaaattgcttatttagaaagtttattttcttatattttctcaaaaatatttattgtcaaatcagtgattctgtagaggggtaaatagctaaatttccttttaaaaattgtatgatgtgctgatttcaaattgatgtgaaatacagatttcatttaaaggcagtcatgccagattgtgctacagtaaaggaatattcagacca

SEQ ID NO: 136557 - DNA, 3037 bp, Homo sapiens
  Payload ID: 6719
  Gene Symbol: GJA1
  Gene Name: gap junction protein, alpha 1, 43kDa
  Uniprot ID: P17302
  ENST ID: ENST00000282561
  CDS Start-End: 158-1306
gcgtgaggaaagtaccaaacagcagcggagttttaaactttaaatagacaggtctgagtgcctgaacttgccttttcattttacttcatcctccaaggagttcaatcacttggcgtgacttcactacttttaagcaaaagagtggtgcccaggcaacatgggtgactggagcgccttaggcaaactccttgacaaggttcaagcctactcaactgctggagggaaggtgtggctgtcagtacttttcattttccgaatcctgctgctggggacagcggttgagtcagcctggggagatgagcagtctgcctttcgttgtaacactcagcaacctggttgtgaaaatgtctgctatgacaagtctttcccaatctctcatgtgcgcttctgggtcctgcagatcatatttgtgtctgtacccacactcttgtacctggctcatgtgttctatgtgatgcgaaaggaagagaaactgaacaagaaagaggaagaactcaaggttgcccaaactgatggtgtcaatgtggacatgcacttgaagcagattgagataaagaagttcaagtacggtattgaagagcatggtaaggtgaaaatgcgaggggggttgctgcgaacctacatcatcagtatcctcttcaagtctatctttgaggtggccttcttgctgatccagtggtacatctatggattcagcttgagtgctgtttacacttgcaaaagagatccctgcccacatcaggtggactgtttcctctctcgccccacggagaaaaccatcttcatcatcttcatgctggtggtgtccttggtgtccctggccttgaatatcattgaactcttctatgttttcttcaagggcgttaaggatcgggttaagggaaagagcgacccttaccatgcgaccagtggtgcgctgagccctgccaaagactgtgggtctcaaaaatatgcttatttcaatggctgctcctcaccaaccgctcccctctcgcctatgtctcctcctgggtacaagctggttactggcgacagaaacaattcttcttgccgcaattacaacaagcaagcaagtgagcaaaactgggctaattacagtgcagaacaaaatcgaatggggcaggcgggaagcaccatctctaactcccatgcacagccttttgatttccccgatgataaccagaattctaaaaaactagctgctggacatgaattacagccactagccattgtggaccagcgaccttcaagcagagccagcagtcgtgccagcagcagacctcggcctgatgacctggagatctagatacaggcttgaaagcatcaagattccactcaattgtggagaagaaaaaaggtgctgtagaaagtgcaccaggtgttaattttgatccggtggaggtggtactcaacagccttattcatgaggcttagaaaacacaaagacattagaatacctaggttcactgggggtgtatggggtagatgggtggagagggaggggataagagaggtgcatgttggtatttaaagtagtggattcaaagaacttagattataaataagagttccattaggtgatacatagataagggctttttctccccgcaaacacccctaagaatggttctgtgtatgtgaatgagcgggtggtaattgtggctaaatatttttgttttaccaagaaactgaaataattctggccaggaataaatacttcctgaacatcttaggtcttttcaacaagaaaaagacagaggattgtccttaagtccctgctaaaacattccattgttaaaatttgcactttgaaggtaagctttctaggcctgaccctccaggtgtcaatggacttgtgctactatatttttttattcttggtatcagtttaaaattcagacaaggcccacagaataagattttccatgcatttgcaaatacgtatattctttttccatccacttgcacaatatcattaccatcactttttcatcattcctcagctactactcacattcatttaatggtttctgtaaacatttttaagacagttgggatgtcacttaacattttttttttgagctaaagtcagggaatcaagccatgcttaatatttaacaatcacttatatgtgtgtcgaagagtttgttttgtttgtcatgtattggtacaagcagatacagtataaactcacaaacacagatttgaaaataatgcacatatggtgttcaaatttgaacctttctcatggatttttgtggtgtgggccaatatggtgtttacattatataattcctgctgtggcaagtaaagcacactttttttttctcctaaaatgtttttccctgtgtatcctattatggatactggttttgttaattatgattctttattttctctcctttttttaggatatagcagtaatgctattactgaaatgaatttcctttttctgaaatgtaatcattgatgcttgaatgatagaattttagtactgtaaacaggctttagtcattaatgtgagagacttagaaaaaatgcttagagtggactattaaatgtgcctaaatgaattttgcagtaactggtattcttgggttttcctacttaatacacagtaattcagaacttgtattctattatgagtttagcagtcttttggagtgaccagcaactttgatgtttgcactaagattttatttggaatgcaagagaggttgaaagaggattcagtagtacacatacaactaatttatttgaactatatgttgaagacatctaccagtttctccaaatgccttttttaaaactcatcacagaagattggtgaaaatgctgagtatgacacttttcttcttgcatgcatgtcagctacataaacagttttgtacaatgaaaattactaatttgtttgacattccatgttaaactacggtcatgttcagcttcattgcatgtaatgtagacctagtccatcagatcatgtgttctggagagtgttctttattcaataaagttttaatttagtataaacata

SEQ ID NO: 136558 - DNA, 1652 bp, Homo sapiens
  Payload ID: 6720
  Gene Symbol: GJA10
  Gene Name: gap junction protein, alpha 10, 62kDa
  Uniprot ID: Q969M2
  ENST ID: ENST00000369352
  CDS Start-End: 1-1632
atgggggactggaacttattgggtggcatcctagaggaagttcactcccactcaaccatagtggggaaaatctggctgaccatcctcttcatcttccgaatgctggtacttcgtgtggctgctgaggatgtctgggatgatgaacagtcagcatttgcctgcaacacccggcagccaggttgcaacaatatctgttatgatgatgcattccctatctctttgatcaggttctgggttttacagatcatctttgtgtcttctccttctttggtctatatgggccatgcactttataggctcagggcctttgagaaagacaggcagaggaaaaagtcacaccttagagcccagatggagaatccagatcttgacttggaggagcagcaaagaatagatagggaactgaggaggttagaggagcagaagaggatccataaagtccctctgaaaggatgtctgctgcgtacttatgtcttacacatcttgaccagatctgtgctggaagtaggattcatgataggccaatatattctctatgggtttcaaatgcaccccctttacaaatgcactcaacctccttgccccaatgcggtggattgctttgtatccaggcccactgagaagacaattttcatgctttttatgcacagcattgcagccatttccttgttactcaatatactggaaatatttcatctaggcatcagaaaaattatgaggacactttataagaaatccagcagtgagggcattgaggatgaaacaggccctccattccatttgaagaaatattctgtggcccagcagtgtatgatttgctcttcattgcctgaaagaatctctccacttcaagctaacaatcaacagcaagtcattcgagttaatgtgccaaagtctaaaaccatgtggcaaatcccacagccaaggcaacttgaagtagacccttccaatgggaaaaaggactggtctgagaaggatcagcatagcggacagctccatgttcacagcccgtgtccctgggctggcagtgctggaaatcagcacctgggacagcaatcagaccattcctcatttggcctgcagaatacaatgtctcagtcctggctaggtacaactacggctcctagaaactgtccatcctttgcagtaggaacctgggagcagtcccaggacccagaaccctcaggtgagcctctcacagatcttcatagtcactgcagagacagtgaaggcagcatgagagagagtggggtctggatagacagatctcgcccaggcagtcgcaaggccagctttctgtccagattgttgtctgaaaagcgacatctgcacagtgactcaggaagctctggttctcggaatagctcctgcttggattttcctcactgggaaaacagcccctcacctctgccttcagtcactgggcacagaacatcaatggtaagacaggcagccctaccgatcatggaactatcacaagagctgttccattctggatgctttctttttcctttctttcttcctggggtgtgtatgtatgtttgtgttgacagagaggcagatggagggggagattatttatggagagataaaattattcattcgatacattcagttaaattcaattcataaaatagacttagaaaaatctt

SEQ ID NO: 136559 - DNA, 5211 bp, Homo sapiens
  Payload ID: 6721
  Gene Symbol: GJA3
  Gene Name: gap junction protein, alpha 3, 46kDa
  Uniprot ID: Q9Y6H8
  ENST ID: ENST00000241125
  CDS Start-End: 178-1485
cactggggctgcagggatggcgatcagggcggggaggtcgggccctggcgcggggcgcacgcgtgaagcagcaccgcacgtgtgaaaggaattcttttcagagcggccgggagccctgctccggaggaacgcacccgggtcgccgccgcggcagagcggggttaggaatctgaagcaatgggcgactggagctttctgggaagactcttagaaaatgcacaggagcactccacggtcatcggcaaggtttggctgaccgtgctgttcatcttccgcatcttggtgctgggggccgcggcggaggacgtgtggggcgatgagcagtcagacttcacctgcaacacccagcagccgggctgcgagaacgtctgctacgacagggccttccccatctcccacatccgcttctgggcgctgcagatcatcttcgtgtccacgcccaccctcatctacctgggccacgtgctgcacatcgtgcgcatggaagagaagaagaaagagagggaggaggaggagcagctgaagagagagagccccagccccaaggagccaccgcaggacaatccctcgtcgcgggacgaccgcggcagggtgcgcatggccggggcgctgctgcggacctacgtcttcaacatcatcttcaagacgctgttcgaggtgggcttcatcgccggccagtactttctgtacggcttcgagctgaagccgctctaccgctgcgaccgctggccctgccccaacacggtggactgcttcatctccaggcccacggagaagaccatcttcatcatcttcatgctggcggtggcctgcgcgtccctgctgctcaacatgctggagatctaccacctgggctggaagaagctcaagcagggcgtgaccagccgcctcggcccggacgcctccgaggccccgctggggacagccgatcccccgcccctgccccccagctcccggccgcccgccgttgccatcgggttcccaccctactatgcgcacaccgctgcgcccctgggacaggcccgcgccgtgggctaccccggggccccgccaccagccgcggacttcaaactgctagccctgaccgaggcgcgcggaaagggccagtccgccaagctctacaacggccaccaccacctgctgatgactgagcagaactgggccaaccaggcggccgagcggcagcccccggcgctcaaggcttacccggcagcgtccacgcctgcagcccccagccccgtcggcagcagctccccgccactcgcgcacgaggctgaggcgggcgcggcgcccctgctgctggatgggagcggcagcagtctggaggggagcgccctggcagggacccccgaggaggaggagcaggccgtgaccaccgcggcccagatgcaccagccgcccttgcccctcggagacccaggtcgggccagcaaggccagcagggccagcagcgggcgggccagaccggaggacttggccatctagtgcccgggtgcctgcctccagacagctgtgtagtgatctttttcttagaaaccaaaaccaaagtgcacttcccaccagcagatagaacctgaaagtcccaggaggtgggagcgactggagtcccaggaggtggacgatggaggagagatcaggtttccgtgttcaatgcttgctgttcttagcactgtgagttacagtggggataactcccactttctgagtttgggggtggcggggacaagggttgtgggcctttaagatcttcacagcagcccagaaatctggtcgctgagggctgtctctgggggtaactgttctgtagtggtaaagcaacaggtatcctgcagtccctttagctcctgggcaattgggtttgctattcctaagctctccagagcctctgggcggcccagagggtcttagctctgggccagagcacttagctctatctctttgatacttttaacttagagttgaatttcatttgggatatttgccaaactgcactaaaaaaagatttacagcaagtctatgtagtgtcatttgagtttccgaaattgcatgtgaagcccaggatatcaagcttcaggcctcatgacaagtgacaaagagcagttgccctccagaggcaggctcagtgggcaagggccccagaggttgctggcagaaggcaggtggaaacgcagccacgcctgaggccatttttaaacagttgaggaaattgacataaaagtgtgtcgggtatgccgtaggtatttattttctaaatgattattttgtgctttgaatggtgcagctatgcctattttctcccactttctttcaggaaaaatgaaagaaaaatagtgtttttctttctttaaatactgttagaatgattgctgaccaagacagtgctaatttgccctaatgcatgctactagcatctttactaaagattttgaactttcttgtaaaagaaattctttaatttcatgagtcacctaattataatgagaatgtattatataaaacaaaagcaggggaaagttttaagtgcattcaaatagaagttctgaagattttgaatgggaagtgaaaagtgaactactgttgccaggaaaattatttatacagatgaatctatgacaatctacacttttaaaaagtacagaataaaacacttcaagcttcctaatcattctttgtgggcagcctgtttgctttctccagtgtaaataatataagtgtctggggatccctgcctgggggagggcgcgtgctcatgcaggctgtatgccccattctgcctccacaccagagctgtcctgacagggaaggctatttatgtgtgtgggcatggctggaagacggcagaattttctgtcctgcacacacagctgtagtatcttggtcaccatttgtttataaaatgaacgatggtcatgttgagcctgtttctactcacacttttcacctccaacttctactgagtatcattagcccttgttcagcgagaccaatgtaatacatttctttttataaattaacttctcgatgatgcatttgggaccacactccaaacatactttctgttttctatcataaagggtgctccactaacaatctgatgaaaggaatgcaatttccaagtctcagattcttgcatgcaactagtttttcatgtcagtcaaacacaaagaatttgttagtacattctgcttgctgtaggatgcactggacaggctcctaggcttgaaaaatgctaacttttccatacgtctcctcagagactttctcaaccagattgacaagagagaaattagccctttggaaaactgtgagtgactttctcactcctctccaggctggtgcataactacagccattctagatgcataacttctctccgaagttcactcattacatgcagtgtatgccataggcctagggcagcaggacttagttcttgtgagtgataagggctgctagaagatcctagtgtgagaagcattccgataaaaagctttggccattttagaaaatgcaatagcaatcatccaagagcacaagtacagctcaagtacaagtggatgtcaatacttggttctttaagttctaccataataaatgttcataacagtaacaagcttcttatttacccacaatttgattttgagtggggttggagatgagcatgagaactcaaattgtatctagtttttacattttaaaattgaatttagtcacaatatgtttatggaaatgccagtattgtaccattgaccatagtctagtgggtccatttagagtggataggagtgtagaattagattcacctacttgaaaatcactaatctataaagaagtgaggttttgcaatagaacagtgcctgtggtgttttttcaggttagcatactgatttcagttcatgtaagaaatgaacgcatgtttcacatccttttgctctttgaggtatccatgattctaaaggctgggtccttctctctcaggcagtgtggaattgttctctactcaactagtcctttaagacattgaaacatgcaataaaaatagaaattgcctctctctgtgggcaagattccagacctatttttttctagcctggaaatttcactgaaactattttgttcttgattcattagaaagttttaaaaaatctctaagcctattttaaaactcaaatgctatacctatagcatttgagtattatatttacatacatggtttttaagctgctgtatacaattacttcttatatccctgtttttataaaatgttaaacatcactatagttacagtaccaaaaatcattttttaaattctaaaactattacttatattatcactcactttctcctttttaaacttttaatggttattcttgtattttttaataaaattgacacgaataaatccttaaatttacaaaagaaaaatagcaagccagcatctttctcatttatcctggatttcttcggctctggacaagtaagtggataggtcatagaattcctacacaagaatacctggactaataactatgaatataatttaaacatcactttacaaaaaattaatccaatagggtttaggtctcctttcacgttaggctttttaaaaagtattattaacactttctttattttgtattactgaataaactccttttttctgaattttttgaacttctgatatttgtaacactaattcatgaatctccaccaaaataaatacttatagagagtattgcatgatttaagagagtaaatgtgttttccaaagatgaatagagtcctgccaccatcaccacccgccacccctacaaattgaggatatcctaaataacctttaatatagcatatggacattgtacatttaaggtcagggaaggcacttttcttcctaattttatattacagtgcaaatcttgggttgactcactttaaggtttctgactgcccaaaatattttttcccctttacgttacagaacattataataaggcaaacaagttagggatttgaataacactcaaagcaacaaactgtttccagaaagtaccatatttgaagctgtttggtgtgtaaatgttcatttagctcatgtatttacaaaactcttactaaaacttaatttttgtgccataacagtgtctttcctggattacattgtaactggaagtaagcattttctaaaataataaaagtgcccttaagtttaaa

SEQ ID NO: 136560 - DNA, 1622 bp, Homo sapiens
  Payload ID: 6722
  Gene Symbol: GJA4
  Gene Name: gap junction protein, alpha 4, 37kDa
  Uniprot ID: P35212
  ENST ID: ENST00000342280
  CDS Start-End: 89-1090
cagcagggctcccgcgggcgtcactccggccatcgtccccacctccacctgggccgcccggcaggcaggcgacggaggcccgggagccatgggtgactggggcttcctggagaagttgctggaccaggtccaggagcactcgaccgtggtgggtaagatctggctgacggtgctcttcatcttccgcatcctcatcctgggcctggccggcgagtcagtgtggggtgacgagcaatcagatttcgagtgtaacacggcccagccaggctgcaccaacgtctgctatgaccaggccttccccatctcccacatccgctactgggtgctgcagttcctcttcgtcagcacacccaccctggtctacctgggccatgtcatttacctgtctcggcgagaagagcggctgcggcagaaggagggggagctgcgggcactgccggccaaggacccacaggtggagcgggcgctggcggccgtagagcgtcagatggccaagatctcggtggcagaagatggtcgcctgcgcatccgcggagcactgatgggcacctatgtcgccagtgtgctctgcaagagtgtgctagaggcaggcttcctctatggccagtggcgcctgtacggctggaccatggagcccgtgtttgtgtgccagcgagcaccctgcccctacctcgtggactgctttgtctctcgccccacggagaagaccatcttcatcatcttcatgttggtggttggactcatctccctggtgcttaacctgctggagttggtgcacctgctgtgtcgctgcctcagccgggggatgagggcacggcaaggccaagacgcacccccgacccagggcacctcctcagacccttacacggaccaggtcttcttctacctccccgtgggccaggggccctcatccccaccatgccccacctacaatgggctctcatccagtgagcagaactgggccaacctgaccacagaggagaggctggcgtcttccaggccccctctcttcctggacccaccccctcagaatggccaaaaacccccaagtcgtcccagcagctctgcttctaagaagcagtatgtatagaggcctgtggcttatgtcacccaacagaggggtcctgagaagtctggctgcctgggatgccccctgccccctcctggaaggctctgcagagatgactgggctggggaagcaggtgcttgctggccatggagcctcattgcaagttgttcttgaacacctgaggccttcctggtgcccaccaggcactacggcttcctctccagaatgtggctttgcctgagcacagacagagtcagcatggaatgctcttggccaagggtactgggggccctctggccttttgcagctgatccagaggaacccagagccaacttaccccaacctcaccctatggaacagtcacctgtgcgcaggttgtcctcaaaccctctcctcacaggaaaaggcggattgaggctgctgggtcagccttgatcgcacagacagagcttgtgccggatttggccctgtcaaggggactggtgccttgttttcatcactccttcctagttctactgttcaagcttctgaaataaacaggacttgatcacaa

SEQ ID NO: 136561 - DNA, 1059 bp, Homo sapiens
  Payload ID: 6722
  Gene Symbol: GJA4
  Gene Name: gap junction protein, alpha 4, 37kDa
  ENST ID: ENST00000450137
  CDS Start-End: 183-1059
agcagggctcccgcgggcgtcactccggccatcgtccccacctccacctgggccgcccggcaggcaggcggtagaacgggcgtggcagacctccctgcaggcttgttgctgggcgaacgagaaggatgccatgctgacacactgacgtgctctgtctccttgcagacggaggcccgggagccatgggtgactggggcttcctggagaagttgctggaccaggtccaggagcactcgaccgtggtgggtaagatctggctgacggtgctcttcatcttccgcatcctcatcctgggcctggccggcgagtcagtgtggggtgacgagcaatcagatttcgagtgtaacacggcccagccaggctgcaccaacgtctgctatgaccaggccttccccatctcccacatccgctactgggtgctgcagttcctcttcgtcagcacacccaccctggtctacctgggccatgtcatttacctgtctcggcgagaagagcggctgcggcagaaggagggggagctgcgggcactgccggccaaggacccacaggtggagcgggcgctggcggccgtagagcgtcagatggccaagatctcggtggcagaagatggtcgcctgcgcatccgcggagcactgatgggcacctatgtcgccagtgtgctctgcaagagtgtgctagaggcaggcttcctctatggccagtggcgcctgtacggctggaccatggagcccgtgtttgtgtgccagcgagcaccctgcccctacctcgtggactgctttgtctctcgccccacggagaagaccatcttcatcatcttcatgttggtggttggactcatctccctggtgcttaacctgctggagttggtgcacctgctgtgtcgctgcctcagccgggggatgagggcacggcaaggccaagacgcacccccgacccagggcacctcctcagacccttacacggaccaggtcttcttctacctccccgtgggccaggggccctcatccccaccatgccccacctacaatgggctctcatccagtgagcagaactgggcca

SEQ ID NO: 136562 - DNA, 891 bp, Homo sapiens
  Payload ID: 6723
  Gene Symbol: GJA5
  Gene Name: gap junction protein, alpha 5, 40kDa
  ENST ID: ENST00000430508
  CDS Start-End: 137-891
actgacaggctcaagagcaaaaagcgtgggcagttggagaagaagcagccagagtgtgaagaagcccacggaaggaaagtccagggaggaggaaaagaagcagaagttttggcatctgttccctggctgtgccaagatgggcgattggagcttcctgggaaatttcctggaggaagtacacaagcactcgaccgtggtaggcaaggtctggctcactgtcctcttcatattccgtatgctcgtgctgggcacagctgctgagtcttcctggggggatgagcaggctgatttccggtgtgatacgattcagcctggctgccagaatgtctgctacgaccaggctttccccatctcccacattcgctactgggtgctgcagatcatcttcgtctccacgccctctctggtgtacatgggccacgccatgcacactgtgcgcatgcaggagaagcgcaagctacgggaggccgagagggccaaagaggtccggggctctggctcttacgagtacccggtggcagagaaggcagaactgtcctgctgggaggaagggaatggaaggattgccctccagggcactctgctcaacacctatgtgtgcagcatcctgatccgcaccaccatggaggtgggcttcattgtgggccagtacttcatctacggaatcttcctgaccaccctgcatgtctgccgcaggagtccctgtccccacccggtcaactgttacgtatcccggcccacagagaagaatgtcttcattgtctttatgctggctgtggctgcactgtccctcctccttagcctggctgaactctaccacctgggctggaagaagatcagacagcgatttgtcaaaccgcggcagcacatggctaagtgccagctttctgg

SEQ ID NO: 136563 - DNA, 3181 bp, Homo sapiens
  Payload ID: 6723
  Gene Symbol: GJA5
  Gene Name: gap junction protein, alpha 5, 40kDa
  Uniprot ID: P36382
  ENST ID: ENST00000579774
  CDS Start-End: 142-1218
ctctggtgatacagaagaaaagacagtctccattttcaaacagtccctcctgggagaacacagacaggcagaggattacaacacaaggcagcaagcactgggagacgaaagttttggcatctgttccctggctgtgccaagatgggcgattggagcttcctgggaaatttcctggaggaagtacacaagcactcgaccgtggtaggcaaggtctggctcactgtcctcttcatattccgtatgctcgtgctgggcacagctgctgagtcttcctggggggatgagcaggctgatttccggtgtgatacgattcagcctggctgccagaatgtctgctacgaccaggctttccccatctcccacattcgctactgggtgctgcagatcatcttcgtctccacgccctctctggtgtacatgggccacgccatgcacactgtgcgcatgcaggagaagcgcaagctacgggaggccgagagggccaaagaggtccggggctctggctcttacgagtacccggtggcagagaaggcagaactgtcctgctgggaggaagggaatggaaggattgccctccagggcactctgctcaacacctatgtgtgcagcatcctgatccgcaccaccatggaggtgggcttcattgtgggccagtacttcatctacggaatcttcctgaccaccctgcatgtctgccgcaggagtccctgtccccacccggtcaactgttacgtatcccggcccacagagaagaatgtcttcattgtctttatgctggctgtggctgcactgtccctcctccttagcctggctgaactctaccacctgggctggaagaagatcagacagcgatttgtcaaaccgcggcagcacatggctaagtgccagctttctggcccctctgtgggcatagtccagagctgcacaccaccccccgactttaatcagtgcctggagaatggccctgggggaaaattcttcaatcccttcagcaataatatggcctcccaacaaaacacagacaacctggtcaccgagcaagtacgaggtcaggagcagactcctggggaaggtttcatccaggttcgttatggccagaagcctgaggtgcccaatggagtctcaccaggtcaccgccttccccatggctatcatagtgacaagcgacgtcttagtaaggccagcagcaaggcaaggtcagatgacctatcagtgtgaccctcctttatgggaggatcaggaccaggtgggaacaaaggaggctcagagaggaaagacgtgtcccttctgaactgatgctttctcactgtcatcactgcttggctcctttgagccccgggtctcaatgacgttgctcattaattctagaaactataaccagggctctgggatagtaagagaggtgacaacccacccagactgcagttccctccccaccctctacccagtatacgaagcctttcagattactcatgaaacagggtagagggaaagaagggaagcatggcaaaagctggcctggaagggatagccagagggatagaatgactctctctctacataccagcagcataccaaatgcgttctctaagttcctacctccttgacctgatcaccctccctcctccaaggaagagctcaaagttcccagccaatagacagcatgaatcaaggaacttgcattatatgtgctcttgaatctgttgtctccatggaccattcctcggagtagtggtgagatggccttgggttgcccttggcttctcctccctctactcagccttaaaaagggcttcttggaactttaccagcagcctcagctttacaaatgccttggtatgtacctctggcaaatgccctggtatgtacctctggcaaatgccccaccttggtgatgttgcaacctttccttctgctagggtgtacacctagcctgtgcaggtgtcagccctgctagggagtcactgtacacacaaactctactggaattcctgccaacatctgtcaccctgcagctcctttacagttcaatccaatgatagaaaccatcccttccctttctcccttggctgttcacccagccattccctgaaggccttaccaacaggaatatccaagaagctgttgtcctctctcgaaccctgaccagatcatcagccactgaggccagtggaatttccccaggccttgttaaaacaaagaaagcattgtacttctcagattccccttgtggaaaaaaaaattctgctgtgaagatgaaaataaaaatggagagaaaacactggaaaactattttcccctcctatttacttcctttgctgactgccaacttagtgccaagaggaggtgtgatgacagctatggaggcccccagatctctctctcctggaggctttagcaggggcaaggaaatagtaggggaatctccagctctcttggcagggcctttatttaaagagcgcagagattcctatgtctccctagtgcccctaatgagactgccaagtgggggctgtagaaaagccttgccttccccagggattggcctggtctctgtattcactggatccataatgggttgctgttgttttggatgaaggtaaacgatgcttggaattggaaactgagacttatagagggattattacattattaaaatgcacgtgtgtgtgtgtgtgggtgctgatgggatgggtaaaggcttggggagtcctgaaataaggaaaggaaaccacagagaaacttgtgtcttcctgctctcctctccggctgcctggcagttattaacctaaacagatagccacaagaggttgggacagaggagggtaaaggctcagaaggaggttcaacctctgactcacctgcccatctctgggccctctgctgacacttggatgctattgttgggtggaaagataaatgagagtggagaggtggaggaaagtgactaggatgccatttaggaaggaatgtctgatcatcccgggtccctggaggggacaccttttaatctattgcctagcattaatattttctctccttctatctctgaaatgttttatgaaatgagtgttcttgaattagaaattctgtgggatcaatctttgatggtgagggttttagaaaggaaaaatatagtaaaatgtgtaatttgtcttaataaaatctatctctacatcta

SEQ ID NO: 136564 - DNA, 3183 bp, Homo sapiens
  Payload ID: 6723
  Gene Symbol: GJA5
  Gene Name: gap junction protein, alpha 5, 40kDa
  Uniprot ID: P36382
  ENST ID: ENST00000621517
  CDS Start-End: 145-1221
gaggaacaactgacaggctcaagagcaaaaagcgtgggcagttggagaagaagcagccagagtgtgaagaagcccacggaaggaaagtccagggaggaggaaaagaagcagaagttttggcatctgttccctggctgtgccaagatgggcgattggagcttcctgggaaatttcctggaggaagtacacaagcactcgaccgtggtaggcaaggtctggctcactgtcctcttcatattccgtatgctcgtgctgggcacagctgctgagtcttcctggggggatgagcaggctgatttccggtgtgatacgattcagcctggctgccagaatgtctgctacgaccaggctttccccatctcccacattcgctactgggtgctgcagatcatcttcgtctccacgccctctctggtgtacatgggccacgccatgcacactgtgcgcatgcaggagaagcgcaagctacgggaggccgagagggccaaagaggtccggggctctggctcttacgagtacccggtggcagagaaggcagaactgtcctgctgggaggaagggaatggaaggattgccctccagggcactctgctcaacacctatgtgtgcagcatcctgatccgcaccaccatggaggtgggcttcattgtgggccagtacttcatctacggaatcttcctgaccaccctgcatgtctgccgcaggagtccctgtccccacccggtcaactgttacgtatcccggcccacagagaagaatgtcttcattgtctttatgctggctgtggctgcactgtccctcctccttagcctggctgaactctaccacctgggctggaagaagatcagacagcgatttgtcaaaccgcggcagcacatggctaagtgccagctttctggcccctctgtgggcatagtccagagctgcacaccaccccccgactttaatcagtgcctggagaatggccctgggggaaaattcttcaatcccttcagcaataatatggcctcccaacaaaacacagacaacctggtcaccgagcaagtacgaggtcaggagcagactcctggggaaggtttcatccaggttcgttatggccagaagcctgaggtgcccaatggagtctcaccaggtcaccgccttccccatggctatcatagtgacaagcgacgtcttagtaaggccagcagcaaggcaaggtcagatgacctatcagtgtgaccctcctttatgggaggatcaggaccaggtgggaacaaaggaggctcagagaggaaagacgtgtcccttctgaactgatgctttctcactgtcatcactgcttggctcctttgagccccgggtctcaatgacgttgctcattaattctagaaactataaccagggctctgggatagtaagagaggtgacaacccacccagactgcagttccctccccaccctctacccagtatacgaagcctttcagattactcatgaaacagggtagagggaaagaagggaagcatggcaaaagctggcctggaagggatagccagagggatagaatgactctctctctacataccagcagcataccaaatgcgttctctaagttcctacctccttgacctgatcaccctccctcctccaaggaagagctcaaagttcccagccaatagacagcatgaatcaaggaacttgcattatatgtgctcttgaatctgttgtctccatggaccattcctcggagtagtggtgagatggccttgggttgcccttggcttctcctccctctactcagccttaaaaagggcttcttggaactttaccagcagcctcagctttacaaatgccttggtatgtacctctggcaaatgccctggtatgtacctctggcaaatgccccaccttggtgatgttgcaacctttccttctgctagggtgtacacctagcctgtgcaggtgtcagccctgctagggagtcactgtacacacaaactctactggaattcctgccaacatctgtcaccctgcagctcctttacagttcaatccaatgatagaaaccatcccttccctttctcccttggctgttcacccagccattccctgaaggccttaccaacaggaatatccaagaagctgttgtcctctctcgaaccctgaccagatcatcagccactgaggccagtggaatttccccaggccttgttaaaacaaagaaagcattgtacttctcagattccccttgtggaaaaaaaaattctgctgtgaagatgaaaataaaaatggagagaaaacactggaaaactattttcccctcctatttacttcctttgctgactgccaacttagtgccaagaggaggtgtgatgacagctatggaggcccccagatctctctctcctggaggctttagcaggggcaaggaaatagtaggggaatctccagctctcttggcagggcctttatttaaagagcgcagagattcctatgtctccctagtgcccctaatgagactgccaagtgggggctgtagaaaagccttgccttccccagggattggcctggtctctgtattcactggatccataatgggttgctgttgttttggatgaaggtaaacgatgcttggaattggaaactgagacttatagagggattattacattattaaaatgcacgtgtgtgtgtgtgtgggtgctgatgggatgggtaaaggcttggggagtcctgaaataaggaaaggaaaccacagagaaacttgtgtcttcctgctctcctctccggctgcctggcagttattaacctaaacagatagccacaagaggttgggacagaggagggtaaaggctcagaaggaggttcaacctctgactcacctgcccatctctgggccctctgctgacacttggatgctattgttgggtggaaagataaatgagagtggagaggtggaggaaagtgactaggatgccatttaggaaggaatgtctgatcatcccgggtccctggaggggacaccttttaatctattgcctagcattaatattttctctccttctatctctgaaatgttttatgaaatgagtgttcttgaattagaaattctgtgggatcaatctttgatggtgagggttttagaaaggaaaaatatagtaaaatgtgtaatttgtcttaataaaatctatctctacatct

SEQ ID NO: 136565 - DNA, 1302 bp, Homo sapiens
  Payload ID: 6724
  Gene Symbol: GJA8
  Gene Name: gap junction protein, alpha 8, 50kDa
  Uniprot ID: P48165
  ENST ID: ENST00000369235
  CDS Start-End: 1-1302
atgggcgactggagtttcctggggaacatcttggaggaggtgaatgagcactccaccgtcatcggcagagtctggctcaccgtgcttttcatcttccggatcctcatccttggcacggccgcagagttcgtgtggggggatgagcaatccgacttcgtgtgcaacacccagcagcctggctgcgagaacgtctgctacgacgaggcctttcccatctcccacattcgcctctgggtgctgcagatcatcttcgtctccaccccgtccctgatgtacgtggggcacgcggtgcactacgtccgcatggaggagaagcgcaaaagccgcgaggcggaggagctgggccagcaggcggggactaacggcggcccggaccagggcagcgtcaagaagagcagcggcagcaaaggcactaagaagttccggctggaggggaccctgctgaggacctacatctgccacatcatcttcaagaccctctttgaagtgggcttcatcgtgggccactacttcctgtacgggttccggatcctgcctctgtaccgctgcagccggtggccctgccccaatgtggtggactgcttcgtgtcccggcccacggagaaaaccatcttcatcctgttcatgttgtctgtggcctctgtgtccctattcctcaacgtgatggagttgggccacctgggcctgaaggggatccggtctgccttgaagaggcctgtagagcagcccctgggggagattcctgagaaatccctccactccattgctgtctcctccatccagaaagccaagggctatcagctcctagaagaagagaaaatcgtttcccactatttccccttgaccgaggttgggatggtggagaccagcccactgcctgccaagcctttcaatcagttcgaggagaagatcagcacaggacccctgggggacttgtcccggggctaccaagagacactgccttcctacgctcaggtgggggcacaagaagtggagggcgaggggccgcctgcagaggagggagccgaacccgaggtgggagagaagaaggaggaagcagagaggctgaccacggaggagcaggagaaggtggccgtgccagagggggagaaagtagagacccccggagtggataaggagggtgaaaaagaagagccgcagtcggagaaggtgtcaaagcaagggctgccagctgagaagacaccttcactctgtccagagctgacaacagatgatgccagacccctgagcaggctaagcaaagccagcagccgagccaggtcagacgatctaaccgtatga

SEQ ID NO: 136566 - DNA, 1799 bp, Homo sapiens
  Payload ID: 6725
  Gene Symbol: GJA9
  Gene Name: gap junction protein, alpha 9, 59kDa
  Uniprot ID: P57773
  ENST ID: ENST00000357771
  CDS Start-End: 252-1799
atggattttagttgatggatgactcactcactacattcaactgaactgaatctgctctataccagcaaagggacaaattcagaaaataaattgaagatggccatgctgtaacttctaaacatggtttgcttctcagatttacctaaactaagaaaggtttgctttaagaaatagtgctcccttcagaatggaagaatttatctgcctcttatttgatgtggatcagagctaagatggctgactaaataaacatgggggactggaatctccttggagatactctggaggaagttcacatccactccaccatgattggaaagatctggctcaccatcctgttcatatttcgaatgcttgttctgggtgtagcagctgaagatgtctggaatgatgagcagtctggcttcatctgcaatacagaacaaccaggctgcagaaatgtatgctacgaccaggcctttcctatctccctcattagatactgggttctgcaggtgatatttgtgtcttcaccatccctggtctacatgggccatgcattgtaccgactgagagttcttgaggaagagaggcaaaggatgaaagctcagttaagagtagaactggaggaggtagagtttgaaatgcctagggatcggaggagattggagcaagagctttgtcagctggagaaaaggaaactaaataaagctccactcagaggaaccttgctttgcacttatgtgatacacattttcactcgctctgtggttgaagttggattcatgattggacagtaccttttatatggatttcacttagagccgctatttaagtgccatggccacccgtgtccaaatataatcgactgttttgtctcaagaccaacagaaaagacaatattcctattatttatgcaatctatagccactatttcacttttcttaaacattcttgaaattttccacctaggttttaaaaagattaaaagagggctttggggaaaatacaagttgaagaaggaacataatgaattccatgcaaacaaggcaaaacaaaatgtagccaaataccagagcacatctgcaaattcactgaagcgactcccttctgcccctgattataatctgttagtggaaaagcaaacacacactgcagtgtaccctagtttaaattcatcttctgtattccagccaaatcctgacaatcatagtgtaaatgatgagaaatgcattttggatgaacaggaaactgtactttctaatgagatttccacacttagtactagttgtagtcattttcaacacatcagttcaaacaataacaaagacactcataaaatatttggaaaagaacttaatggtaaccagttaatggaaaaaagagaaactgaaggcaaagacagcaaaaggaactactactctagaggtcaccgttctattccaggtgttgctatagatggagagaacaacatgaggcagtcaccccaaacagttttctccttgccagctaactgcgattggaaaccgcggtggcttagagctacatggggttcctctacagaacatgaaaaccgggggtcacctcctaaaggtaacctcaagggccagttcagaaagggcacagtcagaacccttcctccttcacaaggagattctcaatcacttgacattccaaacactgctgattctttgggagggctgtcctttgagccagggttggtcagaacctgtaataatcctgtttgtcctccaaatcacgtagtgtccctaacgaacaatctcattggtaggcgggttcccacagatcttcagatctaa

SEQ ID NO: 136567 - DNA, 1901 bp, Homo sapiens
  Payload ID: 6725
  Gene Symbol: GJA9
  Gene Name: gap junction protein, alpha 9, 59kDa
  Uniprot ID: P57773
  ENST ID: ENST00000360786
  CDS Start-End: 254-1801
cagggagttgtggttgcaacactgtactccagcctgggcaacagagggagactctgtctcaacaaacaaacaaacaaagaaaaaaccccacagctatctagggaaaaagtaaagcaaccagcatatagaagtgacatattgttatattttcaccataggtttgctttaagaaatagtgctcccttcagaatggaagaatttatctgcctcttatttgatgtggatcagagctaagatggctgactaaataaacatgggggactggaatctccttggagatactctggaggaagttcacatccactccaccatgattggaaagatctggctcaccatcctgttcatatttcgaatgcttgttctgggtgtagcagctgaagatgtctggaatgatgagcagtctggcttcatctgcaatacagaacaaccaggctgcagaaatgtatgctacgaccaggcctttcctatctccctcattagatactgggttctgcaggtgatatttgtgtcttcaccatccctggtctacatgggccatgcattgtaccgactgagagttcttgaggaagagaggcaaaggatgaaagctcagttaagagtagaactggaggaggtagagtttgaaatgcctagggatcggaggagattggagcaagagctttgtcagctggagaaaaggaaactaaataaagctccactcagaggaaccttgctttgcacttatgtgatacacattttcactcgctctgtggttgaagttggattcatgattggacagtaccttttatatggatttcacttagagccgctatttaagtgccatggccacccgtgtccaaatataatcgactgttttgtctcaagaccaacagaaaagacaatattcctattatttatgcaatctatagccactatttcacttttcttaaacattcttgaaattttccacctaggttttaaaaagattaaaagagggctttggggaaaatacaagttgaagaaggaacataatgaattccatgcaaacaaggcaaaacaaaatgtagccaaataccagagcacatctgcaaattcactgaagcgactcccttctgcccctgattataatctgttagtggaaaagcaaacacacactgcagtgtaccctagtttaaattcatcttctgtattccagccaaatcctgacaatcatagtgtaaatgatgagaaatgcattttggatgaacaggaaactgtactttctaatgagatttccacacttagtactagttgtagtcattttcaacacatcagttcaaacaataacaaagacactcataaaatatttggaaaagaacttaatggtaaccagttaatggaaaaaagagaaactgaaggcaaagacagcaaaaggaactactactctagaggtcaccgttctattccaggtgttgctatagatggagagaacaacatgaggcagtcaccccaaacagttttctccttgccagctaactgcgattggaaaccgcggtggcttagagctacatggggttcctctacagaacatgaaaaccgggggtcacctcctaaaggtaacctcaagggccagttcagaaagggcacagtcagaacccttcctccttcacaaggagattctcaatcacttgacattccaaacactgctgattctttgggagggctgtcctttgagccagggttggtcagaacctgtaataatcctgtttgtcctccaaatcacgtagtgtccctaacgaacaatctcattggtaggcgggttcccacagatcttcagatctaaacagcggttggcttttagacattatatatattatcagagaagtagcctagtggtcgtggggcacagaaaaaatagataggggcagctctaaagaccagct

SEQ ID NO: 136568 - DNA, 1637 bp, Homo sapiens
  Payload ID: 6726
  Gene Symbol: GJB1
  Gene Name: gap junction protein, beta 1, 32kDa
  Uniprot ID: P08034
  ENST ID: ENST00000361726
  CDS Start-End: 147-998
atatgactccccagcaccgggcggtgatgaattgggacgcaggcgcggagcccagggaccactccccctgcacagacatgagaccataggggacctgtctgggtggcctcagggataggcgctccccaaggtgtgaatgaggcaggatgaactggacaggtttgtacaccttgctcagtggcgtgaaccggcattctactgccattggccgagtatggctctcggtcatcttcatcttcagaatcatggtgctggtggtggctgcagagagtgtgtggggtgatgagaaatcttccttcatctgcaacacactccagcctggctgcaacagcgtttgctatgaccaattcttccccatctcccatgtgcggctgtggtccctgcagctcatcctagtttccaccccagctctcctcgtggccatgcacgtggctcaccagcaacacatagagaagaaaatgctacggcttgagggccatggggaccccctacacctggaggaggtgaagaggcacaaggtccacatctcagggacactgtggtggacctatgtcatcagcgtggtgttccggctgttgtttgaggccgtcttcatgtatgtcttttatctgctctaccctggctatgccatggtgcggctggtcaagtgcgacgtctacccctgccccaacacagtggactgcttcgtgtcccgccccaccgagaaaaccgtcttcaccgtcttcatgctagctgcctctggcatctgcatcatcctcaatgtggccgaggtggtgtacctcatcatccgggcctgtgcccgccgagcccagcgccgctccaatccaccttcccgcaagggctcgggcttcggccaccgcctctcacctgaatacaagcagaatgagatcaacaagctgctgagtgagcaggatggctccctgaaagacatactgcgccgcagccctggcaccggggctgggctggctgaaaagagcgaccgctgctcggcctgctgatgccacataccaggcaacctcccatcccacccccgaccctgccctgggcgagcccctccttctcccctgccggtgcacaggcctctgcctgctggggattactcgatcaaaaccttccttccctggctacttcccttcctcccggggccttccttttgaggagctggaggggtggggagctagaggccacctatgccagtgctcaaggttactgggagtgtgggctgcccttgttgcctgcacccttccctcttccctctccctctctctgggaccactgggtacaagagatgggatgctccgacagcgtctccaattatgaaactaatcttaaccctgtgctgtcagataccctgtttctggagtcacatcagtgaggagggatgtgggtaagaggagcagagggcaggggtgctgtggacatgtgggtggagaagggagggtggccagcactagtaaaggaggaatagtgcttgctggccacaaggaaaaggaggaggtgtctggggtgagggagttagggagagagaagcaggcagataagttggagcaggggttggtcaaggccacctctgcctctagtccccaaggcctctctctgcctgaaatgttacacattaaacaggattttacagtaaa

SEQ ID NO: 136569 - DNA, 1904 bp, Homo sapiens
  Payload ID: 6726
  Gene Symbol: GJB1
  Gene Name: gap junction protein, beta 1, 32kDa
  Uniprot ID: P08034
  ENST ID: ENST00000374022
  CDS Start-End: 96-947
ctggtggcatagggcagacacgcctgcagacattctctgggaaagggcagcagcagccaggtgtggcagtgacagggaggtgtgaatgaggcaggatgaactggacaggtttgtacaccttgctcagtggcgtgaaccggcattctactgccattggccgagtatggctctcggtcatcttcatcttcagaatcatggtgctggtggtggctgcagagagtgtgtggggtgatgagaaatcttccttcatctgcaacacactccagcctggctgcaacagcgtttgctatgaccaattcttccccatctcccatgtgcggctgtggtccctgcagctcatcctagtttccaccccagctctcctcgtggccatgcacgtggctcaccagcaacacatagagaagaaaatgctacggcttgagggccatggggaccccctacacctggaggaggtgaagaggcacaaggtccacatctcagggacactgtggtggacctatgtcatcagcgtggtgttccggctgttgtttgaggccgtcttcatgtatgtcttttatctgctctaccctggctatgccatggtgcggctggtcaagtgcgacgtctacccctgccccaacacagtggactgcttcgtgtcccgccccaccgagaaaaccgtcttcaccgtcttcatgctagctgcctctggcatctgcatcatcctcaatgtggccgaggtggtgtacctcatcatccgggcctgtgcccgccgagcccagcgccgctccaatccaccttcccgcaagggctcgggcttcggccaccgcctctcacctgaatacaagcagaatgagatcaacaagctgctgagtgagcaggatggctccctgaaagacatactgcgccgcagccctggcaccggggctgggctggctgaaaagagcgaccgctgctcggcctgctgatgccacataccaggcaacctcccatcccacccccgaccctgccctgggcgagcccctccttctcccctgccggtgcacaggcctctgcctgctggggattactcgatcaaaaccttccttccctggctacttcccttcctcccggggccttccttttgaggagctggaggggtggggagctagaggccacctatgccagtgctcaaggttactgggagtgtgggctgcccttgttgcctgcacccttccctcttccctctccctctctctgggaccactgggtacaagagatgggatgctccgacagcgtctccaattatgaaactaatcttaaccctgtgctgtcagataccctgtttctggagtcacatcagtgaggagggatgtgggtaagaggagcagagggcaggggtgctgtggacatgtgggtggagaagggagggtggccagcactagtaaaggaggaatagtgcttgctggccacaaggaaaaggaggaggtgtctggggtgagggagttagggagagagaagcaggcagataagttggagcaggggttggtcaaggccacctctgcctctagtccccaaggcctctctctgcctgaaatgttacacattaaacaggattttacagtaaatgaagaggtggcttgtgtgtttgtcaagttctttctcctgcaacctctgacctcccccaggatgagctggccttggttttttactgattaagaaaggaacagggcaaaagaagtagttacttgagtagctgaagctgcaaatgaggaaatcactgtacttctgggccgcagagccagccccggagccattcctccctgttgcttttgttgttgtggttcttgtctttttcattgtctaataacagctttattgggatttagtttacatacctccttcctctgattttgaaaagattaaaaatgacaactccctctgaa

SEQ ID NO: 136570 - DNA, 1587 bp, Homo sapiens
  Payload ID: 6726
  Gene Symbol: GJB1
  Gene Name: gap junction protein, beta 1, 32kDa
  Uniprot ID: P08034
  ENST ID: ENST00000374029
  CDS Start-End: 95-946
gggctgggctgacagtacctggtggcatagggcagacacgcctgcagacattctctgggaaagggcagcagcagccaggtgtgaatgaggcaggatgaactggacaggtttgtacaccttgctcagtggcgtgaaccggcattctactgccattggccgagtatggctctcggtcatcttcatcttcagaatcatggtgctggtggtggctgcagagagtgtgtggggtgatgagaaatcttccttcatctgcaacacactccagcctggctgcaacagcgtttgctatgaccaattcttccccatctcccatgtgcggctgtggtccctgcagctcatcctagtttccaccccagctctcctcgtggccatgcacgtggctcaccagcaacacatagagaagaaaatgctacggcttgagggccatggggaccccctacacctggaggaggtgaagaggcacaaggtccacatctcagggacactgtggtggacctatgtcatcagcgtggtgttccggctgttgtttgaggccgtcttcatgtatgtcttttatctgctctaccctggctatgccatggtgcggctggtcaagtgcgacgtctacccctgccccaacacagtggactgcttcgtgtcccgccccaccgagaaaaccgtcttcaccgtcttcatgctagctgcctctggcatctgcatcatcctcaatgtggccgaggtggtgtacctcatcatccgggcctgtgcccgccgagcccagcgccgctccaatccaccttcccgcaagggctcgggcttcggccaccgcctctcacctgaatacaagcagaatgagatcaacaagctgctgagtgagcaggatggctccctgaaagacatactgcgccgcagccctggcaccggggctgggctggctgaaaagagcgaccgctgctcggcctgctgatgccacataccaggcaacctcccatcccacccccgaccctgccctgggcgagcccctccttctcccctgccggtgcacaggcctctgcctgctggggattactcgatcaaaaccttccttccctggctacttcccttcctcccggggccttccttttgaggagctggaggggtggggagctagaggccacctatgccagtgctcaaggttactgggagtgtgggctgcccttgttgcctgcacccttccctcttccctctccctctctctgggaccactgggtacaagagatgggatgctccgacagcgtctccaattatgaaactaatcttaaccctgtgctgtcagataccctgtttctggagtcacatcagtgaggagggatgtgggtaagaggagcagagggcaggggtgctgtggacatgtgggtggagaagggagggtggccagcactagtaaaggaggaatagtgcttgctggccacaaggaaaaggaggaggtgtctggggtgagggagttagggagagagaagcaggcagataagttggagcaggggttggtcaaggccacctctgcctctagtccccaaggcctctctctgcctgaaatgttacacattaaacaggattttacagtaaatg

SEQ ID NO: 136571 - DNA, 484 bp, Homo sapiens
  Payload ID: 6726
  Gene Symbol: GJB1
  Gene Name: gap junction protein, beta 1, 32kDa
  ENST ID: ENST00000447581
  CDS Start-End: 232-484
cagcagcagccaggtgtggcagtgacagggagacactatctgcagaagcacagggagcctgctgtagaaagacttctgtctcagatacattgtttcatcctacctatcctaccgctttggaacggtgtgaccttgaggagttacttatctgagcttcagcttcttcatctggaaaatgggataacaggcttcctaaatgggtcgaaagaaaaaatgtgtgaatgaggcaggatgaactggacaggtttgtacaccttgctcagtggcgtgaaccggcattctactgccattggccgagtatggctctcggtcatcttcatcttcagaatcatggtgctggtggtggctgcagagagtgtgtggggtgatgagaaatcttccttcatctgcaacacactccagcctggctgcaacagcgtttgctatgaccaattcttccccatctcccatgtgcggctgtggtccctgcagctcatcctagttt

SEQ ID NO: 136572 - DNA, 2309 bp, Homo sapiens
  Payload ID: 6727
  Gene Symbol: GJB2
  Gene Name: gap junction protein, beta 2, 26kDa
  Uniprot ID: P29033
  ENST ID: ENST00000382844
  CDS Start-End: 200-880
atttaatcctatgacaaactaagttggttctgtcttcacctgttttggtgaggttgtgtaagagttggtgtttgctcaggaagagatttaagcatgcttgcttacccagactcagagaagtctccctgttctgtcctagctagtgattcctgtgttgtgtgcattcgtcttttccagagcaaaccgcccagagtagaagatggattggggcacgctgcagacgatcctggggggtgtgaacaaacactccaccagcattggaaagatctggctcaccgtcctcttcatttttcgcattatgatcctcgttgtggctgcaaaggaggtgtggggagatgagcaggccgactttgtctgcaacaccctgcagccaggctgcaagaacgtgtgctacgatcactacttccccatctcccacatccggctatgggccctgcagctgatcttcgtgtccacgccagcgctcctagtggccatgcacgtggcctaccggagacatgagaagaagaggaagttcatcaagggggagataaagagtgaatttaaggacatcgaggagatcaaaacccagaaggtccgcatcgaaggctccctgtggtggacctacacaagcagcatcttcttccgggtcatcttcgaagccgccttcatgtacgtcttctatgtcatgtacgacggcttctccatgcagcggctggtgaagtgcaacgcctggccttgtcccaacactgtggactgctttgtgtcccggcccacggagaagactgtcttcacagtgttcatgattgcagtgtctggaatttgcatcctgctgaatgtcactgaattgtgttatttgctaattagatattgttctgggaagtcaaaaaagccagtttaacgcattgcccagttgttagattaagaaatagacagcatgagagggatgaggcaacccgtgctcagctgtcaaggctcagtcgctagcatttcccaacacaaagattctgaccttaaatgcaaccatttgaaacccctgtaggcctcaggtgaaactccagatgccacaatggagctctgctcccctaaagcctcaaaacaaaggcctaattctatgcctgtcttaattttctttcacttaagttagttccactgagaccccaggctgttaggggttattggtgtaaggtactttcatattttaaacagaggatatcggcatttgtttctttctctgaggacaagagaaaaaagccaggttccacagaggacacagagaaggtttgggtgtcctcctggggttctttttgccaactttccccacgttaaaggtgaacattggttctttcatttgctttggaagttttaatctctaacagtggacaaagttaccagtgccttaaactctgttacactttttggaagtgaaaactttgtagtatgataggttattttgatgtaaagatgttctggataccattatatgttccccctgtttcagaggctcagattgtaatatgtaaatggtatgtcattcgctactatgatttaatttgaaatatggtcttttggttatgaatactttgcagcacagctgagaggctgtctgttgtattcattgtggtcatagcacctaacaacattgtagcctcaatcgagtgagacagactagaagttcctagtgatggcttatgatagcaaatggcctcatgtcaaatatttagatgtaattttgtgtaagaaatacagactggatgtaccaccaactactacctgtaatgacaggcctgtccaacacatctcccttttccatgactgtggtagccagcatcggaaagaacgctgatttaaagaggtcgcttgggaattttattgacacagtaccatttaatggggaggacaaaatggggcaggggagggagaagtttctgtcgttaaaaacagatttggaaagactggactctaaagtctgttgattaaagatgagctttgtctacttcaaaagtttgtttgcttaccccttcagcctccaattttttaagtgaaaatatagctaataacatgtgaaaagaatagaagctaaggtttagataaatattgagcagatctataggaagattgaacctgaatattgccattatgcttgacatggtttccaaaaaatggtactccacatatttcagtgagggtaagtattttcctgttgtcaagaatagcattgtaaaagcattttgtaataataaagaatagctttaatgatatgcttgtaactaaaataattttgtaatgtatcaaatacatttaaaacattaaaatataatctctataat

SEQ ID NO: 136573 - DNA, 2250 bp, Homo sapiens
  Payload ID: 6727
  Gene Symbol: GJB2
  Gene Name: gap junction protein, beta 2, 26kDa
  Uniprot ID: P29033
  ENST ID: ENST00000382848
  CDS Start-End: 139-819
cggagcccctcggcggcgcccggcccaggacccgcctaggagcgcaggagccccagcgcagagaccccaacgccgagacccccgccccggccccgccgcgcttcctcccgacgcagagcaaaccgcccagagtagaagatggattggggcacgctgcagacgatcctggggggtgtgaacaaacactccaccagcattggaaagatctggctcaccgtcctcttcatttttcgcattatgatcctcgttgtggctgcaaaggaggtgtggggagatgagcaggccgactttgtctgcaacaccctgcagccaggctgcaagaacgtgtgctacgatcactacttccccatctcccacatccggctatgggccctgcagctgatcttcgtgtccacgccagcgctcctagtggccatgcacgtggcctaccggagacatgagaagaagaggaagttcatcaagggggagataaagagtgaatttaaggacatcgaggagatcaaaacccagaaggtccgcatcgaaggctccctgtggtggacctacacaagcagcatcttcttccgggtcatcttcgaagccgccttcatgtacgtcttctatgtcatgtacgacggcttctccatgcagcggctggtgaagtgcaacgcctggccttgtcccaacactgtggactgctttgtgtcccggcccacggagaagactgtcttcacagtgttcatgattgcagtgtctggaatttgcatcctgctgaatgtcactgaattgtgttatttgctaattagatattgttctgggaagtcaaaaaagccagtttaacgcattgcccagttgttagattaagaaatagacagcatgagagggatgaggcaacccgtgctcagctgtcaaggctcagtcgctagcatttcccaacacaaagattctgaccttaaatgcaaccatttgaaacccctgtaggcctcaggtgaaactccagatgccacaatggagctctgctcccctaaagcctcaaaacaaaggcctaattctatgcctgtcttaattttctttcacttaagttagttccactgagaccccaggctgttaggggttattggtgtaaggtactttcatattttaaacagaggatatcggcatttgtttctttctctgaggacaagagaaaaaagccaggttccacagaggacacagagaaggtttgggtgtcctcctggggttctttttgccaactttccccacgttaaaggtgaacattggttctttcatttgctttggaagttttaatctctaacagtggacaaagttaccagtgccttaaactctgttacactttttggaagtgaaaactttgtagtatgataggttattttgatgtaaagatgttctggataccattatatgttccccctgtttcagaggctcagattgtaatatgtaaatggtatgtcattcgctactatgatttaatttgaaatatggtcttttggttatgaatactttgcagcacagctgagaggctgtctgttgtattcattgtggtcatagcacctaacaacattgtagcctcaatcgagtgagacagactagaagttcctagtgatggcttatgatagcaaatggcctcatgtcaaatatttagatgtaattttgtgtaagaaatacagactggatgtaccaccaactactacctgtaatgacaggcctgtccaacacatctcccttttccatgactgtggtagccagcatcggaaagaacgctgatttaaagaggtcgcttgggaattttattgacacagtaccatttaatggggaggacaaaatggggcaggggagggagaagtttctgtcgttaaaaacagatttggaaagactggactctaaagtctgttgattaaagatgagctttgtctacttcaaaagtttgtttgcttaccccttcagcctccaattttttaagtgaaaatatagctaataacatgtgaaaagaatagaagctaaggtttagataaatattgagcagatctataggaagattgaacctgaatattgccattatgcttgacatggtttccaaaaaatggtactccacatatttcagtgagggtaagtattttcctgttgtcaagaatagcattgtaaaagcattttgtaataataaagaatagctttaatgatatgcttgtaactaaaataattttgtaatgtatcaaatacatttaaaacattaaaatataatctctataataa

SEQ ID NO: 136574 - DNA, 1797 bp, Homo sapiens
  Payload ID: 6728
  Gene Symbol: GJB3
  Gene Name: gap junction protein, beta 3, 31kDa
  Uniprot ID: O75712
  ENST ID: ENST00000373362
  CDS Start-End: 191-1003
agacagcacccaagggtagaagatgggggcccaggagggagctgcaccctggtgggcagccatgggagtgtgtcaggtggaagcagccgtcagggtccctctctgctctctgtccggacagacagggctccaaccttcacttcagttcttgtgaactcccaccaggtaggcacggcccccaccaggcgccatggactggaagacactccaggccctactgagcggtgtgaacaagtactccacagcgttcgggcgcatctggctgtccgtggtgttcgtcttccgggtgctggtatacgtggtggctgcagagcgcgtgtggggggatgagcagaaggactttgactgcaacaccaagcagcccggctgcaccaacgtctgctacgacaactacttccccatctccaacatccgcctctgggccctgcagctcatcttcgtcacatgcccctcgctgctggtcatcctgcacgtggcctaccgtgaggagcgggagcgccggcaccgccagaaacacggggaccagtgcgccaagctgtacgacaacgcaggcaagaagcacggaggcctgtggtggacctacctgttcagcctcatcttcaagctcatcattgagttcctcttcctctacctgctgcacactctctggcatggcttcaatatgccgcgcctggtgcagtgtgccaacgtggccccctgccccaacatcgtggactgctacattgcccgacctaccgagaagaaaatcttcacctacttcatggtgggcgcctccgccgtctgcatcgtactcaccatctgtgagctctgctacctcatctgccacagggtcctgcgaggcctgcacaaggacaagcctcgagggggttgcagcccctcgtcctccgccagccgagcttccacctgccgctgccaccacaagctggtggaggctggggaggtggatccagacccaggcaataacaagctgcaggcttcagcacccaacctgacccccatctgaccacagggcaggggtggggcaacatgcgggctgccaatgggacatgcagggcggtgtggcaggtggagaggtcctacaggggctgagtgaccccactctgagttcactaagttatgcaactttcgttttggcagatattttttgacactgggaactgggctgtctagccgggtataggtaacccacaggcccagtgccagccctcaaaggacatagactttgaaacaagcgaattaactatctacgctgcctgcaaggggccacttagggcactgctagcagggcttcaaccaggaagggatcaacccaggaagggatgatcaggagaggcttccctgaggacataatgtgtaagagaggtgagaagtgctcccaagcagacacaacagcagcacagaggtctggaggccacacaaaaagtgatgctcgccctgggctagcctcagcagacctaaggcatctctactccctccagaggagccgcccagattcctgcagtggagaggaggtcttccagcagcagcaggtctggagggctgagaatgaacctgactagaggttctggagatacccagaggtcccccaggtcatcacttggctcagtggaagccctctttccccaaatcctactccctcagcctcaggcagtggtgctcccatcttcctccccacaactgtgctcaggctggtgccagcctttcagaccctgctcccagggacttgggtggatgcgctgatagaacatcctcaagacagtttccttgaaatcaataaatactgtgttttatacaggt

SEQ ID NO: 136575 - DNA, 2217 bp, Homo sapiens
  Payload ID: 6728
  Gene Symbol: GJB3
  Gene Name: gap junction protein, beta 3, 31kDa
  Uniprot ID: O75712
  ENST ID: ENST00000373366
  CDS Start-End: 616-1428
gaacttctttcctggcacaggactcactgtgccccttcccgctgtgggtacaaggtctgccccccaccccagctctccaaagcccaccggcctccctggaggccgaggtcgacggcccgtcgcaccgggagggggggctcccaggggtgccccacgcacggtcaaggtcccgcgccaagcggggaccgggctgggccggaagcgggcacggtactcgcggcaaactagcgtgggcgagtcctgattgcagtcggacctgccgccgcggcacttaacagtttgcagagtgcttcccgcccctgatctcattggagccttcggacagcccagcccatggccaccgatgcccccatttcacgcctgaggaagcggaggctcagacgggccaccagcccctccggaggctggcccgggagcgcctggcagcgtcgggtctaggagccggctccctcctgctccctcctccgcgccgcccggggtgtgcccgccgtctgtgtgcaccactgctgagcccagctccggcgccctcgcctctgctgtgggccccggggacgcggggtcaggccaccgcgttggccaggccgctgcaggtaggcacggcccccaccaggcgccatggactggaagacactccaggccctactgagcggtgtgaacaagtactccacagcgttcgggcgcatctggctgtccgtggtgttcgtcttccgggtgctggtatacgtggtggctgcagagcgcgtgtggggggatgagcagaaggactttgactgcaacaccaagcagcccggctgcaccaacgtctgctacgacaactacttccccatctccaacatccgcctctgggccctgcagctcatcttcgtcacatgcccctcgctgctggtcatcctgcacgtggcctaccgtgaggagcgggagcgccggcaccgccagaaacacggggaccagtgcgccaagctgtacgacaacgcaggcaagaagcacggaggcctgtggtggacctacctgttcagcctcatcttcaagctcatcattgagttcctcttcctctacctgctgcacactctctggcatggcttcaatatgccgcgcctggtgcagtgtgccaacgtggccccctgccccaacatcgtggactgctacattgcccgacctaccgagaagaaaatcttcacctacttcatggtgggcgcctccgccgtctgcatcgtactcaccatctgtgagctctgctacctcatctgccacagggtcctgcgaggcctgcacaaggacaagcctcgagggggttgcagcccctcgtcctccgccagccgagcttccacctgccgctgccaccacaagctggtggaggctggggaggtggatccagacccaggcaataacaagctgcaggcttcagcacccaacctgacccccatctgaccacagggcaggggtggggcaacatgcgggctgccaatgggacatgcagggcggtgtggcaggtggagaggtcctacaggggctgagtgaccccactctgagttcactaagttatgcaactttcgttttggcagatattttttgacactgggaactgggctgtctagccgggtataggtaacccacaggcccagtgccagccctcaaaggacatagactttgaaacaagcgaattaactatctacgctgcctgcaaggggccacttagggcactgctagcagggcttcaaccaggaagggatcaacccaggaagggatgatcaggagaggcttccctgaggacataatgtgtaagagaggtgagaagtgctcccaagcagacacaacagcagcacagaggtctggaggccacacaaaaagtgatgctcgccctgggctagcctcagcagacctaaggcatctctactccctccagaggagccgcccagattcctgcagtggagaggaggtcttccagcagcagcaggtctggagggctgagaatgaacctgactagaggttctggagatacccagaggtcccccaggtcatcacttggctcagtggaagccctctttccccaaatcctactccctcagcctcaggcagtggtgctcccatcttcctccccacaactgtgctcaggctggtgccagcctttcagaccctgctcccagggacttgggtggatgcgctgatagaacatcctcaagacagtttccttgaaatcaataaatactgtgttttata

SEQ ID NO: 136576 - DNA, 2840 bp, Homo sapiens
  Payload ID: 6729
  Gene Symbol: GJB4
  Gene Name: gap junction protein, beta 4, 30.3kDa
  Uniprot ID: Q9NTQ9
  ENST ID: ENST00000339480
  CDS Start-End: 371-1171
aaacagacaagcccaaggacaaggaagcagctactggacccaagaaggaataaggtagaccctgattttggaacctgaagaccaaagtgcaagattagctctgctacttccatctgtggaccattgggcaggtatctctgggccttcacttactctttgtgaaatgaggacaggggcaatccctaccctaccaagtcattgggagtgaagacatgatgacacggtgattgtgaaaagattttgtcaatcgcaccagcattaagggtgcccatctccaggttcccccaggcctcaaggctcccaaggcctgagtgggcaggtagcacccaggtatagaccttccacgtgcagcacccaggacacagccagcatgaactgggcatttctgcagggcctgctgagtggcgtgaacaagtactccacagtgctgagccgcatctggctgtctgtggtgttcatctttcgtgtgctggtgtacgtggtggcagcggaggaggtgtgggacgatgagcagaaggactttgtctgcaacaccaagcagcccggctgccccaacgtctgctatgacgagttcttccccgtgtcccacgtgcgcctctgggccctacagctcatcctggtcacgtgcccctcactgctcgtggtcatgcacgtggcctaccgcgaggaacgcgagcgcaagcaccacctgaaacacgggcccaatgccccgtccctgtacgacaacctgagcaagaagcggggcggactgtggtggacgtacttgctgagcctcatcttcaaggccgccgtggatgctggcttcctctatatcttccaccgcctctacaaggattatgacatgccccgcgtggtggcctgctccgtggagccttgcccccacactgtggactgttacatctcccggcccacggagaagaaggtcttcacctacttcatggtgaccacagctgccatctgcatcctgctcaacctcagtgaagtcttctacctggtgggcaagaggtgcatggagatcttcggccccaggcaccggcggcctcggtgccgggaatgcctacccgatacgtgcccaccatatgtcctctcccagggagggcaccctgaggatgggaactctgtcctaatgaaggctgggtcggccccagtggatgcaggtgggtatccataacctgcgagatcagcagataagatcaacaggtcccccccacatgaggccacccaggaaaaaaggcaggggcagtggcatccttgccgtagcagggtggtgaggagggtggctgtgggggctcaggaagctcgcccaggggccaatgtgggaggttgggggtagtttggtccctgggtcctgagcctcaggggagggaggttgatagctactggggattttgtatatggcaacagtatatgtcaaacctcttaataaatatgattttcccagtactttgcagaccaggtggggagtggccgataggaaaacggggggcaggggggattaggtggacctcagagaggatgccaagactactcagtgagcacctgagcactggaacctcagatccaggctcacccatcaccccccaacacacacagtgtgtgcccccagaacatgatgggctgtgcccaaaggcagaggctactccaggggcctctgggttgtgcaaccacctggccaaagcaggaggagaggaattccaggagaccctgtgcccagcaggagtcagttctcagtgatcgtccatcacaggaatgagcgtgggttgggcctccctagccctgcccagcacaggtcccggataggtgagtcccctctgacggtgggagggtcacggctgagagcaagccagggatgggaatctgtcaaggtgcccaagaggcacatcctacaggccagggcccactgagagtgtctgagctgaaaggtcccttgtggatcctggagtctatggaatttcatgttctttttcactgatacaacttccccatcccatactcccccaccccaccaccactcagactttggcaactcccagaaccacacctccaccctaacatgcctctgagtcccaccaaatgcccactagacaattccctgggaggcccccaggcatctcatacccgccactcccaagctgacctcatcagctcacccagacctgcccccttgaagatgccccaccccatctcatgcaggacacagctattcacccagctgcccaagccaggggacgagacaagcctgacatccttgtccctcacaccccacacccccactggcaccaaatcccactgattccagtccctaaatgccacctgaatctgctcttcctctccttacaacaacctaactacctcctggacctcccccatctgccctccgctacagggatggagtgatttatctgtctatgcaactgaccatgtcattccacctgctttaaaatttcttccaccatcaccagccccatgccctcagcatggcccccgctgacctccccacctcatcccagcttcctccccttttctacctgcaagtaataccaaagggctcctggttccccaggcagacacgtcatgtggtgtcattcctcgtgcctttgtcatgctatttcctctggctagaatgcccttcccaccccctctgtgatcctccctcgaacctctaggacagctttacccatctctctaagtgccagcctcgcttgtccctctgccactctccccaaatcggaattgtcacttcccctgagtgtctccctatcagtctgtgagcccttaatgggcaggtcactgagtcatccaggtccctgctgccttcaataaatgcttgttagatgagt

SEQ ID NO: 136577 - DNA, 1355 bp, Homo sapiens
  Payload ID: 6730
  Gene Symbol: GJB5
  Gene Name: gap junction protein, beta 5, 31.1kDa
  Uniprot ID: O95377
  ENST ID: ENST00000338513
  CDS Start-End: 174-995
agcacacccggcaggctctgtcctggaaacaggcttcaacgggcttccccgaaaaccttccccgcttctggatatgaaattcaagctgcttgctgagtcctattgccggctgctgggagccaggagagccctgaggagtagtcactcagtagcagctgacgcgtgggtccaccatgaactggagtatctttgagggactcctgagtggggtcaacaagtactccacagcctttgggcgcatctggctgtctctggtcttcatcttccgcgtgctggtgtacctggtgacggccgagcgtgtgtggagtgatgaccacaaggacttcgactgcaatactcgccagcccggctgctccaacgtctgctttgatgagttcttccctgtgtcccatgtgcgcctctgggccctgcagcttatcctggtgacatgcccctcactgctcgtggtcatgcacgtggcctaccgggaggttcaggagaagaggcaccgagaagcccatggggagaacagtgggcgcctctacctgaaccccggcaagaagcggggtgggctctggtggacatatgtctgcagcctagtgttcaaggcgagcgtggacatcgcctttctctatgtgttccactcattctaccccaaatatatcctccctcctgtggtcaagtgccacgcagatccatgtcccaatatagtggactgcttcatctccaagccctcagagaagaacattttcaccctcttcatggtggccacagctgccatctgcatcctgctcaacctcgtggagctcatctacctggtgagcaagagatgccacgagtgcctggcagcaaggaaagctcaagccatgtgcacaggtcatcacccccacggtaccacctcttcctgcaaacaagacgacctcctttcgggtgacctcatctttctgggctcagacagtcatcctcctctcttaccagaccgcccccgagaccatgtgaagaaaaccatcttgtgaggggctgcctggactggtctggcaggttgggcctggatggggaggctctagcatctctcataggtgcaacctgagagtgggggagctaagccatgaggtaggggcaggcaagagagaggattcagacgctctgggagccagttcctagtcctcaactccagccacctgccccagctcgacggcactgggccagttccccctctgctctgcagctcggtttccttttctagaatggaaatagtgagggccaatgcccagggttggagggaggagggcgttcatagaagaacacacatgcgggcaccttcatcgtgtgtggcccactgtcagaacttaataaaagtcaactcatttgctggt

SEQ ID NO: 136578 - DNA, 1808 bp, Homo sapiens
  Payload ID: 6731
  Gene Symbol: GJB6
  Gene Name: gap junction protein, beta 6, 30kDa
  Uniprot ID: O95452
  ENST ID: ENST00000241124
  CDS Start-End: 299-1084
acataactgggggtgtggagagcgcctcattgccactgcagtgactaaagctgggaagacgctggtcagttcacctgccccactggttgttttttaaacaaattctgatacaggcgacatcctcactgaccgagcaaagattgacattcgtatcatcactgtgcaccattggcttctaggcactccagtggggtaggagaaggaggtctgaaaccctcgcagagggatcttgccctcattctttgggtctgaaacactggcagtcgttggaaacaggactcagggataaaccagcgcaatggattgggggacgctgcacactttcatcgggggtgtcaacaaacactccaccagcatcgggaaggtgtggatcacagtcatctttattttccgagtcatgatcctcgtggtggctgcccaggaagtgtggggtgacgagcaagaggacttcgtctgcaacacactgcaaccgggatgcaaaaatgtgtgctatgaccactttttcccggtgtcccacatccggctgtgggccctccagctgatcttcgtctccaccccagcgctgctggtggccatgcatgtggcctactacaggcacgaaaccactcgcaagttcaggcgaggagagaagaggaatgatttcaaagacatagaggacattaaaaagcagaaggttcggatagaggggtcgctgtggtggacgtacaccagcagcatctttttccgaatcatctttgaagcagcctttatgtatgtgttttacttcctttacaatgggtaccacctgccctgggtgttgaaatgtgggattgacccctgccccaaccttgttgactgctttatttctaggccaacagagaagaccgtgtttaccatttttatgatttctgcgtctgtgatttgcatgctgcttaacgtggcagagttgtgctacctgctgctgaaagtgtgttttaggagatcaaagagagcacagacgcaaaaaaatcaccccaatcatgccctaaaggagagtaagcagaatgaaatgaatgagctgatttcagatagtggtcaaaatgcaatcacaggtttcccaagctaaacatttcaaggtaaaatgtagctgcgtcataaggagacttctgtcttctccagaaggcaataccaacctgaaagttccttctgtagcctgaagagtttgtaaatgactttcataataaatagacacttgagttaactttttgtaggatacttgctccattcatacacaacgtaatcaaatatgtggtccatctctgaaaacaagagactgcttgacaaaggagcattgcagtcactttgacaggttccttttaagtggactctctgacaaagtgggtactttctgaaaatttatataactgttgttgataaggaacatttatccaggaattgatacgtttattaggaaaagatatttttataggcttggatgtttttagttctgactttgaatttatataaagtatttttataatgactggtcttccttacctggaaaaacatgcgatgttagttttagaattacaccacaagtatctaaatttggaacttacaaagggtctatcttgtaaatattgttttgcattgtctgttggcaaatttgtgaactgtcatgatacgcttaaggtggaaagtgttcattgcacaatatatttttactgctttctgaatgtagacggaacagtgtggaagcagaaggcttttttaactcatccgtttgccaatcattgcaaacaactgaaatgtggatgtgattgcctcaataaagctcgtccccattgctt

SEQ ID NO: 136579 - DNA, 2131 bp, Homo sapiens
  Payload ID: 6731
  Gene Symbol: GJB6
  Gene Name: gap junction protein, beta 6, 30kDa
  Uniprot ID: O95452
  ENST ID: ENST00000356192
  CDS Start-End: 622-1407
ccgcagcccgcccgagccgcgtcagggcagaggcggggtggggcgcggttaaaaggcgcagcaggtgggagccggggccttcacccgaaacccgacgagagcccgacagccggcggcgcccgagcccgacctgcctgcccagccggagcgaagggcgccgccccgcgcagagcccgcgccagggccgccggccgcagagcagttaaaacgtgcaggcaccagaaggcacttcctgtcggtgaagaagacctgtctccggtgtcacgggcatcctgtgttttgcaaacggggctgacctcccttcctggggagcaggaagggtcagggaaggaaaagaagtacagaagatctggctaaacaatttctgtatggcgaaagaaaaattctaacttgtacgccctcttcatgcatctttaattcaatttgaatattccaggcgacatcctcactgaccgagcaaagattgacattcgtatcatcactgtgcaccattggcttctaggcactccagtggggtaggagaaggaggtctgaaaccctcgcagagggatcttgccctcattctttgggtctgaaacactggcagtcgttggaaacaggactcagggataaaccagcgcaatggattgggggacgctgcacactttcatcgggggtgtcaacaaacactccaccagcatcgggaaggtgtggatcacagtcatctttattttccgagtcatgatcctcgtggtggctgcccaggaagtgtggggtgacgagcaagaggacttcgtctgcaacacactgcaaccgggatgcaaaaatgtgtgctatgaccactttttcccggtgtcccacatccggctgtgggccctccagctgatcttcgtctccaccccagcgctgctggtggccatgcatgtggcctactacaggcacgaaaccactcgcaagttcaggcgaggagagaagaggaatgatttcaaagacatagaggacattaaaaagcagaaggttcggatagaggggtcgctgtggtggacgtacaccagcagcatctttttccgaatcatctttgaagcagcctttatgtatgtgttttacttcctttacaatgggtaccacctgccctgggtgttgaaatgtgggattgacccctgccccaaccttgttgactgctttatttctaggccaacagagaagaccgtgtttaccatttttatgatttctgcgtctgtgatttgcatgctgcttaacgtggcagagttgtgctacctgctgctgaaagtgtgttttaggagatcaaagagagcacagacgcaaaaaaatcaccccaatcatgccctaaaggagagtaagcagaatgaaatgaatgagctgatttcagatagtggtcaaaatgcaatcacaggtttcccaagctaaacatttcaaggtaaaatgtagctgcgtcataaggagacttctgtcttctccagaaggcaataccaacctgaaagttccttctgtagcctgaagagtttgtaaatgactttcataataaatagacacttgagttaactttttgtaggatacttgctccattcatacacaacgtaatcaaatatgtggtccatctctgaaaacaagagactgcttgacaaaggagcattgcagtcactttgacaggttccttttaagtggactctctgacaaagtgggtactttctgaaaatttatataactgttgttgataaggaacatttatccaggaattgatacgtttattaggaaaagatatttttataggcttggatgtttttagttctgactttgaatttatataaagtatttttataatgactggtcttccttacctggaaaaacatgcgatgttagttttagaattacaccacaagtatctaaatttggaacttacaaagggtctatcttgtaaatattgttttgcattgtctgttggcaaatttgtgaactgtcatgatacgcttaaggtggaaagtgttcattgcacaatatatttttactgctttctgaatgtagacggaacagtgtggaagcagaaggcttttttaactcatccgtttgccaatcattgcaaacaactgaaatgtggatgtgattgcctcaataaagctcgtccccattgctt

SEQ ID NO: 136580 - DNA, 1805 bp, Homo sapiens
  Payload ID: 6731
  Gene Symbol: GJB6
  Gene Name: gap junction protein, beta 6, 30kDa
  Uniprot ID: O95452
  ENST ID: ENST00000400065
  CDS Start-End: 296-1081
cgacgagagcccgacagccggcggcgcccgagcccgacctgcctgcccagccggagcgaagggcgccgccccgcgcagagcccgcgccagggccgccggccgcagagcaggcgacatcctcactgaccgagcaaagattgacattcgtatcatcactgtgcaccattggcttctaggcactccagtggggtaggagaaggaggtctgaaaccctcgcagagggatcttgccctcattctttgggtctgaaacactggcagtcgttggaaacaggactcagggataaaccagcgcaatggattgggggacgctgcacactttcatcgggggtgtcaacaaacactccaccagcatcgggaaggtgtggatcacagtcatctttattttccgagtcatgatcctcgtggtggctgcccaggaagtgtggggtgacgagcaagaggacttcgtctgcaacacactgcaaccgggatgcaaaaatgtgtgctatgaccactttttcccggtgtcccacatccggctgtgggccctccagctgatcttcgtctccaccccagcgctgctggtggccatgcatgtggcctactacaggcacgaaaccactcgcaagttcaggcgaggagagaagaggaatgatttcaaagacatagaggacattaaaaagcagaaggttcggatagaggggtcgctgtggtggacgtacaccagcagcatctttttccgaatcatctttgaagcagcctttatgtatgtgttttacttcctttacaatgggtaccacctgccctgggtgttgaaatgtgggattgacccctgccccaaccttgttgactgctttatttctaggccaacagagaagaccgtgtttaccatttttatgatttctgcgtctgtgatttgcatgctgcttaacgtggcagagttgtgctacctgctgctgaaagtgtgttttaggagatcaaagagagcacagacgcaaaaaaatcaccccaatcatgccctaaaggagagtaagcagaatgaaatgaatgagctgatttcagatagtggtcaaaatgcaatcacaggtttcccaagctaaacatttcaaggtaaaatgtagctgcgtcataaggagacttctgtcttctccagaaggcaataccaacctgaaagttccttctgtagcctgaagagtttgtaaatgactttcataataaatagacacttgagttaactttttgtaggatacttgctccattcatacacaacgtaatcaaatatgtggtccatctctgaaaacaagagactgcttgacaaaggagcattgcagtcactttgacaggttccttttaagtggactctctgacaaagtgggtactttctgaaaatttatataactgttgttgataaggaacatttatccaggaattgatacgtttattaggaaaagatatttttataggcttggatgtttttagttctgactttgaatttatataaagtatttttataatgactggtcttccttacctggaaaaacatgcgatgttagttttagaattacaccacaagtatctaaatttggaacttacaaagggtctatcttgtaaatattgttttgcattgtctgttggcaaatttgtgaactgtcatgatacgcttaaggtggaaagtgttcattgcacaatatatttttactgctttctgaatgtagacggaacagtgtggaagcagaaggcttttttaactcatccgtttgccaatcattgcaaacaactgaaatgtggatgtgattgcctcaataaagctcgtccccattgctt

SEQ ID NO: 136581 - DNA, 1927 bp, Homo sapiens
  Payload ID: 6731
  Gene Symbol: GJB6
  Gene Name: gap junction protein, beta 6, 30kDa
  Uniprot ID: O95452
  ENST ID: ENST00000400066
  CDS Start-End: 418-1203
acgagagcccgacagccggcggcgcccgagcccgacctgcctgcccagccggagcgaagggcgccgccccgcgcagagcccgcgccagggccgccggccgcagagcagttaaaacgtgcaggcaccagaaggcacttcctgtcggtgaagaagacctgtctccggtgtcacgggcatcctgtgttttgcaaacggggctgacctcccttcctggggagcaggaagggtcagggcgacatcctcactgaccgagcaaagattgacattcgtatcatcactgtgcaccattggcttctaggcactccagtggggtaggagaaggaggtctgaaaccctcgcagagggatcttgccctcattctttgggtctgaaacactggcagtcgttggaaacaggactcagggataaaccagcgcaatggattgggggacgctgcacactttcatcgggggtgtcaacaaacactccaccagcatcgggaaggtgtggatcacagtcatctttattttccgagtcatgatcctcgtggtggctgcccaggaagtgtggggtgacgagcaagaggacttcgtctgcaacacactgcaaccgggatgcaaaaatgtgtgctatgaccactttttcccggtgtcccacatccggctgtgggccctccagctgatcttcgtctccaccccagcgctgctggtggccatgcatgtggcctactacaggcacgaaaccactcgcaagttcaggcgaggagagaagaggaatgatttcaaagacatagaggacattaaaaagcagaaggttcggatagaggggtcgctgtggtggacgtacaccagcagcatctttttccgaatcatctttgaagcagcctttatgtatgtgttttacttcctttacaatgggtaccacctgccctgggtgttgaaatgtgggattgacccctgccccaaccttgttgactgctttatttctaggccaacagagaagaccgtgtttaccatttttatgatttctgcgtctgtgatttgcatgctgcttaacgtggcagagttgtgctacctgctgctgaaagtgtgttttaggagatcaaagagagcacagacgcaaaaaaatcaccccaatcatgccctaaaggagagtaagcagaatgaaatgaatgagctgatttcagatagtggtcaaaatgcaatcacaggtttcccaagctaaacatttcaaggtaaaatgtagctgcgtcataaggagacttctgtcttctccagaaggcaataccaacctgaaagttccttctgtagcctgaagagtttgtaaatgactttcataataaatagacacttgagttaactttttgtaggatacttgctccattcatacacaacgtaatcaaatatgtggtccatctctgaaaacaagagactgcttgacaaaggagcattgcagtcactttgacaggttccttttaagtggactctctgacaaagtgggtactttctgaaaatttatataactgttgttgataaggaacatttatccaggaattgatacgtttattaggaaaagatatttttataggcttggatgtttttagttctgactttgaatttatataaagtatttttataatgactggtcttccttacctggaaaaacatgcgatgttagttttagaattacaccacaagtatctaaatttggaacttacaaagggtctatcttgtaaatattgttttgcattgtctgttggcaaatttgtgaactgtcatgatacgcttaaggtggaaagtgttcattgcacaatatatttttactgctttctgaatgtagacggaacagtgtggaagcagaaggcttttttaactcatccgtttgccaatcattgcaaacaactgaaatgtggatgtgattgcctcaataaagctcgtccccattgctt

SEQ ID NO: 136582 - DNA, 2173 bp, Homo sapiens
  Payload ID: 6732
  Gene Symbol: GJB7
  Gene Name: gap junction protein, beta 7, 25kDa
  Uniprot ID: Q6PEY0
  ENST ID: ENST00000296882
  CDS Start-End: 240-911
ttcattccgttaagttctacacattgtgttgcagggctgaaaaagcacgagtgtccgcactatgacaaaagaaaagcggcgtctcctcaaaacaccaccatgttcccctatgagtctggtgagccaagacactaagaaactgcaggaaacgagagagttctcggggtgggggtgtccatggatgaagcaccgaacaaactggagcccgcaagagtcttgccttcttttgagcctaagtcatgagttggatgttcctcagagatctcctgagtggagtaaataaatactccactgggactggatggatttggctggctgtcgtgtttgtcttccgtttgctggtctacatggtggcagcagagcacgtgtggaaagatgagcagaaagagtttgagtgcaacagtagacagcccggttgcaaaaatgtgtgttttgatgacttcttccccatttcccaagtcagactttgggccttacaactgataatggtctccacaccttcacttctggtggttttacatgtagcctatcatgagggtagagagaaaaggcacagaaagaaactctatgtcagcccaggtacaatggatgggggcctatggtacgcttatcttatcagcctcattgttaaaactggttttgaaattggcttccttgttttattttataagctatatgatggctttagtgttccctaccttataaagtgtgatttgaagccttgtcccaacactgtggactgcttcatctccaaacccactgagaagacgatcttcatcctcttcttggtcatcacctcatgcttgtgtattgtgttgaatttcattgaactgagttttttggttctcaagtgctttattaagtgctgtctccaaaaatatttaaaaaaacctcaagtcctcagtgtgtgagtgccacagcctcagatatgttgaatgtggtaggagagggacccctcccctactccagaatcttcacacttggccataaacacactccctctacctgaagcaaagctactctgtgacacacaagagggttaaacaaagaaaacctgcatccctcctcagcaaggcctaagctgagttggaagacaaagcacatcagccttagtatcatttgggaggaatttttttacattgtcaatatgctttcagttatgagctctagacagaggtctcattgttttgttgtagggttctccagtatgtggataacattagttgttttagaataggtaattgcaaattagtctgaagaaatctaacaggattcttttaagagcttagatttttcagggaaaaaaaaaaaaaaagaaaccctgtgtcagttttctgttttttctaactatctcattacaattggtgcacaatgaactggaaaatataaaaagtgacactttaggcaaatgtgatggcctccgagctgaaatgaaggaactggcaatctttccaaagtggcagccaaggccccactccctgtcctactcaatctctgcagggaaaaactgtgggataggatagcagccagctggggacacacagaggaacattcaacaggaaggtcccgcctagggaaaaggccacagagcccaggcctcttgccgattcagggatccttggatataagtggattagaggagagggaggaaagctatcatttcagtggtctccaaatcaagtagaaatattactgggaggtatcccacttaagcctgaaccagcagacatccgaaagggtcactctagagtcagaaaggaaagcaggtcccccagaaggcaacacattgataggaagtggaggccacagaaaaagaatgtgcccacttgataattacttaagacttctatttaaccaaaagaacattgaaatactttgtaaatattcatattgttgaacctttcataatcaggaattcactatgtactatactgtaagtcatagttcgcctataatttactagtatatctccctctaggacagatagtaaaatgtgtactatgttgttacagtggtgcaaaaatgttttaaaagtttatcacttgttttgaagactagaactttctttacttttctatattttcttagcaattcacagatatgttctctttggatttagtactttaacatatgtacatttcttcagaataaaaataagggtatttcacaatgc

SEQ ID NO: 136583 - DNA, 571 bp, Homo sapiens
  Payload ID: 6732
  Gene Symbol: GJB7
  Gene Name: gap junction protein, beta 7, 25kDa
  ENST ID: ENST00000369576
  CDS Start-End: 84-571
aaatcaaatgagtaactgactggatctcttattaatctccacatctgtgtaaagagagtcttgccttcttttgagcctaagtcatgagttggatgttcctcagagatctcctgagtggagtaaataaatactccactgggactggatggatttggctggctgtcgtgtttgtcttccgtttgctggtctacatggtggcagcagagcacgtgtggaaagatgagcagaaagagtttgagtgcaacagtagacagcccggttgcaaaaatgtgtgttttgatgacttcttccccatttcccaagtcagactttgggccttacaactgataatggtctccacaccttcacttctggtggttttacatgtagcctatcatgagggtagagagaaaaggcacagaaagaaactctatgtcagcccaggtacaatggatgggggcctatggtacgcttatcttatcagcctcattgttaaaactggttttgaaattggcttccttgttttattttataagctatatgatggctttagtgttccctaccttataaagtgtgatttgaagccttgtcc

SEQ ID NO: 136584 - DNA, 2281 bp, Homo sapiens
  Payload ID: 6732
  Gene Symbol: GJB7
  Gene Name: gap junction protein, beta 7, 25kDa
  Uniprot ID: Q6PEY0
  ENST ID: ENST00000525899
  CDS Start-End: 347-1018
ggggaggagccaagatggctgaataggaacagctccggtctacagctcccagagtgagcaacgcagaagatgggtgatttctgcatttccagtcgaggtaccgggttcatctcactagggagtgccagacactgggcgcagggctgaaaaagcacgagtgtccgcactatgacaaaagaaaagcggcgtctcctcaaaacaccaccatgttcccctatgagtctggtgagccaagacactaagaaactgcaggaaacgagagagttctcggggtgggggtgtccatggatgaagcaccgaacaaactggagcccgcaagagtcttgccttcttttgagcctaagtcatgagttggatgttcctcagagatctcctgagtggagtaaataaatactccactgggactggatggatttggctggctgtcgtgtttgtcttccgtttgctggtctacatggtggcagcagagcacgtgtggaaagatgagcagaaagagtttgagtgcaacagtagacagcccggttgcaaaaatgtgtgttttgatgacttcttccccatttcccaagtcagactttgggccttacaactgataatggtctccacaccttcacttctggtggttttacatgtagcctatcatgagggtagagagaaaaggcacagaaagaaactctatgtcagcccaggtacaatggatgggggcctatggtacgcttatcttatcagcctcattgttaaaactggttttgaaattggcttccttgttttattttataagctatatgatggctttagtgttccctaccttataaagtgtgatttgaagccttgtcccaacactgtggactgcttcatctccaaacccactgagaagacgatcttcatcctcttcttggtcatcacctcatgcttgtgtattgtgttgaatttcattgaactgagttttttggttctcaagtgctttattaagtgctgtctccaaaaatatttaaaaaaacctcaagtcctcagtgtgtgagtgccacagcctcagatatgttgaatgtggtaggagagggacccctcccctactccagaatcttcacacttggccataaacacactccctctacctgaagcaaagctactctgtgacacacaagagggttaaacaaagaaaacctgcatccctcctcagcaaggcctaagctgagttggaagacaaagcacatcagccttagtatcatttgggaggaatttttttacattgtcaatatgctttcagttatgagctctagacagaggtctcattgttttgttgtagggttctccagtatgtggataacattagttgttttagaataggtaattgcaaattagtctgaagaaatctaacaggattcttttaagagcttagatttttcagggaaaaaaaaaaaaaaagaaaccctgtgtcagttttctgttttttctaactatctcattacaattggtgcacaatgaactggaaaatataaaaagtgacactttaggcaaatgtgatggcctccgagctgaaatgaaggaactggcaatctttccaaagtggcagccaaggccccactccctgtcctactcaatctctgcagggaaaaactgtgggataggatagcagccagctggggacacacagaggaacattcaacaggaaggtcccgcctagggaaaaggccacagagcccaggcctcttgccgattcagggatccttggatataagtggattagaggagagggaggaaagctatcatttcagtggtctccaaatcaagtagaaatattactgggaggtatcccacttaagcctgaaccagcagacatccgaaagggtcactctagagtcagaaaggaaagcaggtcccccagaaggcaacacattgataggaagtggaggccacagaaaaagaatgtgcccacttgataattacttaagacttctatttaaccaaaagaacattgaaatactttgtaaatattcatattgttgaacctttcataatcaggaattcactatgtactatactgtaagtcatagttcgcctataatttactagtatatctccctctaggacagatagtaaaatgtgtactatgttgttacagtggtgcaaaaatgttttaaaagtttatcacttgttttgaagactagaactttctttacttttctatattttcttagcaattcacagatatgttctctttggatttagtactttaacatatgtacatttcttcagaataaaaataagggtatttcacaatgct

SEQ ID NO: 136585 - DNA, 2889 bp, Homo sapiens
  Payload ID: 6733
  Gene Symbol: GJD2
  Gene Name: gap junction protein, delta 2, 36kDa
  Uniprot ID: Q9UKL4
  ENST ID: ENST00000290374
  CDS Start-End: 478-1443
gctcggccctggcctcgcaggctgccgcgccggagcgccaggtgcccgctgaagtagcaggaacagagccggtgttcggaccctcccctggcccccaacctgcggcggagagcggcgctgagacttctcctgggcgggcgagcgctggaggacctgcaggctgccaccccgccccgcccctcgtcccggcgtccgcgggatccagacccgaaccccggacggcgcccgaggttcgtgccctctctctagaccgcgccaactgccccatcggtcgggacgcgcttggatttctttccccatttcttctcttttaagtacaataaaaggaaagggggattcgaggattttttaaaaaattgcttctttaattgggaggcaattcactcccattctggaagtgcggcccggggaggggccaggagcgggaacgtgcccggtgctgcccagtctttgtctgctgcctccggatgcacagcgatgggggaatggaccatcttggagaggctgctagaagccgcggtgcagcagcactccactatgatcgggaggatcctgttgactgtggtggtgatcttccggatcctcattgtggccattgtgggggagacggtgtacgatgatgagcagaccatgtttgtgtgcaacaccctgcagcccggctgtaaccaggcctgctatgaccgcgccttccccatctcccacatacgttactgggtcttccagatcataatggtgtgtacccccagtctttgcttcatcacctactctgtgcaccagtccgccaagcagcgagaacgccgctactctacagtcttcctagccctggacagagacccccctgagtccataggaggtcctggaggaactgggggtgggggcagtggtgggggcaaacgagaagataagaagttgcaaaatgctattgtgaatggggtgctgcagaacacagagaacaccagtaaggagacagagccagattgtttagaggttaaggagctgactccacacccatcaggtctacgcactgcatcaaaatccaagctcagaaggcaggaaggcatctcccgcttctacattatccaagtggtgttccgaaatgccctggaaattgggttcctggttggccaatattttctctatggctttagtgtcccagggttgtatgagtgtaaccgctacccctgcatcaaggaggtggaatgttatgtgtcccggccaactgagaagactgtctttctagtgttcatgtttgctgtaagtggcatctgtgttgtgctcaacctggctgaactcaaccacctgggatggcgcaagatcaagctggctgtgcgaggggctcaggccaagagaaagtcaatctatgagattcgtaacaaggacctgccaagggtcagtgttcccaattttggcaggactcagtccagtgactctgcctatgtgtgagagggcaggtttcatgaaggtctgggggatggcaaggagccccaaggcagatgactgctcagacgtggctgtatccaccctcatttatgtgaccctcaccattaagatgtaggataagactggataaaagaagattttgcaccaatgggaaaggaggaaaagtggacccattttcacatatcacctaattggttctacagagacgattgggtagagtgatgaaatggatcaattagacttctttggtccctttctgtttatggcctagcctgatcctgataacactgaacttgcacagctaccaagtaggacttagccctgctgagctctttattctggtgaatggtgtgagttgagtacttcattgatataaaatttgtgacctatctcaacccatccctttatcctgagccatgggacaaacatccttgaggcactcttcatgtatctcccccaccagcatgcccctttccctcaatccaaaatagcatgccagctttttttttttttttttttttttttccagaatctggccttacattagacctaatatgttttatttgcaaacttagagggaattacatggggtgcttattggagaacggccatggcagaggttttcattagagccccatctgactggcccttagtcgtgatgaaaaccttaggaatgtctcaatatttccagttttctaactcaaactgcactggtgctgtttactagggatgggggatgggtgggagggagggaattgcaatatgcaactacaacacttttgtgagattgttgttgcacagttaggcacacggttacgagcttcaggatatttctgccttccagcttgtggactttggttaacattaaaaagattttttttggctaatatcaagagtgtctagctgagccacagcatttgtaactggtgtatctcactcattttcttacatagttttgttgtgcaacacagctgcacggtcattttgccatgatttgaatttacctgtgtgcttacaccagagaccttaatcatcccatgtcaatcctgatttattattttttcagttactctttgaaacacacacacatatacagacacacatacaaaattactggcttaaaagacctgcaactaaacactattggctaacgtgtgtttacggtgacttatttgagacatataccaaaggttcaaaaacctattgcattggactgtcaatatgttttcttctttttgctcttatttatttaagtgccatactgtacctttcatatccactgtgtatttagttaaaatattggccaagagaaacatctgggtaatgtgcttttatgaagccctttgttccctttgaattatcattatcatttttgatttagatatggacatggtgtaacacacaactaaggatttgtttaaaataaagttcttgcctttttttgtaaaa

SEQ ID NO: 136586 - DNA, 885 bp, Homo sapiens
  Payload ID: 6734
  Gene Symbol: GJD3
  Gene Name: gap junction protein, delta 3, 31.9kDa
  Uniprot ID: Q8N144
  ENST ID: ENST00000578689
  CDS Start-End: 1-885
atgggggagtgggcgttcctgggctcgctgctggacgccgtgcagctgcagtcgccgctcgtgggccgcctctggctggtggtcatgctgatcttccgcatcctggtgctggccacggtgggcggcgccgtgttcgaggacgagcaagaggagttcgtgtgcaacacgctgcagccgggctgtcgccagacctgctacgaccgcgccttcccggtctcccactaccgcttctggctcttccacatcctgctgctctcggcgcccccggtgctgttcgtcgtctactccatgcaccgggcaggcaaggaggcgggcggcgctgaggcggcggcgcagtgcgcccccggactgcccgaggcccagtgcgcgccgtgcgccctgcgcgcccgccgcgcgcgccgctgctacctgctgagcgtggcgctgcgcctgctggccgagctgaccttcctgggcggccaggcgctgctctacggcttccgcgtggccccgcacttcgcgtgcgccggtccgccctgcccgcacacggtcgactgcttcgtgagccggcccaccgagaagaccgtcttcgtgctcttctatttcgcggtggggctgctgtcggcgctgctcagcgtagccgagctgggccacctgctctggaagggccgcccgcgcgccggggagcgtgacaaccgctgcaaccgtgcacacgaagaggcgcagaagctgctcccgccgccgccgccgccacctccgccaccggccctgccctcccggcgccccggccccgagccgtgcgccccgccggcctatgcgcacccggcgccggccagcctccgcgagtgcggcagcggccgcggcaaggcgtcaccggccaccggccgccgagatctggccatctag

SEQ ID NO: 136587 - DNA, 1580 bp, Homo sapiens
  Payload ID: 6735
  Gene Symbol: GJD4
  Gene Name: gap junction protein, delta 4, 40.1kDa
  Uniprot ID: Q96KN9
  ENST ID: ENST00000321660
  CDS Start-End: 159-1271
agaaaaacccacctcctactcctggctcagacctttgctttcttatctccagctcacacctttaagtcttatgtagttaaaggacatttatccgcctccttggagaacacagccctccagtgtctcctgcagcctggagcctgggacattctggaagcatggaaggcgtggacttgctagggtttctcatcatcacattaaactgcaacgtgaccatggtgggaaagctctggttcgtcctcacgatgctgctgcggatgctggtgattgtcttggcggggcgacccgtctaccaggacgagcaggagaggtttgtctgcaacacgctgcagccgggatgcgccaatgtttgctacgacgtcttctcccccgtgtctcacctgcggttctggctgatccagggcgtgtgcgtcctcctcccctccgccgtcttcagcgtctatgtcctgcaccgaggagccacgctcgccgcgctgggcccccgccgctgccccgacccccgggagccggcctccgggcagagacgctgcccgcggccattcggggagcgcggcggcctccaggtgcccgacttttcggccggctacatcatccacctcctcctccggaccctgctggaggcagccttcggggccttgcactactttctctttggattcctggccccgaagaagttcccttgcacgcgccctccgtgcacgggcgtggtggactgctacgtgtcgcggcccacagagaagtccctgctgatgctgttcctctgggcggtcagcgcgctgtcttttctgctgggcctcgccgacctggtctgcagcctgcggcggcggatgcgcaggaggccgggaccccccacaagcccctccatccggaagcagagcggagcctcaggccacgcggagggacgccggactgacgaggagggtgggcgggaggaagagggggcaccggcgcccccgggtgcacgcgccggaggggagggggctggcagccccaggcgtacatccagggtgtcagggcacacgaagattccggatgaggatgagagtgaggtgacatcctccgccagcgaaaagctgggcagacagccccggggcaggccccaccgagaggccgcccaggaccccaggggctcaggatccgaggagcagccctcagcagcccccagccgcctggccgcgcccccttcctgcagcagcctgcagccccctgacccgcctgccagctccagtggtgctccccacctgagagccaggaagtctgagtgggtgtgaaaaaaacagcacctggcggtgccccggggctcacgcctgtaatcccaacactttgggaggcccaggcaggaggatcgtttgagaatatatctccttgcccaagagtttgagaccagcctggacaacataatgagaccctcgtctctacaaaatatctaaaaattagctgggcacagtggctccctcctgtagtcccagctacttgggaggctgagatgggaggaccatttgagcctgggagatcgaggctgcagtgagccaagatcacggcactgcgctgcagcctgggcaacacagtgagaccctgtc

SEQ ID NO: 136588 - DNA, 916 bp, Homo sapiens
  Payload ID: 6736
  Gene Symbol: GJE1
  Gene Name: gap junction protein, epsilon 1, 23kDa
  Uniprot ID: A6NN92
  ENST ID: ENST00000450456
  CDS Start-End: 70-687
gcagaagcaaactggcaatgtgggtcaagaattaaccaacaggaatgccaggataacatctcctgagacatgtctctaaattacatcaaaaacttctatgaaggatgtgttaaacctccaactgtgattggtcaattccacacccttttctttggatcgatccgaatattcttcctcggggtgctaggctttgcagtttatgggaatgaggccttgcacttcatttgcgatccagacaaaagagaagtaaacctcttctgttacaatcagttcaggccaatcactccacaagtaagtttttctgcattacaactagttattgtcctggttcctggagctcttttccacctttatgctgcatgtaaaagcatcaatcaagaatgcattcttcaaaagcctatctacactataatttatatactctctgttttattaagaattagtctagcggcaatagcattctggcttcagatttacctctttggtttccaagtaaaatctctttacctgtgtgatgctagatctcttggggaaaacatgattataagatgcatggttccagaacactttgaaaaaaccatttttctcattgcaataaatacatttacaacaattacaattttattatttgttgctgagatttttgagatcatatttagaagattatactttccattcagacaatgaccaaataattacctattgtcatgctgcagttatttatcatttttatttagttttatcttactcagtgagtacaatttcaaaacaaacttacttcaatgtgtctgaaatttttgtctactataaaatatagtgcctggttgtaaggtaaggattcttgaagaaatatttcattttaattttgatcacttttattagaaaatatacacagaactactgttaatttattttt

SEQ ID NO: 136589 - DNA, 3295 bp, Homo sapiens
  Payload ID: 6737
  Gene Symbol: GJC1
  Gene Name: gap junction protein, gamma 1, 45kDa
  Uniprot ID: P36383
  ENST ID: ENST00000330514
  CDS Start-End: 512-1702
aaatccccctgagaggtgtatcggctgcttcagggaatagagcagatggggtgaaggtttttgcaaggcctttagtgacctgctttcaatttgctgcaattcttctgctttggctttttcctataggtgccagagttcatctgcttcatatttttactactgacgcatcttcctgtcgtatattcttagactgtggtgacttaagaatctttgggtcacctgttacatggtttctcctgccacctgtatggggaggagaagactggtattcaaactcaagcctgtttctatcttattctcattgatttttatgatacatagaaaactttgtttctttctgaaaatggcattttagtgattcattgttttctgtgggagaaagcttatgacctgctcttttctttttcccttccagagggaatctggaaaaattgcaatcaaaacatcatttctctaagaaaattttgggtaaccgaagttctggacaacagggcataccaattcaatcaccatgagttggagcttcctgactcgcctgctagaggagattcacaaccattccacatttgtggggaagatctggctcactgttctgattgtcttccggatcgtccttacagctgtaggaggagaatccatctattacgatgagcaaagcaaatttgtgtgcaacacagaacagccgggctgtgagaatgtctgttatgatgcgtttgcacctctctcccatgtacgcttctgggtgttccagatcatcctggtggcaactccctctgtgatgtacctgggctatgctatccacaagattgccaaaatggagcacggtgaagcagacaagaaggcagctcggagcaagccctatgcaatgcgctggaaacaacaccgggctctggaagaaacggaggaggacaacgaagaggatcctatgatgtatccagagatggagttagaaagtgataaggaaaataaagagcagagccaacccaaacctaagcatgatggccgacgacggattcgggaagatgggctcatgaaaatctatgtgctgcagttgctggcaaggaccgtgtttgaggtgggttttctgatagggcagtattttctgtatggcttccaagtccacccgttttatgtgtgcagcagacttccttgtcctcataagatagactgctttatttctagacccactgaaaagaccatcttccttctgataatgtatggtgttacaggcctttgcctcttgcttaacatttgggagatgcttcatttagggtttgggaccattcgagactcactaaacagtaaaaggagggaacttgaggatccgggtgcttataattatcctttcacttggaatacaccatctgctccccctggctataacattgctgtcaaaccagatcaaatccagtacaccgaactgtccaatgctaagatcgcctacaagcaaaacaaggccaacacagcccaggaacagcagtatggcagccatgaggagaacctcccagctgacctggaggctctgcagcgggagatcaggatggctcaggaacgcttggatctggcagttcaggcctacagtcaccaaaacaaccctcatggtccccgggagaagaaggccaaagtggggtccaaagctgggtccaacaaaagcactgccagtagcaaatcaggggatgggaagacctccgtctggatttaatcctggcgggcttaaaacctgtgcttttcatagtttatggtaagcagcagctcactgaataatgacttccattgagtaaacatttggctctggttatcttcagggatgctgttggctcatgatccaagctcaggggactctggaggcggggctgggctgagggagagaaagggaaacacagtgttcccaggcacatgttcttagcaataatacagttgcagaactttacatttgtgtcttccagatctggagaagaacagacatatttaaatcattcttgttgaacagtttttgtatgtacagtattatggtacttttttttttttagtatgagaactttttttgtatttgtacattgaactgctgtagttatacttttatattaaaggggaaaaagtccttataaataatgcctattaggctagtgctattactttgttcagcaaattctaccctggctttagagtttttaatagatgctacacctaataaaagtgcctctcatattgcaggaacgatttcagatgtgtaaggagactgaagaggagataccagtttttagtcttggaaagcaagttcacagtagaaggaggttgagatctttcttttatgtgagaaatctttgaatctcattcatgcgatcagagttgtagccaatttttgaaaaccttattttcaaaggaaataaatgattcactgtaggattcctttaaatatcaagcatcaccagtatatgctttgatggtatatgtatataacttaaagttctttcaaaagcctgatacagaaacgtgtccccagtttggtagcaatgtggaaaacctggctagagatgatatggagctgtccctcagaaagcaaagccatgcctggaatccctaataggctgcttagttgtgaacctgtttgatttgccttaagcctctatccagaaacctgcccgcttccgtctggttaagaagccagtggtggatattttctttgttaacattagaaatgcaaacattcccttgtcaaccaagaatactcaaagctacttgtattggaaatggcagaaggcctaaatccaaatttcttattttttataatttaccatagaagttttgtgattaaattcttacttctgccagtggaggtttatgcctgaaaggtcatggggtcctgtctgtaaatagacctaaagagaagtgcagtatttattctttgtaggcataatgtgtttgtcactgacaagcattcatgttcatcccactagtcttttattgcagtcttttattgtcattttcagccttatgttggagagctttgctttctcatcatgttcacattgtcttaagttttgtgagcttctgagaaagagcttggtaaaggtttaaaggggactttgttccaccagggagcattttatttgggcgtctcacccttttctaatgaaagctgttgtaagccacctctgacttggaaattctgaaagtatgaatattttttatatcttaattgtaaaatgccagttctccattatttagatgaatagtagaacactgcaccctttgtgcagtgtttttgtttctctactgcattcctacccccacc

SEQ ID NO: 136590 - DNA, 7640 bp, Homo sapiens
  Payload ID: 6737
  Gene Symbol: GJC1
  Gene Name: gap junction protein, gamma 1, 45kDa
  Uniprot ID: P36383
  ENST ID: ENST00000426548
  CDS Start-End: 271-1461
actgctaagagccccgactctagctagatccacgcagggcccgccagatcctcgaggaattgtagagcagaacctgggaggagacattagcatcccgtgctacaatggaccaaggcctcggcggagcgcgcagaagacaactctgggcccgctaaaccaacccaggatacccagagggaatctggaaaaattgcaatcaaaacatcatttctctaagaaaattttgggtaaccgaagttctggacaacagggcataccaattcaatcaccatgagttggagcttcctgactcgcctgctagaggagattcacaaccattccacatttgtggggaagatctggctcactgttctgattgtcttccggatcgtccttacagctgtaggaggagaatccatctattacgatgagcaaagcaaatttgtgtgcaacacagaacagccgggctgtgagaatgtctgttatgatgcgtttgcacctctctcccatgtacgcttctgggtgttccagatcatcctggtggcaactccctctgtgatgtacctgggctatgctatccacaagattgccaaaatggagcacggtgaagcagacaagaaggcagctcggagcaagccctatgcaatgcgctggaaacaacaccgggctctggaagaaacggaggaggacaacgaagaggatcctatgatgtatccagagatggagttagaaagtgataaggaaaataaagagcagagccaacccaaacctaagcatgatggccgacgacggattcgggaagatgggctcatgaaaatctatgtgctgcagttgctggcaaggaccgtgtttgaggtgggttttctgatagggcagtattttctgtatggcttccaagtccacccgttttatgtgtgcagcagacttccttgtcctcataagatagactgctttatttctagacccactgaaaagaccatcttccttctgataatgtatggtgttacaggcctttgcctcttgcttaacatttgggagatgcttcatttagggtttgggaccattcgagactcactaaacagtaaaaggagggaacttgaggatccgggtgcttataattatcctttcacttggaatacaccatctgctccccctggctataacattgctgtcaaaccagatcaaatccagtacaccgaactgtccaatgctaagatcgcctacaagcaaaacaaggccaacacagcccaggaacagcagtatggcagccatgaggagaacctcccagctgacctggaggctctgcagcgggagatcaggatggctcaggaacgcttggatctggcagttcaggcctacagtcaccaaaacaaccctcatggtccccgggagaagaaggccaaagtggggtccaaagctgggtccaacaaaagcactgccagtagcaaatcaggggatgggaagacctccgtctggatttaatcctggcgggcttaaaacctgtgcttttcatagtttatggtaagcagcagctcactgaataatgacttccattgagtaaacatttggctctggttatcttcagggatgctgttggctcatgatccaagctcaggggactctggaggcggggctgggctgagggagagaaagggaaacacagtgttcccaggcacatgttcttagcaataatacagttgcagaactttacatttgtgtcttccagatctggagaagaacagacatatttaaatcattcttgttgaacagtttttgtatgtacagtattatggtacttttttttttttagtatgagaactttttttgtatttgtacattgaactgctgtagttatacttttatattaaaggggaaaaagtccttataaataatgcctattaggctagtgctattactttgttcagcaaattctaccctggctttagagtttttaatagatgctacacctaataaaagtgcctctcatattgcaggaacgatttcagatgtgtaaggagactgaagaggagataccagtttttagtcttggaaagcaagttcacagtagaaggaggttgagatctttcttttatgtgagaaatctttgaatctcattcatgcgatcagagttgtagccaatttttgaaaaccttattttcaaaggaaataaatgattcactgtaggattcctttaaatatcaagcatcaccagtatatgctttgatggtatatgtatataacttaaagttctttcaaaagcctgatacagaaacgtgtccccagtttggtagcaatgtggaaaacctggctagagatgatatggagctgtccctcagaaagcaaagccatgcctggaatccctaataggctgcttagttgtgaacctgtttgatttgccttaagcctctatccagaaacctgcccgcttccgtctggttaagaagccagtggtggatattttctttgttaacattagaaatgcaaacattcccttgtcaaccaagaatactcaaagctacttgtattggaaatggcagaaggcctaaatccaaatttcttattttttataatttaccatagaagttttgtgattaaattcttacttctgccagtggaggtttatgcctgaaaggtcatggggtcctgtctgtaaatagacctaaagagaagtgcagtatttattctttgtaggcataatgtgtttgtcactgacaagcattcatgttcatcccactagtcttttattgcagtcttttattgtcattttcagccttatgttggagagctttgctttctcatcatgttcacattgtcttaagttttgtgagcttctgagaaagagcttggtaaaggtttaaaggggactttgttccaccagggagcattttatttgggcgtctcacccttttctaatgaaagctgttgtaagccacctctgacttggaaattctgaaagtatgaatattttttatatcttaattgtaaaatgccagttctccattatttagatgaatagtagaacactgcaccctttgtgcagtgtttttgtttctctactgcattcctacccccaccaaaaaaaagaaacttaaggaaatttttttttgagacagggtctccctctttcacccaggctggagtgcagcagcatgatctcagctcactgcagcctctgcctcccaggctcaagcaatcattccacctcagcctcttgattagctgggactacaggcatgtgccaccatactcggctaattctgttttaaaaattttttttgtagagatgaggtctcactatgttacccaggctggtctcgaacttttgggttcaagtgatcctcccgcctcagcctctcaaagtgttagtattataggtgtgagccaccatgcccagcctagaaaatttaaccttatcttttagccattcatttacttttatttgcttttttaaaaaaaaatctttaaattttagcctagagaagcacctcaggaactctaaacatcttaggcaaaaattaaactcaggtgagactgaaggagaaatttcagaaatacacatgtacctcatgggtaattaatagacatgcacagtttccttcaaatcaaatgtttaataaggaaattcatataattccaagaaaacaggcaaaatttggaatacataagcctagctaagataaagaactaccagttaattcttaacatcactggagcttccagcaggttttttaattgaaggacaaaaagtgtccatacatttgtgttatctcttcagagcctgagggagaagagagtggctttgcccagtggaaaggctggggatttgagaatgatacagggggaaggagtcaagcagaaatgccaggaagaaccaggcaaagacatttggcgccagaagcatccacttaatttctgtgaagagtgcccctggtgtttcatcttggcctgttttgatgagaatgttatcttttgtgtctggataacgcgtcagcttcttaaagtacatataaagatattctgtcacctccccacatgcacacacttttaaaatctatttttattctcttgctaaagttgtaattatgtcaagaattttccagctctaactgccttcttagtacatgtctttctgcctttgaagcatatgagtttgccaaagtcattctcccctaatgacatattgtggacttacattaagaaaatgggccaggcgcggtggctcacacctgtaatcccagcactttaggaggcccaggcgggtggattacctgaggtcaggagttcaagaccagactggtcaacatggtgaaactccatctctactaaaaatacagaaattagccaggagtgctgggtggacgcctgcaatcccagctacttgggaggttgaggcaggagaattgcttgaacccaggaggcagaggttgcagtgagctgagatcataccattgcactccagcctgcaagacagagtgaaactcttgtctcaaaaaaaaaaaaagaaaaaaagaaagtgagcctgttgatgtctagctaacccattggtggagtctgcattgaatctgtaagaatattgttctggatcatgcaggtgggatttgtataaaaagcctgtccaacatttagttctcactcgcatcagaatcatactgttttgaattgccatataagacatgctccatcatgacacttgcttctcctccaaatacaagttgagtgcttagtccttcacctgctagaatcaggatacaatcaacatgattatgttccttaacacacttggatttatgcagatgtggtgtgtcctttgctcttttttttcttaagacagagtcttgctcttgtcgctcaggctggagtgcagtggtgtgatttcggctcactgcaacctccgcctcctgggttcaagcgattctcctgcctcagcctcccgagtagctgggattacaggcaccaccaccataccaggctgattttttttgtatttttaatatagacagggcttcatcatgttggccaggctggcaggctggtctcgaactcctcacctcgtgatccgcccacctcagcttcccaaagtgctgtgattacaggcgtgagccaccgcgcctggcctgctcttaaaacccgttattcagaagatttgtaaaagaaataggctttttttttttttttggttaattcaaacgaggggaaaattagatagcattttcccctaaagaaatgttaatgttcattttgtggctttgttttcaagtttcaggagccatgtacatctcagaagtgttacgaagtgattagaaaaggcctctggtaaaagaccttcaaggaccaaccattattattggtcacttgtttgaacttggcgcttaaaaaaaaagttggactgtgatgctttggtgctctttatcacagacatcagtgatggtctgaaacactctctagcagtttatacgaagaatggacttacatgttatcagttacactcatgatttactcgttcagcttctacaagtccatactttatgctgtctcatttaagagacagtccacttctgaaaataaaatcgatagttgatgatacatttttggctagccagctttctgtaaaaggcaagtatgttagacatgcacagtttccttcaaatcaaatgtttaataaggtacttcaagaaacgcctttttaaaaatcaaaggttttggccaggcatggtggctcacgcctgtaatcccagcactttgggaggccaaggtgggcgaatcacaaggtcaggagtttgagaccagcctggccaacatggtgaaaccccgtctctactaaaaataccaaaaattagccgggcgtggtggtgggtacctgtaatcccagctactcaggaggctgagatgagaatcacttgatcccaggaggtagaggttgcagtgagccgagattgcgccattgcacttcagcctgggcaacgagtgaaactctcaaaaaaaaattcatagtaataataaagtccctgcatgcagtttggaaataaaatttaaactcatttatgtgtaataaatatgtaataattcacagtcaccatcaaatgttggaatcattgaattgcatacttgtactcattccggccacatcatgaagtgtttaaagatttgtatttgctgttgtccctatgtagttctattgatgtttggttttgttttttggggtttgttttgagcccaggctagagtgcaatggcacaatctcaactcactacagcctggacctccttggctcaagcagtcctcccacttcagcctcccaagtagctggtctgcaagtgctcaccaccacacctggctaatttttgtattttttgtagagacagagctctcactatgttgcctagactggtctcaaactcctgggcccaagcaatcctcccatcacagcctccgaaggtgctgggattacaggcataagccactgtgcccagcctgtttttaataatgatattaagtgggtttggttcatgtgttattaatcagtgttaataatcgtacttttttttttttttaaaagaaaccatggtattctaaaatcaggagtccaaataaaagaaagttctcggctgtgcatggtggctaacacctgtaatcccagcactttgggaggctgaggtgggtggatcactagaggtcaggagtttgaaacaagcctggccaacatggtaaaaccccctctctactaaaaatacaaaaattagccgggcatggtggtgcacacctgtaatcccagctactcgggatgttgaggcatgagatttccttgaacctggaaggcagaggttgctgtgagccgagatcgcgccactgcactccagcctgggtgacagagtaagactgtcgccaaaaaagaggaaaaaagttatccagtgcagtttctacagagataaaagaagtaatagttctggctgggtgtggtggcttatgcctgtaatcccaacactttgggaggccaaggcaggtggatcacatgaggtcaggagttcgagaccagcctggccaacatggcaaaactgtctctactaaaaatataaaaattaggtatggtggcacgtgcctgtacttacagctacttgggaggctgaggcatgagatgacaatctcttgaacccaggaggcggaggttgcagtgagctgagattgcaccactgcactccagcttgggtgatggagtgagactcaaataaaaaaggtactagttctgcatttcagagttggcttgttgaaccaggctatatgcttccaagatttaaatgtttttctgtattatactctcaattgtgttttaaaaaaatctcttacagaaatctctacctcaggcactaagtgttatgacatgggtagcatattgatattgaaaacttagctaggacttccagccttttaagataatttaaatgtaaaattaaatggttaaccagcaatctaatgtcatgtggtgtgcagtttggatattgcatgaacagctaaggaatcacctgttctagtgccaaagatcactcattgctaattttgttctgtacagcttatgtaatattttcatggtggagacggactctgtgtgctcagggccttgtctctaggaagattttgtcaattccaaatacagttttgaagattca

SEQ ID NO: 136591 - DNA, 7566 bp, Homo sapiens
  Payload ID: 6737
  Gene Symbol: GJC1
  Gene Name: gap junction protein, gamma 1, 45kDa
  Uniprot ID: P36383
  ENST ID: ENST00000590758
  CDS Start-End: 197-1387
gcactgctaagagccccgactctagctagatccacgcagggcccgccagatcctcgaggaattgtagagcagaacctgggaggagacattagcatcccgtgctacaatggaccaaggcctcggcggagcgcgcagaagacaactctgggcccgctaaaccaacccaggatacccagggcataccaattcaatcaccatgagttggagcttcctgactcgcctgctagaggagattcacaaccattccacatttgtggggaagatctggctcactgttctgattgtcttccggatcgtccttacagctgtaggaggagaatccatctattacgatgagcaaagcaaatttgtgtgcaacacagaacagccgggctgtgagaatgtctgttatgatgcgtttgcacctctctcccatgtacgcttctgggtgttccagatcatcctggtggcaactccctctgtgatgtacctgggctatgctatccacaagattgccaaaatggagcacggtgaagcagacaagaaggcagctcggagcaagccctatgcaatgcgctggaaacaacaccgggctctggaagaaacggaggaggacaacgaagaggatcctatgatgtatccagagatggagttagaaagtgataaggaaaataaagagcagagccaacccaaacctaagcatgatggccgacgacggattcgggaagatgggctcatgaaaatctatgtgctgcagttgctggcaaggaccgtgtttgaggtgggttttctgatagggcagtattttctgtatggcttccaagtccacccgttttatgtgtgcagcagacttccttgtcctcataagatagactgctttatttctagacccactgaaaagaccatcttccttctgataatgtatggtgttacaggcctttgcctcttgcttaacatttgggagatgcttcatttagggtttgggaccattcgagactcactaaacagtaaaaggagggaacttgaggatccgggtgcttataattatcctttcacttggaatacaccatctgctccccctggctataacattgctgtcaaaccagatcaaatccagtacaccgaactgtccaatgctaagatcgcctacaagcaaaacaaggccaacacagcccaggaacagcagtatggcagccatgaggagaacctcccagctgacctggaggctctgcagcgggagatcaggatggctcaggaacgcttggatctggcagttcaggcctacagtcaccaaaacaaccctcatggtccccgggagaagaaggccaaagtggggtccaaagctgggtccaacaaaagcactgccagtagcaaatcaggggatgggaagacctccgtctggatttaatcctggcgggcttaaaacctgtgcttttcatagtttatggtaagcagcagctcactgaataatgacttccattgagtaaacatttggctctggttatcttcagggatgctgttggctcatgatccaagctcaggggactctggaggcggggctgggctgagggagagaaagggaaacacagtgttcccaggcacatgttcttagcaataatacagttgcagaactttacatttgtgtcttccagatctggagaagaacagacatatttaaatcattcttgttgaacagtttttgtatgtacagtattatggtacttttttttttttagtatgagaactttttttgtatttgtacattgaactgctgtagttatacttttatattaaaggggaaaaagtccttataaataatgcctattaggctagtgctattactttgttcagcaaattctaccctggctttagagtttttaatagatgctacacctaataaaagtgcctctcatattgcaggaacgatttcagatgtgtaaggagactgaagaggagataccagtttttagtcttggaaagcaagttcacagtagaaggaggttgagatctttcttttatgtgagaaatctttgaatctcattcatgcgatcagagttgtagccaatttttgaaaaccttattttcaaaggaaataaatgattcactgtaggattcctttaaatatcaagcatcaccagtatatgctttgatggtatatgtatataacttaaagttctttcaaaagcctgatacagaaacgtgtccccagtttggtagcaatgtggaaaacctggctagagatgatatggagctgtccctcagaaagcaaagccatgcctggaatccctaataggctgcttagttgtgaacctgtttgatttgccttaagcctctatccagaaacctgcccgcttccgtctggttaagaagccagtggtggatattttctttgttaacattagaaatgcaaacattcccttgtcaaccaagaatactcaaagctacttgtattggaaatggcagaaggcctaaatccaaatttcttattttttataatttaccatagaagttttgtgattaaattcttacttctgccagtggaggtttatgcctgaaaggtcatggggtcctgtctgtaaatagacctaaagagaagtgcagtatttattctttgtaggcataatgtgtttgtcactgacaagcattcatgttcatcccactagtcttttattgcagtcttttattgtcattttcagccttatgttggagagctttgctttctcatcatgttcacattgtcttaagttttgtgagcttctgagaaagagcttggtaaaggtttaaaggggactttgttccaccagggagcattttatttgggcgtctcacccttttctaatgaaagctgttgtaagccacctctgacttggaaattctgaaagtatgaatattttttatatcttaattgtaaaatgccagttctccattatttagatgaatagtagaacactgcaccctttgtgcagtgtttttgtttctctactgcattcctacccccaccaaaaaaaagaaacttaaggaaatttttttttgagacagggtctccctctttcacccaggctggagtgcagcagcatgatctcagctcactgcagcctctgcctcccaggctcaagcaatcattccacctcagcctcttgattagctgggactacaggcatgtgccaccatactcggctaattctgttttaaaaattttttttgtagagatgaggtctcactatgttacccaggctggtctcgaacttttgggttcaagtgatcctcccgcctcagcctctcaaagtgttagtattataggtgtgagccaccatgcccagcctagaaaatttaaccttatcttttagccattcatttacttttatttgcttttttaaaaaaaaatctttaaattttagcctagagaagcacctcaggaactctaaacatcttaggcaaaaattaaactcaggtgagactgaaggagaaatttcagaaatacacatgtacctcatgggtaattaatagacatgcacagtttccttcaaatcaaatgtttaataaggaaattcatataattccaagaaaacaggcaaaatttggaatacataagcctagctaagataaagaactaccagttaattcttaacatcactggagcttccagcaggttttttaattgaaggacaaaaagtgtccatacatttgtgttatctcttcagagcctgagggagaagagagtggctttgcccagtggaaaggctggggatttgagaatgatacagggggaaggagtcaagcagaaatgccaggaagaaccaggcaaagacatttggcgccagaagcatccacttaatttctgtgaagagtgcccctggtgtttcatcttggcctgttttgatgagaatgttatcttttgtgtctggataacgcgtcagcttcttaaagtacatataaagatattctgtcacctccccacatgcacacacttttaaaatctatttttattctcttgctaaagttgtaattatgtcaagaattttccagctctaactgccttcttagtacatgtctttctgcctttgaagcatatgagtttgccaaagtcattctcccctaatgacatattgtggacttacattaagaaaatgggccaggcgcggtggctcacacctgtaatcccagcactttaggaggcccaggcgggtggattacctgaggtcaggagttcaagaccagactggtcaacatggtgaaactccatctctactaaaaatacagaaattagccaggagtgctgggtggacgcctgcaatcccagctacttgggaggttgaggcaggagaattgcttgaacccaggaggcagaggttgcagtgagctgagatcataccattgcactccagcctgcaagacagagtgaaactcttgtctcaaaaaaaaaaaaagaaaaaaagaaagtgagcctgttgatgtctagctaacccattggtggagtctgcattgaatctgtaagaatattgttctggatcatgcaggtgggatttgtataaaaagcctgtccaacatttagttctcactcgcatcagaatcatactgttttgaattgccatataagacatgctccatcatgacacttgcttctcctccaaatacaagttgagtgcttagtccttcacctgctagaatcaggatacaatcaacatgattatgttccttaacacacttggatttatgcagatgtggtgtgtcctttgctcttttttttcttaagacagagtcttgctcttgtcgctcaggctggagtgcagtggtgtgatttcggctcactgcaacctccgcctcctgggttcaagcgattctcctgcctcagcctcccgagtagctgggattacaggcaccaccaccataccaggctgattttttttgtatttttaatatagacagggcttcatcatgttggccaggctggcaggctggtctcgaactcctcacctcgtgatccgcccacctcagcttcccaaagtgctgtgattacaggcgtgagccaccgcgcctggcctgctcttaaaacccgttattcagaagatttgtaaaagaaataggctttttttttttttttggttaattcaaacgaggggaaaattagatagcattttcccctaaagaaatgttaatgttcattttgtggctttgttttcaagtttcaggagccatgtacatctcagaagtgttacgaagtgattagaaaaggcctctggtaaaagaccttcaaggaccaaccattattattggtcacttgtttgaacttggcgcttaaaaaaaaagttggactgtgatgctttggtgctctttatcacagacatcagtgatggtctgaaacactctctagcagtttatacgaagaatggacttacatgttatcagttacactcatgatttactcgttcagcttctacaagtccatactttatgctgtctcatttaagagacagtccacttctgaaaataaaatcgatagttgatgatacatttttggctagccagctttctgtaaaaggcaagtatgttagacatgcacagtttccttcaaatcaaatgtttaataaggtacttcaagaaacgcctttttaaaaatcaaaggttttggccaggcatggtggctcacgcctgtaatcccagcactttgggaggccaaggtgggcgaatcacaaggtcaggagtttgagaccagcctggccaacatggtgaaaccccgtctctactaaaaataccaaaaattagccgggcgtggtggtgggtacctgtaatcccagctactcaggaggctgagatgagaatcacttgatcccaggaggtagaggttgcagtgagccgagattgcgccattgcacttcagcctgggcaacgagtgaaactctcaaaaaaaaattcatagtaataataaagtccctgcatgcagtttggaaataaaatttaaactcatttatgtgtaataaatatgtaataattcacagtcaccatcaaatgttggaatcattgaattgcatacttgtactcattccggccacatcatgaagtgtttaaagatttgtatttgctgttgtccctatgtagttctattgatgtttggttttgttttttggggtttgttttgagcccaggctagagtgcaatggcacaatctcaactcactacagcctggacctccttggctcaagcagtcctcccacttcagcctcccaagtagctggtctgcaagtgctcaccaccacacctggctaatttttgtattttttgtagagacagagctctcactatgttgcctagactggtctcaaactcctgggcccaagcaatcctcccatcacagcctccgaaggtgctgggattacaggcataagccactgtgcccagcctgtttttaataatgatattaagtgggtttggttcatgtgttattaatcagtgttaataatcgtacttttttttttttttaaaagaaaccatggtattctaaaatcaggagtccaaataaaagaaagttctcggctgtgcatggtggctaacacctgtaatcccagcactttgggaggctgaggtgggtggatcactagaggtcaggagtttgaaacaagcctggccaacatggtaaaaccccctctctactaaaaatacaaaaattagccgggcatggtggtgcacacctgtaatcccagctactcgggatgttgaggcatgagatttccttgaacctggaaggcagaggttgctgtgagccgagatcgcgccactgcactccagcctgggtgacagagtaagactgtcgccaaaaaagaggaaaaaagttatccagtgcagtttctacagagataaaagaagtaatagttctggctgggtgtggtggcttatgcctgtaatcccaacactttgggaggccaaggcaggtggatcacatgaggtcaggagttcgagaccagcctggccaacatggcaaaactgtctctactaaaaatataaaaattaggtatggtggcacgtgcctgtacttacagctacttgggaggctgaggcatgagatgacaatctcttgaacccaggaggcggaggttgcagtgagctgagattgcaccactgcactccagcttgggtgatggagtgagactcaaataaaaaaggtactagttctgcatttcagagttggcttgttgaaccaggctatatgcttccaagatttaaatgtttttctgtattatactctcaattgtgttttaaaaaaatctcttacagaaatctctacctcaggcactaagtgttatgacatgggtagcatattgatattgaaaacttagctaggacttccagccttttaagataatttaaatgtaaaattaaatggttaaccagcaatctaatgtcatgtggtgtgcagtttggatattgcatgaacagctaaggaatcacctgttctagtgccaaagatcactcattgctaattttgttctgtacagcttatgtaatattttcatggtggagacggactctgtgtgctcagggccttgtctctaggaagattttgtcaattccaaatacagttttgaagattca

SEQ ID NO: 136592 - DNA, 586 bp, Homo sapiens
  Payload ID: 6737
  Gene Symbol: GJC1
  Gene Name: gap junction protein, gamma 1, 45kDa
  ENST ID: ENST00000591424
  CDS Start-End: 276-586
agagcactgctaagagccccgactctagctagatccacgcagggcccgccagatcctcgaggaattgtagagcagaacctgggaggagacattagcatcccgtgctacaatggaccaaggcctcggcggagcgcgcagaagacaactctgggcccgctaaaccaacccaggatacccagagggaatctggaaaaattgcaatcaaaacatcatttctctaagaaaattttgggtaaccgaagttctggacaacagggcataccaattcaatcaccatgagttggagcttcctgactcgcctgctagaggagattcacaaccattccacatttgtggggaagatctggctcactgttctgattgtcttccggatcgtccttacagctgtaggaggagaatccatctattacgatgagcaaagcaaatttgtgtgcaacacagaacagccgggctgtgagaatgtctgttatgatgcgtttgcacctctctcccatgtacgcttctgggtgttccagatcatcctggtggcaactccctctgtgatgtacctgggctatgctatccacaagattgccaaaatggagca

SEQ ID NO: 136593 - DNA, 478 bp, Homo sapiens
  Payload ID: 6737
  Gene Symbol: GJC1
  Gene Name: gap junction protein, gamma 1, 45kDa
  ENST ID: ENST00000586267
  CDS Start-End: 269-478
gacaactacccgggcggttaggggcgcagggcggagccgggccgcccctcgccgcccgggctcttcgcgggctgctctttgtctccccgacctcgatccctgcgtctccggcggcgtgcgggctcgtctgaggcttcccgcatctccccgctggaactcctgcctcccggggagggaatctggaaaaattgcaatcaaaacatcatttctctaagaaaattttgggtaaccgaagttctggacaacagggcataccaattcaatcaccatgagttggagcttcctgactcgcctgctagaggagattcacaaccattccacatttgtggggaagatctggctcactgttctgattgtcttccggatcgtccttacagctgtaggaggagaatccatctattacgatgagcaaagcaaatttgtgtgcaacacagaacagccgggctgtgagaatgtctgttatgatgcgtttgcacct

SEQ ID NO: 136594 - DNA, 1837 bp, Homo sapiens
  Payload ID: 6737
  Gene Symbol: GJC1
  Gene Name: gap junction protein, gamma 1, 45kDa
  Uniprot ID: P36383
  ENST ID: ENST00000592524
  CDS Start-End: 267-1457
cgggagcggcttctgcctcggctggagactgaggcgaaggcggcagcggcggaggaggtggaggagaggcgagggtgaaggcgatggcgacgcggggcacatgaggccgcgaccggcgggacgggccgaggcccggcggaggaggcggctccgggggaacccgccgccggagggaatctggaaaaattgcaatcaaaacatcatttctctaagaaaattttgggtaaccgaagttctggacaacagggcataccaattcaatcaccatgagttggagcttcctgactcgcctgctagaggagattcacaaccattccacatttgtggggaagatctggctcactgttctgattgtcttccggatcgtccttacagctgtaggaggagaatccatctattacgatgagcaaagcaaatttgtgtgcaacacagaacagccgggctgtgagaatgtctgttatgatgcgtttgcacctctctcccatgtacgcttctgggtgttccagatcatcctggtggcaactccctctgtgatgtacctgggctatgctatccacaagattgccaaaatggagcacggtgaagcagacaagaaggcagctcggagcaagccctatgcaatgcgctggaaacaacaccgggctctggaagaaacggaggaggacaacgaagaggatcctatgatgtatccagagatggagttagaaagtgataaggaaaataaagagcagagccaacccaaacctaagcatgatggccgacgacggattcgggaagatgggctcatgaaaatctatgtgctgcagttgctggcaaggaccgtgtttgaggtgggttttctgatagggcagtattttctgtatggcttccaagtccacccgttttatgtgtgcagcagacttccttgtcctcataagatagactgctttatttctagacccactgaaaagaccatcttccttctgataatgtatggtgttacaggcctttgcctcttgcttaacatttgggagatgcttcatttagggtttgggaccattcgagactcactaaacagtaaaaggagggaacttgaggatccgggtgcttataattatcctttcacttggaatacaccatctgctccccctggctataacattgctgtcaaaccagatcaaatccagtacaccgaactgtccaatgctaagatcgcctacaagcaaaacaaggccaacacagcccaggaacagcagtatggcagccatgaggagaacctcccagctgacctggaggctctgcagcgggagatcaggatggctcaggaacgcttggatctggcagttcaggcctacagtcaccaaaacaaccctcatggtccccgggagaagaaggccaaagtggggtccaaagctgggtccaacaaaagcactgccagtagcaaatcaggggatgggaagacctccgtctggatttaatcctggcgggcttaaaacctgtgcttttcatagtttatggtaagcagcagctcactgaataatgacttccattgagtaaacatttggctctggttatcttcagggatgctgttggctcatgatccaagctcaggggactctggaggcggggctgggctgagggagagaaagggaaacacagtgttcccaggcacatgttcttagcaataatacagttgcagaactttacatttgtgtcttccagatctggagaagaacagacatatttaaatcattcttgttgaacagtttttgtatgtacagtattatggtacttttttttttttagtatgagaactttttttgtatttgtacattgaactgctgtagttatactttta

SEQ ID NO: 136595 - DNA, 572 bp, Homo sapiens
  Payload ID: 6737
  Gene Symbol: GJC1
  Gene Name: gap junction protein, gamma 1, 45kDa
  ENST ID: ENST00000587239
  CDS Start-End: 355-572
ggtgaatctcctgaggtcaggagttcgagaccagactggccaacggggcgaaaccccatctctactaaaaattagttggacgtggtggtgtgcgcctgtagtccagctactcgggaggctaaggcaggagaattgcttggacccaggagacggaggctacagtcagctgagattgcggtactgtgctccagcctgggtgacagagactcttgtctcaaagaaaaaaaagagaaagggaggaaaggagaaggaaggaagagggaatctggaaaaattgcaatcaaaacatcatttctctaagaaaattttgggtaaccgaagttctggacaacagggcataccaattcaatcaccatgagttggagcttcctgactcgcctgctagaggagattcacaaccattccacatttgtggggaagatctggctcactgttctgattgtcttccggatcgtccttacagctgtaggaggagaatccatctattacgatgagcaaagcaaatttgtgtgcaacacagaacagccgggctgtgagaatgtctgttatgatgcgtttgcacctctctccca

SEQ ID NO: 136596 - DNA, 545 bp, Homo sapiens
  Payload ID: 6737
  Gene Symbol: GJC1
  Gene Name: gap junction protein, gamma 1, 45kDa
  ENST ID: ENST00000586347
  CDS Start-End: 1-340
atctgctccccctggctataacattgctgtcaaaccagatcaaatccagtacaccgaactgtccaatgctaagatcgcctacaagcaaaacaaggccaacacagcccaggaacagcagtatggcagccatgaggagaacctcccagctgacctggaggctctgcagcgggagatcaggatggctcaggaacgcttggatctggcagttcaggcctacagtcaccaaaacaaccctcatggtccccgggagaagaaggccaaagtggggtccaaagctgggtccaacaaaagcactgccagtagcaaatcaggggatgggaagacctccgtctggatttaatcctggcgggcttaaaacctgtgcttttcatagtttatggaacgatttcagatgtgtaaggagactgaagaggagataccagtttttagtcttggaaagcaagttcacagtagaaggaggttgagatctttcttttatgtgagaaatctttgaatctcattcatgcgatcagagttgtagccaatttttgaaaaccttattttca

SEQ ID NO: 136597 - DNA, 3226 bp, Homo sapiens
  Payload ID: 6737
  Gene Symbol: GJC1
  Gene Name: gap junction protein, gamma 1, 45kDa
  ENST ID: ENST00000587113
  CDS Start-End: 1-783
gatcctatgatgtatccagagatggagttagaaagtgataaggaaaataaagagcagagccaacccaaacctaagcatgatggccgacgacggattcgggaagatgggctcatgaaaatctatgtgctgcagttgctggcaaggaccgtgtttgaggtgggttttctgatagggcagtattttctgtatggcttccaagtccacccgttttatgtgtgcagcagacttccttgtcctcataagatagactgctttatttctagacccactgaaaagaccatcttccttctgataatgtatggtgttacaggcctttgcctcttgcttaacatttgggagatgcttcatttagggtttgggaccattcgagactcactaaacagtaaaaggagggaacttgaggatccgggtgcttataattatcctttcacttggaatacaccatctgctccccctggctataacattgctgtcaaaccagatcaaatccagtacaccgaactgtccaatgctaagatcgcctacaagcaaaacaaggccaacacagcccaggaacagcagtatggcagccatgaggagaacctcccagctgacctggaggctctgcagcgggagatcaggatggctcaggaacgcttggatctggcagttcaggcctacagtcaccaaaacaaccctcatggtccccgggagaagaaggccaaagtggggtccaaagctgggtccaacaaaagcactgccagtagcaaatcaggggatgggaagacctccgtctggatttaatcctggcgggcttaaaacctgtgcttttcatagtttatgtttcaggagccatgtacatctcagaagtgttacgaagtgattagaaaaggcctctggtaaaagaccttcaaggaccaaccattattattggtcacttgtttgaacttggcgcttaaaaaaaaagttggactgtgatgctttggtgctctttatcacagacatcagtgatggtctgaaacactctctagcagtttatacgaagaatggacttacatgttatcagttacactcatgatttactcgttcagcttctacaagtccatactttatgctgtctcatttaagagacagtccacttctgaaaataaaatcgatagttgatgatacatttttggctagccagctttctgtaaaaggcaagtatgttagacatgcacagtttccttcaaatcaaatgtttaataaggtacttcaagaaacgcctttttaaaaatcaaaggttttggccaggcatggtggctcacgcctgtaatcccagcactttgggaggccaaggtgggcgaatcacaaggtcaggagtttgagaccagcctggccaacatggtgaaaccccgtctctactaaaaataccaaaaattagccgggcgtggtggtgggtacctgtaatcccagctactcaggaggctgagatgagaatcacttgatcccaggaggtagaggttgcagtgagccgagattgcgccattgcacttcagcctgggcaacgagtgaaactctcaaaaaaaaattcatagtaataataaagtccctgcatgcagtttggaaataaaatttaaactcatttatgtgtaataaatatgtaataattcacagtcaccatcaaatgttggaatcattgaattgcatacttgtactcattccggccacatcatgaagtgtttaaagatttgtatttgctgttgtccctatgtagttctattgatgtttggttttgttttttggggtttgttttgagcccaggctagagtgcaatggcacaatctcaactcactacagcctggacctccttggctcaagcagtcctcccacttcagcctcccaagtagctggtctgcaagtgctcaccaccacacctggctaatttttgtattttttgtagagacagagctctcactatgttgcctagactggtctcaaactcctgggcccaagcaatcctcccatcacagcctccgaaggtgctgggattacaggcataagccactgtgcccagcctgtttttaataatgatattaagtgggtttggttcatgtgttattaatcagtgttaataatcgtacttttttttttttttaaaagaaaccatggtattctaaaatcaggagtccaaataaaagaaagttctcggctgtgcatggtggctaacacctgtaatcccagcactttgggaggctgaggtgggtggatcactagaggtcaggagtttgaaacaagcctggccaacatggtaaaaccccctctctactaaaaatacaaaaattagccgggcatggtggtgcacacctgtaatcccagctactcgggatgttgaggcatgagatttccttgaacctggaaggcagaggttgctgtgagccgagatcgcgccactgcactccagcctgggtgacagagtaagactgtcgccaaaaaagaggaaaaaagttatccagtgcagtttctacagagataaaagaagtaatagttctggctgggtgtggtggcttatgcctgtaatcccaacactttgggaggccaaggcaggtggatcacatgaggtcaggagttcgagaccagcctggccaacatggcaaaactgtctctactaaaaatataaaaattaggtatggtggcacgtgcctgtacttacagctacttgggaggctgaggcatgagatgacaatctcttgaacccaggaggcggaggttgcagtgagctgagattgcaccactgcactccagcttgggtgatggagtgagactcaaataaaaaaggtactagttctgcatttcagagttggcttgttgaaccaggctatatgcttccaagatttaaatgtttttctgtattatactctcaattgtgttttaaaaaaatctcttacagaaatctctacctcaggcactaagtgttatgacatgggtagcatattgatattgaaaacttagctaggacttccagccttttaagataatttaaatgtaaaattaaatggttaaccagcaatctaatgtcatgtggtgtgcagtttggatattgcatgaacagctaaggaatcacctgttctagtgccaaagatcactcattgctaattttgttctgtacagcttatgtaatattttcatggtggagacggactctgtgtgctcagggccttgtctctaggaagattttgtcaattccaaatacagttttgaagattca

SEQ ID NO: 136598 - DNA, 2243 bp, Homo sapiens
  Payload ID: 6738
  Gene Symbol: GJC2
  Gene Name: gap junction protein, gamma 2, 47kDa
  Uniprot ID: Q5T442
  ENST ID: ENST00000366714
  CDS Start-End: 176-1495
ggggaacaatggggcccttgagggcccctcctccagcccccattgtgcttggtggtgagaggtggccctggctcggccacacaccctcggggaggaccagcatccaagcaggtggaagggctctgagggagactggaattttctggcctggagaaggacccgcccgcccgcccctatgaccaacatgagctggagcttcctgacgcggctgctggaggagatccacaaccactccaccttcgtgggcaaggtgtggctcacggtgctggtggtcttccgcatcgtgctgacggctgtgggcggcgaggccatctactcggacgagcaggccaagttcacttgcaacacgcggcagccaggctgcgacaacgtctgctatgacgccttcgcgcccctgtcgcacgtgcgcttctgggtcttccagattgtggtcatctccacgccctcggtcatgtacctgggctacgccgtgcaccgcctggcccgtgcgtctgagcaggagcggcgccgcgccctccgccgccgcccggggccacgccgcgcgccccgagcgcacctgccgcccccgcacgccggctggcctgagcccgccgacctgggcgaggaggagcccatgctgggcctgggcgaggaggaggaggaggaggagacgggggcagccgagggcgccggcgaggaagcggaggaggcaggcgcggaggaggcgtgcactaaggcggtcggcgctgacggcaaggcggcagggaccccgggcccgaccgggcaacacgatgggcggaggcgcatccagcgggagggcctgatgcgcgtgtacgtggcccagctggtggccagggcagctttcgaggtggccttcctggtgggccagtacctgctgtacggcttcgaggtgcgaccgttctttccctgcagccgccagccctgcccgcacgtggtggactgcttcgtgtcgcgccctactgaaaagacggtcttcctgctggttatgtacgtggtcagctgcctgtgcctgctgctcaacctctgtgagatggcccacctgggcttgggcagcgcgcaggacgcggtgcgcggccgccgcggccccccggcctccgcccccgcccccgcgccgcggcccccgccctgcgccttccctgcggcggccgctggcttggcctgcccgcccgactacagcctggtggtgcgggcggccgagcgcgctcgggcgcatgaccagaacctggcaaacctggccctgcaggcgctgcgcgacggggcagcggctggggaccgcgaccgggacagttcgccgtgcgtcggcctccctgcggcctcccgggggccccccagagcaggcgcccccgcgtcccggacgggcagtgctacctctgcgggcactgtcggggagcagggccggcccggcacccacgagcggccaggagccaagcccagggctggctccgagaagggcagtgccagcagcagggacgggaagaccaccgtgtggatctgagggcgctggcttgcgagctgggccagggaggaggagggttggggggctccggtggaaacctgcgaccccttctcctcagccttctccttagccggtggcctcaggcagactctgcccagaggggcagccaggctgctcagggaaggggctgaaagcggcagaggagtgccctggcttggtcaccactggggccaaggtggggtggagagaggcctaggagccagaaagggccctctgctgtggtctgaaccccagggggagtggggcattgactccacccctgtcctgagctggaataggtcctctgggatgccagctctcccctttgtgcttccctgcagcaacccatggagggcccagggtgcctggtatgggcatcagttggtgggggtgcgggggtgcgtgtccccattccctgcaacagcaaatggggctccttcttcagccctccccttcccagccccaaactgagacagactgggagctgggagcctggggtggacaggaccataccctctttgagcttctgcgatgccggccttccgttcctctgggaggcttgaagttctgcaaagatgttgatatgccttgcagcttggacccaatgggtggtggtcagggcctgggggcttggccatgctgggggaatggggctctgggttcctgcctgtggcctgtctgtcctcctccctaattcagacccagcctcaagaggaaagggagtaaaataaaactaacttgtttataa

SEQ ID NO: 136599 - DNA, 1116 bp, Homo sapiens
  Payload ID: 6739
  Gene Symbol: GJC3
  Gene Name: gap junction protein, gamma 3, 30.2kDa
  Uniprot ID: Q8NFK1
  ENST ID: ENST00000312891
  CDS Start-End: 1-840
atgtgtggcaggttcctgcggcggctgctggcggaggagagccggcgctccacccccgtggggcgcctcttgcttcccgtgctcctgggattccgccttgtgctgctggctgccagtgggcctggagtctatggtgatgagcagagtgaattcgtgtgtcacacccagcagccgggctgcaaggctgcctgcttcgatgccttccaccccctctccccgctgcgtttctgggtcttccaggtcatcttggtggctgtacccagcgccctctatatgggtttcactctgtatcacgtgatctggcactgggaattatcaggaaaggggaaggaggaggagaccctgatccagggacgggagggcaacacagatgtcccaggggctggaagcctcaggctgctctgggcttatgtggctcagctgggggctcggcttgtcctggagggggcagccctggggttgcagtaccacctgtatgggttccagatgcccagctcctttgcatgtcgccgagaaccttgccttggtagtataacctgcaatctgtcccgcccctctgagaagaccattttcctaaagaccatgtttggagtcagcggtttctgtctcttgtttacttttttggagcttgtgcttctgggtttggggagatggtggaggacctggaagcacaaatcttcctcttctaaatacttcctaacttcagagagcaccagaagacacaagaaagcaaccgatagcctcccagtggtggaaaccaaagagcaatttcaagaagcagttccaggaagaagcttagcccaggaaaaacaaagaccagttggacccagagatgcctgagttggagatgaactttggccaactttcctcatcaccatacttaaaatcctgtccaaggaggagcttattcaccattttctatacatgtgacatatgtagcagcataaccgacaactgggactgcgctgccttgactccacctctacatacaatgactcagctaaccagactaataaaagccatgtttgcaccattgctcagggaggcattgctttggggaattattcccagtgtcctccttacttatcgcaagtaataaaatccccctgggaaatc

SEQ ID NO: 136600 - DNA, 1224 bp, Homo sapiens
  Payload ID: 6740
  Gene Symbol: GAR1
  Gene Name: GAR1 homolog, ribonucleoprotein
  Uniprot ID: Q9NY12
  ENST ID: ENST00000226796
  CDS Start-End: 265-918
ggcctctctgttgtaaattagtggttaaggttatctattattgccacttttccagcgctaaaggctgttttggaaccagtgttgcttgttccgcgggtgattggcttttttttttggcaaaccagttattcaagtttctggtctttaaaaaactctgtggcggtacggtaaccgaggaggttccagcgcggcggaagtaccccgcgggtgggtgtgtgcgcaaggccagggccagaggggcacgtggcgccgggaggagagagaatgtcttttcgaggcggaggtcgtggaggctttaatcgaggtggtggaggtggcggcttcaaccgaggtggcagcagcaaccacttccgaggtggaggcggcggtggaggcggcggcaatttcagaggcggcggcaggggaggatttggacgagggggtggccgcggaggctttaacaaaggccaagaccaaggacctccagaacgtgtagtcttattaggagagttcctgcatccctgtgaagatgacatagtttgtaaatgtaccacagatgaaaataaggtgccttatttcaatgctcctgtttacttagaaaacaaagaacaaattggaaaagtggatgaaatatttggacaactcagagatttttatttttcagttaagttgtcagaaaacatgaaggcttcatcctttaaaaaactacagaagttttatatagacccatataagctgctgccactgcagaggtttttacctcgacctccaggtgagaaaggacctccaagaggtggtggcaggggaggccgaggaggaggaagaggaggaggtggcagaggtggtggcagaggcggtggttttagaggtggaagaggaggtggaggtgggggcttcagaggaggaagaggtggtggtttcagagggagaggacattaagtgaaacagttgacagacatcaccagttgacttctgcattaacctgcatgatctgtttctactatggattggaaacttgtttcttgaacaagtcttgaagatcttggtcattttatgacaatggatctaaaatgtcagcatcatgcaaagtgcaacggaatagtgaattttgctctaaaagagcatgaacaagtctttctaatgttttgtacagtgcctggcactctgtgggtgctcaataaatggataggagttttcatttgaagcatatttgaatttttaaaataaagtgttttattcccttaa

SEQ ID NO: 136601 - DNA, 1011 bp, Homo sapiens
  Payload ID: 6740
  Gene Symbol: GAR1
  Gene Name: GAR1 homolog, ribonucleoprotein
  Uniprot ID: Q9NY12
  ENST ID: ENST00000394631
  CDS Start-End: 49-702
ccgctgttatacgtcacttccacggctcagcgtcagggaggagagagaatgtcttttcgaggcggaggtcgtggaggctttaatcgaggtggtggaggtggcggcttcaaccgaggtggcagcagcaaccacttccgaggtggaggcggcggtggaggcggcggcaatttcagaggcggcggcaggggaggatttggacgagggggtggccgcggaggctttaacaaaggccaagaccaaggacctccagaacgtgtagtcttattaggagagttcctgcatccctgtgaagatgacatagtttgtaaatgtaccacagatgaaaataaggtgccttatttcaatgctcctgtttacttagaaaacaaagaacaaattggaaaagtggatgaaatatttggacaactcagagatttttatttttcagttaagttgtcagaaaacatgaaggcttcatcctttaaaaaactacagaagttttatatagacccatataagctgctgccactgcagaggtttttacctcgacctccaggtgagaaaggacctccaagaggtggtggcaggggaggccgaggaggaggaagaggaggaggtggcagaggtggtggcagaggcggtggttttagaggtggaagaggaggtggaggtgggggcttcagaggaggaagaggtggtggtttcagagggagaggacattaagtgaaacagttgacagacatcaccagttgacttctgcattaacctgcatgatctgtttctactatggattggaaacttgtttcttgaacaagtcttgaagatcttggtcattttatgacaatggatctaaaatgtcagcatcatgcaaagtgcaacggaatagtgaattttgctctaaaagagcatgaacaagtctttctaatgttttgtacagtgcctggcactctgtgggtgctcaataaatggataggagttttcatttgaagcatatttgaatttttaaaataaagtgttttattcccttaagtt

SEQ ID NO: 136602 - DNA, 2164 bp, Homo sapiens
  Payload ID: 6741
  Gene Symbol: GSDMA
  Gene Name: gasdermin A
  Uniprot ID: Q96QA5
  ENST ID: ENST00000301659
  CDS Start-End: 119-1456
ataaagcagcctgtcctggcaagggatggtcatcctctcaacctacagacccagtgagccctaggccctcaccccagacccagctgctggataggacccagccccgctcccagagacaatgaccatgtttgaaaatgtcacccgggccctggccagacagctaaaccctcgaggggacctgacaccacttgacagcctcatcgacttcaagcgcttccatcccttctgcctggtgctgaggaagaggaagagcacgctcttctggggggcccggtacgtccgcaccgactacacgctgctggatgtgcttgagcccggcagctcaccttcagacccaacagacactgggaattttggctttaagaatatgctggacacccgagtggagggagatgtggatgtaccaaagacggtgaaggtgaagggaacggcagggctctcgcagaacagcactctggaggtccagacactcagtgtggctcccaaggccctggagaccgtgcaggagaggaagctggcagcagaccacccattcctgaaggagatgcaagatcaaggggagaacctgtatgtggtgatggaggtggtggagacggtgcaggaggtcacactggagcgagccggcaaggcagaggcctgcttctccctccccttcttcgccccattggggctacagggatccataaatcacaaggaggctgtaaccatccccaagggctgcgtcctggcctttcgagtgagacagctgatggtcaaaggcaaagatgagtgggatattccacatatctgcaatgataacatgcaaaccttccctcctggagaaaagtcaggagaggagaaggtcatccttatccaggcatctgatgttggggacgtacacgaaggcttcaggacactaaaagaagaagttcagagagagacccaacaagtggagaagctgagccgagtagggcaaagctccctgctcagctccctcagcaaacttctagggaagaaaaaggagctacaagaccttgagctcgcacttgaaggggctctagacaagggacatgaagtgaccctggaggcactcccaaaagatgtcctgctatcaaaggaggccgtgggcgccatcctctatttcgttggagccctaacagagctaagtgaagcccaacagaagctgctggtgaaatccatggagaaaaagatcctacccgtgcagctaaagctggtggagagcacgatggaacagaacttcctgctggataaagagggtgttttccccctgcaacctgagctgctctcctcccttggggacgaggagctgaccctcacggaggctctagtcgggctgagtggcctggaagtgcagagatcgggcccccaatatatgtgggacccagacaccctccctcgcctctgtgctctttatgcaggcctctctctccttcagcagcttaccaaggcctcctaatttgccttttacgtctgcttcatgactccctaatgccttcccaacctcgtggtgctgtgtccttaccacctaagggcatttcagagccatcagctgaagacatctgaaatctcagctggtcacccatgataaccaacttccacctgcccaaccatatatcaccccctacccctccagctccgcaacccactaagcccatctgctgatgcttaaattttctttacttttcttttctttttttttttttttttgagatggaggctcactctgtcacccaggctggagtgcagtggcttgatcttggctcactgcaacctccgcctcccaggttcaagcaattctcctgcctcagcctctcgagcagctggaattacaggcacgtgccacgacacccagctaatttttgtatttttagtagagacggggtttcaccatgttgcccaggttggtctcgaactcctggcctcaagtgatctgcccgcctcggcctcccaaagtgctgggattacaggcgtgagccaccgtgcccggcctgtgcttaaatattctaggagtagaagcactcagacttttaaaactatgagccgtttcagcaaaactgagaaaaaaagaagattaattaatttcctatcctaatccctcctacttatacttccccaaaaaacaagctttactggaattaatggaaaatattatgtcaatcttagg

SEQ ID NO: 136603 - DNA, 547 bp, Homo sapiens
  Payload ID: 6741
  Gene Symbol: GSDMA
  Gene Name: gasdermin A
  ENST ID: ENST00000577447
  CDS Start-End: 72-547
attctttccagctgtgacatgagacaatccaggcatctctaagagctcctcctgcctcagagccggagacaatgaccatgtttgaaaatgtcacccgggccctggccagacagctaaaccctcgaggggacctgacaccacttgacagcctcatcgacttcaagcgcttccatcccttctgcctggtgctgaggaagaggaagagcacgctcttctggggggcccggtacgtccgcaccgactacacgctgctggatgtgcttgagcccggcagctcaccttcagacccaacagacactgggaattttggctttaagaatatgctggacacccgagtggagggagatgtggatgtaccaaagacggtgaaggtgaagggaacggcagggctctcgcagaacagcactctggaggtccagacactcagtgtggctcccaaggccctggagaccgtgcaggagaggaagctggcagcagaccacccattcctgaaggagatgcaagatcaaggggagaacctgtatgtggtgatggaggtggtggagac

SEQ ID NO: 136604 - DNA, 1500 bp, Homo sapiens
  Payload ID: 6742
  Gene Symbol: GSDMB
  Gene Name: gasdermin B
  Uniprot ID: Q8TAX9
  ENST ID: ENST00000309481
  CDS Start-End: 72-1283
atctgtggggattctcacaacttccatttctggtgaacagctgaggtcagagaggagttggtccaggcgcaatgttcagcgtatttgaggaaatcacaagaattgtagttaaggagatggatgctggaggggatatgattgccgttagaagccttgttgatgctgatagattccgctgcttccatctggtgggggagaagagaactttctttggatgccggcactacacaacaggcctcaccctgatggacattctggacacagatggggacaagtggttagatgaactggattctgggctccaaggtcaaaaggctgagtttcaaattctggataatgtagactcaacgggagagttgatagtgagattacccaaagaaataacaatttcaggcagtttccagggcttccaccatcagaaaatcaagatatcggagaaccggatatcccagcagtatctggctacccttgaaaacaggaagctgaagagggaactacccttttcattccgatcaattaatacgagagaaaacctgtatctggtgacagaaactctggagacggtaaaggaggaaaccctgaaaagcgaccggcaatataaattttggagccagatctctcagggccatctcagctataaacacaagggccaaagggaagtgaccatccccccaaatcgggtcctgagctatcgagtaaagcagcttgtcttccccaacaaggagacgatgaagaaggatggtgcttcatcctgtttaggaaagtctttgggttcggaggattccagaaacatgaaggagaagttggaggacatggagagtgtcctcaaggacctgacagaggagaagagaaaagatgtgctaaactccctcgctaagtgcctcggcaaggaggatattcggcaggatctagagcaaagagtatctgaggtcctgatttccggggagctacacatggaggacccagacaagcctctcctaagcagcctttttaatgctgctggggtcttggtagaagcgcgtgcaaaagccattctggacttcctggatgccctgctagagctgtctgaagagcagcagtttgtggctgaggccctggagaaggggacccttcctctgttgaaggaccaggtgaaatctgtcatggagcagaactgggatgagctggccagcagtcctcctgacatggactatgaccctgaggcacgaattctctgtgcgctgtatgttgttgtctctatcctgctggagctggctgaggggcctacctctgtctcttcctaactacaaaagccctttctccccacaagcctctgggttttccctttaccagtctgtcctcactgccatcgccactaccatcctgtcaccagtgggacctctttaaaacaagcagccaaccattctttgatgtatcccattcgctccatgttaacatccaaaaccagcctggatttcatacatggacttctgattaaaagtggcaggttgtgcatgttaa

SEQ ID NO: 136605 - DNA, 1468 bp, Homo sapiens
  Payload ID: 6742
  Gene Symbol: GSDMB
  Gene Name: gasdermin B
  Uniprot ID: Q8TAX9
  ENST ID: ENST00000360317
  CDS Start-End: 1-1251
atgttcagcgtatttgaggaaatcacaagaattgtagttaaggagatggatgctggaggggatatgattgccgttagaagccttgttgatgctgatagattccgctgcttccatctggtgggggagaagagaactttctttggatgccggcactacacaacaggcctcaccctgatggacattctggacacagatggggacaagtggttagatgaactggattctgggctccaaggtcaaaaggctgagtttcaaattctggataatgtagactcaacgggagagttgatagtgagattacccaaagaaataacaatttcaggcagtttccagggcttccaccatcagaaaatcaagatatcggagaaccggatatcccagcagtatctggctacccttgaaaacaggaagctgaagagggaactacccttttcattccgatcaattaatacgagagaaaacctgtatctggtgacagaaactctggagacggtaaaggaggaaaccctgaaaagcgaccggcaatataaattttggagccagatctctcagggccatctcagctataaacacaagggccaaagggaagtgaccatccccccaaatcgggtcctgagctatcgagtaaagcagcttgtcttccccaacaaggagacgatgaatattcatttcaggggcaaaacaaaatcctttccagaagagaaggatggtgcttcatcctgtttaggaaagtctttgggttcggaggattccagaaacatgaaggagaagttggaggacatggagagtgtcctcaaggacctgacagaggagaagagaaaagatgtgctaaactccctcgctaagtgcctcggcaaggaggatattcggcaggatctagagcaaagagtatctgaggtcctgatttccggggagctacacatggaggacccagacaagcctctcctaagcagcctttttaatgctgctggggtcttggtagaagcgcgtgcaaaagccattctggacttcctggatgccctgctagagctgtctgaagagcagcagtttgtggctgaggccctggagaaggggacccttcctctgttgaaggaccaggtgaaatctgtcatggagcagaactgggatgagctggccagcagtcctcctgacatggactatgaccctgaggcacgaattctctgtgcgctgtatgttgttgtctctatcctgctggagctggctgaggggcctacctctgtctcttcctaactacaaaagccctttctccccacaagcctctgggttttccctttaccagtctgtcctcactgccatcgccactaccatcctgtcaccagtgggacctctttaaaacaagcagccaaccattctttgatgtatcccattcgctccatgttaacatccaaaaccagcctggatttcatacatggacttctgattaaaagtggcaggttgtgcatgttaa

SEQ ID NO: 136606 - DNA, 1626 bp, Homo sapiens
  Payload ID: 6742
  Gene Symbol: GSDMB
  Gene Name: gasdermin B
  Uniprot ID: Q8TAX9
  ENST ID: ENST00000394175
  CDS Start-End: 225-1409
gtggaatgtcatcagttaaggctattttcatttcttttgtggatcttcagttgcttcaggccatctggatgtatacatgcaggtcacagggaatatgatggcttagcttgggttcagaggcctgacacctcaggctgccaaatgtggaagatttaaatacttgaaccaataccctcctcccaaaaactgaaattggcttctgtttctgagttggtccaggcgcaatgttcagcgtatttgaggaaatcacaagaattgtagttaaggagatggatgctggaggggatatgattgccgttagaagccttgttgatgctgatagattccgctgcttccatctggtgggggagaagagaactttctttggatgccggcactacacaacaggcctcaccctgatggacattctggacacagatggggacaagtggttagatgaactggattctgggctccaaggtcaaaaggctgagtttcaaattctggataatgtagactcaacgggagagttgatagtgagattacccaaagaaataacaatttcaggcagtttccagggcttccaccatcagaaaatcaagatatcggagaaccggatatcccagcagtatctggctacccttgaaaacaggaagctgaagagggaactacccttttcattccgatcaattaatacgagagaaaacctgtatctggtgacagaaactctggagacggtaaaggaggaaaccctgaaaagcgaccggcaatataaattttggagccagatctctcagggccatctcagctataaacacaagggccaaagggaagtgaccatccccccaaatcgggtcctgagctatcgagtaaagcagcttgtcttccccaacaaggagacgatgagaaagtctttgggttcggaggattccagaaacatgaaggagaagttggaggacatggagagtgtcctcaaggacctgacagaggagaagagaaaagatgtgctaaactccctcgctaagtgcctcggcaaggaggatattcggcaggatctagagcaaagagtatctgaggtcctgatttccggggagctacacatggaggacccagacaagcctctcctaagcagcctttttaatgctgctggggtcttggtagaagcgcgtgcaaaagccattctggacttcctggatgccctgctagagctgtctgaagagcagcagtttgtggctgaggccctggagaaggggacccttcctctgttgaaggaccaggtgaaatctgtcatggagcagaactgggatgagctggccagcagtcctcctgacatggactatgaccctgaggcacgaattctctgtgcgctgtatgttgttgtctctatcctgctggagctggctgaggggcctacctctgtctcttcctaactacaaaagccctttctccccacaagcctctgggttttccctttaccagtctgtcctcactgccatcgccactaccatcctgtcaccagtgggacctctttaaaacaagcagccaaccattctttgatgtatcccattcgctccatgttaacatccaaaaccagcctggatttcatacatggacttctgattaaaagtggcaggttgtgcatgttaa

SEQ ID NO: 136607 - DNA, 1427 bp, Homo sapiens
  Payload ID: 6742
  Gene Symbol: GSDMB
  Gene Name: gasdermin B
  Uniprot ID: Q8TAX9
  ENST ID: ENST00000394179
  CDS Start-End: 1-1212
atgttcagcgtatttgaggaaatcacaagaattgtagttaaggagatggatgctggaggggatatgattgccgttagaagccttgttgatgctgatagattccgctgcttccatctggtgggggagaagagaactttctttggatgccggcactacacaacaggcctcaccctgatggacattctggacacagatggggacaagtggttagatgaactggattctgggctccaaggtcaaaaggctgagtttcaaattctggataatgtagactcaacgggagagttgatagtgagattacccaaagaaataacaatttcaggcagtttccagggcttccaccatcagaaaatcaagatatcggagaaccggatatcccagcagtatctggctacccttgaaaacaggaagctgaagagggaactacccttttcattccgatcaattaatacgagagaaaacctgtatctggtgacagaaactctggagacggtaaaggaggaaaccctgaaaagcgaccggcaatataaattttggagccagatctctcagggccatctcagctataaacacaagggccaaagggaagtgaccatccccccaaatcgggtcctgagctatcgagtaaagcagcttgtcttccccaacaaggagacgatgaagaaggatggtgcttcatcctgtttaggaaagtctttgggttcggaggattccagaaacatgaaggagaagttggaggacatggagagtgtcctcaaggacctgacagaggagaagagaaaagatgtgctaaactccctcgctaagtgcctcggcaaggaggatattcggcaggatctagagcaaagagtatctgaggtcctgatttccggggagctacacatggaggacccagacaagcctctcctaagcagcctttttaatgctgctggggtcttggtagaagcgcgtgcaaaagccattctggacttcctggatgccctgctagagctgtctgaagagcagcagtttgtggctgaggccctggagaaggggacccttcctctgttgaaggaccaggtgaaatctgtcatggagcagaactgggatgagctggccagcagtcctcctgacatggactatgaccctgaggcacgaattctctgtgcgctgtatgttgttgtctctatcctgctggagctggctgaggggcctacctctgtctcttcctaactacaaaagccctttctccccacaagcctctgggttttccctttaccagtctgtcctcactgccatcgccactaccatcctgtcaccagtgggacctctttaaaacaagcagccaaccattctttgatgtatcccattcgctccatgttaacatccaaaaccagcctggatttcatacatggacttctgattaaaagtggcaggttgtgcatgtt

SEQ ID NO: 136608 - DNA, 1597 bp, Homo sapiens
  Payload ID: 6742
  Gene Symbol: GSDMB
  Gene Name: gasdermin B
  Uniprot ID: Q8TAX9
  ENST ID: ENST00000418519
  CDS Start-End: 132-1382
acaactttcagtttcattattttagcttcctgagattcagaggccaggaactgtgcagagatctgtggggattctcacaacttccatttctggtgaacagctgaggtcagagaggagttggtccaggcgcaatgttcagcgtatttgaggaaatcacaagaattgtagttaaggagatggatgctggaggggatatgattgccgttagaagccttgttgatgctgatagattccgctgcttccatctggtgggggagaagagaactttctttggatgccggcactacacaacaggcctcaccctgatggacattctggacacagatggggacaagtggttagatgaactggattctgggctccaaggtcaaaaggctgagtttcaaattctggataatgtagactcaacgggagagttgatagtgagattacccaaagaaataacaatttcaggcagtttccagggcttccaccatcagaaaatcaagatatcggagaaccggatatcccagcagtatctggctacccttgaaaacaggaagctgaagagggaactacccttttcattccgatcaattaatacgagagaaaacctgtatctggtgacagaaactctggagacggtaaaggaggaaaccctgaaaagcgaccggcaatataaattttggagccagatctctcagggccatctcagctataaacacaagggccaaagggaagtgaccatccccccaaatcgggtcctgagctatcgagtaaagcagcttgtcttccccaacaaggagacgatgaatattcatttcaggggcaaaacaaaatcctttccagaagagaaggatggtgcttcatcctgtttaggaaagtctttgggttcggaggattccagaaacatgaaggagaagttggaggacatggagagtgtcctcaaggacctgacagaggagaagagaaaagatgtgctaaactccctcgctaagtgcctcggcaaggaggatattcggcaggatctagagcaaagagtatctgaggtcctgatttccggggagctacacatggaggacccagacaagcctctcctaagcagcctttttaatgctgctggggtcttggtagaagcgcgtgcaaaagccattctggacttcctggatgccctgctagagctgtctgaagagcagcagtttgtggctgaggccctggagaaggggacccttcctctgttgaaggaccaggtgaaatctgtcatggagcagaactgggatgagctggccagcagtcctcctgacatggactatgaccctgaggcacgaattctctgtgcgctgtatgttgttgtctctatcctgctggagctggctgaggggcctacctctgtctcttcctaactacaaaagccctttctccccacaagcctctgggttttccctttaccagtctgtcctcactgccatcgccactaccatcctgtcaccagtgggacctctttaaaacaagcagccaaccattctttgatgtatcccattcgctccatgttaacatccaaaaccagcctggatttcatacatggacttctgattaaaagtggcaggttgtgcatgtt

SEQ ID NO: 136609 - DNA, 958 bp, Homo sapiens
  Payload ID: 6742
  Gene Symbol: GSDMB
  Gene Name: gasdermin B
  ENST ID: ENST00000522564
  CDS Start-End: 1-552
atgttcagcgtatttgaggaaatcacaagaattgtagttaaggagatggatgctggaggggatatgattgccgttagaagccttgttgatgctgatagattccgctgcttccatctggtgggggagaagagaactttctttggatgccggcactacacaacaggcctcaccctgatggacattctggacacagatggggacaagtggttagatgaactggattctgggctccaaggtcaaaaggctgagtttcaaattctggataatgtagactcaacgggagagttgatagtgagattacccaaagaaataacaatttcaggcagtttccagggcttccaccatcagaaaatcaagatatcggagaaccggatatcccagcagtatctggctacccttgaaaacagagaaggatggtgcttcatcctgtttaggaaagtctttgggttcggaggattccagaaacatgaaggagaagttggaggacatggagagtgtcctcaaggacctgacagaggagaagagaaaagatgtgctaaactccctcgctaagtgcctcggcaaggaggatattcggcaggatctagagcaaagagtatctgaggtcctgatttccggggagctacacatggaggacccagacaagcctctcctaagcagcctttttaatgctgctggggtcttggtagaagcgcgtgcaaaagccattctggacttcctggatgccctgctagagctgtctgaagagcagcagtttgtggctgaggccctggagaaggggacccttcctctgttgaaggaccaggtgaaatctgtcatggagcagaactgggatgagctggccagcagtcctcctgacatggactatgaccctgaggcacgaattctctgtgcgctgtatgttgttgtctctatcctgctggagctggctgaggggcctacctctgtctcttcctaa

SEQ ID NO: 136610 - DNA, 1100 bp, Homo sapiens
  Payload ID: 6742
  Gene Symbol: GSDMB
  Gene Name: gasdermin B
  ENST ID: ENST00000524039
  CDS Start-End: 1-612
atgttcagcgtatttgaggaaatcacaagaattgtagttaaggagatggatgctggaggggatatgattgccgttagaagccttgttgatgctgatagattccgctgcttccatctggtgggggagaagagaactttctttggatgccggcactacacaacaggcctcaccctgatggacattctggacacagatggggacaagtggttagatgaactggattctgggctccaaggtcaaaaggctgagtttcaaattctggataatgtagactcaacgggagagttgatagtgagattacccaaagaaataacaatttcaggcagtttccagggcttccaccatcagaaaatcaagatatcggagaaccggatatcccagcagtatctggctacccttgaaaacaggaagctgaagagggaactacccttttcattccgatcaattaatacgagagaaaacctgtatctggtgacagaaactctggagacggtaaaggaggaaaccctgaaaagcgaccggcaatataaattttggagccagatctctcagggccatctcagctataaacacaaggaaagtctttgggttcggaggattccagaaacatgaaggagaagttggaggacatggagagtgtcctcaaggacctgacagaggagaagagaaaagatgtgctaaactccctcgctaagtgcctcggcaaggaggatattcggcaggatctagagcaaagagtatctgaggtcctgatttccggggagctacacatggaggacccagacaagcctctcctaagcagcctttttaatgctgctggggtcttggtagaagcgcgtgcaaaagccattctggacttcctggatgccctgctagagctgtctgaagagcagcagtttgtggctgaggccctggagaaggggacccttcctctgttgaaggaccaggtgaaatctgtcatggagcagaactgggatgagctggccagcagtcctcctgacatggactatgaccctgaggcacgaattctctgtgcgctgtatgttgttgtctctatcctgctggagctggctgaggggcctacctctgtctcttcctaa

SEQ ID NO: 136611 - DNA, 1127 bp, Homo sapiens
  Payload ID: 6742
  Gene Symbol: GSDMB
  Gene Name: gasdermin B
  ENST ID: ENST00000523371
  CDS Start-End: 1-603
atgttcagcgtatttgaggaaatcacaagaattgtagttaaggagatggatgctggaggggatatgattgccgttagaagccttgttgatgctgatagattccgctgcttccatctggtgggggagaagagaactttctttggatgccggcactacacaacaggcctcaccctgatggacattctggacacagatggggacaagtggttagatgaactggattctgggctccaaggtcaaaaggctgagtttcaaattctggataatgtagactcaacgggagagttgatagtgagattacccaaagaaataacaatttcaggcagtttccagggcttccaccatcagaaaatcaagatatcggagaaccggatatcccagcagtatctggctacccttgaaaacaggaagctgaagagggaactacccttttcattccgatcaattaatacgagagaaaacctgtatctggtgacagaaactctggagacggtaaaggaggaaaccctgaaaagcgaccggcaatataaattttggagccagatctctcagggccatctcagctataaacacaagagaaggatggtgcttcatcctgtttaggaaagtctttgggttcggaggattccagaaacatgaaggagaagttggaggacatggagagtgtcctcaaggacctgacagaggagaagagaaaagatgtgctaaactccctcgctaagtgcctcggcaaggaggatattcggcaggatctagagcaaagagtatctgaggtcctgatttccggggagctacacatggaggacccagacaagcctctcctaagcagcctttttaatgctgctggggtcttggtagaagcgcgtgcaaaagccattctggacttcctggatgccctgctagagctgtctgaagagcagcagtttgtggctgaggccctggagaaggggacccttcctctgttgaaggaccaggtgaaatctgtcatggagcagaactgggatgagctggccagcagtcctcctgacatggactatgaccctgaggcacgaattctctgtgcgctgtatgttgttgtctctatcctgctggagctggctgaggggcctacctctgtctcttcctaa

SEQ ID NO: 136612 - DNA, 1546 bp, Homo sapiens
  Payload ID: 6742
  Gene Symbol: GSDMB
  Gene Name: gasdermin B
  Uniprot ID: Q8TAX9
  ENST ID: ENST00000520542
  CDS Start-End: 108-1331
attattttagcttcctgagattcagaggccaggaactgtgcagagatctgtggggattctcacaacttccatttctggtgaacagctgaggtcagagaggaggcgcaatgttcagcgtatttgaggaaatcacaagaattgtagttaaggagatggatgctggaggggatatgattgccgttagaagccttgttgatgctgatagattccgctgcttccatctggtgggggagaagagaactttctttggatgccggcactacacaacaggcctcaccctgatggacattctggacacagatggggacaagtggttagatgaactggattctgggctccaaggtcaaaaggctgagtttcaaattctggataatgtagactcaacgggagagttgatagtgagattacccaaagaaataacaatttcaggcagtttccagggcttccaccatcagaaaatcaagatatcggagaaccggatatcccagcagtatctggctacccttgaaaacaggaagctgaagagggaactacccttttcattccgatcaattaatacgagagaaaacctgtatctggtgacagaaactctggagacggtaaaggaggaaaccctgaaaagcgaccggcaatataaattttggagccagatctctcagggccatctcagctataaacacaagggccaaagggaagtgaccatccccccaaatcgggtcctgagctatcgagtaaagcagcttgtcttccccaacaaggagacgatgaatattcatttcaggggcaaaacaaaatcctttccagaaggaaagtctttgggttcggaggattccagaaacatgaaggagaagttggaggacatggagagtgtcctcaaggacctgacagaggagaagagaaaagatgtgctaaactccctcgctaagtgcctcggcaaggaggatattcggcaggatctagagcaaagagtatctgaggtcctgatttccggggagctacacatggaggacccagacaagcctctcctaagcagcctttttaatgctgctggggtcttggtagaagcgcgtgcaaaagccattctggacttcctggatgccctgctagagctgtctgaagagcagcagtttgtggctgaggccctggagaaggggacccttcctctgttgaaggaccaggtgaaatctgtcatggagcagaactgggatgagctggccagcagtcctcctgacatggactatgaccctgaggcacgaattctctgtgcgctgtatgttgttgtctctatcctgctggagctggctgaggggcctacctctgtctcttcctaactacaaaagccctttctccccacaagcctctgggttttccctttaccagtctgtcctcactgccatcgccactaccatcctgtcaccagtgggacctctttaaaacaagcagccaaccattctttgatgtatcccattcgctccatgttaacatccaaaaccagcctggatttcatacatggacttctgattaaaagtggcaggttgtgcatgtt

SEQ ID NO: 136613 - DNA, 369 bp, Homo sapiens
  Payload ID: 6742
  Gene Symbol: GSDMB
  Gene Name: gasdermin B
  ENST ID: ENST00000468820
  CDS Start-End: 1-223
ggctacccttgaaaacaggaagctgaagagggaactacccttttcattccgatcaattaatacgagagaaaacctgtatctggtgacagaaactctggagacggtaaaggaggaaaccctgaaaagcgaccggcaatataaattttggagccagatctctcagggccatctcagctataaacacaaggaaagtctttgggttcggaggattccagaaacatgaaggagaagttggaggacatggagagtgtcctcaaggacctgacagaggagaagagaaaagatgtgctaaactccctcgctaagtgcctcggcaaggaggatattcggcaggatctagagcaaagagtatctgaggtcctgatttcc

SEQ ID NO: 136614 - DNA, 2714 bp, Homo sapiens
  Payload ID: 6743
  Gene Symbol: GSDMC
  Gene Name: gasdermin C
  Uniprot ID: Q9BYG8
  ENST ID: ENST00000276708
  CDS Start-End: 883-2409
ccacatgtaggcagttcagaggtgcttcccagggccctggcgctagtgcctgtccctcctgctgaagttgcctttcctggtgtccagtgattgaattctaaattcagcacatataccagaggaatacgagccaaagaagttgttccagctagagttgctgggaatccatgaatcaaagacttgctcagctagttctgtatgtgaaaggaaatgggtgtgactctgaggaagcctttttaattctgattcaggagatacataattagatgccacttgattttgttccacagactttttgctgaggacttgagagctaaggttctgtgatccagaactagttccagacttactcttctggaaatgaacagggccctcctgtgcttatttttccaggatactgcattggaaattgagtcagggacccattggtgagaagagaacagtgaacagaatcacattgatctggtcctggagtttgtctgacaatttctacttgaccgcaggaggtctgaagattggaaggggccctactcaattgtgctatttttctctcttttttttttttttgagacggagttgcccaggctggagtgcagcggcatggtctcagctcactgcaacctctgcctcccgggttcaagcagttctctgcctcagcctcccaagtagctgggattacaggtgcctgccaccattcctggctaatttttgtattttcagtagagacagggtttcaccatcttggcctggctgatcttgaactcctgacctcgtgatccaccggcctcagcctcccaaagtgctgggattacagacgtgagccaccgtgcccggccaatcctgctatttctctacaggacaaagggatatataatctgcaacatgccctccatgttggaacgcattagcaaaaatttggtcaaagagattggaagcaaagacctgacacctgtcaaatacctattgagtgccaccaaattacgtcagtttgttatattacgaaagaagaaggattctcgttcatcattttgggaacaatctgactatgttccagttgaattctccctcaatgacatcctggagccaagttcttcagtcctagaaactgttgtgacaggaccgttccacttcagtgacattatgatccagaagcataaggctgacatgggtgtgaatgttggtatagaagtgagtgtgtcaggggaggcctctgtggaccatggatgctccctcgagtttcaaattgttaccatcccatcaccaaacctggaagactttcaaaaaaggaaactgttggatccagagccatcatttctgaaggagtgccggaggagaggggacaacctgtacgtggtgacagaggctgttgaactgatcaacaatactgtgctgtacgatagcagtagtgtgaatattttagggaaaattgctctttggattacctatggcaagggtcaaggccaaggagagagtctcagagtgaagaagaaggcgctgactcttcagaaaggcatggtgatggcttataagagaaagcagctggttatcaaggagaaagccattctcatctcagatgatgatgaacagagaacctttcaagatgagtacgaaatttccgaaatggtaggctactgtgctgcgaggagtgaggggttgctaccatcatttcataccatctctccaaccctcttcaatgcctcatccaatgatatgaagttaaaaccagagctatttctgacacagcaatttttgagcgggcatttgccaaaatacgaacaagttcacatcctcccagtaggaagaatagaggaacccttctggcaaaatttcaagcatctacaagaggaggttttccagaaaataaagacactggctcagctctcaaaggatgttcaggatgtcatgttctacagtatcctggccatgctcagagacagaggggctctacaggacctgatgaacatgctggaattggacagctcaggtcatttggatggccctggtggtgccatcctaaagaaacttcaacaggattcaaaccatgcatggtttaacccaaaggaccccattctttatctccttgaagccataatggtgctgagtgacttccaacacgatttgctggcctgttccatggagaagaggatcctgcttcagcaacaggagctggtaaggagcatcctggagccaaacttcagatacccctggagcattcccttcaccctcaaacctgagctcctcgccccactccagagtgagggtttggccatcacctatggcctgctggaggagtgtggccttaggatggagctggataaccccaggtcaacctgggatgtagaagcaaagatgcccctgtctgccctctatgggactctctcgttgctgcagcagctggctgaggcctaagccctccctgatgggcagtcagtccagagatgctggccctcgcccagtctatgctgtgagtgtccttatgggtgcaagagatagggctgtgcctctctgcgtttccaggtggagtagagacagtaatgggtagagactttaggaaatgttttggggtggtggaatactctatatattgacaagagtttatatattgacaagagtttatatatttgtcaaaactcctcaaatagtatgttaaagacgtaagcgtttcactatgtataaattttacttcaaaataataaaaacaaatactgactcta

SEQ ID NO: 136615 - DNA, 1831 bp, Homo sapiens
  Payload ID: 6743
  Gene Symbol: GSDMC
  Gene Name: gasdermin C
  Uniprot ID: Q9BYG8
  ENST ID: ENST00000619643
  CDS Start-End: 1-1527
atgccctccatgttggaacgcattagcaaaaatttggtcaaagagattggaagcaaagacctgacacctgtcaaatacctattgagtgccaccaaattacgtcagtttgttatattacgaaagaagaaggattctcgttcatcattttgggaacaatctgactatgttccagttgaattctccctcaatgacatcctggagccaagttcttcagtcctagaaactgttgtgacaggaccgttccacttcagtgacattatgatccagaagcataaggctgacatgggtgtgaatgttggtatagaagtgagtgtgtcaggggaggcctctgtggaccatggatgctccctcgagtttcaaattgttaccatcccatcaccaaacctggaagactttcaaaaaaggaaactgttggatccagagccatcatttctgaaggagtgccggaggagaggggacaacctgtacgtggtgacagaggctgttgaactgatcaacaatactgtgctgtacgatagcagtagtgtgaatattttagggaaaattgctctttggattacctatggcaagggtcaaggccaaggagagagtctcagagtgaagaagaaggcgctgactcttcagaaaggcatggtgatggcttataagagaaagcagctggttatcaaggagaaagccattctcatctcagatgatgatgaacagagaacctttcaagatgagtacgaaatttccgaaatggtaggctactgtgctgcgaggagtgaggggttgctaccatcatttcataccatctctccaaccctcttcaatgcctcatccaatgatatgaagttaaaaccagagctatttctgacacagcaatttttgagcgggcatttgccaaaatacgaacaagttcacatcctcccagtaggaagaatagaggaacccttctggcaaaatttcaagcatctacaagaggaggttttccagaaaataaagacactggctcagctctcaaaggatgttcaggatgtcatgttctacagtatcctggccatgctcagagacagaggggctctacaggacctgatgaacatgctggaattggacagctcaggtcatttggatggccctggtggtgccatcctaaagaaacttcaacaggattcaaaccatgcatggtttaacccaaaggaccccattctttatctccttgaagccataatggtgctgagtgacttccaacacgatttgctggcctgttccatggagaagaggatcctgcttcagcaacaggagctggtaaggagcatcctggagccaaacttcagatacccctggagcattcccttcaccctcaaacctgagctcctcgccccactccagagtgagggtttggccatcacctatggcctgctggaggagtgtggccttaggatggagctggataaccccaggtcaacctgggatgtagaagcaaagatgcccctgtctgccctctatgggactctctcgttgctgcagcagctggctgaggcctaagccctccctgatgggcagtcagtccagagatgctggccctcgcccagtctatgctgtgagtgtccttatgggtgcaagagatagggctgtgcctctctgcgtttccaggtggagtagagacagtaatgggtagagactttaggaaatgttttggggtggtggaatactctatatattgacaagagtttatatattgacaagagtttatatatttgtcaaaactcctcaaatagtatgttaaagacgtaagcgtttcactatgtataaattttacttcaaaataataaaaacaaatactgactct

SEQ ID NO: 136616 - DNA, 1762 bp, Homo sapiens
  Payload ID: 6744
  Gene Symbol: GSDMD
  Gene Name: gasdermin D
  Uniprot ID: P57764
  ENST ID: ENST00000262580
  CDS Start-End: 150-1604
gttccgggagggcgtcctgggcgggccctgcgtcaggttgcagtttcacttttagctctgggcacctccagctcctgctcgccggacggctcccagggagagcagacgcgccagacgcgccaccctcggggcgccgacggtcacggagcatggggtcggcctttgagcgggtagtccggagagtggtccaggagctggaccatggtggggagttcatccctgtgaccagcctgcagagctccactggcttccagccctactgcctggtggttaggaagccctcaagctcatggttctggaaaccccgttataagtgtgtcaacctgtctatcaaggacatcctggagccggatgccgcggaaccagacgtgcagcgtggcaggagcttccacttctacgatgccatggatgggcagatacagggcagcgtggagctggcagccccaggacaggcaaagatcgcaggcggggccgcggtgtctgacagctccagcacctcaatgaatgtgtactcgctgagtgtggaccctaacacctggcagactctgctccatgagaggcacctgcggcagccagaacacaaagtcctgcagcagctgcgcagccgcggggacaacgtgtacgtggtgactgaggtgctgcagacacagaaggaggtggaagtcacgcgcacccacaagcgggagggctcgggccggttttccctgcccggagccacgtgcttgcagggtgagggccagggccatctgagccagaagaagacggtcaccatcccctcaggcagcaccctcgcattccgggtggcccagctggttattgactctgacttggacgtccttctcttcccggataagaagcagaggaccttccagccacccgcgacaggccacaagcgttccacgagcgaaggcgcctggccacagctgccctctggcctctccatgatgaggtgcctccacaacttcctgacagatggggtccctgcggagggggcgttcactgaagacttccagggcctacgggcagaggtggagaccatctccaaggaactggagcttttggacagagagctgtgccagctgctgctggagggcctggagggggtgctgcgggaccagctggccctgcgagccttggaggaggcgctggagcagggccagagccttgggccggtggagcccctggacggtccagcaggtgctgtcctggagtgcctggtgttgtcctccggaatgctggtgccggaactcgctatccctgttgtctacctgctgggggcactgaccatgctgagtgaaacgcagcacaagctgctggcggaggcgctggagtcgcagaccctgttggggccgctcgagctggtgggcagcctcttggagcagagtgccccgtggcaggagcgcagcaccatgtccctgccccccgggctcctggggaacagctggggcgaaggagcaccggcctgggtcttgctggacgagtgtggcctagagctgggggaggacactccccacgtgtgctgggagccgcaggcccagggccgcatgtgtgcactctacgcctccctggcactgctatcaggactgagccaggagccccactagcctgtgcccgggcatggcctggcagctctccagcagggcagagtgtttgcccaccagctgctagccctaggaaggccaggagcccagtagccatgtggccagtctaccatggggcccaggagttggggaaacacaataaaggtggcatacgaaggaaa

SEQ ID NO: 136617 - DNA, 511 bp, Homo sapiens
  Payload ID: 6744
  Gene Symbol: GSDMD
  Gene Name: gasdermin D
  ENST ID: ENST00000529854
  CDS Start-End: 368-511
gaactgagtgtggacagagcacctgtcctcgccagcgcccagctggaagctgagttatttgtggctgcagcattccaacgcacacaccaccagaaatccccttcagcatactggcctcagacctaccagggcagagaccttgtcttgtttgctgctagaacccaggatcgctggaaaatcacctagcagcagccaggtgcggtgactcacgcctgtaatcccagcactttggaaggccaaggcgggtggatagcaaggtcaagagatcgagaccagcctggccaacatgctcctgctcgccggacggctcccagggagagcagacgcgccagacgcgccaccctcggggcgccgacggtcacggagcatggggtcggcctttgagcgggtagtccggagagtggtccaggagctggaccatggtggggagttcatccctgtgaccagcctgcagagctccactggcttccagccctactgcctggtggttaggaagccctcaagctcatgg

SEQ ID NO: 136618 - DNA, 2496 bp, Homo sapiens
  Payload ID: 6744
  Gene Symbol: GSDMD
  Gene Name: gasdermin D
  Uniprot ID: P57764
  ENST ID: ENST00000526406
  CDS Start-End: 884-2338
cttcccggctcggggattacctctctggctggtcccctcctccgtgctctgcgcgcctccaccctagcgcttgtcttggctcctagaaccaggggcctggacgctgctcagggcagaggcgccccctctgaggggctggcccctcagccgcactccgagacagccgcccccgggaccgcccttccttggagccccgccgcccgccgctcactctgcacacgcagcagaagggacgtggtgttccccaggctctggccccccaggacctgcgcggatctggcccagggcgcctcgccgacttccgtaaactgggcggagggatgaaccccgacccaggggacggaggcgctcgccctctcgctgcagggttctgccctcaacacttctggccccgcctgtgaatgggggccggagcgatggggcggggccggcctccctccctcctcccaggctgacctctgccctccttcgagcacttcccgttcggggtgatgattgaagaactgagtgtggacagagcacctgtcctcgccagcgcccagctggaagctgagttatttgtggctgcagcattccaacgcacacaccaccagaaatccccttcagcatactggcctcagacctaccagggcagagaccttgtcttgtttgctgctagaacccaggatcgctggaaaatcacctagcagcagccaggtgcggtgactcacgcctgtaatcccagcactttggaaggccaaggcgggtggatagcaaggtcaagagatcgagaccagcctggccaacatgctctgggcacctccagctcctgctcgccggacggctcccagggagagcagacgcgccagacgcgccaccctcggggcgccgacggtcacggagcatggggtcggcctttgagcgggtagtccggagagtggtccaggagctggaccatggtggggagttcatccctgtgaccagcctgcagagctccactggcttccagccctactgcctggtggttaggaagccctcaagctcatggttctggaaaccccgttataagtgtgtcaacctgtctatcaaggacatcctggagccggatgccgcggaaccagacgtgcagcgtggcaggagcttccacttctacgatgccatggatgggcagatacagggcagcgtggagctggcagccccaggacaggcaaagatcgcaggcggggccgcggtgtctgacagctccagcacctcaatgaatgtgtactcgctgagtgtggaccctaacacctggcagactctgctccatgagaggcacctgcggcagccagaacacaaagtcctgcagcagctgcgcagccgcggggacaacgtgtacgtggtgactgaggtgctgcagacacagaaggaggtggaagtcacgcgcacccacaagcgggagggctcgggccggttttccctgcccggagccacgtgcttgcagggtgagggccagggccatctgagccagaagaagacggtcaccatcccctcaggcagcaccctcgcattccgggtggcccagctggttattgactctgacttggacgtccttctcttcccggataagaagcagaggaccttccagccacccgcgacaggccacaagcgttccacgagcgaaggcgcctggccacagctgccctctggcctctccatgatgaggtgcctccacaacttcctgacagatggggtccctgcggagggggcgttcactgaagacttccagggcctacgggcagaggtggagaccatctccaaggaactggagcttttggacagagagctgtgccagctgctgctggagggcctggagggggtgctgcgggaccagctggccctgcgagccttggaggaggcgctggagcagggccagagccttgggccggtggagcccctggacggtccagcaggtgctgtcctggagtgcctggtgttgtcctccggaatgctggtgccggaactcgctatccctgttgtctacctgctgggggcactgaccatgctgagtgaaacgcagcacaagctgctggcggaggcgctggagtcgcagaccctgttggggccgctcgagctggtgggcagcctcttggagcagagtgccccgtggcaggagcgcagcaccatgtccctgccccccgggctcctggggaacagctggggcgaaggagcaccggcctgggtcttgctggacgagtgtggcctagagctgggggaggacactccccacgtgtgctgggagccgcaggcccagggccgcatgtgtgcactctacgcctccctggcactgctatcaggactgagccaggagccccactagcctgtgcccgggcatggcctggcagctctccagcagggcagagtgtttgcccaccagctgctagccctaggaaggccaggagcccagtagccatgtggccagtctaccatggggcccaggagttggggaaacacaataaaggtggcatacgaaggaaa

SEQ ID NO: 136619 - DNA, 691 bp, Homo sapiens
  Payload ID: 6744
  Gene Symbol: GSDMD
  Gene Name: gasdermin D
  ENST ID: ENST00000525208
  CDS Start-End: 1-691
cagagagctgtgccagctgctgctggagggcctggagggggtgctgcgggaccagctggccctgcgagccttggaggaggcgctggagcagggccagagccttgggccggtggagcccctggacggtccagcaggtgctgtcctggagtgcctggtgttgtcctccggaatgctggtgccggaactcgctatccctgttgtctacctgctgggggcactgaccatgctgagtgaaacgcagcacaagctgctggcggaggcgctggagtcgcagaccctgttggggccgctcgagctgcctcttggagcagagtgccccgtggcaggagcgcagcaccatgtccctgccccccgggctcctggggaacagctggggcgaaggagcaccggcctgggtcttgctggacgagtgtggcctagagctgggggaggacactccccacgtgtgctgggagccgcaggcccagggccgcatgtgtgcactctacgcctccctggcactgctatcaggactgagccaggagccccactagcctgtgcccgggcatggcctggcagctctccagcagggcagagtgtttgcccaccagctgctagccctaggaaggccaggagcccagtagccatgtggccagtctaccatggggcccaggagttggggaaacacaataaaggtggcatacgaaggaaa

SEQ ID NO: 136620 - DNA, 1800 bp, Homo sapiens
  Payload ID: 6744
  Gene Symbol: GSDMD
  Gene Name: gasdermin D
  ENST ID: ENST00000533063
  CDS Start-End: 44-1642
gagacggagtctcactctgtcgcccaggctggagtacaatggcatgatctcggctcactgcaacctacacctcccaggttcaagcgattctcttgcctcagcctcccagctcctgctcgccggacggctcccagggagagcagacgcgccagacgcgccaccctcggggcgccgacggtcacggagcatggggtcggcctttgagcgggtagtccggagagtggtccaggagctggaccatggtggggagttcatccctgtgaccagcctgcagagctccactggcttccagccctactgcctggtggttaggaagccctcaagctcatggttctggaaaccccgttataagtgtgtcaacctgtctatcaaggacatcctggagccggatgccgcggaaccagacgtgcagcgtggcaggagcttccacttctacgatgccatggatgggcagatacagggcagcgtggagctggcagccccaggacaggcaaagatcgcaggcggggccgcggtgtctgacagctccagcacctcaatgaatgtgtactcgctgagtgtggaccctaacacctggcagactctgctccatgagaggcacctgcggcagccagaacacaaagtcctgcagcagctgcgcagccgcggggacaacgtgtacgtggtgactgaggtgctgcagacacagaaggaggtggaagtcacgcgcacccacaagcgggagggctcgggccggttttccctgcccggagccacgtgcttgcagggtgagggccagggccatctgagccagaagaagacggtcaccatcccctcaggcagcaccctcgcattccgggtggcccagctggttattgactctgacttggacgtccttctcttcccggataagaagcagaggaccttccagccacccgcgacaggccacaagcgttccacgagcgaaggcgcctggccacagctgccctctggcctctccatgatgaggtgcctccacaacttcctgacagatggggtccctgcggagggggcgttcactgaagacttccagggcctacgggcagaggtggagaccatctccaaggaactggagcttttggacagagagctgtgccagctgctgctggagggcctggagggggtgctgcgggaccagctggccctgcgagccttggaggaggcgctggagcagggccagagccttgggccggtggagcccctggacggtccagcaggtgctgtcctggagtgcctggtgttgtcctccggaatgctggtgccggaactcgctatccctgttgtctacctgctgggggcactgaccatgctgagtgaaacgcagcacaagctgctggcggaggcgctggagtcgcagaccctgttggggccgctcgagctggtgggcagcctcttggagcagagtgccccgtggcaggagcgcagcaccatgtccctgccccccgggctcctggggaacagctggggcgaaggagcaccggcctgggtcttgctggacgagtgtggcctagagctgggggaggacactccccacgtgtgctgggagccgcaggcccagggccgcatgtgtgcactctacgcctccctggcactgctatcaggactgagccaggagccccactagcctgtgcccgggcatggcctggcagctctccagcagggcagagtgtttgcccaccagctgctagccctaggaaggccaggagcccagtagccatgtggccagtctaccatggggcccaggagttggggaaacacaataaaggtggcatacgaaggaaa

SEQ ID NO: 136621 - DNA, 724 bp, Homo sapiens
  Payload ID: 6744
  Gene Symbol: GSDMD
  Gene Name: gasdermin D
  ENST ID: ENST00000533348
  CDS Start-End: 231-724
aagttgtttgtttgcttgtttgtttttgagacggagtctcactctgtcgcccaggctggagtacaatggcatgatctcggctcactgcaacctacacctcccaggttcaagcgattctcttgcctcagcctcccagctctgggcacctccagctcctgctcgccggacggctcccagggagagcagacgcgccagacgcgccaccctcggggcgccgacggtcacggagcatggggtcggcctttgagcgggtagtccggagagtggtccaggagctggaccatggtggggagttcatccctgtgaccagcctgcagagctccactggcttccagccctactgcctggtggttaggaagccctcaagctcatggttctggaaaccccgttataagtgtgtcaacctgtctatcaaggacatcctggagccggatgccgcggaaccagacgtgcagcgtggcaggagcttccacttctacgatgccatggatgggcagatacagggcagcgtggagctggcagccccaggacaggcaaagatcgcaggcggggccgcggtgtctgacagctccagcacctcaatgaatgtgtactcgctgagtgtggaccctaacacctggcagactctgctccatgagaggcacctgcggcagccagaacacaaagtcctgcagcagctgcgcagccgcggggacaacgtgtacgtggtgactgaggtgctgca

SEQ ID NO: 136622 - DNA, 442 bp, Homo sapiens
  Payload ID: 6744
  Gene Symbol: GSDMD
  Gene Name: gasdermin D
  ENST ID: ENST00000525721
  CDS Start-End: 100-442
acttttagctctgggcacctccagctcctgctcgccggacggctcccagggagagcagacgcgccagacgcgccaccctcggggcgccgacggtcacgcatggggtcggcctttgagcgggtagtccggagagtggtccaggagctggaccatggtggggagttcatccctgtgaccagcctgcagagctccactggcttccagccctactgcctggtggttaggaagccctcaagctcatggttctggaaaccccgttataagtgtgtcaacctgtctatcaaggacatcctggagccggatgccgcggaaccagacgtgcagcgtggcaggagcttccacttctacgatgccatggatgggcagatacagggcagcgtggagctggcagccccaggacaggcaaagatcgcaggcggggccgcggtgtctgacagctcca

SEQ ID NO: 136623 - DNA, 1101 bp, Homo sapiens
  Payload ID: 6744
  Gene Symbol: GSDMD
  Gene Name: gasdermin D
  ENST ID: ENST00000534018
  CDS Start-End: 271-1101
cctccagctcctgctcgccggacggctcccagggagagcagacgcgccagacgcgccaccctcggggcgccgacggtcacggttcccgggccggtgctgttcccgcccccagctgccttctgggcccagcctccactttcagcagacccagcactcagaggcttcctggggcagctgcagcccctccacagtggcccaggtgccccctatcccagcggaggcccgctatggcctctgacccccaaagcctcagccttggacaggtggctcatggagctccaggcacagagaaggccctggaggacgcagctggggagcatggggtcggcctttgagcgggtagtccggagagtggtccaggagctggaccatggtggggagttcatccctgtgaccagcctgcagagctccactggcttccagccctactgcctggtggttaggaagccctcaagctcatggttctggaaaccccgttataagtgtgtcaacctgtctatcaaggacatcctggagccggatgccgcggaaccagacgtgcagcgtggcaggagcttccacttctacgatgccatggatgggcagatacagggcagcgtggagctggcagccccaggacaggcaaagatcgcaggcggggccgcggtgtctgacagctccagcacctcaatgaatgtgtactcgctgagtgtggaccctaacacctggcagactctgctccatgagaggcacctgcggcagccagaacacaaagtcctgcagcagctgcgcagccgcggggacaacgtgtacgtggtgactgaggtgctgcagacacagaaggaggtggaagtcacgcgcacccacaagcgggagggctcgggccggttttccctgcccggagccacgtgcttgcagggtgagggccagggccatctgagccagaagaagacggtcaccatcccctcaggcagcaccctcgcattccgggtggcccagctggttattgactctgacttggacgtccttctcttcccggataagaagcagaggaccttccagccacccgcgacaggccacaagcgttccacgagcgaaggcgcctggccacagctgccctct

SEQ ID NO: 136624 - DNA, 576 bp, Homo sapiens
  Payload ID: 6744
  Gene Symbol: GSDMD
  Gene Name: gasdermin D
  ENST ID: ENST00000533888
  CDS Start-End: 116-576
cagaaggccccgcgccgcacacgggggcggaagctccaggcttcgggaaaggctgcccctggccagcccaggggcccggcctttggacctgggcttgggcttgactcccaggagcatggggtcggcctttgagcgggtagtccggagagtggtccaggagctggaccatggtggggagttcatccctgtgaccagcctgcagagctccactggcttccagccctactgcctggtggttaggaagccctcaagctcatggttctggaaaccccgttataagtgtgtcaacctgtctatcaaggacatcctggagccggatgccgcggaaccagacgtgcagcgtggcaggagcttccacttctacgatgccatggatgggcagatacagggcagcgtggagctggcagccccaggacaggcaaagatcgcaggcggggccgcggtgtctgacagctccagcacctcaatgaatgtgtactcgctgagtgtggaccctaacacctggcagactctgctccatgagaggcacctgcggcagccagaacacaaagtcctgcagcagctgcgcagccgcgg

SEQ ID NO: 136625 - DNA, 1762 bp, Homo sapiens; identical to SEQ ID NO: 136616
  Payload ID: 6744
  Gene Symbol: GSDMD
  Gene Name: gasdermin D
  Uniprot ID: P57764
  ENST ID: ENST00000615119
  CDS Start-End: 150-1604

SEQ ID NO: 136626 - DNA, 1800 bp, Homo sapiens; identical to SEQ ID NO: 136620
  Payload ID: 6744
  Gene Symbol: GSDMD
  Gene Name: gasdermin D
  ENST ID: ENST00000628703
  CDS Start-End: 44-1642

SEQ ID NO: 136627 - DNA, 691 bp, Homo sapiens; identical to SEQ ID NO: 136619
  Payload ID: 6744
  Gene Symbol: GSDMD
  Gene Name: gasdermin D
  ENST ID: ENST00000632705
  CDS Start-End: 1-691

SEQ ID NO: 136628 - DNA, 724 bp, Homo sapiens; identical to SEQ ID NO: 136621
  Payload ID: 6744
  Gene Symbol: GSDMD
  Gene Name: gasdermin D
  ENST ID: ENST00000633391
  CDS Start-End: 231-724

SEQ ID NO: 136629 - DNA, 2496 bp, Homo sapiens; identical to SEQ ID NO: 136618
  Payload ID: 6744
  Gene Symbol: GSDMD
  Gene Name: gasdermin D
  Uniprot ID: P57764
  ENST ID: ENST00000631751
  CDS Start-End: 884-2338

SEQ ID NO: 136630 - DNA, 1101 bp, Homo sapiens; identical to SEQ ID NO: 136623
  Payload ID: 6744
  Gene Symbol: GSDMD
  Gene Name: gasdermin D
  ENST ID: ENST00000631389
  CDS Start-End: 271-1101

SEQ ID NO: 136631 - DNA, 442 bp, Homo sapiens; identical to SEQ ID NO: 136622
  Payload ID: 6744
  Gene Symbol: GSDMD
  Gene Name: gasdermin D
  ENST ID: ENST00000632347
  CDS Start-End: 100-442

SEQ ID NO: 136632 - DNA, 576 bp, Homo sapiens; identical to SEQ ID NO: 136624
  Payload ID: 6744
  Gene Symbol: GSDMD
  Gene Name: gasdermin D
  ENST ID: ENST00000631550
  CDS Start-End: 116-576

SEQ ID NO: 136633 - DNA, 511 bp, Homo sapiens; identical to SEQ ID NO: 136617
  Payload ID: 6744
  Gene Symbol: GSDMD
  Gene Name: gasdermin D
  ENST ID: ENST00000631917
  CDS Start-End: 368-511

SEQ ID NO: 136634 - DNA, 716 bp, Homo sapiens
  Payload ID: 6745
  Gene Symbol: GIP
  Gene Name: gastric inhibitory polypeptide
  Uniprot ID: P09681
  ENST ID: ENST00000357424
  CDS Start-End: 102-563
agcaggctcagaaggtccagaaatcaggggaaggagacccctatctgtccttcttctggaagagctggaaaggaagtctgctcaggaaataaccttggaagatggtggccacgaagacctttgctctgctgctgctgtccctgttcctggcagtgggactaggagagaagaaagagggtcacttcagcgctctcccctccctgcctgttggatctcatgctaaggtgagcagccctcaacctcgaggccccaggtacgcggaagggactttcatcagtgactacagtattgccatggacaagattcaccaacaagactttgtgaactggctgctggcccaaaaggggaagaagaatgactggaaacacaacatcacccagagggaggctcgggcgctggagctggccagtcaagctaataggaaggaggaggaggcagtggagccacagagctccccagccaagaaccccagcgatgaagatttgctgcgggacttgctgattcaagagctgttggcctgcttgctggatcagacaaacctctgcaggctcaggtctcggtgactctgaccacacccagctcaggactggattctgcccttcacttagcacctgcctcagccccactccagaatagccaagagaacccaaaccaataaagtttatgctaagtcgagcccattgtgaaaatttattaaaatgactactgagcactaa

SEQ ID NO: 136635 - DNA, 1791 bp, Homo sapiens
  Payload ID: 6746
  Gene Symbol: GIPR
  Gene Name: gastric inhibitory polypeptide receptor
  Uniprot ID: P48546
  ENST ID: ENST00000263281
  CDS Start-End: 88-1347
aggggctgcaggagcaagtgaccaggagcaggactggggacaggcctgatcgcccctgcacgaaccagacccttcgccgccctcacgatgactacctctccgatcctgcagctgctgctgcggctctcactgtgcgggctgctgctccagagggcggagacaggctctaaggggcagacggcgggggagctgtaccagcgctgggaacggtaccgcagggagtgccaggagaccttggcagccgcggaaccgccttcaggcctcgcctgtaacgggtccttcgatatgtacgtctgctgggactatgctgcacccaatgccactgcccgtgcgtcctgcccctggtacctgccctggcaccaccatgtggctgcaggtttcgtcctccgccagtgtggcagtgatggccaatggggactttggagagaccatacacaatgtgagaacccagagaagaatgaggcctttctggaccaaaggctcatcttggagcggttgcaggtcatgtacactgtcggctactccctgtctctcgccacactgctgctagccctgctcatcttgagtttgttcaggcggctacattgcactagaaactatatccacatcaacctgttcacgtctttcatgctgcgagctgcggccattctcagccgagaccgtctgctacctcgacctggcccctaccttggggaccaggcccttgcgctgtggaaccaggccctcgctgcctgccgcacggcccagatcgtgacccagtactgcgtgggtgccaactacacgtggctgctggtggagggcgtctacctgcacagtctcctggtgctcgtgggaggctccgaggagggccacttccgctactacctgctcctcggctggggggcccccgcgcttttcgtcattccctgggtgatcgtcaggtacctgtacgagaacacgcagtgctgggagcgcaacgaagtcaaggccatttggtggattatacggacccccatcctcatgaccatcttgattaatttcctcatttttatccgcattcttggcattctcctgtccaagctgaggacacggcaaatgcgctgccgggattaccggctgaggctggctcgctccacgctgacgctggtgcccctgctgggtgtccacgaggtggtgtttgctcccgtgacagaggaacaggcccggggcgccctgcgcttcgccaagctcggctttgagatcttcctcagctccttccagggcttcctggtcagcgtcctctactgcttcatcaacaaggaggtaggcagagacccggccgccgcccccgccctctggcggcagcgcggggtacggcgccgcctctgagcgccatcgtctcacaggtgcagtcggagatccgccgtggctggcaccactgccgcctgcgccgcagcctgggcgaggagcaacgccagctcccggagcgcgccttccgggccctgccctccggctccggcccgggcgaggtccccaccagccgcggcttgtcctcggggaccctcccagggcctgggaatgaggccagccgggagttggaaagttactgctagggggcgggatccccgtgtctgttcagttagcatggatttattgagtgccaactgcgtgccaggcccagtacggaggacgctggggaaatggtgaaggaaacagaaaaaaggtccctgcccttctggagatgacaactgagtggggaaaacagaccgtgaacacaaaacatcaagttccacacacgctatggaatggttatgaagggaagcgagaaggggg

SEQ ID NO: 136636 - DNA, 1432 bp, Homo sapiens
  Payload ID: 6746
  Gene Symbol: GIPR
  Gene Name: gastric inhibitory polypeptide receptor
  Uniprot ID: P48546
  ENST ID: ENST00000304207
  CDS Start-End: 87-1379
ggggctgcaggagcaagtgaccaggagcaggactggggacaggcctgatcgcccctgcacgaaccagacccttcgccgccctcacgatgactacctctccgatcctgcagctgctgctgcggctctcactgtgcgggctgctgctccagagggcggagacaggctctaaggggcagacggcgggggagctgtaccagcgctgggaacggtaccgcagggagtgccaggagaccttggcagccgcggaaccgccttcagtggctgcaggtttcgtcctccgccagtgtggcagtgatggccaatggggactttggagagaccatacacaatgtgagaacccagagaagaatgaggcctttctggaccaaaggctcatcttggagcggttgcaggtcatgtacactgtcggctactccctgtctctcgccacactgctgctagccctgctcatcttgagtttgttcaggcggctacattgcactagaaactatatccacatcaacctgttcacgtctttcatgctgcgagctgcggccattctcagccgagaccgtctgctacctcgacctggcccctaccttggggaccaggcccttgcgctgtggaaccaggccctcgctgcctgccgcacggcccagatcgtgacccagtactgcgtgggtgccaactacacgtggctgctggtggagggcgtctacctgcacagtctcctggtgctcgtgggaggctccgaggagggccacttccgctactacctgctcctcggctggggggcccccgcgcttttcgtcattccctgggtgatcgtcaggtacctgtacgagaacacgcagtgctgggagcgcaacgaagtcaaggccatttggtggattatacggacccccatcctcatgaccatcttgattaatttcctcatttttatccgcattcttggcattctcctgtccaagctgaggacacggcaaatgcgctgccgggattaccggctgaggctggctcgctccacgctgacgctggtgcccctgctgggtgtccacgaggtggtgtttgctcccgtgacagaggaacaggcccggggcgccctgcgcttcgccaagctcggctttgagatcttcctcagctccttccagggcttcctggtcagcgtcctctactgcttcatcaacaaggaggtgcagtcggagatccgccgtggctggcaccactgccgcctgcgccgcagcctgggcgaggagcaacgccagctcccggagcgcgccttccgggccctgccctccggctccggcccgggcgaggtccccaccagccgcggcttgtcctcggggaccctcccagggcctgggaatgaggccagccgggagttggaaagttactgctagggggcgggatccccgtgtctgttcagttagcatggatttattgagtgccaact

SEQ ID NO: 136637 - DNA, 557 bp, Homo sapiens
  Payload ID: 6746
  Gene Symbol: GIPR
  Gene Name: gastric inhibitory polypeptide receptor
  ENST ID: ENST00000591322
  CDS Start-End: 506-557
tcctggcctcaagtgatccacccgcttcggcctcccaaagtgctgggattacaggcgtgagccaccgcgcccgggcccagattcgagttttgattatcgtttccactcccttttcttcccccaacaagtcctcctgataatttccagccaccccctccccaattttcttgaaggttttcagtctcccatagcaactccagtgggtggcttccaggcaccccaccccaagacttggaactggtttccaagctacccaagactcccgaacaacacgcaacagaccctcaaagtctctctggggcgcttctgggccacatggacctagcagcctgggagcgggggtcggtctgggggggtcctcccttctttcttttcctagacaggctctaaggggcagacggcgggggagctgtaccagcgctgggaacggtaccgcagggagtgccaggagaccttggcagccgcggaaccgccttcaggcctcgcctgtaacgggtccttcgatatgtacgtctgctgggactatgctgcacccaatgccactgcccgtgcgtcct

SEQ ID NO: 136638 - DNA, 1414 bp, Homo sapiens
  Payload ID: 6746
  Gene Symbol: GIPR
  Gene Name: gastric inhibitory polypeptide receptor
  ENST ID: ENST00000585889
  CDS Start-End: 87-884
ggggctgcaggagcaagtgaccaggagcaggactggggacaggcctgatcgcccctgcacgaaccagacccttcgccgccctcacgatgactacctctccgatcctgcagctgctgctgcggctctcactgtgcgggctgctgctccagagggcggagacaggctctaaggggcagacggcgggggagctgtaccagcgctgggaacggtaccgcagggagtgccaggagaccttggcagccgcggaaccgccttcaggcctcgcctgtaacgggtccttcgatatgtacgtctgctgggactatgctgcacccaatgccactgcccgtgcgtcctgcccctggtacctgccctggcaccaccatgtggctgcaggtttcgtcctccgccagtgtggcagtgatggccaatggggactttggagagaccatacacaatgtgagaacccagagaagaatgaggcctttctggaccaaaggctcatcttggagcggttgcaggtcatgtacactgtcggctactccctgtctctcgccacactgctgctagccctgctcatcttgagtttgttcaggcggctacattgcactagaaactatatccacatcaacctgttcacgtctttcatgctgcgagctgcggccattctcagccgagaccgtctgctacctcgacctggcccctaccttggggaccaggcccttgcgctgtggaaccaggccctcgctgcctgccgcacggcccagatcgtgacccagtactgcgtgggtgccaactacacgtggctgctggtggagggcgtctacctgcacagtctcctggtgctcgtgggaggctccgaggagggccacttccgctactacctgctcctcggctgggattaatttcctcatttttatccgcattcttggcattctcctgtccaagctgaggacacggcaaatgcgctgccgggattaccggctgaggctggctcgctccacgctgacgctggtgcccctgctgggtgtccacgaggtggtgtttgctcccgtgacagaggaacaggcccggggcgccctgcgcttcgccaagctcggctttgagatcttcctcagctccttccagggcttcctggtcagcgtcctctactgcttcatcaacaaggaggtgcagtcggagatccgccgtggctggcaccactgccgcctgcgccgcagcctgggcgaggagcaacgccagctcccggagcgcgccttccgggccctgccctccggctccggcccgggcgaggtccccaccagccgcggcttgtcctcggggaccctcccagggcctgggaatgaggccagccgggagttggaaagttactgctagggggcgggatccccgtgtctgttcagttagcatggatttattgagtgccaactgcgtg

SEQ ID NO: 136639 - DNA, 3289 bp, Homo sapiens
  Payload ID: 6746
  Gene Symbol: GIPR
  Gene Name: gastric inhibitory polypeptide receptor
  Uniprot ID: P48546
  ENST ID: ENST00000590918
  CDS Start-End: 100-1500
ggcagcggtggcaggggctgcaggagcaagtgaccaggagcaggactggggacaggcctgatcgcccctgcacgaaccagacccttcgccgccctcacgatgactacctctccgatcctgcagctgctgctgcggctctcactgtgcgggctgctgctccagagggcggagacaggctctaaggggcagacggcgggggagctgtaccagcgctgggaacggtaccgcagggagtgccaggagaccttggcagccgcggaaccgccttcaggcctcgcctgtaacgggtccttcgatatgtacgtctgctgggactatgctgcacccaatgccactgcccgtgcgtcctgcccctggtacctgccctggcaccaccatgtggctgcaggtttcgtcctccgccagtgtggcagtgatggccaatggggactttggagagaccatacacaatgtgagaacccagagaagaatgaggcctttctggaccaaaggctcatcttggagcggttgcaggtcatgtacactgtcggctactccctgtctctcgccacactgctgctagccctgctcatcttgagtttgttcaggcggctacattgcactagaaactatatccacatcaacctgttcacgtctttcatgctgcgagctgcggccattctcagccgagaccgtctgctacctcgacctggcccctaccttggggaccaggcccttgcgctgtggaaccaggccctcgctgcctgccgcacggcccagatcgtgacccagtactgcgtgggtgccaactacacgtggctgctggtggagggcgtctacctgcacagtctcctggtgctcgtgggaggctccgaggagggccacttccgctactacctgctcctcggctggggggcccccgcgcttttcgtcattccctgggtgatcgtcaggtacctgtacgagaacacgcagtgctgggagcgcaacgaagtcaaggccatttggtggattatacggacccccatcctcatgaccatcttgattaatttcctcatttttatccgcattcttggcattctcctgtccaagctgaggacacggcaaatgcgctgccgggattaccggctgaggctggctcgctccacgctgacgctggtgcccctgctgggtgtccacgaggtggtgtttgctcccgtgacagaggaacaggcccggggcgccctgcgcttcgccaagctcggctttgagatcttcctcagctccttccagggcttcctggtcagcgtcctctactgcttcatcaacaaggaggtgcagtcggagatccgccgtggctggcaccactgccgcctgcgccgcagcctgggcgaggagcaacgccagctcccggagcgcgccttccgggccctgccctccggctccggcccgggcgaggtccccaccagccgcggcttgtcctcggggaccctcccagggcctgggaatgaggccagccgggagttggaaagttactgctagggggcgggatccccgtgtctgttcagttagcatggatttattgagtgccaactgcgtgccaggcccagtacggaggacgctggggaaatggtgaaggaaacagaaaaaaggtccctgcccttctggagatgacaactgagtggggaaaacagaccgtgaacacaaaacatcaagttccacacacgctatggaatggttatgaagggaagcgagaagggggcctagggtggtctgggaggcgtctccaaggaggtgacacttaagccatccccgaaagaggtgaaagagatcactttggggagagctggagaacaggattctaggcggaagcgatagcataggcaaaggcccttgggcaggaaggcgctcagccttggctggagtagaattaagtcagagccaacaggtggggagagacagagaagtgggcaggggcacccaagttgggatttcatttcaggtgcattggagattcttaggagtgtctcttgggggtaatattttattttttaaaaaatgaggatgtcactcttacccaggttggtcttgaactcctgggctcaagcaatcctcccaccacgggtctctcaaagtgctgggattacaggcgtgagccaccgcacccggcttttttttttttttttaaacggagtctcactctgtcacccaggctggagtgcagtggtgcaatttcagctcactgcaccctccacctcccgagttcaagcctcccgggtagctgggattacaggcaccgccaccatgcctggctaatttttgcattttcagtagagatagggtttctccatgttggccaggctggtctcgaactcctgacctcaagtgatccacccacctcagcctcccaaagtgctgggattacaggcataagccaccatgcccggcccaaatgggctaatgttttaaacagatccttcttgtctgccctgtaggaggacaaattatcaggggcaggggtggaagctggagcccagaaaggaggggactgcaggtgggaagtgatggtggctggaccaggatggaggccactgaggggtatgaagcagtcggatttgaagctgtttaaaaggtggaggtgagaggatttcatgaaggagcacatgaggacacagcagcagagaggactccttggctttggatggtggagagactaaagatagagagattgggttcgggtagggggagaaccacgtgtgctctttggaaaggttaggctggcagtgtttgtaggacatgacaggacactgagtgtaagggtctggagctctcaggagaggggcgagctggagatagtaatgtgagaggcactgggtcctgagagggtgatttggtgtggaccggagcacaggtgaggcaaggcaggcctcgcagctgaaactttatatccagagcagccagggccactgctggctgcggagtgaggacgcatatccccactgtccttagatgggtggcccctggaacctgggagaatgagggggcatgctgacagtctcattgtggctggaccacctgtacatacacccacaagaccctcacccctaaatcctccccctacacatatgcacacttaagttaccgtatgggtgttgtcgagcattttccctggggtctgtggctccctggaccgacatgccccaaagctgaactcagccttttcaagcttgcggccctgctgcccaattcccctacaccctgccttgtgggttctcgcggggtgggggccttagggcaaggctcttgtaaataaagtataagaaacagttgc

SEQ ID NO: 136640 - DNA, 1518 bp, Homo sapiens
  Payload ID: 6747
  Gene Symbol: GIF
  Gene Name: gastric intrinsic factor (vitamin B synthesis)
  Uniprot ID: P27352
  ENST ID: ENST00000257248
  CDS Start-End: 49-1302
ttgcaaatcgcggtacctgtggatgagagacatagacgagagagtgagatggcctggtttgccctctacctcctgagccttctctgggctacagctgggactagtacccagacccagagttcatgctccgttccctcagcacaggagcccttggtcaatggaatacaagtactcatggagaactcggtgacttcatcagcctacccaaaccccagcatcctgattgccatgaatctggccggagcctacaacttgaaggcccagaagctcctgacttaccagctcatgtccagcgacaacaacgatctaaccattgggcagctcggcctcaccatcatggccctcacctcctcctgccgagaccctggggataaagtatccattctacaaagacaaatggagaactgggcaccttccagccccaacgctgaagcatcagccttctatgggcccagtctagcgatcttggcactgtgccagaagaactctgaggcgaccttgccgatagccgtccgctttgccaagaccctgctggccaactcctctcccttcaatgtagacacaggagcaatggcaaccttggctctgacctgtatgtacaacaagatccctgtaggttcagaggaaggttacagatccctgtttggtcaggtactaaaggatattgtggagaaaatcagcatgaagatcaaagataatggcatcattggagacatctacagtactggcctcgccatgcaggctctctctgtaacacctgagccatctaaaaaggaatggaactgcaagaagactacggatatgatactcaatgagattaagcaggggaaattccacaaccccatgtccattgctcaaatcctcccttccctgaaaggcaagacatacctagatgtgccccaggtcacttgtagtcctgatcatgaggtacaaccaactctacccagcaaccctggccctggccccacctctgcatctaacatcactgtcatatacaccataaataaccagctgaggggggttgagctgctcttcaacgagaccatcaatgttagtgtgaaaagtgggtcagtgttacttgttgtcctagaggaagcacagcgcaaaaatcctatgttcaaatttgaaaccacaatgacatcttggggccttgtcgtctcttctatcaacaatatcgcggaaaatgttaatcacaagacatactggcagtttcttagtggtgtaacacctttgaatgaaggggttgctgactacatacccttcaaccacgagcacatcacagccaatttcacacagtactaacgaagaggtgggttcagcttctatcaaacatctccaaaggatgggtgaaattttttccacttcattttaaatctatgcaaaaaagcgaatgcctgtgatgctaccatattcctggtaaaaacatggagaaccactatgtagaataaaaatgcaaagttcactggagtctcaacatctatgactcatgaaaataaaattttcatcttctcaacacaa

SEQ ID NO: 136641 - DNA, 1623 bp, Homo sapiens
  Payload ID: 6747
  Gene Symbol: GIF
  Gene Name: gastric intrinsic factor (vitamin B synthesis)
  ENST ID: ENST00000525058
  CDS Start-End: 47-193
gcaaatcgcggtacctgtggatgagagacatagacgagagagtgagatggcctggtttgccctctacctcctgagccttctctgggctacagctgggactagtacccagacccagagttcatgctgtgagtatgatgtttttccaaggaggtcagggaagcagttgccctggggaaggggctgtgacctctgacactgagtggttgaaaatagcaatcactataggaattccaaaatggccgttccctcagcacaggagcccttggtcaatggaatacaagtactcatggagaactcggtgacttcatcagcctacccaaaccccagcatcctgattgccatgaatctggccggagcctacaacttgaaggcccagaagctcctgacttaccagctcatgtccagcgacaacaacgatctaaccattgggcagctcggcctcaccatcatggccctcacctcctcctgccgagaccctggggataaagtatccattctacaaagacaaatggagaactgggcaccttccagccccaacgctgaagcatcagccttctatgggcccagtctagcgatcttggcactgtgccagaagaactctgaggcgaccttgccgatagccgtccgctttgccaagaccctgctggccaactcctctcccttcaatgtagacacaggagcaatggcaaccttggctctgacctgtatgtacaacaagatccctgtaggttcagaggaaggttacagatccctgtttggtcaggtactaaaggatattgtggagaaaatcagcatgaagatcaaagataatggcatcattggagacatctacagtactggcctcgccatgcaggctctctctgtaacacctgagccatctaaaaaggaatggaactgcaagaagactacggatatgatactcaatgagattaagcaggggaaattccacaaccccatgtccattgctcaaatcctcccttccctgaaaggcaagacatacctagatgtgccccaggtcacttgtagtcctgatcatgaggtacaaccaactctacccagcaaccctggccctggccccacctctgcatctaacatcactgtcatatacaccataaataaccagctgaggggggttgagctgctcttcaacgagaccatcaatgttagtgtgaaaagtgggtcagtgttacttgttgtcctagaggaagcacagcgcaaaaatcctatgttcaaatttgaaaccacaatgacatcttggggccttgtcgtctcttctatcaacaatatcgcggaaaatgttaatcacaagacatactggcagtttcttagtggtgtaacacctttgaatgaaggggttgctgactacatacccttcaaccacgagcacatcacagccaatttcacacagtactaacgaagaggtgggttcagcttctatcaaacatctccaaaggatgggtgaaattttttccacttcattttaaatctatgcaaaaaagcgaatgcctgtgatgctaccatattcctggtaaaaacatggagaaccactatgtagaataaaaatgcaaagttcactggagtctcaacatctatgactcatgaaaataaaattttcatcttctc

SEQ ID NO: 136642 - DNA, 470 bp, Homo sapiens
  Payload ID: 6748
  Gene Symbol: GAST
  Gene Name: gastrin
  Uniprot ID: P01350
  ENST ID: ENST00000329402
  CDS Start-End: 68-373
agagcagagacctgagaggcaccaggcccagccgtggcaccacacacctcccagctctgcagacgagatgcagcgactgtgtgtgtatgtgctgatctttgcactggctctggccgccttctctgaagcttcttggaagccccgctcccagcagccagatgcacccttaggtacaggggccaacagggacctggagctaccctggctggagcagcagggcccagcctctcatcatcgaaggcagctgggaccccagggtcccccacacctcgtggcagacccgtccaagaagcagggaccatggctggaggaagaagaagaagcctatggatggatggacttcggccgccgcagtgctgaggatgagaactaacaatcctagaaccaagcttcagagcctagccacctcccaccccactccagccctgtcccctgaaaaactgatcaaaaataaactagtttccagtgga

SEQ ID NO: 136643 - DNA, 848 bp, Homo sapiens
  Payload ID: 6749
  Gene Symbol: GRP
  Gene Name: gastrin-releasing peptide
  Uniprot ID: P07492
  ENST ID: ENST00000256857
  CDS Start-End: 99-545
ccagcggctgcggcggcggagctcctccgaggtccgggtcaccagtctctgctcttcccagcctctccggcgcgctccaagggcttcccgtcgggaccatgcgcggccgtgagctcccgctggtcctgctggcgctggtcctctgcctggcgccccgggggcgagcggtcccgctgcctgcgggcggagggaccgtgctgaccaagatgtacccgcgcggcaaccactgggcggtggggcacttaatggggaaaaagagcacaggggagtcttcttctgtttctgagagagggagcctgaagcagcagctgagagagtacatcaggtgggaagaagctgcaaggaatttgctgggtctcatagaagcaaaggagaacagaaaccaccagccacctcaacccaaggccctgggcaatcagcagccttcgtgggattcagaggatagcagcaacttcaaagatgtaggttcaaaaggcaaagttggtagactctctgctccaggttctcaacgtgaaggaaggaacccccagctgaaccagcaatgataatgatggcctctctcaaaagagaaaaacaaaacccctaagagactgcgttctgcaagcatcagttctacggatcatcaacaagatttccttgtgcaaaatatttgactattctgtatctttcatccttgactaaattcgtgattttcaagcagcatcttctggtttaaacttgtttgctgtgaacaattgtcgaaaagagtcttccaattaatgcttttttatatctaggctacctgttggttagattcaaggccccgagctgttaccattcacaataaaagcttaaacacattgtccaaa

SEQ ID NO: 136644 - DNA, 579 bp, Homo sapiens
  Payload ID: 6749
  Gene Symbol: GRP
  Gene Name: gastrin-releasing peptide
  Uniprot ID: P07492
  ENST ID: ENST00000420468
  CDS Start-End: 1-426
atgcgcggccgtgagctcccgctggtcctgctggcgctggtcctctgcctggcgccccgggggcgagcggtcccgctgcctgcgggcggagggaccgtgctgaccaagatgtacccgcgcggcaaccactgggcggtggggcacttaatggggaaaaagagcacaggggagtcttcttctgtttctgagagagggagcctgaagcagcagctgagagagtacatcaggtgggaagaagctgcaaggaatttgctgggtctcatagaagcaaaggagaacagaaaccaccagccacctcaacccaaggccctgggcaatcagcagccttcgtgggattcagaggatagcagcaacttcaaagatgtaggttcaaaaggcaaaggttctcaacgtgaaggaaggaacccccagctgaaccagcaatgataatgatggcctctctcaaaagagaaaaacaaaacccctaagagactgcgttctgcaagcatcagttctacggatcatcaacaagatttccttgtgcaaaatatttgactattctgtatctttcatccttgactaaattcgtgattttcaagc

SEQ ID NO: 136645 - DNA, 607 bp, Homo sapiens
  Payload ID: 6749
  Gene Symbol: GRP
  Gene Name: gastrin-releasing peptide
  ENST ID: ENST00000456142
  CDS Start-End: 1-290
ggcacttaatggggaaaaagagcacaggggagtcttcttctgtttctgagagagggagcctgaagcagcagctgagagagtacatcaggtgggaagaagctgcaaggaatttgctgggtctcatagaagcaaaggagaacagaaaccaccagccacctcaacccaaggccctgggcaatcagcagccttcgtgggattcagaggatagcagcaacttcaaagatgtaggttcaaaaggcaaagactctctgctccaggttctcaacgtgaaggaaggaacccccagctgaaccagcaatgataatgatggcctctctcaaaagagaaaaacaaaacccctaagagactgcgttctgcaagcatcagttctacggatcatcaacaagatttccttgtgcaaaatatttgactattctgtatctttcatccttgactaaattcgtgattttcaagcagcatcttctggtttaaacttgtttgctgtgaacaattgtcgaaaagagtcttccaattaatgcttttttatatctaggctacctgttggttagattcaaggccccgagctgttaccattcacaataaaagcttaaacacattgtccaaaggg

SEQ ID NO: 136646 - DNA, 405 bp, Homo sapiens
  Payload ID: 6749
  Gene Symbol: GRP
  Gene Name: gastrin-releasing peptide
  ENST ID: ENST00000530323
  CDS Start-End: 1-107
caatcagcagccttcgtgggattcagaggatagcagcaacttcaaagatactctctgctccaggttctcaacgtgaaggaaggaacccccagctgaaccagcaatgataatgatggcctctctcaaaagagaaaaacaaaacccctaagagactgcgttctgcaagcatcagttctacggatcatcaacaagatttccttgtgcaaaatatttgactattctgtatctttcatccttgactaaattcgtgattttcaagcagcatcttctggtttaaacttgtttgctgtgaacaattgtcgaaaagagtcttccaattaatgcttttttatatctaggctacctgttggttagattcaaggccccgagctgttaccattcacaataaaagcttaaacacattgt

SEQ ID NO: 136647 - DNA, 824 bp, Homo sapiens
  Payload ID: 6749
  Gene Symbol: GRP
  Gene Name: gastrin-releasing peptide
  Uniprot ID: P07492
  ENST ID: ENST00000529320
  CDS Start-End: 95-511
cggctgcggcggcggagctcctccgaggtccgggtcaccagtctctgctcttcccagcctctccggcgcgctccaagggcttcccgtcgggaccatgcgcggccgtgagctcccgctggtcctgctggcgctggtcctctgcctggcgccccgggggcgagcggtcccgctgcctgcgggcggagggaccgtgctgaccaagatgtacccgcgcggcaaccactgggcggtggggcacttaatggggaaaaagagcacaggggagtcttcttctgtttctgagagagggagcctgaagcagcagctgagagagtacatcaggtgggaagaagctgcaaggaatttgctgggtctcatagaagcaaaggagaacagaaaccaccagccacctcaacccaaggccctgggcaatcagcagccttcgtgggattcagaggatagcagcaacttcaaagatttggtagactctctgctccaggttctcaacgtgaaggaaggaacccccagctgaaccagcaatgataatgatggcctctctcaaaagagaaaaacaaaacccctaagagactgcgttctgcaagcatcagttctacggatcatcaacaagatttccttgtgcaaaatatttgactattctgtatctttcatccttgactaaattcgtgattttcaagcagcatcttctggtttaaacttgtttgctgtgaacaattgtcgaaaagagtcttccaattaatgcttttttatatctaggctacctgttggttagattcaaggccccgagctgttaccattcacaataaaagcttaaacacattgtccaa

SEQ ID NO: 136648 - DNA, 1929 bp, Homo sapiens
  Payload ID: 6750
  Gene Symbol: GRPR
  Gene Name: gastrin-releasing peptide receptor
  Uniprot ID: P30550
  ENST ID: ENST00000380289
  CDS Start-End: 399-1553
ccagattctaaatatcaggaaagacgctgtgggaaaatagcaggccaaaagttcttagtaaactgcagccagggagactcagactagaatggaggtagaaagaactgatgcagagtgggtttaattctaagcctttttgtggctaagttttgttgttgttaacttattgaatttagagttgtattgcactggtcatgtgaaagccagagcagcaccagtgtcaaaatagtgacagagagttttgaataccatagttagtatatatgtactcagagtatttttattaaagaaggcaaagagcccggcatagatcttatcttcatcttcactcggttgcaaaatcaatagttaagaaatagcatctaagggaacttttaggtgggaaaaaaaatctagagatggctctaaatgactgtttccttctgaacttggaggtggaccatttcatgcactgcaacatctccagtcacagtgcggatctccccgtgaacgatgactggtcccacccggggatcctctatgtcatccctgcagtttatggggttatcattctgataggcctcattggcaacatcactttgatcaagatcttctgtacagtcaagtccatgcgaaacgttccaaacctgttcatttccagtctggctttgggagacctgctcctcctaataacgtgtgctccagtggatgccagcaggtacctggctgacagatggctatttggcaggattggctgcaaactgatcccctttatacagcttacctctgttggggtgtctgtcttcacactcacggcgctctcggcagacagatacaaagccattgtccggccaatggatatccaggcctctcatgccctgatgaagatctgcctcaaagccgcctttatctggatcatctccatgctgctggccattccagaggccgtgttttctgacctccatcccttccatgaggaaagcaccaaccagaccttcattagctgtgccccatacccacactctaatgagcttcaccccaaaatccattctatggcttcctttctggtcttctacgtcattccactgtcgatcatctctgtttactactacttcattgctaaaaatctgatccagagtgcttacaatcttcccgtggaagggaatatacatgtcaagaagcagattgaatcccggaagcgacttgccaagacagtgctggtgtttgtgggcctgttcgccttctgctggctccccaatcatgtcatctacctgtaccgctcctaccactactctgaggtggacacctccatgctccactttgtcaccagcatctgtgcccgcctcctggccttcaccaactcctgcgtgaacccctttgccctctacctgctgagcaagagtttcaggaaacagttcaacactcagctgctctgttgccagcctggcctgatcatccggtctcacagcactggaaggagtacaacctgcatgacctccctcaagagtaccaacccctccgtggccacctttagcctcatcaatggaaacatctgtcacgagcggtatgtctagattgacccttgattttgccccctgagggacggttttgctttatggctagacaggaacccttgcatccattgttgtgtctgtgccctccaaagagccttcagaatgctcctgagtggtgtaggtgggggtggggaggcccaaatgatggatcaccattatattttgaaagaagccatcaagtcttaagtttttcatttcaacttgtgaacgtttcttctgatgtgaagcaaaccttcccttttcagaaaagggaacaagtagaaaattattttttaagcctcaagccctgttaaatggtcgtggccaattatgtcatagaaactgtatgaacaaccagatttacatagcagagaaatcatacattgaatgcttactt

SEQ ID NO: 136649 - DNA, 814 bp, Homo sapiens
  Payload ID: 6751
  Gene Symbol: GKN1
  Gene Name: gastrokine 1
  Uniprot ID: Q9NS71
  ENST ID: ENST00000377938
  CDS Start-End: 64-663
ataacacctagtttgagtcaacctggttaagtacaaatatgagaaggcttctcattcaggtccatgcttgcctactcctctgtccactgctttcgtgaagacaagatgaagttcacaattgtctttgctggacttcttggagtctttctagctcctgccctagctaactataatatcaacgtcaatgatgacaacaacaatgctggaagtgggcagcagtcagtgagtgtcaacaatgaacacaatgtggccaatgttgacaataacaacggatgggactcctggaattccatctgggattatggaaatggctttgctgcaaccagactctttcaaaagaagacatgcattgtgcacaaaatgaacaaggaagtcatgccctccattcaatcccttgatgcactggtcaaggaaaagaagcttcagggtaagggaccaggaggaccacctcccaagggcctgatgtactcagtcaacccaaacaaagtcgatgacctgagcaagttcggaaaaaacattgcaaacatgtgtcgtgggattccaacatacatggctgaggagatgcaagaggcaagcctgtttttttactcaggaacgtgctacacgaccagtgtactatggattgtggacatttccttctgtggagacacggtggagaactaaacaattttttaaagccactatggatttagtcatctgaatatgctgtgcagaaaaaatatgggctccagtggtttttaccatgtcattctgaaatttttctctactagttatgtttgatttctttaagtttcaataaaatcatttagcattg

SEQ ID NO: 136650 - DNA, 800 bp, Homo sapiens
  Payload ID: 6752
  Gene Symbol: GKN2
  Gene Name: gastrokine 2
  Uniprot ID: Q86XP6
  ENST ID: ENST00000328895
  CDS Start-End: 110-664
ccaaagtgatcatttgaaaaagagatatccacatcttcaagcccatataaaggatagaagctgcacagggcagctttacttactccagcaccttcctctcccaggcaaaatgaaaatacttgtggcatttctggtggtgctgaccatctttgggatacaatctcatggatacgaggtttttaacatcatcagcccaagcaacaatggtggcaatgttcaggagacagtgacaattgataatgaaaaaaataccgccatcattaacatccatgcaggatcatgctcttctaccacaatttttgactataaacatggctacattgcatccagggtgctctcccgaagagcctgctttatcctgaagatggaccatcagaacatccctcctctgaacaatctccaatggtacatctatgagaaacaggctctggacaacatgttctccagcaaatacacctgggtcaagtacaaccctctggagtctctgatcaaagacgtggattggttcctgcttgggtcacccattgagaaactctgcaaacatatccctttgtataagggggaagtggttgaaaacacacataatgtcggtgctggaggctgtgcaaaggctgggctcctgggcatcttgggaatttcaatctgtgcagacattcatgtttaggatgattagccctcttgttttatcttttcaaagaaatacatccttggtttacactcaaaagtcaaattaaattctttcccaatgccccaactaattttgagattcagtcagaaaatataaatgctgtatttataga

SEQ ID NO: 136651 - DNA, 1498 bp, Homo sapiens
  Payload ID: 6752
  Gene Symbol: GKN2
  Gene Name: gastrokine 2
  ENST ID: ENST00000481498
  CDS Start-End: 20-505
ccttcctctcccaggcaaaatgaaaatacttgtggcatttctggtggtgctgaccatctttgggatacaatctcatggatacgaggtttttaacatcatcagcccaagcaacaatggtggcaatgttcaggagacagtgacaattgataatgaaaaaaataccgccatcattaacatccatgcaggatcatgctcttctaccacaatttttgactataaacatggctacattgcatccagggtgctctcccgaagagcctgctttatcctgaagatggaccatcagaacatccctcctctgaacaatctccaatggtacatctatgagaaacaggctctggacaacatgttctccagcaaatacacctgggtcaagtacaaccctctggagtctctgatcaaagacgtggattggttcctgcttgggtcacccattgagaaactctgcaaacatatccctttgtataagggggaagtggttgaaaacacacgtgagtaccaataagtcattcactcaccaaatattttctgaaagctactatgtgccaggtgctctgttgggtgccaagtgaaatgcaaataaatgggaacagtactcagttcagtttgctttgggaattaattacatgccatgtgtgtaaattgtgctaaattttaggaatacagaaatgaattaaacgtctccagggaacacatagtctagtgaagaagctgacaagtgaaaagagaggatggagtaaaggatttctggatgccaatgaaaaactactcgattcttgtatactttcatatgtaagaatttcaagtagcaaaaagtcatctgggcccttagaatagcatattttgaagataataagaaggaagtcactaagaaatgctctcaggatctagaatagaattggtataggaaagaggaggccaagcggacttacagacagggagtaaaaaccctgattcatctgggtaacatatgccactgcagatattactgtcatttttatacaaagtttctaaatgtggcagagcaaccagagtgaaagaggtcgggccaactgatgatgaacacaacaaaggaaatttctcagagtactggaaggtagataaagaagagtttatgtttattatatatctactgcccagaaaaaaattttaagtactcattcataaagtaaataaaggcacataggtatgccattgacacagaatggcataatatcactgggattgagccaaccagcacttccaaaagttgtcagttttatttaagctaatgtattattattctaataattccaataatatattttttaatgctctttctctgaaaaattttcccttttccagataatgtcggtgctggaggctgtgcaaaggctgggctcctgggcatcttgggaatttcaatctgtgcagacattcatgtttaggatgattagccctcttgttttatcttttcaaagaaatacatccttggtttacactcaaaagtcaaattaaa

SEQ ID NO: 136652 - DNA, 1092 bp, Homo sapiens
  Payload ID: 6753
  Gene Symbol: GBX1
  Gene Name: gastrulation brain homeobox 1
  Uniprot ID: Q14549
  ENST ID: ENST00000297537
  CDS Start-End: 1-1092
atgcagcgggccggaggcggtagcgcccctgggggcaacggcgggggcggcggcgggggcccgggcactgccttctccatcgactccctaatcgggccgccgccgccgcgctccggccacttgctgtacaccggctaccccatgttcatgccctaccggccgctcgtgctgccgcaggcgctggcccctgcgccgctgcccgctggcctcccgcccctcgccccgctagcctctttcgccggccgccttaccaacaccttctgcgcggggctgggtcaggctgtgccctcgatggtggcgctgaccaccgcgctgcccagcttcgcggagccgcccgacgctttctacgggccccaggagctcgccgccgccgctgccgccgccgccgccactgccgcccgaaacaaccccgagccaggcggccgacgcccagagggtgggctggaagctgatgagctgctgccggcccgggagaaagtggcagagcccccaccacctccgcctccgcacttctcagagacttttccaagtctgcccgcagaggggaaggtgtacagctcagatgaggagaagctggaggcatcagcaggagacccagcaggcagcgaacaggaggaagagggctcaggcggtgacagcgaggatgacggtttcctggacagttctgcagggggcccaggggctcttctgggacctaaaccgaagctaaagggaagcctggggactggagctgaggagggggcaccggtgacagcaggggtcacagctcctggggggaaaagccgacggcgccgcacagcatttaccagcgagcagcttttggaattggagaaggaatttcattgcaagaaatacctgagcttgacagagcgctctcagatcgcccacgccctcaagctcagtgaggtgcaggtcaagatctggtttcagaatcgacgggccaagtggaagcgcatcaaagctggcaatgtgagcagccgttctggggagcccgtaagaaaccccaagattgttgtccccatacctgtgcatgtcaacaggtttgctgtgcggagccagcaccaacaaatggagcagggggcccggccctga

SEQ ID NO: 136653 - DNA, 2123 bp, Homo sapiens
  Payload ID: 6754
  Gene Symbol: GBX2
  Gene Name: gastrulation brain homeobox 2
  Uniprot ID: P52951
  ENST ID: ENST00000306318
  CDS Start-End: 399-1445
ccgccggagataagtacgccggcttcgcgcgctccccagcggcccgcgggaggcgacggacggcgggacggacggacggacggcagcttaccggggccgagggccaaacccgcgaagcgcgcgggctccgacgggcaagcggcggacgggggctccggcgagccctcggggcccgggcgccctctccactccggggcgcacggcctcaccccgcacaccccctgcacccgcccggcatgcagcgggcccaggactgaggggcggaggcgtctgctctccgggtcccgctcggcccctgcccggcgctcccggcggtgctcccggcgtccggcgggcttcccggcggcggcgcggcgcggggacttttcgcctctcgctggcctctaccgagcgcgtctatgagcgcagcgttcccgccgtcgctgatgatgatgcagcgcccgctggggagtagcaccgccttcagcatagactcgctgatcggcagcccgccgcagcccagccccggccatttcgtctacaccggctaccccatgttcatgccctaccggccggtagtgctgccgccgccgccgccgccgccgcccgcgctgccccaggccgcgctgcagccagcgctgccgcccgcacaccctcaccaccagatccccagcctgcccacaggcttctgctccagcctggcgcagggcatggcgctcacctctacgctcatggccacgctccccggcggcttctccgcgtcgccccagcaccaggaggcggcagcggcccgcaagttcgcgccgcagccgctgcccggcggcggtaacttcgacaaggcggaggcgctgcaggctgacgcggaggacggcaaaggcttcctggccaaagagggctcgctgctcgccttctccgcggccgagacggtgcaggcttcgctcgtcggggctgtccgagggcaagggaaagacgagtcaaaggtggaagacgacccgaagggcaaggaggagagcttctcgctggagagcgatgtggactacagctcggatgacaatctgactggccaggcagctcacaaggaggaagacccgggccacgcgctggaggagaccccgccgagcagcggcgccgcgggcagcaccacgtctacgggcaagaaccggcggcggcggactgccttcaccagcgagcagctgctggagctagagaaggagttccactgcaaaaagtacctctccttgaccgagcgctcgcagatcgcccacgccctcaaactcagcgaggtgcaggtgaaaatctggttccagaaccgacgggccaagtggaaacgggtgaaggcaggcaatgccaattccaagacaggggagccctcccggaaccctaagatcgtcgtccccatccctgtccacgtcagcaggttcgctatcagaagtcagcatcagcagctagaacaggcccggccctgagggtccagaagggccagggcctggcacccacctggagaagcccccgcacccgagggaacccatggtggactccactgtgtttgaagcaacaaagtcacagcccagctgtggccatcccaagcaaattgagaatatattcactaaatgggcttaaaagactgcttttgaaggggcttacagccacaccagaagacacgctaaatatttattatactatcctactttgtacataaatatctctatagactggatctcagctgcagtattttgaaagttataggacttaattacccagtaatttctccactcattccagaagaaaacaaaacctctgctgtaatctgcgcggttagcagccacctttccatacttttccaaaggtaaacgtgaaacccaagaacaagcactggggtttaaactgattttggtttgcgttctggctttttgagttgactgaaaagcagacattgttaggcagcctggaaattcgctttgctttgctttgcttttgcctggctttggtttcccctggggttgcctatcctatctgagccatgtgaagcacgtctccgttgtgttaatttatttcaatgtagcttattttcttataagttatgacatttaaacaatttcagtcttgtgaataataaaaaggagagagggggggaaaaagaccaa

SEQ ID NO: 136654 - DNA, 1307 bp, Homo sapiens
  Payload ID: 6754
  Gene Symbol: GBX2
  Gene Name: gastrulation brain homeobox 2
  ENST ID: ENST00000551105
  CDS Start-End: 39-707
gacttttcgcctctcgctggcctctaccgagcgcgtctatgagcgcagcgttcccgccgtcgctgatgatgatgcagcgcccgctggggagtagcaccgccttcagcatagactcgctgatcggcagcccgccgcagcccagccccggccatttcgtctacaccggctaccccatgttcatgccctaccggccggtagtgctgccgccgccgccgccgccgccgcccgcgctgccccaggccgcgctgcagccagcgctgccgcccgcacaccctcaccaccagatccccagcctgcccacaggcttctgctccagcctggcgcagggcatggcgctcacctctacgctcatggccacgctccccggcggcttctccgcgtcgccccagcaccaggaggcggcagcggcccgcaagttcgcgccgcagccgctgcccggcggcggtaacttcgacaaggcggaggcgctgcaggctgacgcggaggacggcaaaggcttcctggccaaagagggctcgctgctcgccttctccgcggccgagacggtgcaggcttcgctcggccgcctctgccgctccgcggtgacctggggttccggtcggggctgtccgagggcaagggaaagacgagtcaaaggtggaagacgacccgaagggcaaggaggagagcttctcgctggagagcgatgtggactacagctcggatgacaatctgactggccaggcagctcacaaggaggaagacccgggccacgcgctggaggagaccccgccgagcagcggcgccgcgggcagcaccacgtctacgggcaagaaccggcggcggcggactgccttcaccagcgagcagctgctggagctagagaaggagttccactgcaaaaagtacctctccttgaccgagcgctcgcagatcgcccacgccctcaaactcagcgaggtgcaggtgaaaatctggttccagaaccgacgggccaagtggaaacgggtgaaggcaggcaatgccaattccaagacaggggagccctcccggaaccctaagatcgtcgtccccatccctgtccacgtcagcaggttcgctatcagaagtcagcatcagcagctagaacaggcccggccctgagggtccagaagggccagggcctggcacccacctggagaagcccccgcacccgagggaacccatggtggactccactgtgtttgaagcaacaaagtcacagcccagctgtggccatcccaagcaaattgagaatatattcactaaatgggcttaaaagactgcttttgaaggggcttacagccaca

SEQ ID NO: 136655 - DNA, 1140 bp, Homo sapiens
  Payload ID: 6755
  Gene Symbol: GATA1
  Gene Name: GATA binding protein 1 (globin transcription factor 1)
  ENST ID: ENST00000376665
  CDS Start-End: 93-1097
ggacaccccctgggatcacactgagcttgccacatccccaaggcggccgaaccctccgcaaccaccagcccaggttaatccccagaggctccatggagttccctggcctggggtccctggggacctcagagcccctcccccagtttgtggatcctgctctggtgtcctccacaccagaatcaggggttttcttcccctctgggcctgagggcttggatgcagcagcttcctccactgccccgagcacagccaccgctgcagctgcggcactggcctactacagggacgctgaggcctacagacactccccagtctttcaggtgtacccattgctcaactgtatggaggggatcccagggggctcaccatatgccggctgggcctacggcaagacggggctctaccctgcctcaactgtgtgtcccacccgcgaggactctcctccccaggccgtggaagatctggatggaaaaggcagcaccagcttcctggagactttgaagacagagcggctgagcccagacctcctgaccctgggacctgcactgccttcatcactccctgtccccaatagtgcttatgggggccctgacttttccagtaccttcttttctcccaccgggagccccctcaattcagcagcctattcctctcccaagcttcgtggaactctccccctgcctccctgtgaggccagggagtgtgtgaactgcggagcaacagccactccactgtggcggagggacaggacaggccactacctatgcaacgcctgcggcctctatcacaagatgaatgggcagaacaggcccctcatccggcccaagaagcgcctgattgtcagtaaacgggcaggtactcagtgcaccaactgccagacgaccaccacgacactgtggcggagaaatgccagtggggatcccgtgtgcaatgcctgcggcctctactacaagctacaccagcactactgtggtggctccgctcagctcatgagggcacagagcatggcctccagaggaggggtggtgtccttctcctcttgtagccagaattctggacaacccaagtctctgggccccaggcaccccctggcttgaaccttcaaagcttttgtaaaataaaaccaccaaagtcctgaaa

SEQ ID NO: 136656 - DNA, 1497 bp, Homo sapiens
  Payload ID: 6755
  Gene Symbol: GATA1
  Gene Name: GATA binding protein 1 (globin transcription factor 1)
  Uniprot ID: P15976
  ENST ID: ENST00000376670
  CDS Start-End: 112-1353
caaaggccaaggccagccaggacaccccctgggatcacactgagcttgccacatccccaaggcggccgaaccctccgcaaccaccagcccaggttaatccccagaggctccatggagttccctggcctggggtccctggggacctcagagcccctcccccagtttgtggatcctgctctggtgtcctccacaccagaatcaggggttttcttcccctctgggcctgagggcttggatgcagcagcttcctccactgccccgagcacagccaccgctgcagctgcggcactggcctactacagggacgctgaggcctacagacactccccagtctttcaggtgtacccattgctcaactgtatggaggggatcccagggggctcaccatatgccggctgggcctacggcaagacggggctctaccctgcctcaactgtgtgtcccacccgcgaggactctcctccccaggccgtggaagatctggatggaaaaggcagcaccagcttcctggagactttgaagacagagcggctgagcccagacctcctgaccctgggacctgcactgccttcatcactccctgtccccaatagtgcttatgggggccctgacttttccagtaccttcttttctcccaccgggagccccctcaattcagcagcctattcctctcccaagcttcgtggaactctccccctgcctccctgtgaggccagggagtgtgtgaactgcggagcaacagccactccactgtggcggagggacaggacaggccactacctatgcaacgcctgcggcctctatcacaagatgaatgggcagaacaggcccctcatccggcccaagaagcgcctgattgtcagtaaacgggcaggtactcagtgcaccaactgccagacgaccaccacgacactgtggcggagaaatgccagtggggatcccgtgtgcaatgcctgcggcctctactacaagctacaccaggtgaaccggccactgaccatgcggaaggatggtattcagactcgaaaccgcaaggcatctggaaaagggaaaaagaaacggggctccagtctgggaggcacaggagcagccgaaggaccagctggtggctttatggtggtggctgggggcagcggtagcgggaattgtggggaggtggcttcaggcctgacactgggccccccaggtactgcccatctctaccaaggcctgggccctgtggtgctgtcagggcctgttagccacctcatgcctttccctggacccctactgggctcacccacgggctccttccccacaggccccatgccccccaccaccagcactactgtggtggctccgctcagctcatgagggcacagagcatggcctccagaggaggggtggtgtccttctcctcttgtagccagaattctggacaacccaagtctctgggccccaggcaccccctggcttgaaccttcaaagcttttgtaaaataaaaccaccaaagtcctg

SEQ ID NO: 136657 - DNA, 3367 bp, Homo sapiens
  Payload ID: 6756
  Gene Symbol: GATA2
  Gene Name: GATA binding protein 2
  Uniprot ID: P23769
  ENST ID: ENST00000341105
  CDS Start-End: 333-1775
gagcgccaggaaggtagcgaggccagcgtcgccccgggactcgctgctcaagtctgtctattgcctgccgccacatccatcctagcagggccccgtcgcccaccaggcggacaaaagcggtccgctgaacaccatgcggccgctcggcgtgccgcccaggctctgctggtgagcgccgccaccccgcgcccaggtcccgcgagcccgcctgccgcgcacctcgccctgctcccagctctactccaggccccgtccgcccgggggcgccgcccaccgcgcctcgctcgggccgttgccgtctgcacccagaccctgagccgccgccgccggccatggaggtggcgcccgagcagccgcgctggatggcgcacccggccgtgctgaatgcgcagcaccccgactcacaccacccgggcctggcgcacaactacatggaacccgcgcagctgctgcctccagacgaggtggacgtcttcttcaatcacctcgactcgcagggcaacccctactatgccaaccccgctcacgcgcgggcgcgcgtctcctacagccccgcgcacgcccgcctgaccggaggccagatgtgccgcccacacttgttgcacagcccgggtttgccctggctggacgggggcaaagcagccctctctgccgctgcggcccaccaccacaacccctggaccgtgagccccttctccaagacgccactgcacccctcagctgctggaggccctggaggcccactctctgtgtacccaggggctgggggtgggagcgggggaggcagcgggagctcagtggcctccctcacccctacagcagcccactctggctcccaccttttcggcttcccacccacgccacccaaagaagtgtctcctgaccctagcaccacgggggctgcgtctccagcctcatcttccgcggggggtagtgcagcccgaggagaggacaaggacggcgtcaagtaccaggtgtcactgacggagagcatgaagatggaaagtggcagtcccctgcgcccaggcctagctactatgggcacccagcctgctacacaccaccccatccccacctacccctcctatgtgccggcggctgcccacgactacagcagcggactcttccaccccggaggcttcctggggggaccggcctccagcttcacccctaagcagcgcagcaaggctcgttcctgttcagaaggccgggagtgtgtcaactgtggggccacagccacccctctctggcggcgggacggcaccggccactacctgtgcaatgcctgtggcctctaccacaagatgaatgggcagaaccgaccactcatcaagcccaagcgaagactgtcggccgccagaagagccggcacctgttgtgcaaattgtcagacgacaaccaccaccttatggcgccgaaacgccaacggggaccctgtctgcaacgcctgtggcctctactacaagctgcacaatgttaacaggccactgaccatgaagaaggaagggatccagactcggaaccggaagatgtccaacaagtccaagaagagcaagaaaggggcggagtgcttcgaggagctgtcaaagtgcatgcaggagaagtcatcccccttcagtgcagctgccctggctggacacatggcacctgtgggccacctcccgcccttcagccactccggacacatcctgcccactccgacgcccatccacccctcctccagcctctccttcggccacccccacccgtccagcatggtgaccgccatgggctagggaacagatggacgtcgaggaccgggcactcccgggatgggtggaccaaacccttagcagcccagcatttcccgaaggccgacaccactcctgccagcccggctcggcccagcaccccctctcctggagggcgcccagcagcctgccagcagttactgtgaatgttccccaccgctgagaggctgcctccgcacctgaccgctgcccaggtggggtttcctgcatggacagttgtttggagaacaacaaggacaactttatgtagagaaaaggaggggacgggacagacgaaggcaaccatttttagaaggaaaaaggattaggcaaaaataatttattttgctcttgtttctaacaaggacttggagacttggtggtctgagctgtcccaagtcctccggttcttcctcgggattggcgggtccacttgccagggctctgggggcagatttgtggggacctcagcctgcaccctcttctcctctggcttccctctctgaaatagccgaactccaggctgggctgagccaaagccagagtggccacggcccagggagggtgagctggtgcctgctttgacgggccaggccctggagggcagagacaatcacgggcggtcctgcacagattcccaggccagggctgggtcacaggaaggaaacaacattttcttgaaaggggaaacgtctcccagatcgctcccttggctttgaggccgaagctgctgtgactgtgtccccttactgagcgcaagccacagcctgtcttgtcaggtggaccctgtaaatacatcctttttctgctaacccttcaaccccctcgcctcctactctgagacaaaagaaaaaatattaaaaaaatgcataggcttaactcgctgatgagttaattgttttatttttaaactctttttgggtccagttgattgtacgtagccacaggagccctgctatgaaaggaataaaacctacacacaaggttggagctttgcaattctttttggaaaagagctgggatcccacagccctagtatgaaagctgggggtggggaggggcctttgctgcccttggtttctgggggctggttggcatttgctggcctggcagggggtgaaggcaggagttgggggcaggtcaggaccaggacccagggagaggctgtgtccctgctggggtctcaggtccagctttactgtggctgtctggatccttcccaaggtacagctgtatataaacgtgtcccgagcttagattctgtatgcggtgacggcggggtgtggtggcctgtgaggggcccctggcccaggaggaggattgtgctgatgtagtgaccaagtgcaatatgggcgggcagtcgctgcagggagcaccacggccagaagtaacttattttgtactagtgtccgcataagaaaaagaatcggcagtattttctgtttttatgttttatttggcttgttttattttggattagtgaactaagttattgttaattatgtacaacatttatatattgtctgtaaaaaatgtatgctatcctcttattcctttaaagtgagtactgttaagaataataaaatactttttgtgaa

SEQ ID NO: 136658 - DNA, 2525 bp, Homo sapiens
  Payload ID: 6756
  Gene Symbol: GATA2
  Gene Name: GATA binding protein 2
  Uniprot ID: P23769
  ENST ID: ENST00000430265
  CDS Start-End: 252-1652
ggcagctggcgccagggcggccggaggatgccgaggggccggagccgggagggcccgaggccgaggcgcactctacccccagctcctaccctgtaagccccgccagcctccggacgtgctgtccctgggcccgtcgccctcggggctcccgccggaactccttcactctcagaggccgagtccctcccctccccacggctgcgtgtggccgttgccgtctgcacccagaccctgagccgccgccgccggccatggaggtggcgcccgagcagccgcgctggatggcgcacccggccgtgctgaatgcgcagcaccccgactcacaccacccgggcctggcgcacaactacatggaacccgcgcagctgctgcctccagacgaggtggacgtcttcttcaatcacctcgactcgcagggcaacccctactatgccaaccccgctcacgcgcgggcgcgcgtctcctacagccccgcgcacgcccgcctgaccggaggccagatgtgccgcccacacttgttgcacagcccgggtttgccctggctggacgggggcaaagcagccctctctgccgctgcggcccaccaccacaacccctggaccgtgagccccttctccaagacgccactgcacccctcagctgctggaggccctggaggcccactctctgtgtacccaggggctgggggtgggagcgggggaggcagcgggagctcagtggcctccctcacccctacagcagcccactctggctcccaccttttcggcttcccacccacgccacccaaagaagtgtctcctgaccctagcaccacgggggctgcgtctccagcctcatcttccgcggggggtagtgcagcccgaggagaggacaaggacggcgtcaagtaccaggtgtcactgacggagagcatgaagatggaaagtggcagtcccctgcgcccaggcctagctactatgggcacccagcctgctacacaccaccccatccccacctacccctcctatgtgccggcggctgcccacgactacagcagcggactcttccaccccggaggcttcctggggggaccggcctccagcttcacccctaagcagcgcagcaaggctcgttcctgttcagaaggccgggagtgtgtcaactgtggggccacagccacccctctctggcggcgggacggcaccggccactacctgtgcaatgcctgtggcctctaccacaagatgaatgggcagaaccgaccactcatcaagcccaagcgaagactgacgacaaccaccaccttatggcgccgaaacgccaacggggaccctgtctgcaacgcctgtggcctctactacaagctgcacaatgttaacaggccactgaccatgaagaaggaagggatccagactcggaaccggaagatgtccaacaagtccaagaagagcaagaaaggggcggagtgcttcgaggagctgtcaaagtgcatgcaggagaagtcatcccccttcagtgcagctgccctggctggacacatggcacctgtgggccacctcccgcccttcagccactccggacacatcctgcccactccgacgcccatccacccctcctccagcctctccttcggccacccccacccgtccagcatggtgaccgccatgggctagggaacagatggacgtcgaggaccgggcactcccgggatgggtggaccaaacccttagcagcccagcatttcccgaaggccgacaccactcctgccagcccggctcggcccagcaccccctctcctggagggcgcccagcagcctgccagcagttactgtgaatgttccccaccgctgagaggctgcctccgcacctgaccgctgcccaggtggggtttcctgcatggacagttgtttggagaacaacaaggacaactttatgtagagaaaaggaggggacgggacagacgaaggcaaccatttttagaaggaaaaaggattaggcaaaaataatttattttgctcttgtttctaacaaggacttggagacttggtggtctgagctgtcccaagtcctccggttcttcctcgggattggcgggtccacttgccagggctctgggggcagatttgtggggacctcagcctgcaccctcttctcctctggcttccctctctgaaatagccgaactccaggctgggctgagccaaagccagagtggccacggcccagggagggtgagctggtgcctgctttgacgggccaggccctggagggcagagacaatcacgggcggtcctgcacagattcccaggccagggctgggtcacaggaaggaaacaacattttcttgaaaggggaaacgtctcccagatcgctcccttggctttgaggccgaagctgctgtgactgtgtccccttactgagcgcaagccacagcctgtcttgtcaggtggaccctgtaaatacatcctttttctgctaacccttcaaccccctcgcctcctactctgagacaaaagaaaaaatattaaaaaaatgcataggcttaa

SEQ ID NO: 136659 - DNA, 1878 bp, Homo sapiens
  Payload ID: 6756
  Gene Symbol: GATA2
  Gene Name: GATA binding protein 2
  Uniprot ID: P23769
  ENST ID: ENST00000487848
  CDS Start-End: 436-1878
actgggtcaagcacagccctgagcggccgcgtgtccgaggcccaggtgccctctagagccctgtagttcctgcccctctctgcccctctcggctcctgctgttccgccgctgtcgtccgaaccatcccaacccccagtccacccagacagcgcccgagctaggggagggaacggtctgggagtcggcagctggcgccagggcggccggaggatgccgaggggccggagccgggagggcccgaggccgaggcgcactctacccccagctcctaccctgtaagccccgccagcctccggacgtgctgtccctgggcccgtcgccctcggggctcccgccggaactccttcactctcagaggccgagtccctcccctccccacggctgcgtgtggccgttgccgtctgcacccagaccctgagccgccgccgccggccatggaggtggcgcccgagcagccgcgctggatggcgcacccggccgtgctgaatgcgcagcaccccgactcacaccacccgggcctggcgcacaactacatggaacccgcgcagctgctgcctccagacgaggtggacgtcttcttcaatcacctcgactcgcagggcaacccctactatgccaaccccgctcacgcgcgggcgcgcgtctcctacagccccgcgcacgcccgcctgaccggaggccagatgtgccgcccacacttgttgcacagcccgggtttgccctggctggacgggggcaaagcagccctctctgccgctgcggcccaccaccacaacccctggaccgtgagccccttctccaagacgccactgcacccctcagctgctggaggccctggaggcccactctctgtgtacccaggggctgggggtgggagcgggggaggcagcgggagctcagtggcctccctcacccctacagcagcccactctggctcccaccttttcggcttcccacccacgccacccaaagaagtgtctcctgaccctagcaccacgggggctgcgtctccagcctcatcttccgcggggggtagtgcagcccgaggagaggacaaggacggcgtcaagtaccaggtgtcactgacggagagcatgaagatggaaagtggcagtcccctgcgcccaggcctagctactatgggcacccagcctgctacacaccaccccatccccacctacccctcctatgtgccggcggctgcccacgactacagcagcggactcttccaccccggaggcttcctggggggaccggcctccagcttcacccctaagcagcgcagcaaggctcgttcctgttcagaaggccgggagtgtgtcaactgtggggccacagccacccctctctggcggcgggacggcaccggccactacctgtgcaatgcctgtggcctctaccacaagatgaatgggcagaaccgaccactcatcaagcccaagcgaagactgtcggccgccagaagagccggcacctgttgtgcaaattgtcagacgacaaccaccaccttatggcgccgaaacgccaacggggaccctgtctgcaacgcctgtggcctctactacaagctgcacaatgttaacaggccactgaccatgaagaaggaagggatccagactcggaaccggaagatgtccaacaagtccaagaagagcaagaaaggggcggagtgcttcgaggagctgtcaaagtgcatgcaggagaagtcatcccccttcagtgcagctgccctggctggacacatggcacctgtgggccacctcccgcccttcagccactccggacacatcctgcccactccgacgcccatccacccctcctccagcctctccttcggccacccccacccgtccagcatggtgaccgccatgggctag

SEQ ID NO: 136660 - DNA, 844 bp, Homo sapiens
  Payload ID: 6756
  Gene Symbol: GATA2
  Gene Name: GATA binding protein 2
  ENST ID: ENST00000492608
  CDS Start-End: 395-844
gtcgagcgcgggtccctctttattggccagctgggcgccctgctacttggcgtcgcatttctctctcccaggcgggttcgtttccgccagagaatgcagcagtcccgcatcctacgcaggacctgcaaccgaggtggaggcttcggtcaagccggctcctgcctgcgttgtcgaggaaggcaaccccaaggcctgaaaggacctggcagaactcctgtttcctttttttcctctacaccggattgcgggcaaggaggctggttcgggtctcccgaggcccctgctcaagcactccttaaccgtcctgctaagcccctctgtgcggcgattttctgagctgccgagcgggggccgttgccgtctgcacccagaccctgagccgccgccgccggccatggaggtggcgcccgagcagccgcgctggatggcgcacccggccgtgctgaatgcgcagcaccccgactcacaccacccgggcctggcgcacaactacatggaacccgcgcagctgctgcctccagacgaggtggacgtcttcttcaatcacctcgactcgcagggcaacccctactatgccaaccccgctcacgcgcgggcgcgcgtctcctacagccccgcgcacgcccgcctgaccggaggccagatgtgccgcccacacttgttgcacagcccgggtttgccctggctggacgggggcaaagcagccctctctgccgctgcggcccaccaccacaacccctggaccgtgagccccttctccaagacgccactgcacccctcagctgctggaggccctggaggcccactctctgtgtacccaggggctgggggtgggagcggggga

SEQ ID NO: 136661 - DNA, 563 bp, Homo sapiens
  Payload ID: 6756
  Gene Symbol: GATA2
  Gene Name: GATA binding protein 2
  ENST ID: ENST00000498200
  CDS Start-End: 540-563
ggtagcgaggccagcgtcgccccgggactcgctgctcaagtctgtctattgcctgccgccacatccatcctagcagggccccgtcgcccaccaggcggacaaaagcggtccgctgaacaccatgcggccgctcggcgtgccgcccaggctctgctggtgagcgccgccaccccgcgcccaggtcccgcgagcccgcctgccgcgcacctcgccctgctcccagctctactccaggccccgtccgcccgggggcgccgcccaccgcgcctcgctcggcttgaactccgcgttgctccaaccacgaggggaaaggccccgcgttcagggaccccgtgtgtggcgaacgctcctttaccggaaaacaaggaaggaaattcgttgttttggaaaaagcctcctctcccgaggtcgggaacatctggtggtgagctccaggtctacgcaggcaccccgtgctaggattcgtttatgagcaggcaggattcgagaaccagggccgttgccgtctgcacccagaccctgagccgccgccgccggccatggaggtggcgcccgagcagccg

SEQ ID NO: 136662 - DNA, 2654 bp, Homo sapiens
  Payload ID: 6757
  Gene Symbol: GATA3
  Gene Name: GATA binding protein 3
  Uniprot ID: P23771
  ENST ID: ENST00000346208
  CDS Start-End: 456-1787
gagagcgagacagagcgagcaacgcaatctgaccgagcaggtcgtacgccgccgcctcctcctcctctctgctcttcgctacccaggtgacccgaggagggactccgcctccgagcggctgaggaccccggtgcagaggagcctggctcgcagaattgcagagtcgtcgcccctttttacaacctggtcccgttttattctgccgtacccagtttttggatttttgtcttccccttcttctctttgctaaacgacccctccaagataatttttaaaaaaccttctcctttgctcacctttgcttcccagccttcccatccccccaccgaaagcaaatcattcaacgacccccgaccctccgacggcaggagccccccgacctcccaggcggaccgccctccctccccgcgcgcgggttccgggcccggcgagagggcgcgagcacagccgaggccatggaggtgacggcggaccagccgcgctgggtgagccaccaccaccccgccgtgctcaacgggcagcacccggacacgcaccacccgggcctcagccactcctacatggacgcggcgcagtacccgctgccggaggaggtggatgtgctttttaacatcgacggtcaaggcaaccacgtcccgccctactacggaaactcggtcagggccacggtgcagaggtaccctccgacccaccacgggagccaggtgtgccgcccgcctctgcttcatggatccctaccctggctggacggcggcaaagccctgggcagccaccacaccgcctccccctggaatctcagccccttctccaagacgtccatccaccacggctccccggggcccctctccgtctaccccccggcctcgtcctcctccttgtcggggggccacgccagcccgcacctcttcaccttcccgcccaccccgccgaaggacgtctccccggacccatcgctgtccaccccaggctcggccggctcggcccggcaggacgagaaagagtgcctcaagtaccaggtgcccctgcccgacagcatgaagctggagtcgtcccactcccgtggcagcatgaccgccctgggtggagcctcctcgtcgacccaccaccccatcaccacctacccgccctacgtgcccgagtacagctccggactcttcccccccagcagcctgctgggcggctcccccaccggcttcggatgcaagtccaggcccaaggcccggtccagcacaggcagggagtgtgtgaactgtggggcaacctcgaccccactgtggcggcgagatggcacgggacactacctgtgcaacgcctgcgggctctatcacaaaatgaacggacagaaccggcccctcattaagcccaagcgaaggctgtctgcagccaggagagcagggacgtcctgtgcgaactgtcagaccaccacaaccacactctggaggaggaatgccaatggggaccctgtctgcaatgcctgtgggctctactacaagcttcacaatattaacagacccctgactatgaagaaggaaggcatccagaccagaaaccgaaaaatgtctagcaaatccaaaaagtgcaaaaaagtgcatgactcactggaggacttccccaagaacagctcgtttaacccggccgccctctccagacacatgtcctccctgagccacatctcgcccttcagccactccagccacatgctgaccacgcccacgccgatgcacccgccatccagcctgtcctttggaccacaccacccctccagcatggtcaccgccatgggttagagccctgctcgatgctcacagggcccccagcgagagtccctgcagtccctttcgacttgcatttttgcaggagcagtatcatgaagcctaaacgcgatggatatatgtttttgaaggcagaaagcaaaattatgtttgccactttgcaaaggagctcactgtggtgtctgtgttccaaccactgaatctggaccccatctgtgaataagccattctgactcatatcccctatttaacagggtctctagtgctgtgaaaaaaaaaatgctgaacattgcatataacttatattgtaagaaatactgtacaatgactttattgcatctgggtagctgtaaggcatgaaggatgccaagaagtttaaggaatatgggagaaatagtgtggaaattaagaagaaactaggtctgatattcaaatggacaaactgccagttttgtttcctttcactggccacagttgtttgatgcattaaaagaaaataaaaaaaagaaaaaagagaaaagaaaaaaaaagaaaaaagttgtaggcgaatcatttgttcaaagctgttggcctctgcaaaggaaataccagttctgggcaatcagtgttaccgttcaccagttgccgttgagggtttcagagagcctttttctaggcctacatgctttgtgaacaagtccctgtaattgttgtttgtatgtataattcaaagcaccaaaataagaaaagatgtagatttatttcatcatattatacagaccgaactgttgtataaatttatttactgctagtcttaagaactgctttctttcgtttgtttgtttcaatattttccttctctctcaatttttggttgaataaactagattacattcagttggc

SEQ ID NO: 136663 - DNA, 3078 bp, Homo sapiens
  Payload ID: 6757
  Gene Symbol: GATA3
  Gene Name: GATA binding protein 3
  Uniprot ID: P23771
  ENST ID: ENST00000379328
  CDS Start-End: 569-1903
ctgagctgcctggcgccgtcttgatactttcagaaagaatgcattccctgtaaaaaaaaaaaaaaaatactgagagagggagagagagagagaagaagagagagagacggagggagagcgagacagagcgagcaacgcaatctgaccgagcaggtcgtacgccgccgcctcctcctcctctctgctcttcgctacccaggtgacccgaggagggactccgcctccgagcggctgaggaccccggtgcagaggagcctggctcgcagaattgcagagtcgtcgcccctttttacaacctggtcccgttttattctgccgtacccagtttttggatttttgtcttccccttcttctctttgctaaacgacccctccaagataatttttaaaaaaccttctcctttgctcacctttgcttcccagccttcccatccccccaccgaaagcaaatcattcaacgacccccgaccctccgacggcaggagccccccgacctcccaggcggaccgccctccctccccgcgcgcgggttccgggcccggcgagagggcgcgagcacagccgaggccatggaggtgacggcggaccagccgcgctgggtgagccaccaccaccccgccgtgctcaacgggcagcacccggacacgcaccacccgggcctcagccactcctacatggacgcggcgcagtacccgctgccggaggaggtggatgtgctttttaacatcgacggtcaaggcaaccacgtcccgccctactacggaaactcggtcagggccacggtgcagaggtaccctccgacccaccacgggagccaggtgtgccgcccgcctctgcttcatggatccctaccctggctggacggcggcaaagccctgggcagccaccacaccgcctccccctggaatctcagccccttctccaagacgtccatccaccacggctccccggggcccctctccgtctaccccccggcctcgtcctcctccttgtcggggggccacgccagcccgcacctcttcaccttcccgcccaccccgccgaaggacgtctccccggacccatcgctgtccaccccaggctcggccggctcggcccggcaggacgagaaagagtgcctcaagtaccaggtgcccctgcccgacagcatgaagctggagtcgtcccactcccgtggcagcatgaccgccctgggtggagcctcctcgtcgacccaccaccccatcaccacctacccgccctacgtgcccgagtacagctccggactcttcccccccagcagcctgctgggcggctcccccaccggcttcggatgcaagtccaggcccaaggcccggtccagcacagaaggcagggagtgtgtgaactgtggggcaacctcgaccccactgtggcggcgagatggcacgggacactacctgtgcaacgcctgcgggctctatcacaaaatgaacggacagaaccggcccctcattaagcccaagcgaaggctgtctgcagccaggagagcagggacgtcctgtgcgaactgtcagaccaccacaaccacactctggaggaggaatgccaatggggaccctgtctgcaatgcctgtgggctctactacaagcttcacaatattaacagacccctgactatgaagaaggaaggcatccagaccagaaaccgaaaaatgtctagcaaatccaaaaagtgcaaaaaagtgcatgactcactggaggacttccccaagaacagctcgtttaacccggccgccctctccagacacatgtcctccctgagccacatctcgcccttcagccactccagccacatgctgaccacgcccacgccgatgcacccgccatccagcctgtcctttggaccacaccacccctccagcatggtcaccgccatgggttagagccctgctcgatgctcacagggcccccagcgagagtccctgcagtccctttcgacttgcatttttgcaggagcagtatcatgaagcctaaacgcgatggatatatgtttttgaaggcagaaagcaaaattatgtttgccactttgcaaaggagctcactgtggtgtctgtgttccaaccactgaatctggaccccatctgtgaataagccattctgactcatatcccctatttaacagggtctctagtgctgtgaaaaaaaaaatgctgaacattgcatataacttatattgtaagaaatactgtacaatgactttattgcatctgggtagctgtaaggcatgaaggatgccaagaagtttaaggaatatgggagaaatagtgtggaaattaagaagaaactaggtctgatattcaaatggacaaactgccagttttgtttcctttcactggccacagttgtttgatgcattaaaagaaaataaaaaaaagaaaaaagagaaaagaaaaaaaaagaaaaaagttgtaggcgaatcatttgttcaaagctgttggcctctgcaaaggaaataccagttctgggcaatcagtgttaccgttcaccagttgccgttgagggtttcagagagcctttttctaggcctacatgctttgtgaacaagtccctgtaattgttgtttgtatgtataattcaaagcaccaaaataagaaaagatgtagatttatttcatcatattatacagaccgaactgttgtataaatttatttactgctagtcttaagaactgctttctttcgtttgtttgtttcaatattttccttctctctcaatttttggttgaataaactagattacattcagttggcctaaggtggttgtgctcggagggtttcttgtttcttttccattttgtttttggatgatatttattaaatagcttctaagagtccggcggcatctgtcttgtccctattcctgcagcctgtgctgagggtagcagtgtatgagctaccagcgtgcatgtcagcgaccctggcccgacaggccacgtcctgcaatcggcccggctgcctcttcgccctgtcgtgttctgtgttagtgatcactgcctttaatacagtctgttggaataatattataagcataataataaagtgaaaatattttaaaacta

SEQ ID NO: 136664 - DNA, 3414 bp, Homo sapiens
  Payload ID: 6758
  Gene Symbol: GATA4
  Gene Name: GATA binding protein 4
  Uniprot ID: P43694
  ENST ID: ENST00000335135
  CDS Start-End: 559-1887
ggacttggaggcggccggcgcaggggccgcgagaggcttcgtcgccgctgcagctccgggggctcccaggggagcgtgcgcggaacctccaggcccagcaggaccccggctgcggcgaggaggaaggagccagcctagcagcttctgcgcctgtggccgcgggtgtcctggaggcctctcggtgtgacgagtgggggacccgaaggctcgtgcgccacctccaggcctggacgctgccctccgtcttctgcccccaataggtgcgccggaccttcaggccctggggtgaattcagctgctcctacatcagcttccggaaccaccaaaaattcaaattgggattttccggagtaaacaagagcctagagccctttgctcaatgctggatttaatacgtatatatttttaagcgagttggttttttcccctttgatttttgatcttcgcgacagttcctcccacgcatattatcgttgttgccgtcgttttctctccccgcgtggctccttgacctgcgagggagagagaggacaccgaagccgggagctcgcagggaccatgtatcagagcttggccatggccgccaaccacgggccgccccccggtgcctacgaggcgggcggccccggcgccttcatgcacggcgcgggcgccgcgtcctcgccagtctacgtgcccacaccgcgggtgccctcctccgtgctgggcctgtcctacctccagggcggaggcgcgggctctgcgtccggaggcgcctcgggcggcagctccggtggggccgcgtctggtgcggggcccgggacccagcagggcagcccgggatggagccaggcgggagccgacggagccgcttacaccccgccgccggtgtcgccgcgcttctccttcccggggaccaccgggtccctggcggccgccgccgccgctgccgcggcccgggaagctgcggcctacagcagtggcggcggagcggcgggtgcgggcctggcgggccgcgagcagtacgggcgcgccggcttcgcgggctcctactccagcccctacccggcttacatggccgacgtgggcgcgtcctgggccgcagccgccgccgcctccgccggccccttcgacagcccggtcctgcacagcctgcccggccgggccaacccggccgcccgacaccccaatctcgatatgtttgacgacttctcagaaggcagagagtgtgtcaactgtggggctatgtccaccccgctctggaggcgagatgggacgggtcactatctgtgcaacgcctgcggcctctaccacaagatgaacggcatcaaccggccgctcatcaagcctcagcgccggctgtccgcctcccgccgagtgggcctctcctgtgccaactgccagaccaccaccaccacgctgtggcgccgcaatgcggagggcgagcctgtgtgcaatgcctgcggcctctacatgaagctccacggggtccccaggcctcttgcaatgcggaaagaggggatccaaaccagaaaacggaagcccaagaacctgaataaatctaagacaccagcagctccttcaggcagtgagagccttcctcccgccagcggtgcttccagcaactccagcaacgccaccaccagcagcagcgaggagatgcgtcccatcaagacggagcctggcctgtcatctcactacgggcacagcagctccgtgtcccagacgttctcagtcagtgcgatgtctggccatgggccctccatccaccctgtcctctcggccctgaagctctccccacaaggctatgcgtctcccgtcagccagtctccacagaccagctccaagcaggactcttggaacagcctggtcttggccgacagtcacggggacataatcactgcgtaatcttccctcttccctcctcaaattcctgcacggacctgggacttggaggatagcaaagaaggaggccctgggctcccaggggccggcctcctctgcctggtaatgactccagaacaacaactgggaagaaacttgaagtcgacaatctggttaggggaagcgggtgttggattttctcagatgcctttacacgctgatgggactggagggagcccacccttcagcacgagcacactgcatctctcctgtgagttggagacttctttcccaagatgtccttgtcccctgcgttccccactgtggcctagaccgtgggttttgcattgtgtttctagcaccgaggatctgagaacaagcggagggccgggccctgggacccctgctccagcccgaatgacggcatctgtttgccatgtacctggatgcgacgggcccctggggacaggcccttgccccatccatccgcttgaggcatggcaccgccctgcatccctaataccaaatctgactccaaaattgtggggtgtgacatacaagtgactgaacacttcctggggagctacaggggcacttaacccaccacagcacagcctcatcaaaatgcagctggcaacttctcccccaggtgccttccccctgctgccggcctttgctccttcacttccaacatctctcaaaataaaaatccctcttcccgctctgagcgattcagctctgcccgcagcttgtacatgtctctcccctggcaaaacaagagctgggtagtttagccaaacggcaccccctcgagttcactgcagacccttcgttcaccgtgtcacacatagaggggttctgagtaagaacaaaacgttctgctgctcaagccagtctggcaagcactcagcccagcctcgaggtccttctggggagagtgtaagtggacagagtcctggtcagggggcaggagtgtcccaagggctggcccacctgctgtctgtctgctcctcctagcccttggtcagatggcagccagagtccctcaggacctgcagcctcgccccggcagaagtcttttgtccaggaggcaaaaagccagagattctgcaacacgaattcgaagcaaacaaacacaacacaacagaattcctggaaagaagacgactgctaagacacggcaggggggcctggagggagcctccgactctgagctgctccgggatctgccgcgttctcctctgcacattgctgtttctgcccctgatgctggagctcaaggagactccttcctctttctcagcagagctgtagctgactgtggcattactacgcctccccacacgcccagacccctcactccaaaatcctactggctgtagcagagaatacctttgaaccaagattctgttttaatcatcatttacattgttttcttccaaaggccccctcgtataccctccctaacccacaaacctgttaacattgtcttaaggtgaaatggctggaaaatcagtatttaactaataaatttatctgtattcctctttc

SEQ ID NO: 136665 - DNA, 1010 bp, Homo sapiens
  Payload ID: 6758
  Gene Symbol: GATA4
  Gene Name: GATA binding protein 4
  ENST ID: ENST00000528027
  CDS Start-End: 661-1010
cgcaggggccgcgagaggcttcgtcgccgctgcagctccgggggctcccaggggagcgtgcgcggaacctccaggcccagcagttatgaaagaaaaaaaattacattatcttgaagaactgcaggagttgagtattccagaaaatgcaatgaaataggtcagctacttgattttaaaagtcaaatactggatcttttattaaggaccccggctgcggcgaggaggaaggagccagcctagcagcttctgcgcctgtggccgcgggtgtcctggaggcctctcggtgtgacgagtgggggacccgaaggctcgtgcgccacctccaggcctggacgctgccctccgtcttctgcccccaataggtgcgccggaccttcaggccctggggtgaattcagctgctcctacatcagcttccggaaccaccaaaaattcaaattgggattttccggagtaaacaagagcctagagccctttgctcaatgctggatttaatacgtatatatttttaagcgagttggttttttcccctttgatttttgatcttcgcgacagttcctcccacgcatattatcgttgttgccgtcgttttctctccccgcgtggctccttgacctgcgagggagagagaggacaccgaagccgggagctcgcagggaccatgtatcagagcttggccatggccgccaaccacgggccgccccccggtgcctacgaggcgggcggccccggcgccttcatgcacggcgcgggcgccgcgtcctcgccagtctacgtgcccacaccgcgggtgccctcctccgtgctgggcctgtcctacctccagggcggaggcgcgggctctgcgtccggaggcgcctcgggcggcagctccggtggggccgcgtctggtgcggggcccgggacccagcagggcagcccgggatggagccaggcgggagccgacggagccgcttacaccccgccgccggtgtcgccgcgcttctccttcccggggaccaccgggtccct

SEQ ID NO: 136666 - DNA, 2614 bp, Homo sapiens
  Payload ID: 6758
  Gene Symbol: GATA4
  Gene Name: GATA binding protein 4
  ENST ID: ENST00000528712
  CDS Start-End: 379-1089
acaacgtctccctcccacccggctgagaacagcctggaatccctgtgcagagtttgcctcacaccaggccttgagcagccgcagggacgccgctccccaccgcggggacgcatcctgctctgcaccctggttctcggcgctgcgcccgcggaggctcgtgcagggcaggctgcccgtgcgggtgaggactgagtgccgcgcagggaaggagtatcgcagaccggcgcccaggcccagcgggggaatccaagggccgtgttgcaggactcggcattcgttctgcgcgggtcaccttgaatgtctgtccggatccctcgcggcagggccgcagaggcgcgtccatatcttggaggaattcgttccatagaatgagtagatatgtttgacgacttctcagaaggcagagagtgtgtcaactgtggggctatgtccaccccgctctggaggcgagatgggacgggtcactatctgtgcaacgcctgcggcctctaccacaagatgaacggcatcaaccggccgctcatcaagcctcagcgccggctgtccgcctcccgccgagtgggcctctcctgtgccaactgccagaccaccaccaccacgctgtggcgccgcaatgcggagggcgagcctgtgtgcaatgcctgcggcctctacatgaagctccacggggtccccaggcctcttgcaatgcggaaagaggggatccaaaccagaaaacggaagcccaagaacctgaataaatctaagacaccagcagctccttcaggcagtgagagccttcctcccgccagcggtgcttccagcaactccagcaacgccaccaccagcagcagcgaggagatgcgtcccatcaagacggagcctggcctgtcatctcactacgggcacagcagctccgtgtcccagacgttctcagtcagtgcgatgtctggccatgggccctccatccaccctgtcctctcggccctgaagctctccccacaaggctatgcgtctcccgtcagccagtctccacagaccagctccaagcaggactcttggaacagcctggtcttggccgacagtcacggggacataatcactgcgtaatcttccctcttccctcctcaaattcctgcacggacctgggacttggaggatagcaaagaaggaggccctgggctcccaggggccggcctcctctgcctggtaatgactccagaacaacaactgggaagaaacttgaagtcgacaatctggttaggggaagcgggtgttggattttctcagatgcctttacacgctgatgggactggagggagcccacccttcagcacgagcacactgcatctctcctgtgagttggagacttctttcccaagatgtccttgtcccctgcgttccccactgtggcctagaccgtgggttttgcattgtgtttctagcaccgaggatctgagaacaagcggagggccgggccctgggacccctgctccagcccgaatgacggcatctgtttgccatgtacctggatgcgacgggcccctggggacaggcccttgccccatccatccgcttgaggcatggcaccgccctgcatccctaataccaaatctgactccaaaattgtggggtgtgacatacaagtgactgaacacttcctggggagctacaggggcacttaacccaccacagcacagcctcatcaaaatgcagctggcaacttctcccccaggtgccttccccctgctgccggcctttgctccttcacttccaacatctctcaaaataaaaatccctcttcccgctctgagcgattcagctctgcccgcagcttgtacatgtctctcccctggcaaaacaagagctgggtagtttagccaaacggcaccccctcgagttcactgcagacccttcgttcaccgtgtcacacatagaggggttctgagtaagaacaaaacgttctgctgctcaagccagtctggcaagcactcagcccagcctcgaggtccttctggggagagtgtaagtggacagagtcctggtcagggggcaggagtgtcccaagggctggcccacctgctgtctgtctgctcctcctagcccttggtcagatggcagccagagtccctcaggacctgcagcctcgccccggcagaagtcttttgtccaggaggcaaaaagccagagattctgcaacacgaattcgaagcaaacaaacacaacacaacagaattcctggaaagaagacgactgctaagacacggcaggggggcctggagggagcctccgactctgagctgctccgggatctgccgcgttctcctctgcacattgctgtttctgcccctgatgctggagctcaaggagactccttcctctttctcagcagagctgtagctgactgtggcattactacgcctccccacacgcccagacccctcactccaaaatcctactggctgtagcagagaatacctttgaaccaagattctgttttaatcatcatttacattgttttcttccaaaggccccctcgtataccctccctaacccacaaacctgttaacattgtcttaaggtgaaatggctggaaaatcagtatttaactaataaatttatctgtattcctctt

SEQ ID NO: 136667 - DNA, 686 bp, Homo sapiens
  Payload ID: 6758
  Gene Symbol: GATA4
  Gene Name: GATA binding protein 4
  ENST ID: ENST00000526716
  CDS Start-End: 160-686
agtcagcgccctagggccgagttgctgggccggggacccgagccgcgagctggggacttggaggcggccggcgcaggggccgcgagaggcttcgtcgccgctgcagctccgggggctcccaggggagcgtgcgcggaacctccaggcccagcagtagatatgtttgacgacttctcagaaggcagagagtgtgtcaactgtggggctatgtccaccccgctctggaggcgagatgggacgggtcactatctgtgcaacgcctgcggcctctaccacaagatgaacggcatcaaccggccgctcatcaagcctcagcgccggctgtccgcctcccgccgagtgggcctctcctgtgccaactgccagaccaccaccaccacgctgtggcgccgcaatgcggagggcgagcctgtgtgcaatgcctgcggcctctacatgaagctccacggggtccccaggcctcttgcaatgcggaaagaggggatccaaaccagaaaacggaagcccaagaacctgaataaatctaagacaccagcagctccttcaggcagtgagagccttcctcccgccagcggtgcttccagcaactccagcaacgccaccaccagcagcagcgaggagatgcgtcccatcaagacggagcctggcctgtcatctcactacgggcacagcagctccgtgtccca

SEQ ID NO: 136668 - DNA, 1459 bp, Homo sapiens
  Payload ID: 6758
  Gene Symbol: GATA4
  Gene Name: GATA binding protein 4
  Uniprot ID: P43694
  ENST ID: ENST00000532059
  CDS Start-End: 81-1412
gccgtcgttttctctccccgcgtggctccttgacctgcgagggagagagaggacaccgaagccgggagctcgcagggaccatgtatcagagcttggccatggccgccaaccacgggccgccccccggtgcctacgaggcgggcggccccggcgccttcatgcacggcgcgggcgccgcgtcctcgccagtctacgtgcccacaccgcgggtgccctcctccgtgctgggcctgtcctacctccagggcggaggcgcgggctctgcgtccggaggcgcctcgggcggcagctccggtggggccgcgtctggtgcggggcccgggacccagcagggcagcccgggatggagccaggcgggagccgacggagccgcttacaccccgccgccggtgtcgccgcgcttctccttcccggggaccaccgggtccctggcggccgccgccgccgctgccgcggcccgggaagctgcggcctacagcagtggcggcggagcggcgggtgcgggcctggcgggccgcgagcagtacgggcgcgccggcttcgcgggctcctactccagcccctacccggcttacatggccgacgtgggcgcgtcctgggccgcagccgccgccgcctccgccggccccttcgacagcccggtcctgcacagcctgcccggccgggccaacccggccgcccgacaccccaatctcgtagatatgtttgacgacttctcagaaggcagagagtgtgtcaactgtggggctatgtccaccccgctctggaggcgagatgggacgggtcactatctgtgcaacgcctgcggcctctaccacaagatgaacggcatcaaccggccgctcatcaagcctcagcgccggctgtccgcctcccgccgagtgggcctctcctgtgccaactgccagaccaccaccaccacgctgtggcgccgcaatgcggagggcgagcctgtgtgcaatgcctgcggcctctacatgaagctccacggggtccccaggcctcttgcaatgcggaaagaggggatccaaaccagaaaacggaagcccaagaacctgaataaatctaagacaccagcagctccttcaggcagtgagagccttcctcccgccagcggtgcttccagcaactccagcaacgccaccaccagcagcagcgaggagatgcgtcccatcaagacggagcctggcctgtcatctcactacgggcacagcagctccgtgtcccagacgttctcagtcagtgcgatgtctggccatgggccctccatccaccctgtcctctcggccctgaagctctccccacaaggctatgcgtctcccgtcagccagtctccacagaccagctccaagcaggactcttggaacagcctggtcttggccgacagtcacggggacataatcactgcgtaatcttccctcttccctcctcaaattcctgcacggacctgggacttgga

SEQ ID NO: 136669 - DNA, 832 bp, Homo sapiens
  Payload ID: 6758
  Gene Symbol: GATA4
  Gene Name: GATA binding protein 4
  ENST ID: ENST00000526974
  CDS Start-End: 764-832
cgcggcctctgcgcctcagccgacctccaccgcggcagggacgcatcctgctctgcaccctggttctcggcgctgcgcccgcggaggctcgtgcagggcaggctgcccgtgcgggtgaggactgagtgccgcgcagggaaggagtatcgcagaccggcgcccaggcccagcgggggaatccaagggccgtgttgcaggactcggcattcgttctgcgcgggtcaccttgaatgtctgtccggatccctcgcggcagggccgcagaggcgcgtccatatcttggaggaattcgttccatagaatgaggaccccggctgcggcgaggaggaaggagccagcctagcagcttctgcgcctgtggccgcgggtgtcctggaggcctctcggtgtgacgagtgggggacccgaaggctcgtgcgccacctccaggcctggacgctgccctccgtcttctgcccccaataggtgcgccggaccttcaggccctggggtgaattcagctgctcctacatcagcttccggaaccaccaaaaattcaaattgggattttccggagtaaacaagagcctagagccctttgctcaatgctggatttaatacgtatatatttttaagcgagttggttttttcccctttgatttttgatcttcgcgacagttcctcccacgcatattatcgttgttgccgtcgttttctctccccgcgtggctccttgacctgcgagggagagagaggacaccgaagccgggagctcgcagggaccatgtatcagagcttggccatggccgccaaccacgggccgccccccggtgcctacgaggcgggcggcccc

SEQ ID NO: 136670 - DNA, 877 bp, Homo sapiens
  Payload ID: 6758
  Gene Symbol: GATA4
  Gene Name: GATA binding protein 4
  ENST ID: ENST00000532977
  CDS Start-End: 830-877
caacgtctccctcccacccggctgagaacagcctggaatccctgtgcagagtttgcctcacaccaggccttgagcagccgcagggacgccgctccccaccgcggggacgcatcctgctctgcaccctggttctcggcgctgcgcccgcggaggctcgtgcagggcaggctgcccgtgcgggtgaggactgagtgccgcgcagggaaggagtatcgcagaccggcgcccaggcccagcgggggaatccaagggccgtgttgcaggactcggcattcgttctgcgcgggtcaccttgaatgtctgtccggatccctcgcggcagggccgcagaggcgcgtccatatcttggaggaattcgttccatagaatgaggaccccggctgcggcgaggaggaaggagccagcctagcagcttctgcgcctgtggccgcgggtgtcctggaggcctctcggtgtgacgagtgggggacccgaaggctcgtgcgccacctccaggcctggacgctgccctccgtcttctgcccccaataggtgcgccggaccttcaggccctggggtgaattcagctgctcctacatcagcttccggaaccaccaaaaattcaaattgggattttccggagtaaacaagagcctagagccctttgctcaatgctggatttaatacgtatatatttttaagcgagttggttttttcccctttgatttttgatcttcgcgacagttcctcccacgcatattatcgttgttgccgtcgttttctctccccgcgtggctccttgacctgcgagggagagagaggacaccgaagccgggagctcgcagggaccatgtatcagagcttggccatggccgccaaccacgggccgccccccggt

SEQ ID NO: 136671 - DNA, 1982 bp, Homo sapiens
  Payload ID: 6758
  Gene Symbol: GATA4
  Gene Name: GATA binding protein 4
  ENST ID: ENST00000622443
  CDS Start-End: 1-1326
atgtatcagagcttgccatggccgccaaccacgggccgccccccggtgcctacgaggcgggcggccccggcgccttcatgcacggcgcgggcgccgcgtcctcgccagtctacgtgcccacaccgcggtgccctcctccgtgctgggcctgtcctacctccagggcggaggcgcgggctctgcgtccggagggcctcgggcggcagctccggtggggccgcgtctggtgcggggcccgggacccagcagggcagcccgggatggagccaggcgggagccgacggagccgcttacaccccgccgccggtgtcgccgcgcttctccttcccggggaccaccgggtccctggcggccgccgccgccgctgccgcggcccgggaagctgcggcctacagcagtggcggcggagcggcgggtgcgggcctggcgggccgcgagcagtacgggcgcgccggcttcgcgggctcctactccagcccctacccggcttacatggccgacgtgggcgcgtcctgggccgcagccgccgccgcctccgccggccccttcgacagcccggtcctgcacagcctgcccggccgggccaacccggccgcccgacaccccaatctcgatatgtttgacgacttctcagaaggcagagagtgtgtcaactgtggggctatgtccaccccgctctggaggcgagatgggacgggtcactatctgtgcaacgcctgcggcctctaccacaagatgaacggcatcaaccggccgctcatcaagcctcagcgccggctgtccgcctcccgccgagtgggcctctcctgtgccaactgccagaccaccaccaccacgctgtggcgccgcaatgcggagggcgagcctgtgtgcaatgcctgcggcctctacatgaagctccacggggtccccaggcctcttgcaatgcggaaagaggggatccaaaccagaaaacggaagcccaagaacctgaataaatctaagacaccagcagctccttcaggcagtgagagccttcctcccgccagcggtgcttccagcaactccagcaacgccaccaccagcagcagcgaggagatgcgtcccatcaagacggagcctggcctgtcatctcactacgggcacagcagctccgtgtcccagacgttctcagtcagtgcgatgtctggccatgggccctccatccaccctgtcctctcggccctgaagctctccccacaaggctatgcgtctcccgtcagccagtctccacagaccagctccaagcaggactcttggaacagcctggtcttggccgacagtcacggggacataatcactgcgtaatcttccctcttccctcctcaaattcctgcacggacctgggacttggaggatagcaaagaaggaggccctgggctcccaggggccggcctcctctgcctggtaatgactccagaacaacaactgggaagaaacttgaagtcgacaatctggttaggggaagcgggtgttggattttctcagatgcctttacacgctgatgggactggagggagcccacccttcagcacgagcacactgcatctctcctgtgagttggagacttctttcccaagatgtccttgtcccctgcgttccccactgtggcctagaccgtgggttttgcattgtgtttctagcaccgaggatctgagaacaagcggagggccgggccctgggacccctgctccagcccgaatgacggcatctgtttgccatgtacctggatgcgacgggcccctggggacaggcccttgccccatccatccgcttgaggcatggcaccgccctgcatccctaataccaaatctgactccaaaattgtggggtgtgacatacaagtgactgaacacttcctggggagctacaggggcacttaacccaccacagcacagcctcatcaaaatgcagctggcaacttctcccccaggtgccttccccctgctgccggcctttgctcc

SEQ ID NO: 136672 - DNA, 2595 bp, Homo sapiens
  Payload ID: 6759
  Gene Symbol: GATA5
  Gene Name: GATA binding protein 5
  Uniprot ID: Q9BWX5
  ENST ID: ENST00000252997
  CDS Start-End: 63-1256
ccaccgccaccgccgtgccctgccgccctccctgcccgctggtcaagaccacgcctgggaggatgtaccagagcctggcgctggccgcgagcccccgccaggccgcctacgccgactcgggctccttcctgcacgctccgggcgccggctctccgatgtttgtgccgccggcgcgcgtcccctcgatgctgtcctacctgtccgggtgtgagccgagcccgcagccccccgagctcgctgcgcgccccggctgggcgcagacagccaccgcggattcgtcggccttcggcccgggcagtccgcaccccccagccgcgcacccgcccggggccaccgccttccctttcgcgcacagcccctcggggcccggcagcggcggcagcgcggggggccgagacggcagtgcctaccagggcgcgctgttgcctcgagaacagttcgcggccccgcttgggcggccggtggggacctcgtactccgccacctacccggcctacgtgagccccgacgtggcccagtcctggactgccgggcccttcgatggcagcgtcctgcacggcctcccaggccgcaggcccaccttcgtgtccgacttcttggaggagttcccgggtgagggtcgtgagtgtgtcaactgcggggccctgtccacaccgctgtggcgccgagacggcaccggccactacctgtgcaatgcctgcggcctctaccacaagatgaatggcgtcaaccggccgctcgttcggcctcagaagcgcctgtcctcgtcccgccgcgccggcctctgctgcaccaactgccacacgaccaacaccacgctgtggcggcggaactcggagggggagcccgtgtgcaatgcctgcggcctctacatgaagctgcacggggtgccgcggcctctggctatgaagaaggaaagcatccagacacggaagcggaagccaaagaccatcgccaaggccaggggctcctcaggatccacaaggaatgcctcggcctccccatctgctgtcgccagcactgacagctcagcagccacttcgaaagccaagcccagcctggcgtccccagtgtgccctgggcccagcatggccccccaggcctctggccaggaggatgactctcttgcccccggccacttggagttcaagttcgagcctgaggactttgccttcccctccacggccccaagcccccaggctggcctcaggggggctctgcgccaagaggcctggtgtgcgctggccttggcctaggtccccaggccagcccatgtcaggggaacagcctggaacagaccacccactgagtcacctccgtgcctgctttgctccagcacagcagagaccagcaggccccccaacccagagactgggtctgctggagtctccacacagtggtggggaggccttctggacagacggcagtcgggccccagagcaagaaggctggtgagggaagggctcagcttcccaccccacgtacagcaagggactccccaggtgcggcccaaggctccggaccacactggccccctgcggcggaggccaacgcagggcaccaccaccaccaacttgaattccgtcatcaatgctcaccgtcaatatgtttacaagttgtagcagttgggggaaaacagtcaacctcccagtgtaaaaccaagattcccagtgaagcacctgaggccaagcaggggagaggaatgaggggagcagctggacatgggcctcctgaggcctcggggctgtccttcattgcccacatggatagacggagctgtggtgcagagaacttttcccgcaacaggtgcaggactgccagggatcggagtgcgggccgcgcacggtgccaggattccgccgaggggaagccgctcacattgcagtcatcacagacttacgcacttgtttggacagtttttccagaggggatgggaaagggccttgttctagctgaatctgtgtatcatgaccatttctgacaggcagaatgaattgtctggtagccctgtcctgacccatccaagcgctgttggggctggtggtgacgtggtcacatgtcctggcatatctggggccacgcagtttagtctcttgtcccaggagaattgttagtgacccctctttctcttgcaagccccctccacactgggttggatgataccttaatgagtgacgctggcgagaggcaccctacccgacgcagctgtgaatggccggtgatgtatgtcaggaggccacagggagcagaggagcggggcaggcagccacagggccctgcggggagcacatcctcgcctccgtccggctgctgcccttcaacaacaagccctgatttttccagcaatgccagaaacctggattttaagtcttccaatttgattcaaaaatatttttaacattgtgagccagctagacccccagtgcaccaccccatattgaaaaacagttgtctggcatcagcttcaggagcgggtccggtcattctgaaactgtccctccagaggttcttccagccccacttctatgcgatgtcatcttttctaaaagagacaaatgaagccacagggaaagtgaaataaagccttgaacctca

SEQ ID NO: 136673 - DNA, 3770 bp, Homo sapiens
  Payload ID: 6760
  Gene Symbol: GATA6
  Gene Name: GATA binding protein 6
  Uniprot ID: Q92908
  ENST ID: ENST00000269216
  CDS Start-End: 278-2065
gacccacagcctggcacccttcggcgagcgctgtttgtttagggctcggtgagtccaatcaggagcccaggctgcagttttccggcagagcagtaagaggcgcctcctctctcctttttattcaccagcagcgcggcgcagaccccggactcgcgctcgcccgctggcgccctcggcttctctccgcgcctgggagcaccctccgccgcggccgttctccatgcgcagcgcccgcccgaggagctagacgtcagcttggagcggcgccggaccgtggatggccttgactgacggcggctggtgcttgccgaagcgcttcggggccgcgggtgcggacgccagcgactccagagcctttccagcgcgggagccctccacgccgccttcccccatctcttcctcgtcctcctcctgctcccggggcggagagcggggccccggcggcgccagcaactgcgggacgcctcagctcgacacggaggcggcggccggacccccggcccgctcgctgctgctcagttcctacgcttcgcatcccttcggggctccccacggaccttcggcgcctggggtcgcgggccccgggggcaacctgtcgagctgggaggacttgctgctgttcactgacctcgaccaagccgcgaccgccagcaagctgctgtggtccagccgcggcgccaagctgagccccttcgcacccgagcagccggaggagatgtaccagaccctcgccgctctctccagccagggtccggccgcctacgacggcgcgcccggcggcttcgtgcactctgcggccgcggcggcagcagccgcggcggcggccagctccccggtctacgtgcccaccacccgcgtgggttccatgctgcccggcctaccgtaccacctgcaggggtcgggcagtgggccagccaaccacgcgggcggcgcgggcgcgcaccccggctggcctcaggcctcggccgacagccctccatacggcagcggaggcggcgcggctggcggcggggccgcggggcctggcggcgctggctcagccgcggcgcacgtctcggcgcgcttcccctactctcccagcccgcccatggccaacggcgccgcgcgggagccgggaggctacgcggcggcgggcagtgggggcgcgggaggcgtgagcggcggcggcagtagcctggcggccatgggcggccgcgagccccagtacagctcgctgtcggccgcgcggccgctgaacgggacgtaccaccaccaccaccaccaccaccaccaccatccgagcccctactcgccctacgtgggggcgccactgacgcctgcctggcccgccggacccttcgagaccccggtgctgcacagcctgcagagccgcgccggagccccgctcccggtgccccggggtcccagtgcagacctgctggaggacctgtccgagagccgcgagtgcgtgaactgcggctccatccagacgccgctgtggcggcgggacggcaccggccactacctgtgcaacgcctgcgggctctacagcaagatgaacggcctcagccggcccctcatcaagccgcagaagcgcgtgccttcatcacggcggcttggattgtcctgtgccaactgtcacaccacaactaccaccttatggcgcagaaacgccgagggtgaacccgtgtgcaatgcttgtggactctacatgaaactccatggggtgcccagaccacttgctatgaaaaaagagggaattcaaaccaggaaacgaaaacctaagaacataaataaatcaaagacttgctctggtaatagcaataattccattcccatgactccaacttccacctcttctaactcagatgattgcagcaaaaatacttcccccacaacacaacctacagcctcaggggcgggtgccccggtgatgactggtgcgggagagagcaccaatcccgagaacagcgagctcaagtattcgggtcaagatgggctctacataggcgtcagtctcgcctcgccggccgaagtcacgtcctccgtgcgaccggattcctggtgcgccctggccctggcctgagcccacgccgccaggaggcagggagggctccgccgcgggcctcactccactcgtgtctgcttttgtgcagcggtccagacagtggcgactgcgctgacagaacgtgattctcgtgcctttattttgaaagagatgtttttcccaagaggcttgctgaaagagtgagagaagatggaagggaagggccagtgcaactgggcgcttgggccactccagccagcccgcctccggggcggaccctgctccacttccagaagccaggactaggacctgggccttgcctgctatggaatattgagagagattttttaaaaaagattttgcattttgtccaaaatcatgtgcttcttctgatcaattttggttgttccagaatttcttcataccttttccacatccagatttcatgtgcgttcatggagaagatcacttgaggccatttggtacacatctctggaggctgagtcggttcatgaggtctcttatcaaaaatattactcagtttgcaagactgcattgtaactttaacatacactgtgactgacgtttctcaaagttcatattgtgtggctgatctgaagtcagtcggaatttgtaaacagggtagcaaacaagatatttttcttccatgtatacaataatttttttaaaaagtgcaatttgcgttgcagcaatcagtgttaaatcatttgcataagatttaacagcattttttataatgaatgtaaacattttaacttaatggtacttaaaataatttaaaagaaaaatgttaacttagacattcttatgcttcttttacaactacatcccattttatatttccaattgttaaagaaaaatatttcaagaacaaatcttctctcaggaaaattgcctttctctatttgttaagaatttttatacaagaacaccaatataccccctttattttactgtggaatatgtgctggaaaaattgcaacaacactttactacctaacggatagcatttgtaaatactctaggtatctgtaaacactctgatgaagtctgtatagtgtgactaacccacaggcaggttggtttacattaatttttttttttgaatgggatgtcctatggaaacctatttcaccagagttttaaaaataaaaagggtattgttttgtcttctgtacagtgagttccttcccttttcaaagctttctttttatgctgtatgtgactatagatattcatataaaacaagtgcacgtgaagtttgcaaaatgctttaaggccttcctttcaaagcatagtccttttggagccgttttgtaccttttataccttggcttatttgaagttgacacatggggttagttactactctccatgtgcattggggacagtttttataagtgggaaggactcagtattattatatttgagatgataagcattttgtttgggaacaatgcttaaaaatattccagaaagttcagattttttttctttgtgaatgaaatatattctggcccacgaacagggcgatttcctttcagttttttccttttgcaacgtgccttgaagtctcaaagctcacctgaggttgcagacgttacccccaacagaagataggtagaaatgattccagtggcctctttgtattttcttcattgttgagtagatttcaggaaatcaggaggtgtttcacaatacagaatgatggcctttaactgtg

SEQ ID NO: 136674 - DNA, 2057 bp, Homo sapiens
  Payload ID: 6760
  Gene Symbol: GATA6
  Gene Name: GATA binding protein 6
  Uniprot ID: Q92908
  ENST ID: ENST00000581694
  CDS Start-End: 213-2000
attgatctccacgcccggggcagaaataggatctttgagaagtctcaaatgggatctttgagaagtcagatcccatttgaactagaaaaaggagtggaggcgaggtagcgtgcagcctacgctcttgttaacccgtcgatctcctaccatacccgtctcccccaccccacctcaggagctagacgtcagcttggagcggcgccggaccgtggatggccttgactgacggcggctggtgcttgccgaagcgcttcggggccgcgggtgcggacgccagcgactccagagcctttccagcgcgggagccctccacgccgccttcccccatctcttcctcgtcctcctcctgctcccggggcggagagcggggccccggcggcgccagcaactgcgggacgcctcagctcgacacggaggcggcggccggacccccggcccgctcgctgctgctcagttcctacgcttcgcatcccttcggggctccccacggaccttcggcgcctggggtcgcgggccccgggggcaacctgtcgagctgggaggacttgctgctgttcactgacctcgaccaagccgcgaccgccagcaagctgctgtggtccagccgcggcgccaagctgagccccttcgcacccgagcagccggaggagatgtaccagaccctcgccgctctctccagccagggtccggccgcctacgacggcgcgcccggcggcttcgtgcactctgcggccgcggcggcagcagccgcggcggcggccagctccccggtctacgtgcccaccacccgcgtgggttccatgctgcccggcctaccgtaccacctgcaggggtcgggcagtgggccagccaaccacgcgggcggcgcgggcgcgcaccccggctggcctcaggcctcggccgacagccctccatacggcagcggaggcggcgcggctggcggcggggccgcggggcctggcggcgctggctcagccgcggcgcacgtctcggcgcgcttcccctactctcccagcccgcccatggccaacggcgccgcgcgggagccgggaggctacgcggcggcgggcagtgggggcgcgggaggcgtgagcggcggcggcagtagcctggcggccatgggcggccgcgagccccagtacagctcgctgtcggccgcgcggccgctgaacgggacgtaccaccaccaccaccaccaccaccaccaccatccgagcccctactcgccctacgtgggggcgccactgacgcctgcctggcccgccggacccttcgagaccccggtgctgcacagcctgcagagccgcgccggagccccgctcccggtgccccggggtcccagtgcagacctgctggaggacctgtccgagagccgcgagtgcgtgaactgcggctccatccagacgccgctgtggcggcgggacggcaccggccactacctgtgcaacgcctgcgggctctacagcaagatgaacggcctcagccggcccctcatcaagccgcagaagcgcgtgccttcatcacggcggcttggattgtcctgtgccaactgtcacaccacaactaccaccttatggcgcagaaacgccgagggtgaacccgtgtgcaatgcttgtggactctacatgaaactccatggggtgcccagaccacttgctatgaaaaaagagggaattcaaaccaggaaacgaaaacctaagaacataaataaatcaaagacttgctctggtaatagcaataattccattcccatgactccaacttccacctcttctaactcagatgattgcagcaaaaatacttcccccacaacacaacctacagcctcaggggcgggtgccccggtgatgactggtgcgggagagagcaccaatcccgagaacagcgagctcaagtattcgggtcaagatgggctctacataggcgtcagtctcgcctcgccggccgaagtcacgtcctccgtgcgaccggattcctggtgcgccctggccctggcctgagcccacgccgccaggaggcagggagggctccgccgcgggcctcactccactcgtgtc

SEQ ID NO: 136675 - DNA, 3361 bp, Homo sapiens
  Payload ID: 6761
  Gene Symbol: GATAD1
  Gene Name: GATA zinc finger domain containing 1
  Uniprot ID: Q8WUU5
  ENST ID: ENST00000287957
  CDS Start-End: 278-1087
tccgcgtcccccccaccccggccagatccctttcccagtcctgcttcccagtgcctcgggccagggaatcctggcctccgcctgcggagccggcggaacccgcttcccgcctccacggggcagcgccagcggcctggtcctttcaccggcagctccgtgccgacgctctcaccgctcttcctatcgccgggagtggcgggccgaccagggggcggccgggctaccgtccgccattcccgtgtctctgcgcccgcgggggccgcccgagccggccaccatgccgctgggcctgaagcccacctgcagcgtatgcaagaccacgtcgtcctccatgtggaagaagggagcgcagggggagatcctctgccatcattgcactggccggggcggcgcgggcagcgggggcgcaggctcgggggcggctggagggactgggggcagcggcggcggcggcttcggcgcggcgaccttcgccagcacctccgccacccctccgcagagcaacgggggcgggggcggcaagcagagtaagcaggaaattcacaggaggtctgctcggctcagaaacactaaatacaaatctgctccggctgctgaaaagaaagtctccaccaaaggaaaagggagaagacatatatttaaattgaaaaatcccatcaaagctcctgagtcagtttccactataatcactgcagaatcaatcttctacaagggagtatattaccaaattggtgatgttgtttctgtgattgatgaacaagatggaaagccctactatgctcaaatcagaggttttatccaggaccagtattgcgagaagagtgcagcactgacgtggctcattcctaccctctctagccccagagaccaatttgatcccgcctcctatatcatagggccagaggaagatcttccaaggaagatggaatacttggaatttgtttgtcatgcaccttctgagtatttcaagtcacggtcatcaccatttcccacagttcccaccagaccagagaagggctacatatggactcatgttgggcctactcctgcaataacaattaaggaatcagttgccaaccatttgtagttcacaaattaaaactgggtttccaggcctggtgtggtggctcacgcctgtagccccagctattgcaccactgctctccaagctgggcaatggagtcagattctctttcttaaaaaaccacaaaaaaactggatttccagttctctaatattcttagtaccacaagatatgtcataggtatctttaaatgaaattcttagctggaaaagtgactaaaaagtttttctcctgctacctagtaataaacaaatcattgtttattactggtcacttagaaaattaaaagggatagggccaggcacagtggcttatgcctgtaattgcagcacttttagaggccgaggcaggcggatcacctgaggtcgggaagtggatcgcctgaggtcaggagttcgagaccagcctggccaacatggcgaaaccccgtcgctactaaaaatacaaaaattagccaggtgtggtggcatgtgcctgtaatcccagctatttgggaggctgaggcaggagaatcgcctaaacccaggaggtggaggttgtagtgagccaagattgcaccgctgtgctccagcctgggcaacagagtgagactcttgtctcggaaaaaaaaaaaaaaaaaaaaggctgggcacagtggctcacgcctttaatcccagcactttgggaggctgaggcagatggatcgcctgaggttgggagttcgagaccagcctggccagcatggtgaaaccctgtctctactaaaaatacaaaaattagccaggtgtggtggcgcacacctgtagtcccagctactcgggaggctgaggcaggagaattggttgaacccaggaggcggaggttgcagtgagcagagatcgtgccactgcactccagcctgggtggacagagcaagactccgtctcaaagaaacaaacaaaaaattaaaagggatagaatataatgaaatatattttgaacttaaattatattctatatgtgtatcttcctaggcaaaagctgtaatttccagagagaccattaggaacaggtagtatctatttttctccattatttatttctagaaactcataaaatggattgtatttttctataagaacaaaatattaattaaggtatagatgactgaccaagggcttaatcaaataaaatgactaacagcatctatcataaagccacacaagccttatgttctcatctcaaaaatgctgtgacagctttttggctgctttaaccataagaaaaatgattggtggatgattttattagcccaggcttttaaaaactttcatctaggccacgtgcggtggctcatgcctgtaatcccggcactttgggaggcctgagtggatggatcacttgaggtcaggagttcaggaccagcctggccaacatgatgaaaccctgtctctactaaatatacaaaaattagttgggtgttatggtgcatgcctgtaatcccagctactcgggaggctgaggcaggagaattgcttgaactcgggaggtggagattgcagtaagccgagatcgtgccactgcactccagcctgggtgatagagcaagactgtctcaaaaaagaaaaaaaagaaaaaattttaatttaatccttctgtagaaacaggcattcagaaccattccattgatcttaataaagctgctctttactgtttctagtcaaaaatgagacttcgatcaaaccataagattttatactgcagatagtcagcttcaccaaagccgcagaggaaacatgtcgagatcaggcttcctgcttgatagtctcttgactaccattaaaacgaatattgggaggtcatgaaagtcattggtaggccattagcattgatatctttaaaacatctaccctaaaccatctgctatggacccataataagaggcctgttgtatatgaaattgtctagaattcaggtgcaggtctttgccggttaagtaagggagcaacacgtaaaatgggagaggagtggggtgtactcacttgcctcctcttttgtcctgatttaaccagcatttttcaaccctgggaaaatttgcagaatctaagttgattgtaatgattttgagctgcagcagctttaactcttaccctttttccacatagttatggtgtttgagttggaaagaaacaactataggtagctacacgtacataattatctctttattcacaaagggtatagtaaaattgattgtaaataactttctaagtgccaatattcaaaacttttggattaaaatgtatttttcaccgtgca

SEQ ID NO: 136676 - DNA, 5510 bp, Homo sapiens
  Payload ID: 6762
  Gene Symbol: GATAD2A
  Gene Name: GATA zinc finger domain containing 2A
  Uniprot ID: Q86YP4
  ENST ID: ENST00000358713
  CDS Start-End: 156-2057
gtgcataccaagcccatactgtttgctctacactgaaaatgaagatgaatggtgaaaaaaagtttctgccattgagagcttaacattgagttgcagtgagagatgaagctcctgagtggcacggagattgttgccagggctctggtgagttcagaatgaccgaagaagcatgccgaacacggagtcagaaacgagcgcttgaacgggacccaacagaggacgatgtggagagcaagaaaataaaaatggagagaggattgttggcttcagatttaaacactgacggagacatgagggtgacacctgagccgggagcaggtccaacccaaggattgctgagggcaacagaggccacggccatggccatgggcagaggcgaagggctggtgggcgatgggcccgtggacatgcgcacctcacacagtgacatgaagtccgagaggagacccccctcacctgacgtgattgtgctctccgacaacgagcagccctcgagcccgagagtgaatgggctgaccacggtggccttgaaggagactagcaccgaggccctcatgaaaagcagtcctgaagaacgagaaaggatgatcaagcagctgaaggaagaattgaggttagaagaagcaaaactcgtgttgttgaaaaagttgcggcagagtcaaatacaaaaggaagccaccgcccagaagcccacaggttctgttgggagcaccgtgaccacccctcccccgcttgttcggggcactcagaacattcctgctggcaagccatcactccagacctcttcagctcggatgcccggcagtgtcatacccccgcccctggtccgaggtgggcagcaggcgtcctcgaagctggggccacaggcgagctcacaggtcgtcatgcccccactcgtcaggggggctcagcaaatccacagcattaggcaacattccagcacagggccaccgcccctcctcctggccccccgggcgtcggtgcccagtgtgcagattcagggacagaggatcatccagcagggcctcatccgcgtcgccaatgttcccaacaccagcctgctcgtcaacatcccacagcccaccccagcatcactgaaggggacaacagccacctccgctcaggccaactccacccccactagtgtggcctctgtggtcacctctgccgagtctccagcaagccgacaggcggccgccaagctggcgctgcgcaaacagctggagaagacgctactcgagatccccccacccaagcccccagccccagagatgaacttcctgcccagcgccgccaacaacgagttcatctacctggtcggcctggaggaggtggtgcagaacctactggagacacaaggcaggatgtcggccgccactgtgctgtcccgggagccctacatgtgtgcacagtgcaagacggacttcacgtgccgctggcgggaggagaagagcggcgccatcatgtgtgagaactgcatgacaaccaaccagaagaaggcgctcaaggtggagcacaccagccggctgaaggccgcctttgtgaaggcgctgcagcaggaacaggagattgagcagcggctcctgcagcagggcacggcccctgcacaggccaaggccgagcccaccgctgccccacaccccgtgctgaagcaggtcataaaaccccggcgtaagttggcgttccgctcaggagaggcccgcgactggagtaacggggctgtgctacaggcctccagccagctgtcccggggttcggccacgacgccccgaggtgtcctgcacacgttcagtccgtcacccaaactgcagaactcagcctcggccacagccctggtcagcaggaccggcagacattctgagagaaccgtgagcgccggcaagggcagcgccacctccaactggaagaagacgcccctcagcacaggcgggacccttgcgtttgtcagcccaagcctggcggtgcacaagagctcctcggccgtggaccgccagcgagagtacctcctggacatgatcccaccccgctccatcccccagtcagccacgtggaaatagtgcgagccaggccccgtggaagacgggctccctcctcccccacctggcccctggtctagaaggacccactgcaccaccctccgctggctcgggaagacaccgtgcccgccccaagagcaagcaccggccatgctgcagaggcaagacctcaattcttggctgcaaagtttcatcagggctagggggctggtgccgcctcataggcagacgaggatcatcgctgggggacctttcccgtgggctttcttcctttctctctttgcctttagtttgcccgacaccagcagaaaagtggaccttgggggctggttctgctcctggcccccttgttcagcccctgccggcacacgggcggctcaccctggacactgtgatgcgcatgggcaaggccagcgcccggggcttctgaaccgagcggggtgtttcatttttttgcttttccctgtcttaggctcccagtctttgactgccttcccatggcgatctataagttgaaagattttttttttttttaatcacctcatgatgatggagttaaaagtaaaccgtgcagaccctggggtccctgttgtacgctgcatcatcccgctggccctgtgccctggagggtgggcggctcatggtgccacagcccctggcagggacggccggcccgcccccgtgactgactgacagatgcagggatggccgaggcagccctcgctccagctgaacgcctccattgctgcttgttctggagacccccgcccccgcaccttccagacttagcagaagaacaaactgaagaacagacccagccagagaagcagggattccagaagctgcccattaagggagaaggagaggatccggtcggcagcagccctgagcagaaagctggaggggggactgtcgcggggtttttctgttgtggtttattttattaaattttttccttttttctattcatttcgatggacgcaatcttaagccaccctggccttgctcctgggaggtgagcgtgcacaggtgtgtgcaggtcaggaggtgccgtccaggtgtgcggcgagccgctgcgcacagatgtcaggatttccgtttgggtctagtttagaacctgtccttaaacctaggggttgctgtcaggatttgctttcagactttttttttttttgtaattccctttagagtctacaaaaatgtttttaaaaggatcaggtctgcttttagtttcatttttgtttctttcccgtcccactctttaaaaactggttccgtgaggaaaggcagaagccgttccgtgtctcttgcaggctgggccggcttcatgccagtgcgagggcgtcccgtgcccacgtacatacgtatgtctccatgagttctgggctccactggttccaattgagctccagccctggttttcctacccatgcagttagggactttaatttaattttttttttgtagggccaccgccttcaaacacaactgctacaacattctaataaaggctcatttaacccccaggctcctgtcgtgtgaatatcctcagtctgtaggaaactttttttgacacagcatagaagacctagttttggaaaacattatctaattttttgttgtgcaaatccccaaatttctcactaatttttgtttttttgtgcataacttggatgggctgaaggaggtgaggacagattggggaagggtggctttcattccaagatccagggatttggggaaaaggaaggaatttgatgttttttggggtgggaggggagggtgtgttttttacaccaaaaaaaaaaaaaaaaatcaagagtatgcaagcatttctattcctcgcatttttctgtgtgcctggcaaataaatacctgtctcctacgaccctgagctgttagccctctctgttccatgacaggggccagatcttccagctcctcccagaaggagcacccaggctggcttcttcccactgaaagccctccccagcgaaccaacctcagttctatgcagtggctggggatcaggcatccagaccgaagtcacctctgcctgctccagcttgggtcagctgggtctgaccagggggccagatccgagccgcacctgccggcccccagccccagctccagctcctgacctctcccagcctggcctggctgttcctccagggctgatggctgtcaacccatccttgtgagttcatatggactgctgcccctcgaaagggagagggtcggccccatgtccccagggagcattccatcagggacaacgtacatactgtgatgtaaactttttttttttccccccagggggcaaaagtgtgagatgccttaatctttccttcatttctgctgtctcgaacactctagcccattatttcctttcagttccttgcagcataacctctacgataagccccaagcgggttgttgtattatgacgtttatgatgttccaggtgaaggcattattaagtacctctctgggtgtggggtttggacgcaccaggatagctattgattaatgttaagggtgttctacccacagcaaagcacaccctcttaaaccaggcactgcctgggtcctggtcccgagagccctaccaggatcaggttcctgcaagccgtcagaatgtgggagcccccagcccaactgattgtaactgtcccctgttacctgtgacatgaacctccaacagcacctggaaacggttccctctgtcagctgctctgtagacagggctggggagatctcagagttcacacctcgcctgttgtaggggaggttgggggtagggtttggaatggccaagtgcccttggaacctcccacagctatggccgtcctgacctcatcccaggaactctacggtgaccaggaaccacccctctgacgaggtctgtagcggcccttctcagagtggaacagcccacagtgctagttgtgcctggtcttacctgtactccacggacctcggtgaagcaaaagcttcagggcagagggaatgaggcaacccagtggcagccccgctgggccccgtggctcctgctctcctattggacgtagaggcaggggagagacttctctatacaaatattctcatcacagaagggatgatccttgctgctctgccgtagggtttttgatgctgagctatgctgcacatgacgttaacctaaagaacttggactgagcttttaaaaaaggacagcaaacaattttataatccttaaagtgtaatagacggttacactagtgcagggtattggggaggctctttgggtgtggaggctgtcacttgtatttattgtgactctaaatctttgatagtaaaacaaatgtaaaaagaaatgtttgccaccagatgggaatagaagttccaataagcaggctggaatgggtggctatacgttgtatcacgaggaagttttagactctgaaggataataaatggatgatgtgtcaa

SEQ ID NO: 136677 - DNA, 5671 bp, Homo sapiens
  Payload ID: 6762
  Gene Symbol: GATAD2A
  Gene Name: GATA zinc finger domain containing 2A
  Uniprot ID: Q86YP4
  ENST ID: ENST00000360315
  CDS Start-End: 313-2214
gggcaatttcagtgtgagactgagccgcgagactgagctgcggctccgagcgctgcgcggcggctcctcccgcccagggtcagcgccccggcgcgcgcacgcgcacccccgccgcccgagcgcgccccgcgccgcccgcgcagtcggtcggtcggtcgtctgtcctgtcgccgctgccgccgccgccacagcggccgccgcgggcgccacctgagggagtcgcctccgcgggacgccacaagacctgaccggactgcgccgcccgaggccgtcggccgccgtcagcgagggcgccgagcaacttcgttcagaatgaccgaagaagcatgccgaacacggagtcagaaacgagcgcttgaacgggacccaacagaggacgatgtggagagcaagaaaataaaaatggagagaggattgttggcttcagatttaaacactgacggagacatgagggtgacacctgagccgggagcaggtccaacccaaggattgctgagggcaacagaggccacggccatggccatgggcagaggcgaagggctggtgggcgatgggcccgtggacatgcgcacctcacacagtgacatgaagtccgagaggagacccccctcacctgacgtgattgtgctctccgacaacgagcagccctcgagcccgagagtgaatgggctgaccacggtggccttgaaggagactagcaccgaggccctcatgaaaagcagtcctgaagaacgagaaaggatgatcaagcagctgaaggaagaattgaggttagaagaagcaaaactcgtgttgttgaaaaagttgcggcagagtcaaatacaaaaggaagccaccgcccagaagcccacaggttctgttgggagcaccgtgaccacccctcccccgcttgttcggggcactcagaacattcctgctggcaagccatcactccagacctcttcagctcggatgcccggcagtgtcatacccccgcccctggtccgaggtgggcagcaggcgtcctcgaagctggggccacaggcgagctcacaggtcgtcatgcccccactcgtcaggggggctcagcaaatccacagcattaggcaacattccagcacagggccaccgcccctcctcctggccccccgggcgtcggtgcccagtgtgcagattcagggacagaggatcatccagcagggcctcatccgcgtcgccaatgttcccaacaccagcctgctcgtcaacatcccacagcccaccccagcatcactgaaggggacaacagccacctccgctcaggccaactccacccccactagtgtggcctctgtggtcacctctgccgagtctccagcaagccgacaggcggccgccaagctggcgctgcgcaaacagctggagaagacgctactcgagatccccccacccaagcccccagccccagagatgaacttcctgcccagcgccgccaacaacgagttcatctacctggtcggcctggaggaggtggtgcagaacctactggagacacaaggcaggatgtcggccgccactgtgctgtcccgggagccctacatgtgtgcacagtgcaagacggacttcacgtgccgctggcgggaggagaagagcggcgccatcatgtgtgagaactgcatgacaaccaaccagaagaaggcgctcaaggtggagcacaccagccggctgaaggccgcctttgtgaaggcgctgcagcaggaacaggagattgagcagcggctcctgcagcagggcacggcccctgcacaggccaaggccgagcccaccgctgccccacaccccgtgctgaagcaggtcataaaaccccggcgtaagttggcgttccgctcaggagaggcccgcgactggagtaacggggctgtgctacaggcctccagccagctgtcccggggttcggccacgacgccccgaggtgtcctgcacacgttcagtccgtcacccaaactgcagaactcagcctcggccacagccctggtcagcaggaccggcagacattctgagagaaccgtgagcgccggcaagggcagcgccacctccaactggaagaagacgcccctcagcacaggcgggacccttgcgtttgtcagcccaagcctggcggtgcacaagagctcctcggccgtggaccgccagcgagagtacctcctggacatgatcccaccccgctccatcccccagtcagccacgtggaaatagtgcgagccaggccccgtggaagacgggctccctcctcccccacctggcccctggtctagaaggacccactgcaccaccctccgctggctcgggaagacaccgtgcccgccccaagagcaagcaccggccatgctgcagaggcaagacctcaattcttggctgcaaagtttcatcagggctagggggctggtgccgcctcataggcagacgaggatcatcgctgggggacctttcccgtgggctttcttcctttctctctttgcctttagtttgcccgacaccagcagaaaagtggaccttgggggctggttctgctcctggcccccttgttcagcccctgccggcacacgggcggctcaccctggacactgtgatgcgcatgggcaaggccagcgcccggggcttctgaaccgagcggggtgtttcatttttttgcttttccctgtcttaggctcccagtctttgactgccttcccatggcgatctataagttgaaagattttttttttttttaatcacctcatgatgatggagttaaaagtaaaccgtgcagaccctggggtccctgttgtacgctgcatcatcccgctggccctgtgccctggagggtgggcggctcatggtgccacagcccctggcagggacggccggcccgcccccgtgactgactgacagatgcagggatggccgaggcagccctcgctccagctgaacgcctccattgctgcttgttctggagacccccgcccccgcaccttccagacttagcagaagaacaaactgaagaacagacccagccagagaagcagggattccagaagctgcccattaagggagaaggagaggatccggtcggcagcagccctgagcagaaagctggaggggggactgtcgcggggtttttctgttgtggtttattttattaaattttttccttttttctattcatttcgatggacgcaatcttaagccaccctggccttgctcctgggaggtgagcgtgcacaggtgtgtgcaggtcaggaggtgccgtccaggtgtgcggcgagccgctgcgcacagatgtcaggatttccgtttgggtctagtttagaacctgtccttaaacctaggggttgctgtcaggatttgctttcagactttttttttttttgtaattccctttagagtctacaaaaatgtttttaaaaggatcaggtctgcttttagtttcatttttgtttctttcccgtcccactctttaaaaactggttccgtgaggaaaggcagaagccgttccgtgtctcttgcaggctgggccggcttcatgccagtgcgagggcgtcccgtgcccacgtacatacgtatgtctccatgagttctgggctccactggttccaattgagctccagccctggttttcctacccatgcagttagggactttaatttaattttttttttgtagggccaccgccttcaaacacaactgctacaacattctaataaaggctcatttaacccccaggctcctgtcgtgtgaatatcctcagtctgtaggaaactttttttgacacagcatagaagacctagttttggaaaacattatctaattttttgttgtgcaaatccccaaatttctcactaatttttgtttttttgtgcataacttggatgggctgaaggaggtgaggacagattggggaagggtggctttcattccaagatccagggatttggggaaaaggaaggaatttgatgttttttggggtgggaggggagggtgtgttttttacaccaaaaaaaaaaaaaaaaatcaagagtatgcaagcatttctattcctcgcatttttctgtgtgcctggcaaataaatacctgtctcctacgaccctgagctgttagccctctctgttccatgacaggggccagatcttccagctcctcccagaaggagcacccaggctggcttcttcccactgaaagccctccccagcgaaccaacctcagttctatgcagtggctggggatcaggcatccagaccgaagtcacctctgcctgctccagcttgggtcagctgggtctgaccagggggccagatccgagccgcacctgccggcccccagccccagctccagctcctgacctctcccagcctggcctggctgttcctccagggctgatggctgtcaacccatccttgtgagttcatatggactgctgcccctcgaaagggagagggtcggccccatgtccccagggagcattccatcagggacaacgtacatactgtgatgtaaactttttttttttccccccagggggcaaaagtgtgagatgccttaatctttccttcatttctgctgtctcgaacactctagcccattatttcctttcagttccttgcagcataacctctacgataagccccaagcgggttgttgtattatgacgtttatgatgttccaggtgaaggcattattaagtacctctctgggtgtggggtttggacgcaccaggatagctattgattaatgttaagggtgttctacccacagcaaagcacaccctcttaaaccaggcactgcctgggtcctggtcccgagagccctaccaggatcaggttcctgcaagccgtcagaatgtgggagcccccagcccaactgattgtaactgtcccctgttacctgtgacatgaacctccaacagcacctggaaacggttccctctgtcagctgctctgtagacagggctggggagatctcagagttcacacctcgcctgttgtaggggaggttgggggtagggtttggaatggccaagtgcccttggaacctcccacagctatggccgtcctgacctcatcccaggaactctacggtgaccaggaaccacccctctgacgaggtctgtagcggcccttctcagagtggaacagcccacagtgctagttgtgcctggtcttacctgtactccacggacctcggtgaagcaaaagcttcagggcagagggaatgaggcaacccagtggcagccccgctgggccccgtggctcctgctctcctattggacgtagaggcaggggagagacttctctatacaaatattctcatcacagaagggatgatccttgctgctctgccgtagggtttttgatgctgagctatgctgcacatgacgttaacctaaagaacttggactgagcttttaaaaaaggacagcaaacaattttataatccttaaagtgtaatagacggttacactagtgcagggtattggggaggctctttgggtgtggaggctgtcacttgtatttattgtgactctaaatctttgatagtaaaacaaatgtaaaaagaaatgtttgccaccagatgggaatagaagttccaataagcaggctggaatgggtggctatacgttgtatcacgaggaagttttagactctgaaggataataaatggatgatgtgtcaactgg

SEQ ID NO: 136678 - DNA, 5776 bp, Homo sapiens
  Payload ID: 6762
  Gene Symbol: GATAD2A
  Gene Name: GATA zinc finger domain containing 2A
  Uniprot ID: Q86YP4
  ENST ID: ENST00000404158
  CDS Start-End: 419-2323
attctatgggttttcttcagtccctggacagatggagtcttattctgtcgccaggctggagtgcagtggtatgatcttggctcactgcagcctccgcctcccaggttcaagcgattctcctgcctcagcctgctgagtagctgcgactacaggcgtgcgtcaccacacccagctaatttttgtatttttaatagggacatttttagtatttttagggttttaccatgttggccaggatggactcgatctcctgacctcatgatccacctgcctcagcctctcaaagtgctgggactacaggtgtgagccaccgtacccagcctcgaaggttggtcagcacattgtctcaagtagccttttgatgtcactgtggccatggccaactggtaggaccagcaccccataccccgaagccagaatgaccgaagaagcatgccgaacacggagtcagaaacgagcgcttgaacgggacccaacagaggacgatgtggagagcaagaaaataaaaatggagagaggattgttggcttcagatttaaacactgacggagacatgagggtgacacctgagccgggagcaggtccaacccaaggattgctgagggcaacagaggccacggccatggccatgggcagaggcgaagggctggtgggcgatgggcccgtggacatgcgcacctcacacagtgacatgaagtccgagaggagacccccctcacctgacgtgattgtgctctccgacaacgagcagccctcgagcccgagagtgaatgggctgaccacggtggccttgaaggagactagcaccgaggccctcatgaaaagcagtcctgaagaacgagaaaggatgatcaagcagctgaaggaagaattgaggttagaagaagcaaaactcgtgttgttgaaaaagttgcggcagagtcaaatacaaaaggaagccaccgcccagaagcccacaggttctgttgggagcaccgtgaccacccctcccccgcttgttcggggcactcagaacattcctgctggcaagccatcactccagacctcttcagctcggatgcccggcagtgtcatacccccgcccctggtccgaggtgggcagcaggcgtcctcgaagctggggccacaggcgagctcacaggtcgtcatgcccccactcgtcaggggggctcagcaaatccacagcattaggcaacattccagcacagggccaccgcccctcctcctggccccccgggcgtcggtgcccagtgtgcagattcagggacagaggatcatccagcagggcctcatccgcgtcgccaatgttcccaacaccagcctgctcgtcaacatcccacagcccaccccagcatcactgaaggggacaacagccacctccgctcaggccaactccacccccactagtgtggcctctgtggtcacctctgccgagtctccagcaagccgacaggcggccgccaagctggcgctgcgcaaacagctggagaagacgctactcgagatccccccacccaagcccccagccccagagatgaacttcctgcccagcgccgccaacaacgagttcatctacctggtcggcctggaggaggtggtgcagaacctactggagacacaagcaggcaggatgtcggccgccactgtgctgtcccgggagccctacatgtgtgcacagtgcaagacggacttcacgtgccgctggcgggaggagaagagcggcgccatcatgtgtgagaactgcatgacaaccaaccagaagaaggcgctcaaggtggagcacaccagccggctgaaggccgcctttgtgaaggcgctgcagcaggaacaggagattgagcagcggctcctgcagcagggcacggcccctgcacaggccaaggccgagcccaccgctgccccacaccccgtgctgaagcaggtcataaaaccccggcgtaagttggcgttccgctcaggagaggcccgcgactggagtaacggggctgtgctacaggcctccagccagctgtcccggggttcggccacgacgccccgaggtgtcctgcacacgttcagtccgtcacccaaactgcagaactcagcctcggccacagccctggtcagcaggaccggcagacattctgagagaaccgtgagcgccggcaagggcagcgccacctccaactggaagaagacgcccctcagcacaggcgggacccttgcgtttgtcagcccaagcctggcggtgcacaagagctcctcggccgtggaccgccagcgagagtacctcctggacatgatcccaccccgctccatcccccagtcagccacgtggaaatagtgcgagccaggccccgtggaagacgggctccctcctcccccacctggcccctggtctagaaggacccactgcaccaccctccgctggctcgggaagacaccgtgcccgccccaagagcaagcaccggccatgctgcagaggcaagacctcaattcttggctgcaaagtttcatcagggctagggggctggtgccgcctcataggcagacgaggatcatcgctgggggacctttcccgtgggctttcttcctttctctctttgcctttagtttgcccgacaccagcagaaaagtggaccttgggggctggttctgctcctggcccccttgttcagcccctgccggcacacgggcggctcaccctggacactgtgatgcgcatgggcaaggccagcgcccggggcttctgaaccgagcggggtgtttcatttttttgcttttccctgtcttaggctcccagtctttgactgccttcccatggcgatctataagttgaaagattttttttttttttaatcacctcatgatgatggagttaaaagtaaaccgtgcagaccctggggtccctgttgtacgctgcatcatcccgctggccctgtgccctggagggtgggcggctcatggtgccacagcccctggcagggacggccggcccgcccccgtgactgactgacagatgcagggatggccgaggcagccctcgctccagctgaacgcctccattgctgcttgttctggagacccccgcccccgcaccttccagacttagcagaagaacaaactgaagaacagacccagccagagaagcagggattccagaagctgcccattaagggagaaggagaggatccggtcggcagcagccctgagcagaaagctggaggggggactgtcgcggggtttttctgttgtggtttattttattaaattttttccttttttctattcatttcgatggacgcaatcttaagccaccctggccttgctcctgggaggtgagcgtgcacaggtgtgtgcaggtcaggaggtgccgtccaggtgtgcggcgagccgctgcgcacagatgtcaggatttccgtttgggtctagtttagaacctgtccttaaacctaggggttgctgtcaggatttgctttcagactttttttttttttgtaattccctttagagtctacaaaaatgtttttaaaaggatcaggtctgcttttagtttcatttttgtttctttcccgtcccactctttaaaaactggttccgtgaggaaaggcagaagccgttccgtgtctcttgcaggctgggccggcttcatgccagtgcgagggcgtcccgtgcccacgtacatacgtatgtctccatgagttctgggctccactggttccaattgagctccagccctggttttcctacccatgcagttagggactttaatttaattttttttttgtagggccaccgccttcaaacacaactgctacaacattctaataaaggctcatttaacccccaggctcctgtcgtgtgaatatcctcagtctgtaggaaactttttttgacacagcatagaagacctagttttggaaaacattatctaattttttgttgtgcaaatccccaaatttctcactaatttttgtttttttgtgcataacttggatgggctgaaggaggtgaggacagattggggaagggtggctttcattccaagatccagggatttggggaaaaggaaggaatttgatgttttttggggtgggaggggagggtgtgttttttacaccaaaaaaaaaaaaaaaaatcaagagtatgcaagcatttctattcctcgcatttttctgtgtgcctggcaaataaatacctgtctcctacgaccctgagctgttagccctctctgttccatgacaggggccagatcttccagctcctcccagaaggagcacccaggctggcttcttcccactgaaagccctccccagcgaaccaacctcagttctatgcagtggctggggatcaggcatccagaccgaagtcacctctgcctgctccagcttgggtcagctgggtctgaccagggggccagatccgagccgcacctgccggcccccagccccagctccagctcctgacctctcccagcctggcctggctgttcctccagggctgatggctgtcaacccatccttgtgagttcatatggactgctgcccctcgaaagggagagggtcggccccatgtccccagggagcattccatcagggacaacgtacatactgtgatgtaaactttttttttttccccccagggggcaaaagtgtgagatgccttaatctttccttcatttctgctgtctcgaacactctagcccattatttcctttcagttccttgcagcataacctctacgataagccccaagcgggttgttgtattatgacgtttatgatgttccaggtgaaggcattattaagtacctctctgggtgtggggtttggacgcaccaggatagctattgattaatgttaagggtgttctacccacagcaaagcacaccctcttaaaccaggcactgcctgggtcctggtcccgagagccctaccaggatcaggttcctgcaagccgtcagaatgtgggagcccccagcccaactgattgtaactgtcccctgttacctgtgacatgaacctccaacagcacctggaaacggttccctctgtcagctgctctgtagacagggctggggagatctcagagttcacacctcgcctgttgtaggggaggttgggggtagggtttggaatggccaagtgcccttggaacctcccacagctatggccgtcctgacctcatcccaggaactctacggtgaccaggaaccacccctctgacgaggtctgtagcggcccttctcagagtggaacagcccacagtgctagttgtgcctggtcttacctgtactccacggacctcggtgaagcaaaagcttcagggcagagggaatgaggcaacccagtggcagccccgctgggccccgtggctcctgctctcctattggacgtagaggcaggggagagacttctctatacaaatattctcatcacagaagggatgatccttgctgctctgccgtagggtttttgatgctgagctatgctgcacatgacgttaacctaaagaacttggactgagcttttaaaaaaggacagcaaacaattttataatccttaaagtgtaatagacggttacactagtgcagggtattggggaggctctttgggtgtggaggctgtcacttgtatttattgtgactctaaatctttgatagtaaaacaaatgtaaaaagaaatgtttgccaccagatgggaatagaagttccaataagcaggctggaatgggtggctatacgttgtatcacgaggaagttttagactctgaaggataataaatggatgatgtgtcaa

SEQ ID NO: 136679 - DNA, 570 bp, Homo sapiens
  Payload ID: 6762
  Gene Symbol: GATAD2A
  Gene Name: GATA zinc finger domain containing 2A
  ENST ID: ENST00000432704
  CDS Start-End: 153-570
agagtgcggatattctatgggttttcttcagtccctggacaggtggggtcatcctaggacccctgcaatctttaggggatttagggagaaacagtgtccaggaacatctgaggtctctgttcccgtgcattgcttggggattgaagttcagaatgaccgaagaagcatgccgaacacggagtcagaaacgagcgcttgaacgggacccaacagaggacgatgtggagagcaagaaaataaaaatggagagaggattgttggcttcagatttaaacactgacggagacatgagggtgacacctgagccgggagcaggtccaacccaaggattgctgagggcaacagaggccacggccatggccatgggcagaggcgaagggctggtgggcgatgggcccgtggacatgcgcacctcacacagtgacatgaagtccgagaggagacccccctcacctgacgtgattgtgctctccgacaacgagcagccctcgagcccgagagtgaatgggctgaccacggtggccttgaaggagactagcaccgaggccctcatgaaaagcagtcctgaag

SEQ ID NO: 136680 - DNA, 655 bp, Homo sapiens
  Payload ID: 6762
  Gene Symbol: GATAD2A
  Gene Name: GATA zinc finger domain containing 2A
  ENST ID: ENST00000417582
  CDS Start-End: 123-655
gcggccgccgcgggcgccacctgagggagtcgcctccgcgggacgccacaagacctgaccggactgcgccgcccgaggccgtcggccgccgtcagcgagggcgccgagcaacttcgttcagaatgaccgaagaagcatgccgaacacggagtcagaaacgagcgcttgaacgggacccaacagaggacgatgtggagagcaagaaaataaaaatggagagaggattgttggcttcagatttaaacactgacggagacatgagggtgacacctgagccgggagcaggtccaacccaaggattgctgagggcaacagaggccacggccatggccatgggcagaggcgaagggctggtgggcgatgggcccgtggacatgcgcacctcacacagtgacatgaagtccgagaggagacccccctcacctgacgtgattgtgctctccgacaacgagcagccctcgagcccgagagtgaatgggctgaccacggtggccttgaaggagactagcaccgaggccctcatgaaaagcagtcctgaagaacgagaaaggatgatcaagcagctgaaggaagaattgaggttagaagaagcaaaactcgtgttgttgaaaaagttgcggcagagtcaaatacaaaaggaagccaccgcccagaa

SEQ ID NO: 136681 - DNA, 729 bp, Homo sapiens
  Payload ID: 6762
  Gene Symbol: GATAD2A
  Gene Name: GATA zinc finger domain containing 2A
  ENST ID: ENST00000457895
  CDS Start-End: 233-729
ccgggctccatgtgtgcggccgaggggcgcattatctggccggcggcgcgggcgggcgggcggaccggcgcagcgagcgccgcgggcccgggcggccccacaggcggaacgagcgcgcgcggcccggcgtccccggcccctccgccgcccggccccgcgggcgaccccggaccagcagcccccgtaacctgcgcgctgccctagggcccggccgacccgcggcccgttcagaatgaccgaagaagcatgccgaacacggagtcagaaacgagcgcttgaacgggacccaacagaggacgatgtggagagcaagaaaataaaaatggagagaggattgttggcttcagatttaaacactgacggagacatgagggtgacacctgagccgggagcaggtccaacccaaggattgctgagggcaacagaggccacggccatggccatgggcagaggcgaagggctggtgggcgatgggcccgtggacatgcgcacctcacacagtgacatgaagtccgagaggagacccccctcacctgacgtgattgtgctctccgacaacgagcagccctcgagcccgagagtgaatgggctgaccacggtggccttgaaggagactagcaccgaggccctcatgaaaagcagtcctgaagaacgagaaaggatgatcaagcagctgaaggaagaattgaggttagaagaagcaaaactcgtgttgttgaaaaagttgcg

SEQ ID NO: 136682 - DNA, 565 bp, Homo sapiens
  Payload ID: 6762
  Gene Symbol: GATAD2A
  Gene Name: GATA zinc finger domain containing 2A
  ENST ID: ENST00000444839
  CDS Start-End: 286-565
atgtgtgtgctgcaggtacagggcagtggcacgttgatgggccaggcctcactctactcaaagtgtacctcactggcaaccaaagggttaaatgtgatccccagtccccactccccagaggtgagcagggagtgaggagacctcccttccctgaaggggagaagctggggttaactcgagtcaccacagcatagggctagtcccaggccccgaccctgctcctggaacagtgcagtcaccgccctcctggattccagacattgcaggtgctgaaaatcccaaagaatgaccgaagaagcatgccgaacacggagtcagaaacgagcgcttgaacgggacccaacagaggacgatgtggagagcaagaaaataaaaatggagagaggattgttggcttcagatttaaacactgacggagacatgagggtgacacctgagccgggagcaggtccaacccaaggattgctgagggcaacagaggccacggccatggccatgggcagaggcgaagggctggtgggcgatgggcccgtggacatgcgcacctcacacagtgacatgaagt
